United States Patent Application Publication US 2006/0134663 A1 - sequence listing, part 64

SEQ ID NO: 162922 - DNA, 2194 bp, Homo Sapiens
  misc_feature (2139)..(2147): n is a, c, g, or t
ggtacattctcttggaatactgcagtagaaggtcaatggctcatattttgaaagcaagaaaggtgttgacagagccagaagttcgatactacctcaggcagattgtgtctggactgaaataccttcatgaacaagaaatcttgcacagagatctcaaactagggaacttttttattaatgaagccatggaactaaaagttggggacttcggtctggcagccaggctagaacccttggaacacagaaggagaacgatatgtggtaccccaaattatctctctcctgaagtcctcaacaaacaaggacatggctgtgaatcagacatttgggccctgggctgtgtaatgtatacaatgttactagggaggcccccatttgaaactacaaatctcaaagaaacttataggtgcataagggaagcaaggtatacaatgccgtcctcattgctggctcctgccaagcacttaattgctagtatgttgtccaaaaacccagaggatcgtcccagtttggatgacatcattcgacatgacttttttttgcagggcttcactccggacagactgtcttctagctgttgtcatacagttccagatttccacttatcaagcccagctaagaatttctttaagaaagcagctgctgctctttttggtggcaaaaaagacaaagcaagatatattgacacacataatagagtgtctaaagaagatgaagacatctacaagcttaggcatgatttgaaaaagacttcaataactcagcaacccagcaaacacaggacagatgaggagctccagccaactaccaccacagttgccaggtctggaacacccgcagtagaaaacaagcagcagattggggatgctattcggatgatagtcagagggactcttggcagctgtagcagcagcagtgaatgccttgaagacagtaccatgggaagtgttgcagacacagtggcaagggttcttcggggatgtctggaaaacatgccggaagctgattgcattcccaaagagcagctgagcacatcatttcagtgggtcaccaaatgggttgattactctaacaaatatggctttgggtaccagctctcagaccacaccgtcggtgtccttttcaacaatggtgctcacatgagcctccttccagacaaaaaaacagttcactattacgcagagcttggccaatgctcagttttcccagcaacagatgctcctgagcaatttattagtcaagtgacggtgctgaaatacttttctcattacatggaggagaacctcatggatggtggagatctgcctagtgttactgatattcgaagacctcggctctacctccttcagtggctaaaatctgataaggccctaatgatgctctttaatgatggcacctttcaggtgaatttctaccatgatcatacaaaaatcatcatctgtagccaaaatgaagaataccttctcacctacatcaatgaggataggatatctacaactttcaggctgacaactctgctgatgtctggctgttcatcagaattaaaaaatcgaatggaatatgccctgaacatgctcttacaaagatgtaactgaaagacttttcgaatggaccctatgggactcctcttttccactgtgagatctacagggaagccaaaagaatgatctagagtatgttgaagaagatggacatgtggtggtacgaaaacaattcccctgtggcctgctggactgggtggaaccagaacaggctaaggcatacagttcttgactttggacaatccaagagtgaaccagaatgcagttttccttgagatacctgttttaaaaggtttttcagacaattttgcagaaaggtgcattgattcttaaattctctctgttgagagcatttcagccagaggactttggaactgtgaatatacttcctgaaggggagggagaagggaggaagctcccatgttgtttaaaggctgtaattggagcagcttttggctgcgtaactgtgaactatggccatatataattttttttcattaatttttgaagatacttgtggctggaaaagtgcattccttgttatataaactttttatctattacagcccaaagagcagtatttattatcaaaatgtcnnnnnnnnnatgttgaccattttaaaccgttggcaataaagagtatgaaaacgcag

SEQ ID NO: 162923 - DNA, 524 bp, Homo Sapiens
tcgtctagaggtcccctgtcacgcccagccactgaagaacaggcaaatcaaagcttccttcaaataagatggtcccatagtctgtatccaaataatgaatcttcgggtgtttccctttagctaagcacagatctaccttggtgatttggaccctggttgctttgtgtctagttttccagacccttcatctcttacttgatagacttactaataaaatgtgaagactagaccaattgtcatgcttgacacaactgctgtggctggttggtgctttgtttatggtagtagtttttctgtaacacagaatataggataagaaataagaataaagtaccttgactttgttcacagcatgtagggtgatgagcactcacaattgttgactaaaatgctgcttttaaaacataggaaagtagaatggttgagtgcaaatccatagcacaagataaattgagctagttaaggcaaatcaggtaaaatagtcatgattctatgtaatgtaaccagaaaacataaagtttcat

SEQ ID NO: 162924 - DNA, 1249 bp, Homo Sapiens
tcaacagcccccgcggaggtattcccccccgggtgggcggggcccgtgtccattccccccggttcgtgggaccccagccaatgttccctttcccggtggggtagccccaagcctccagggcccctggaaaccggtccaggggatttgaggggcgtaagcccaccctttgtatgggccaaaacccaagccctttccgcccctgcggacaaggggagaccaagctgcccccgctgaactcccaccaacctctgggtgggttcagcagccccctaggaagttaagtgagagctacagggcaggggggctccctgagggagtttgcacagaccaggaggggccaaggggtagccccaagggagcagaggaaggagaagggcaggaaaaggtccagggcacagggcaagcaacagtgccagagggtgcctggtcacaggaagcccagctgcatgttccatgctgcccacaggactcccagccaggccccagcaggcctggacagtgctgggcccccatcctcggccttcccagcacagcaggtgctggaagatgaccatgacccaagcgagaagagccgccatgaactgtggtcataccagccagggcgttctaggacaagacttcctaacccgacagcaatgacatccacagtgtatggactgggctcttgaggagcacgagggagaggccaggcagccctgtcaggggtcctgggacatattaaggcaaccagccacgccatctggccagcacaagggacttaagtgcaatctgctaagtgacagtgctaagactgtcttcctgctgagaacatctctacgagttagttcactagaaaaggcaataaacatttgctttaaccttctttaaccaggaaaatgcagtctaaatgccctcttctctaaaaaggaggcaaggacaaaaactcaagccaaggctactttgggtactttgaggggaaactgaccatttccaagagaaacccaggggctgccaagctgcggcattcaccctcctgcagaaagctttggcaatgggacttcttagactggacaaatcaaacaaagctgaccctgtagagctccttcttcttcccacttcttctaaggtcaaactgcaagcattttcaactttggaaccaaccaccaaagccacctcctgcccaggacttcctttagaagcagtgggactcctcacgcgcggcccagacaaaggcttgggcacctgcactgtctgcgtggctggagcgtga

SEQ ID NO: 162925 - DNA, 1103 bp, Homo Sapiens
tgcctgaatatgtcccaggacccctgacaggcctgcctggcctctccctcgtgctcctcaagagcccagtccatacactgtggatgtcattgctgtcgggttaggaagtcttgtcctagaacgccctggctggtatgaccacagttcatggcggctcttctcgcttgggtcatggtcatcttccagcacctgctgtgctgggaaggccgaggatgggggcccagcactgtccaggcctgctggggcctggctgggagtcctgtgggcagcatggaacatgcagctgggcttcctgtgaccaggcaccctctggcactgttgcttgccctgtgccctggaccttttcctgcccttctccttcctctactcccttggggctaccccttggcccctcctggtctgtgcaaactccctcagggagcccccctgccctgtagctctcgcttaacttcctaggggctgctgagcccacccagaggttgttggagttcagcggggcagcttgtctccccttgtcagcaggggcgtaagggctgggtttggccatacaaggttggctacgccctcaatccctgaccgttccaggcactgagctgggcacccacggaaggacatgctgtccagactgtgatgactgccagcacagggcatctcgggcttggctggtctgcgaggccttgcccctgtggaactctgggttcctgttttctcagtcttttttgcggctttgtctgtggttggcagctgccgtactccaggcttgtgtcggccactcagatgagggctgtggtgcgagccagtgcaggagagctgcgcttgggattgtgccctctcctggtgtctgtcctcccgacctacccaggtctccaccatcaggaccctgtctttgggtttagaagaccaagtatggggaaaaccaggcaccagcctctgcagcaatgggtccctctagcctgtggacaccagctgggggatccagggtcaggccccctcctctccccagtttccctctgctgtggtgtctgggctgtcatgtctccaccacttaagatgtctttacactactcaggaagttgctgtgagggggatcctcatagaaacag

SEQ ID NO: 162926 - DNA, 337 bp, Homo Sapiens
gttctgaggatcctcttacgctcagccaagcggggacgtcagaagattacatggatgccaggctggtgggctccgcccttctccaagccccccatccaccccctttgctcctcggtgctacaggcactgccgggttgaggggacaggcagggcaggactgtgggcatgcagagccttctggcagccagggagggctgcccgcccccctgcatctggcgaggcaggcagctgtgtgcgcagtgatggagctaggaggaggaaacatgcgcagacaccccgtgttcccgcttccccacgtggctggagcgtgatttgaagcactagcagccagctgagt

SEQ ID NO: 162927 - DNA, 982 bp, Homo Sapiens
tcgacccacgcgtccgcccacgcgtccgcccacgcgtccgctccaacaagaagaaattcgaggatgccttgagcctcatccacagcgcctggcagcggagcgacagtctctgccgcggccgagcctcccgagacccctggtgctgaggcagagctggttggcgtccctggtgggcaggacaaggaaggcacgccagccggcaggcacactgtcacggctgttgtcatgctgtcgggagcctacagtccacccctgccctgggcggcagaaccaccgagtgtggcttaagacagggtccctccactccagggatccagatcaggtgcccggcacccctgggcatcctgcccgacaggtagcgaatggaggtcgctgggggcagagggtccgagccctgtgggctctgcggatgcacgccctcctcccgggcctccgcctcagtctgcagaatttctgccgagtggcaccgagaacaccatccatctaaggacgaacaaaagaaccaggagggcgggaccccctcttcctctcctgggttgggggctggggccctgagtgcccagccatccttgttcgtgtttgaacactctcctggccacgtggggaagcgggaacacggggtgtctgcgcatgtttcctcctcctagctccatcactgcgcacacagctgcctgcctcgccagatgcaggggggcgggcagccctccctggctgccaggaggctctgcatgcccacagtcctgccctgcctgtcccctcaacccggcagtgcctgtagcaccgaggagcaaagggggtggatggggggcttggagaagggcggagcccaccagcctggcatccatgttgacatcttctgactgtcccctgcttggctggagccaggcccttccctagagtttcgtcaagagcctcctggggaaggggtcaggtggtttgggttttgttttttaaaataaaatagacatgttatattgccaaa

SEQ ID NO: 162928 - DNA, 995 bp, Homo Sapiens
cgggaggagggcgtgcatccgcagagcccacagggctcggaccctctgcccccagcgacctccattcgctacctgtcgggcaggatgcccaggggtgccgggcacctgatctggatccctggagtggagggaccctgtcttaagccacactcggtggttctgccgcccagggcaggggtggactgtaggctcccgacagcatgacaacagccgtgacagtgtgcctgccggctggcgtgccttcctttcctgcccaccagggacgccaaccagctctgcctcagcaccaggggtctcgggaggctcggccgctggcagatgactgtcgcttccgcttgccaggcgctgtggatgagggctcaaggcatcctcgaatttcttcttgttggaggcttcctggatcgccgtgtgggtggaggtccacctgatagatggttttccacccagagttcagtgcagacagcaatcggtccagttcagaagtgcagctcaggtagatgacccagggcgggaggagctgctggctgtcctgggagaactccaagacgcagtactccttgcccggctcggtggagacggcgctgatgtcgcccagcttggctgtgcccaaagagcggaagaagctggtctggcaatcctcatggcacgtaaagaggcggtcatccgtgaggaccaggcagcagggtatgcaggggctgggagctacgccctgggggatgacccctttggacacagcctggcagagatgctgcatccactcggccatctcggcctcgctctcggcacttagctccaggcagggccggtcggagagaatgacctggaaggcgtggggccgatccgtggtgttggctctccggcagccaccgcactgctccccccccatgttcaccgagagcagagggatgacgtcggtgcggtccgggtactggtagaggatcccgttgctgagcaccacgaagcacgtcttccagtgttccttgcccaggtaggag

SEQ ID NO: 162929 - DNA, 878 bp, Homo Sapiens
cgacccacgcgtccgcccacgcgtccgcccacgcgtccgctccaacaagaagaaattcgaggatgccttgagcctcatccacagcgcctggcagcggagcgacagtctctgccgcggccgagcctcccgagacccctggtgctgaggcagagctggttggcgtccctggtgggcaggaaaggaaggcacgccagccggcaggcacactgtcacggctgttgtcatgctgtcgggagcctacagtccacccctgccctgggcggcagaaccaccgagtgtggcttaagacagggtccctccactccagggatccagatcaggtgcccggcacccctgggcatcctgcccgacaggtagcgaatggaggtcgctgggggcagagggtccgagccctgtgggctctgcggatgcacgccctcctcccgggcctccgcctcagtctgcagaatttctgccgagtggcaccgagaacaccatccatctaaggacgaacaaaagaaccaggagggcgggacccccctcttcctctcctgggttgggggctggggccctgagtgcccagccatccttgttcgtgtttgaacactctcctggccacgtggggaaacgggaacacggggtgtctgcgcatgtttcctcctcctagctccatcactgcgcacacagctgcctgcctccccagatgccaggggggcgggccagccctccctggctggccaggagggctctgcatgcccaaagtcctgccctggcctgtcccctcaacccggcagtgcctgtagcaccgaaggagcaaagggggtggaatggggggcttggagaaagggcggagcccaacaggctgggattccatgttgaacattctacttgattgaccc

SEQ ID NO: 162930 - DNA, 742 bp, Homo Sapiens
tagctcagccaacatagctaggtcttctcttaaattgctgatcgacattagcagtagttaccttaataataaattattcattttaaaatcagtagtaacttgaggacaattcataaataagtgtgctctgtgcaatatacacgtttaatatcctgtggatactaaaagcttgtatatggtcagattcgcacattattactttatcaaaaacagtaagctttcccaaagatgaagctggggaaacttgaaaagatattctaaaggttctctggagagttatcaaagctctgcctgctttacaggaggaggttccaatttacgcgagagggcagttaaaatctggttgaatttctcatatctctctgtctgattgacttgtgcacctttgctgccccatagcaatcgcatttgaaattcagtcttgcagatttcattcatttcttcatctggttgaaaacctgccaggatcctctcagaattcatccggtagctgtctgcagcctcggccatgaatcgcgctgttgccaaatggttcagcatgatctcacagctctggtcgtaaacttacccacatgtcgggtccttcaagagtcccaggctggcgctccattaacgtcacaaagcgggatctggagtgggacttgatacatttgtttgggggaacacatgttgtgactctctgacttcatggaggagtttgttgaagggttcaggtgtttctcatagagaatggcagtttggg

SEQ ID NO: 162931 - DNA, 794 bp, Homo Sapiens
atttagtgggttccttgctcctggctgtgcagttcacaggccccacaggccttggccccagcatccccagcagggacagtggaagtgtcagagcagtaaatgccaccacttccctctcagcctctccctgtccccgccagccacctgcctcacccacggctctaaccaagcccaccgagcaactgacgctgccagtctaacaacggggacaaagcaaagagaaagggataacagacaccctcccatttccttctccaaatgtctgtggatgaggggaaggcagattagatgaggaaatataatatttaagatgaaaaagtagcaatcaggttcaggtacaatgctacctgaatgagtcgaaaagcagagtaatttatatttgatcttaaacctcagggaactggactgattagcatactaaacaattgtaactatggactgagaaaaagacatcaatcatcgtacagcgacattccaggaggctgggttagtatgatcacatgctttcacacaaatgtggatcgcatatgtaaataaatacctatcaggtccctttaaaattaacacattctaaataatagaactattttggtgtagtgactcattctgcagatagagttcagaatacatatttcctataaacatcttgtatttacagagaacaaaataataagttataacaaagtatatccttctgtcactgagtcgtggggaaggggtcaggcgggggtattagtttgtatagcaggtgcttccctctcgtcagagaaaggactgagaaagttgtcagagcg

SEQ ID NO: 162932 - DNA, 651 bp, Homo Sapiens
gggtggaactgagaaagaagttgggctgtaaatcatttaaatggtatttggataatgtatacccagagatgcagatatctgggtcccacgccaaaccccaacaacccatttttgtcaatagagggccaaaacgacccaaagtccttcaacgtggaaggctctatcacctccagaccaacaaatgcctggtggcccagggccgcccaagtcagaagggaggtctcgtggtgcttaaggcctgtgactacagtgacccaaatcagatctggatctataatgaagagcatgaattggttttaaatagtctcctttgtctagatatgtcagagactcgctcatcagacccgccacggctcatgaaatgccacgggtcaggaggatcccagcagtggacctttgggaaaaacaatcggctataccaggtgtcggttggacagtgcctgagagcagtggatcccctgggtcagaagggctctgtcgccatggcgatctgcgatggctcctcttcacagcagtggcatttggaaggttaaggtggatgctgtggcgggaacgttgcttcatcaggcgttgcctccggtgtggagtttggggctttaggaaagcctggcttggctcgagcgccgcagtggtaccctcaagaatcagcta

SEQ ID NO: 162933 - DNA, 607 bp, Homo Sapiens
gagctggctagaggatcccttcacgctcagccacatctgccgtctgccctgactcctgcaggtgcccagtccggggaacaaccaacaggtcacataagcaacaagaacttccaagaggaaatggatataaaaccaaggaaagtggtagccccattgttgataatctagatacaaaataatgaaaagctagtacaaaactctttaaacatgcaactctttttaaacaacaatccatactctgaatatgtatcagagcaggttaaagactacactgctacatacccgcagtctgttccctggaaatggcgtgagggtggaggctggcacatgatgtgagagacatggcttctgccagagaagccccggacagctgcgagcgctggctgagaacgtcgctgggggccagtctttccggggtcacagccagcatgctgatgtcatggctgataacatcaccctcaatcacccaccaaaaggaacccatacggtaaaaagcggaggggggagggggaataatggagaaggagatggaaatcacttatatgatttttgtgacatggttgaaacacatcctttgaggagggggaagttgtatgagcgtgatcgg

SEQ ID NO: 162934 - DNA, 337 bp, Homo Sapiens
agctccgttgtacataaatgccttgtggcagagctcccggtgaacttctggatcccgtttctgatgcagattcttgtcttgttctccacttgtgctgttagaactcactggcccagtggtgttctcactcctaccccacccaccccctgcctgtccccaaattgaagatccttccttgcctgtggcttcgatgcggggcgggtaaagggtattttaacttaggggtagttcctgctgtgagtggttacagctgatcctcgggaagaacaaagctaaagctgccttttgtctgttattttatttttttgaagtttaaataaagtttactaaattttga

SEQ ID NO: 162935 - DNA, 476 bp, Homo Sapiens
acataactcaccgggctgccgagcagttcgggctaatgacattaactaccaagaccagatccccagaactcttgaagagtatgttggatttcattaagtgactggatatgtaaagtcgtttaatgtggtgctaaaaagtaaaggacttttaatcacagacagtagaattatgtgttcataaattctgcttttctttccactacccttcctcccatcccatccttccttagttctgtattggtttttcttgcctcatggtaattgatttcagacagactttaacaaaaccacattgtttgggtgtaactataaggtatttgcatatgggttacctattggtctttcttttttttaaaggaacagatataaaatgttttgtttatgtaacaagggacatttataatttcaagttgataatgttttaaacagctgcttacaaaagtatttctgttaagcctatgtcagcatgttatcca

SEQ ID NO: 162936 - DNA, 613 bp, Homo Sapiens
ctgtccgctccagccaacaaactcctcatgataactgcacacaatctgaaaaccactgaaggacaagccaaccacagcagccaagcccactccttgcagcatgggtactggtggcacaccagacagtgacactgccccacaaaggcctgggcccgtgggggctgctgcctggcatgacatctctccagatttctggcttaaaaccaactttccatccgagaagcctcctcagtagttactctgctcatgagacagatctgggctccaagccaggaaaggtgaacagaaaccacaagtgtccagccctcggtgctggagtggacgttaattgtcagccaccagactgtcccggcacctacagagaatgtttcacagttctggcatttaaatcctttgatagtggattgtgctgctgttagccttagtttcagtgctttacaagtctcgcttattatctcactggtatttaggtatacaaaacagttgattattcaccacgccaatatctgggtctctgtatctcatgtagaacataagaaaatgggaactaatagggaactttatttatagcatgaaaataaacctggcggctggagcgtaacggggatcctct

SEQ ID NO: 162937 - DNA, 733 bp, Homo Sapiens
taccttaatgctcagccaacaaactcctcatgataactgcacacaatctgaaaaccactgaaggacaatgccaaccacagcagctgcgtatgcagcgtgttgaaggcgaagctgcagatccattccagagcgggagttcaaggcgctgaccaggcgcctgcaggtggggccccggttcctgagcaagcagatggccgggtgcctggaggactgcacgcgcaaggaccccgagagaccctggtgaggagcagctggcccggctgctgcaggaggcccctgggaagctgagcctcgatgtggagacaagccccgtcggggcagcactcgcaggcccagctctcaggtcagcagcagaggctcctggccttcttcatgtgctgcctgctcactgaccagctgcccctcgcccaccacctgctggtcgtccaaccacggccagcggaagaagcggaagctgctcacgctggacatgtacaacaccgtgatgcttgtctgggcgcgacagggtgccttcaaggagctggtatatgtgttattcatggtgaagtatgccggcttgactccggacctgctgtcctatgcggctgccctccagtgcatggggagccaggaccagtacgccgggaccatcgaaaggggtctggaacagatgagccaggaggcggctgaaccatgcagacactcatcaccagcccatgtctactagtttgtggacgatacggcgtgtgtccct

SEQ ID NO: 162938 - DNA, 839 bp, Homo Sapiens
ggggcggggcgcgggccgcagcttttcggttcacagcgggcagggaaagccgcgggaagggtactccaggcgagaggcggacgcgagtcgtcgtggcaggaaaagtgactagctccccttcgttgtcagccagggacgagaacacagccacgctcccacccggctgccaacgatccctcggcggcgatgtcggccgccggtgcccgaggcctgcgggccacctaccaccggctcctcgataaagtggagctgatgctgcccgagaaattgaggccgttgtacaaccatccagcaggtcccagaacagttttcttctgggctccaattatgaaatgggggttggtgtgtgctggattggctgatatggccagacctgcagaaaaacttagcacagctcaatctgctgttttgatggctacagggtttatttggtcaagatactcacttgtaattattccaaaaaattggagtctgtttgctgttaatttctttgtgggggcagcaggagcctctcagctttttcgtatttggagatataaccaagaactaaaagctaaagcacacaaataaaagagttcctgatcacctgaacaatctagatgtggacaaaaccattgggacctagtttattatttggttattgataaagcaaagctaactgtgtgtttagaaggcactgtaactggtagctagttcttgattcaatagaaaaatgcagcaaacttttaataacagtctctctacatgacttaaggaacttatctatggatattagtaacatttttctaccatttgtccgtaataaaccataactgctcgtaatatagcaaacaacaaaa

SEQ ID NO: 162939 - DNA, 683 bp, Homo Sapiens
gcagtcatcctctctgagaccagggctgtcacttttctgccaagggtactgggtccccctcagcaccctccacagcacagtccttccaagtggatgtcccgtgccgttattcccccagcccacaaaggcaccctggccttggtctgctgaagtgttaggaagaggttgggtccctccagacctggggactgagtggggaaaggagttacacccgtgagtggggaatgaggctggtcctgcagcctctccctccgctcagggcttgaaggtcggtgtcggagggggtggctctcacagggcccaactctaaagtggaagaaccttgttagaccgagagcttgccatccagccaagctgctcgaggccacatgcaagtggccttggcaatgtctgtgccacctcctgagccctcccagcatgtcctcacatactcatgcccacccgctcctccacaagcctagtccatcctgcctgagctccagcccccagccaccactgtgcccagacatgtgtgctcagggtggctttctccctaggaccttctgtgtatatagttagttttataaccctgaatgcccccacccttcccctaagcacacaggggttaaagctgtgtgtccctcccagtggctgtggcagtgacagtgacacccacacccacagtaaagaggagactgaatgag

SEQ ID NO: 162940 - DNA, 967 bp, Homo Sapiens
ggtgatctagaggatcccattcactcaacctgctgcttcaagcaaattttcattatctttgttgtaaaatactttaaaaatcactcagacattaacaagaacacaaaaacaactcttctctaatcctgacctgtccttaaactaatctaattacggctgactcgtaactgacaaaaacattcaaatttctctaacacactcaaacaacagaaaacccagcatattttaggtggcagttagccgttacaagaagttttattaacatattctctaataatcacaaacctatacagctatgttcagtattttcaaggagagtgacttcttacaaaacgtttatagccaatcatgggattttgctagaaaacgatggcatatgcaatgacagatttgacagtttaatcagaaaaatggaatgatagaaatgaagcagactccccacctactgtgctaactgggtatgcaacagtttaatgaaataccataagccttagttggagactgtgatggaacagcgtagaggccatccgtttccaggccattctgagatccaagatgccaactccttgtttctatgaaacttcacgagatgtgccagtcagaaatggcatgctgaacattctgcagagctgcagcactggcctgggcagccagggctaccacactggtgacagtgctgctggtacctgtgatggctcttctggtatccatatcttatacacaacacctatccgtaggaagaacttccgcagaactgctcggagctcagggatcaggtcaaactgcataatttcacacaagtaggggtagtacattgaagcatgtgctttgaacttttcatcatttattttgagggttttagttagaagtaacacaagagacttgtccaggcctcccgatggctctcagaattcacagtgatgaaattaggcaagagcttcactgcaaacagttaaaagtctctgct

SEQ ID NO: 162941 - DNA, 404 bp, Homo Sapiens
cgttgtaagctccagccacccaccatatctgctcagtgggcttcaagcggtcgcaagtctgtcttgtgcactggagtgggtgtctggccctgatgtccacatgagcactccccgcaggggctcagcccctcacaccagcgccagagcctgctcggtggggcagaagcagggcaacatggtgcccacagcgtccacgatggctgccaggtgctcgtcctgcgcctgaggcccacagagctgcatgaagtctgccagacgcagcaagtattcaaggttgtggccggagaagccccggcaggccaggatctgcgtggcaatggcctcttcaggcgcagggcccaggtaaccagggttctgtggggtggccacataggccaatgccttcagtggttggctcgagcgtt

SEQ ID NO: 162942 - DNA, 364 bp, Homo Sapiens
atgctgggaatagattgtgtagggtgagaggacacatgcaggaagatcaggtaaaaggccatcatagaaattcaggaaataaatagaggggcacagatcagatttacggagacggaagatgaaaaatgtggtcaggttgggaaacaagtaataacttgtttaaatgctgatgagaatgatccagtaggaaaaggggagaaaatggtgttaaggagagataaggaaattgctggaaaatgttctttgctaagtaaaagctgctggaatgtagtgcacgtgggaagaaactgactttagatagtagttcagatagttcacccggggcaacaagatgggcgcaggttgagtgaatgtttggctggag

SEQ ID NO: 162943 - DNA, 1408 bp, Homo Sapiens
  misc_feature (979)..(989): n is a, c, g, or t
cgcgtttgtagaggggtgggtgcgcacgctctgtccctgcgtgaccttccgaccccgctgtcctcaccgcaatggcggctgtgagggccctggtggcctcgaggctcgctgcggcatctgcattcacgtccctgtcccccggcggtcggacgccttcccagcgcgcagcccttcacctctccgtgccgcgccccgcggccagggtcgcgctggtgctgtctggatgcggagtctacgatgggaccgagatccacgaggcctcggcgatcctggtgcacctgagccgtggaggggctgaagtccagatctttgctcctgacgtccctcagatgcacgtgattgaccacaccaaggggcagccgtccgaaggcgagagcaggaatgttttgaccgagtctgcgaggatcgcccgtggcaaaatcacagacctggccaacctcagtgcagccaaccatgatgctgccatctttccaggaggctttggagcggctaaaaacctgagcacgtttgccgtggacgggaaagattgcaaggtgaataaagaagtggagcgtgtcctgaaggagttccaccaggccgggaagcccatcggcttgtgctgcattgcacctgtcctcgcggccaaggtgctcagaggcgtcgaggtgactgtgggccacgagcaggaggaaggtggcaagtggccttatgccgggaccgcagaggccatcaaggccctgggtgccaagcactgcgtgaaggaagtggtcgaagctcacgtggaccagaaaaacaaggtggtcacgaccccagccttcatgtgcgagacggcactccactacatccatgatgggatcggagccatggtgaggaaggtgctggaactcactggaaagtgacgcgcatggacggggcccagctaggcgccaggacttggcctcaccctctggctgaggagctgtcggctgctttccatccagctgggagtctggcaggcccnnnnnnnnnnnctttgccgaaacctgcaggcgttctctctctaaggaggatgtgctgcagtgcatgggggatgtttcttcctgggtgtggctgggctgctctcacatacagaggccgaggggccaattcgttctctgccacagggacttgcctcactgtgtcccaaaaacaaatcgcagccagcttttccagaaatagaaaattctgccgtctgaggttttatacttcaggttagttagtttttggaaggaagaacatttttaggtttgcaagcctcctgatcaggaaaccagaaataccacatttatggaccatgaaaggttggttcttgactctgaagggacttttgagttaatcagcgtaagggggatttctaaagcaggcaattccctgtagccggcaaagaataaacggccttcccaaaaaggga

SEQ ID NO: 162944 - DNA, 458 bp, Homo Sapiens
caggctggtaccggtccggaatttcgggatatcgtcgacccacgcgttcgaagaacatttttaggtttgcaagcctcctgatcaggaaaccagaaataccacatttatggaccatgaaaggttggttcttgactctgaagggacttttgagttaatcagcgtaaggggatttctaaagcaggcaatccctgtagccgcagagaataaacgccttcccaaaatggcaacttcccacagccacatttcagacctgctgagactgctgagtgaggaatggcagtgaggtttcttcaattagtctcagttctcttaattttcaggaagaaagggaaattgcagctcctcagcccccaggattgacctctggggagtgatggtagcgttggtgccaggccgtgggttcaggtgtggcagaagcttgcagatgcgtccgaagggaaataaagtgtgttggcgtt

SEQ ID NO: 162945 - DNA, 2103 bp, Homo Sapiens
  misc_feature (57)..(60): n is a, c, g, or t
  misc_feature (65)..(65): n is a, c, g, or t
  misc_feature (68)..(71): n is a, c, g, or t
  misc_feature (79)..(92): n is a, c, g, or t
  misc_feature (100)..(100): n is a, c, g, or t
  misc_feature (102)..(103): n is a, c, g, or t
  misc_feature (105)..(108): n is a, c, g, or t
  misc_feature (110)..(139): n is a, c, g, or t
  misc_feature (141)..(145): n is a, c, g, or t
  misc_feature (147)..(179): n is a, c, g, or t
  misc_feature (181)..(201): n is a, c, g, or t
  misc_feature (203)..(211): n is a, c, g, or t
  misc_feature (213)..(213): n is a, c, g, or t
  misc_feature (215)..(222): n is a, c, g, or t
  misc_feature (1622)..(1630): n is a, c, g, or t
  misc_feature (1734)..(1734): n is a, c, g, or t
  misc_feature (1879)..(1879): n is a, c, g, or t
ctctttggggggcgggcccccccgacaaaaaaggttttttaaaattttttggtgggnnnnggggnggnnnnaaattttnnnnnnnnnnnnnntttttttntnnannnntnnnnnnnnnnnnnnnnnnnnnnnnnnnnnntnnnnntnnnnnnnnnnnnnnnnnnnnnnnnnnnnnnnnntnnnnnnnnnnnnnnnnnnnnntnnnnnnnnntntnnnnnnnnttggtacccatatgcttatgtttattgtacagtcacaagttacatgttgtaaatcaagcagaacactgtaccagttttcactaactcaaatcaagttagcaaattacaaattttagaacagattcattttctgtctcacccaatgtgggtgaccacaaagatatttactttctatgttattaggtagcaaattaatttgatatactacacagcttccaagttaccttaggatatttcaaagtgtttcaaaactggtaaagaataattcatttccagcctgaaatacaatgcagaatggaccatttaggggtaaataacctcacttaatcactctttcctgctaacaaaaataatacaaatatttgtttatattaggcttactaaattaatgacaactttgaaattatctagatttggttacattgttatattgcacttgagaacaatgacaaaaaacatcaaagattcagtacctctcccaagaagttcattatatatcagaaattaaaatgaaatataagcatatattgcatgctgcatatttctatcgttcaaaccagccaaccaacaaactaaaaggaatactctccaaaacactgagtattaagtaatttcatctgccttttttgatcctacaatcatttttcaaattttaggtgtttttctttaaattattcatcaaactactacatatacaagctatccaagaatgcaaacaaggtgacattgagatgggtagtggctgcacataggtattccaagaacgactcattcttctccaccaagctcatcattacattttgcaacttaggaagatctgccaacttacaaattctgtttgccttacaaaaatcgctgatctattatatacaatacttttatcacacaaatctctcccttagggtcatgattcactatcaaaaatctttcacagccctcttaagccagtaaagtctcttttattaatacttgagttttctttatggaaatgtaagtgttaatgagaattaactatgaataagtagtttcataacacaggtagaatgatggcaataatattttgactaattgttttacctttcagattcagaattacagtgataatcgttaagagaaaagagaaacagaaaaaatgactcacatgtatttttctcaaaatatcaattctgaaataaatacctatataaaaatcaatatcagtatcaatatttcttaccaatgtcaaatgtttttaatatcttctagttcattcatgttttcttaaaactgaatcagatcataaaaattttacatttcaaaatggatttttattctccataaatcacaaatatggtagtatttcaaatgttttagagatttaaagttttcatagggcaattttttgatatttaatcatgatnnnnnnnnntcccaccattttcttcagaaagtaggctttcaaattactcttctccatatttttgtagatatataaatgttcattttttgaaggaaaatctatgctattatacnaaactatatttcataaaggtaatttaagatatcatgttaatttctaaattacagcatctttcaatctccaatacaagattactttcaagatagatgccataaaaggaatagatggcacaaaagcaaattctaacacttttgccanagagtgactttctatccaacatattttcagaaatgactgttactaggtggtaaaactgttagggtaaaatttgttatagactaacttactgattggtggcaggcagcacttggccctaggataaaaatatttttcttaaaaaattttaaatttattggtaataaaaatacttactgcatatgattaagctctttcaagctactaataaaaatctatactccaag

SEQ ID NO: 162946 - DNA, 695 bp, Homo Sapiens
aaacacaggaatcatttattaattcctgagaaccattatgaatcatataatagtttaaaagagattcaggattaccactttcaaatatatccactgacgcttccaaagtagtttaatgaatgaataaacctatttgtttgtatataaatggtatacttggaagagctcaaaacttttgtattacttatatgtgcacatacattagacacttccctatcatcatttttactcccttttttcttagcaagccctttctttccaaggaaacttcagtcagactccctctggctgcccacaaatcctcaatcactgttggtccatgaaggtttactgcgttcatttaggtgctcactcctccctgaggctcattccctcctaaaacttctgagcaccccggaattactggccccatgtctctctctctcctttaccaagacagctgctgaggctgctgctatgcaggtctacctgcccctctctggcctctgtcttgctttaacacataatgtgcataccccaggtagtcagtatctggccccctcccatctctttgccaagcagagaagctatgaagaaagacaatcaacaaaatggtcctgtactctaggagctaaagcctcattgagatgataacctcaactcaagacataagggccatgctatgtaataaacaggagccagcaggttgagtgaat

SEQ ID NO: 162947 - DNA, 411 bp, Homo Sapiens
cacacacctgaagtctgagaatgacaagctgaagattgccttgacgcagagcgcagccaacgtgaagaagtgggagatcgagctgcagacccttcgggagagcaatgcacggctgaccacagcactgcaggagtcgacagccagtgaggagcagtggaaggaggcagttcgccatatgccgtgatgagaatgaccggcgccgcaacaagattgatgaactggaagaacaatacagtgagatcgaacagaaagaaggagaagaacacgcagctgaagaggaggatcgaggtagtctggaggcagaacgctccgagaaaaggagacagagtctgaaagatctctctgaaaacaaagtgaaatcatacctcagctcatgtctagagtgcgaatatgtatctgagaagctagagg

SEQ ID NO: 162948 - DNA, 468 bp, Homo Sapiens
ccaaaagcatatttgttcttcagagacacggatgagctgggacagaaaataggggaagacaacaggccaaggcatctctgtgttacttttcctgaagtcagaatcagttgaggcacacactggggcctgcagctatcgagtgagccgcgtggaggaacatgttgtgtctgccgtttttgaatacccagggtgggagcttggccatctgcatccccacttcccatagcccaggcagagggacagagaaatggagtggggagcacagagcaggctccaacaagacaaattccctgctgccaaaccaccatgatccactctgactttggtcacaaactctgctaaaaacaattctctacgttcactgttcccaagggtcattctaaacagtgggtggccaccaccccttaggaagcaagagaaaaagaaaaaaggcaaataagatgcagaaggcagtgaggttgagtgaat

SEQ ID NO: 162949 - DNA, 889 bp, Homo Sapiens
cgtacatgaattactatttgcttttggtgatgttgctgttgctgttctagatgtaggtgttcctgtaccatacagcttgagatcagagccaagcactgttgctgttgataatctgaaggtatgaagggagacttacttaaagaatcttggacatacgtcaggatttcatccgttaagtcaatgtctctgaagtcaacctcaccagaaaaatcatttctgaaaaatttttcattctgcatgtgtctgatgtcttcaaaatcaatgcctaggtttttcattatgctgtacaagtcactgtttttactatcttgaaagagccctgggtgacctccagcaaatgagttcacatcctgaggctggtcaatttgctcatgtttcaggatagtatcatttcccatcggtgcagtattatcttgccaatttctgcattcattcatagattcgttgaaaaagttgttttcaaaaggtgcagtacttgaagtacttgaagcaggatagagataaatagactcatcttgttgcatcatggcagccaggagggaactaggattgagagagtccttgcttagagtggatgtggtagcagagtcttttccactagtgccatttttagtccttagtggtaagggatccattatggcaggaaaagggttggttgcctcatacaacacagcttctccagtggtaaacataaaaggcaacttcgtatttcgttttcgtaaatgctctgttccttcctcatctgttagtggtctctgagttacaatgatataatctgggcttccatttttataaagcaggcgtgcattagactggacccaagtccatcggttgttttttgtaagaagccggaaaactatcatgccactttctccagtctttatcattc

SEQ ID NO: 162950 - DNA, 1302 bp, Homo Sapiens
aggatccacttcggccaaggagggctgcaggcccgagacaggacctttcttctcaaagccctgccgctgggcagcacaggaggcccgggccgccaggatgtacaggaagacactcatcgagacggcaaaggccaccgggccagcaaaactccagatgagcgtgtcatagatggagagccagcagaagtcagggttcccgtagcccccggggtccaggcccacggctagccctgtgatgaaggcaggcacgccccagcccagcatgtagtagaagcgcatggggccggtgttgacatcgcgcacctcagtgagtgcccggtacaggtgcaaggcctccagcagagcccaggaaaaggtgcagaggtacaggaagtgcagcaggatggcaatgactgtgcaggcaaaagggaggtcagcctggttgattcccaggaggaagaccagctgagccaggcccagggcagctgtcaggttacgacggaggccctgcgggttggagcaaaggatacgcaaggaagcctgagcaagaaagaacgtgagcagaagggcagccaaggggacacacagaagaggaaaccctgggccaggtgctgcactaggcaccttattagagttcacggtgcaggagcaggggttgccagtgggggctggggaggcggcctgaaaaggtgcagaggtacaggaagtgcagcaggatggcaatgactgtgcaggcaaaagggaggtcagcctggttgtttcccaggaggaagaccagctgagccaggcccagggcagctgtcaggttacgtcggatgccgtgttggttggagcgcaggatacgcaagagagtgaggaagaagaaggtgagcagaagggcagccaaggtgacacctagagccacgtatgtcagtgtcttcagtggcaggatctccccattctcccgccgagaaacgtccatgagcacagcgaagctcgtcatgtggttgcactggcagctgacgtggctctcattgcggaagacgacttcacagcctctggccgaccagctacctgtgccactgaccaggattgaatggttccagaagacacagatgggcttggtccgctcctctgtctccagcaggcggaactgcaccgtgacgggtttgtccagggcccggggcagaagctcctcatcatcatggacgctgatgctcaccacgggtgtgttgatgatcgggcatttggggactctcaagctgcgcttgtcagggtcatagttatgaggcagtagcccggccagggtgcggtagatgatgacgctggcctacaggacatgcg

SEQ ID NO: 162951 - DNA, 1344 bp, Homo Sapiens
  misc_feature (108)..(108): n is a, c, g, or t
gggaaccacataattaaagaccagctggcctctaagtatctgtaccatggacagaccctggaaactctgggcggcaaaaaactgagagtttttgtttatcgtaatagncctttgcattgagaacagctgcatcgcggcccacgacaagagggggaggtacgggaccctgttcacgatggaccgggtgctgacccccccaatggggactgtcatggatgtcctgaagggagacaatcgctttagcatgctggtagctgccatccagtctgcaggactgacggagaccctcaaccgggaaggagtctacacagtcttcgctcccacaaatgaagccttccgagccctgccaccaagagaacggagcagactcttgggagatgccaaggaacttgccaacatcctgaaataccacattggtgatgaaatcctggttagcggaggcatcggggccctggtgcggctaaagtctctccaaggtgacaagctggaagtcagcttgaaaaacaatgtggtgagtgtcaacaaggagcctgttgccgagcctgacatcatggccacaaatggcgtggtccatgtcatcaccaatgttctgcagcctccagccaacagacctcaggaaagaggggatgaacttgcagactctgcgcttgagatcttcaaacaagcatcagcgttttccagggcttcccagaggtctgtgcgactagcccctgtctatcaaaagttattagagaggatgaagcattagcttgaagcactacaggaggaatgcaccacggcagctctccgccaatttctctcagatttccacagagactgtttgaatgttttcaaaaccaagtatcacactttaatgtacatgggccgcaccataatgagatgtgagccttgtgcatgtgggggaggagggagagagatgtactttttaaatcatgttccccctaaacatggctgttaacccactgcatgcagaaacttggatgtcactgcctgacattcacttccagagaggacctatcccaaatgtggaattgactgcctatgccaagtccctggaaaaggagcttcagtattgtggggctcataaaacatgaatcaagcaatccagcctcatgggaagtcctggcacagtttttgtaaagcccttgcacagctggagaaatggcatcattataagctatgagttgaaatgttctgtcaaatgtgtctcacatctacacgtggcttggaggcttttatggggccctgtccaggtagaaaagaaatggtatgtagagcttagatgtccctattgtgacagagccatggtgtgtttgtaataataaaaccaaagaaacataacac

SEQ ID NO: 162952 - DNA, 745 bp, Homo Sapiens
ggggtctgtcctcacatgtgcactggtaacagactcacacagctgatgaatgcttttctctccttatgtgtggaaggaggggagcacttagacatttgctaactcccagaattggatcatctcctaagatgtacttactttttaaagtccaaatatgtttatatttaaatatacgtgagcatgttcatcatgttgtatgatttatactaagcattaatgtggctctatgtagcaaatcagttattcatgtaggtaaagtaaatctagaattatttataagaattactcattgaactaattctactatttaggaatttgtaagagtctaacataggcttagctacagtgaagttttgcattgcttttgaagacaagaaaagtgctagaataaataagattacagagaaaattttttgttaaaaccaagtgatttccagctgatgtatctaatattttttaaaacaaacattatagaggtgtaatttatttacaataaaatgttcctactttaaatatacaattcagtgagttttgataaattgatatacccatgtaaccaacactccagtcaagcttcagaatatttccatcaccccagaaggttctcttgtatacctgctcagtcagttcctttcactcccaattgttggcagccattgataaggaattctatcactatagggttagtttttcttttggttccaagaacatcaatggaaagcgggcggtcatggtaactggggta

SEQ ID NO: 162953 - DNA, 821 bp, Homo Sapiens
gactctacaggatcttatcataaggcaagctctggctttctgtgtacgggcactgagtaccaagtgggtcccacctgcaccactgtctatccagctagcgggagcagcatcgactgggcgtatgacaacggcatcaaatttgcattcacatttgagttgagagataccgggacctatggcttcctcctgccagctaaccagatcatccccactgcagaggagacgtggctggggctgaagaccatcatggagcatgtgcgggacaacctctactaggcgatggctctgctctgtctacatttatttgtacccacacgtgcacgcactgaggccattgttaaaggagctctttcctacctgtgtgagtcagagccctctgggtttgtggagcacacaggcctgcccctctccagccagctccctggagtcgtgtgtcctggcggtgtccctgcaagaactggttctgccagcctgctcaattttggtcctgctgtttttgatgagccttttgtctgtttctccttccaccctgctggctgggcggctgcactcagcatcaccccttcctgggtggcatgtctctctctaactcatttttagaaccaaagaacatctgagatgattctctaacctcatccacatctagccaagccagtgaccttgctctggtggcactgtgggagacaccacttgtctttaggtgggtctcaaagatgatgtagaatttcctttaatttctcgcagtcttcctggaaaatattttcctttgagcagccaatcttgtagggctatcactgaagggctctacctccctcctctcg

SEQ ID NO: 162954 - DNA, 613 bp, Homo Sapiens
catcctggtctctaggaaagcctcatgtgaggttcctctttctttcagctcagtgcccatgggcaaggatcatgaattccaatccgtgttacaaagacaaaaagtaatgagcataaccttctcagtctcctgctctcaaaattaggacagagccgctaaggacaaaacaatccctcccgtgctttatgatggcaacaaggggctggggagcctctgagggactctttcattctgcagttgtctggaagcctgggtggcgtcatgagctgaaggatcatgctttcctgtcctggctccataggttataggctggctggtgaaaggttcacgtggcccaggctgaacttcattgcctagctttggatgtgctttctgccataaagactgatttttgttcgttctgagccttcaaggaatttgttttttacaactggaatatgctcctgtgtgtgttaacagatcatggatgttttatgttttcactgatcatttaaagagtttgacctcagagctccaggatcatcagtaaatttggcatggtatatatttatttttttataaatcaagacttctgtgtgctcttaaatatattaaaaacaatttacatttcagg

SEQ ID NO: 162955 - DNA, 509 bp, Homo Sapiens
gttaagaatgtaaatgtcatctgtattagataaataactagtagctgttcatctggttcaggttctcatgaatcattcttctattctgctgtcaaaaatatttatgcctgaaggataattttaaaagtggcaagaggcttagaaaagcctaagcattgttgtaggtacaaggcatttcaggtcttctggcgtaattcaacaccttaatacactgctttctgccttttctagtgaaacagcttttatgattttgtacctaaaaagtgcaattttattttcaatccttctttacacatgcagcatggttggggtctgatcggaatcttatgtgcccacctaatccttttcccaaggtgagcactatgacaacgaacttctgtgcaagaggcaggcagccaggaaccagaatgggccttgaacatgtgggagcttatttcactgtcacagttgaaactccctgaattgactccatgacagctgcaaatcggctacataggtcataggggggg

SEQ ID NO: 162956 - DNA, 704 bp, Homo Sapiens
  misc_feature (285)..(306): n is a, c, g, or t
  misc_feature (500)..(500): n is a, c, g, or t
  misc_feature (555)..(582): n is a, c, g, or t
  misc_feature (685)..(685): n is a, c, g, or t
tagccaaaatagttatttattaataatttaaggttttacattcttataataaattccagctctaaactttacaccacgaacataatggagaatttaactctcccttcttcaaaatcaaatgcatttctcttatcaaatgggtacccatgctcacacacacacacttccagtgttatacaaatttttgttaaaggaaagaaaccaacccaaagtattgcatttgaggtgacactcccgtgaagaattttatacagaggtaatatactgtttagcacagctgaaggnnnnnnnnnnnnnnnnnnnnnnaaagtgagcccatgatttggtgtctttcccagattatcccctttgcgacaacacaagcaaaaatatttacaaaggtaaggcatagtcaaactacataaagagaaaaaatcatgaggaaaatacatgaaaaagactaaagacttcgccataacaaggtcttagtgataatagtgtccgtaaagatgtcatcaganttggtaaagtcaagcatgctgcaaatataccctttggattagaaaagagcacaannnnnnnnnnnnnnnnnnnnnnnnnnnnaaggaagtgggcatactgctctttctccctttgggataatttcttttaaggcccattcaaaggggtaaaacaaacacaattcaaacaaacattgttcaagtgntttcaggttcaattttttt

SEQ ID NO: 162957 - DNA, 811 bp, Homo Sapiens
  misc_feature (382)..(390): n is a, c, g, or t
  misc_feature (528)..(554): n is a, c, g, or t
cggacgcgtgggcggacgcgtgggtcgacccacgcgtccgactagacaaggttaccaagtgcggaattggttaatactaacagagagatttgctccattctctttggaataacaggacatgctgtatagatacaggcagtaggtttgctctgtacccatgtgtacagcctacccatgcaggactgggattcgaggacttccaggcgcatagggtagaaccaaatgatagggtaggagcatgtgttctttagggccttgtaaggctgtttccttttgcatctggaactgactatataattgtcttcaatgaagactaattcaattttgcatatagaggagccaaagagagatttcagctctgtatttgtggtatcagtttggnnnnnnnnntctgatactccatttgattattgtaaatatttgatcttgaatcacttgacagtgtttgtttgaattgtgtttgttttttcctttgatgggcttaaaagaaattatccaaagggagaaagagcagtatgccacttcttnnnnnnnnnnnnnnnnnnnnnnnnnnnttgtgctcttttctaatccaaagggtatatttgcagcatgcttgactttaccaattctgatgacatctttacggacactattatcactaagaccttgttatggcgaagtctttagtctttttcatgtattttcctcatgattttttctctttatgtagtttgactatgccttacctttgtaaatattttttgcttgtggttgtcgcaaaaggggataatcctggggaaagacaccaaaatcatggggcctcactttt

SEQ ID NO: 162958 - DNA, 1049 bp, Homo Sapiens
agcagctcgccgccgttgccagtgctggggctcgggggcctgcggatcagctctgactcttcctcggacatcgagtctgaccttgaccgagaccccaatagtgcaacagactcggatggtagtccgctgtccaacagccagccttccttcccagtggagatcttgcccttcctctacttgggctgtgccaaagactccaccaacttggacgtgttggaggaattcggcatcaagtacatcttgaacgtcacccccaatttgccgaatctctttgagaacgcaggagagtttaaatacaagcaaatccccatctcggatcactggagccaaaacctgtcccagtttttccccgaggccatttctttcatagatgaagcccggggcaagaactgtggtgtcttggtacattgcttggctggcattagccgctcagtcactgtgactgtggcttaccttatgcagaagctcaatctgtcgatgaacgatgcctatgacattgtcaaaatgaaaaaatccaacatatcccctaacttcaacttcatgggtcagctgctggacttcgagaggacgctgggactcagcagcccatgtgacaacagggttccagcacagcagctgtattttaccaccccttccaaccagaatgtataccaggtggactctctgcaatctacgtgaaagaccccacacccctccttgctggaatgtgtctggcccttcagcagtttctcttggcagcatcagctgggctgctttctttgtgtgtggccccaggtgtcaaaatgacaccagctgtctgtactagacaaggttaccaagtgcggaattggttaatactaacagagagatttgctccattctctttggaataacaggacatgctgtatagatacaggcagtaggtttgctctgtacccatgtgtacagcctacccatgcagggactgggattcgaggacttccaggcgcatagggtagaaccaaatgatagggtaggagcatgtgttcttttagggccttgttaaggctgtttcctttttgcatcttgga

SEQ ID NO: 162959 - DNA, 853 bp, Homo Sapiens
  misc_feature (717)..(756): n is a, c, g, or t
  misc_feature (765)..(795): n is a, c, g, or t
gcacgctccagccacagccctgctggcccaccacctgtccgtcctgtcccctttcctgctggcaggagccggctgcctaccaggggccttcctgtgtggcctgccttcaccccactcagctcacctctccctccacctcctctccacctgctggtgagaggtgcaaagaggcagatctttgctgccagccacttcatcccctcccagatgttggaccaacacccctccctgccaccaggcactgcctggagggcagggagtgggagccaatgaacaggcatgcaagtgagagcttcctgagctttctcctgtcggtttggtctgttttgccttcacccataagcccctcgcactctggtggcaggtgccttgtcctcagggctacagcagtagggaggtcagtgcttcgtgcctcgattgaaggtgacctctgccccagataggtggtgccagtggcttattaattccgatactagtttgctttgctgaccaaatgcctggtaccagaggatggtgaggcgaaggccaggttgggggcagtgttgtggcccggggcccagccccaaactgggggctctgtatatagctatgaagaaaacacaaagtgtataaatctgagtatatatttacatgtctttttaaaagggtcgttaccagagatttacccatcgggtaagatgctcctggtggctgggaggcatcagttgctatatattnnnnnnnnnnnnnnnnnnnnnnnnnnnnnnnnnnnnnnnngtcatatannnnnnnnnnnnnnnnnnnnnnnnnnnnnnnaaattatgttctaaacctattttcagtttaggtccctcaataaaaattgctgctgctt

SEQ ID NO: 162960 - DNA, 969 bp, Homo Sapiens
gggggtcaaggccgttccttcagtgttttcagacgccctgggaacgcggctgcagggtccggtcttcggtttgcacagctagaggccgcgcagcagcaaaggatgagcggaaccttggaaaaggtgctgtgcctgaggaacaataccatttttaagcaagccttttctctcttaaggtttagaacttcaggagagaagcccatctattctgtaggtggaattctactaagtatcagtcggccctacaagacaaagcccacccacggcattggaaagtacaagcacttaattaaagcagaagagcccaagaagaagaagggaaaagtggaagtgagagccattaatttggggacagattatgaatatggggttttaaatattcatctgactgcatatgatatgaccctggcagagagttatgcccagtatgttcacaacctctgcaactctctctccattaaagtcgaggaaagttatgcaatgccaaccaaaaccatagaagtgttgcagttgcaggaccaaggcagcaaaatgctcctggactcagtgcttaccacccatgagcgagtggttcagatcagcggtttgagtgctacgtttgcagaaattttcttggaaataatccaaagcagtcttcctgaaggagtcagactgtcagtgaaggagcacactgaagaagacttcaagggacgattcaaagctcgaccagaactggaagaactgttggccaagttgaagtagctactgtagaccctttcatgccagcagtggtcatattgagtgccaaagagaagagcttactgggtagttagagttcatcaggagacccaacccttagatttcataagtacccattcccatagccagtaatgtcctcactcctctgtggcttggctgtacttgccatttcttaccacttacctatgaggtaatgcttgttatcttccatctaataaaaatctgctgcaa

SEQ ID NO: 162961 - DNA, 879 bp, Homo Sapiens
  misc_feature (37)..(37): n is a, c, g, or t
  misc_feature (47)..(47): n is a, c, g, or t
  misc_feature (61)..(61): n is a, c, g, or t
  misc_feature (68)..(68): n is a, c, g, or t
  misc_feature (75)..(75): n is a, c, g, or t
  misc_feature (107)..(107): n is a, c, g, or t
aaccccagaatcatcaataaaaccccagtcaacaatnccagaaactnaaagtcgctgtccnacttgcnaggtggnaatcccatgtggagggtgctccttcttgtttnctcaattgggacggtgactgtgtgtaagtggaaagcacagagccaatgagggacaggatggctgtggtggagggaaaacagtgcagggctgctctgtctctctgtcctgtcccgttaggactggtgggcccaccacaggtttcgcgaaggtgtggctggccattcctttcctcgcgttggggtttctctgtgtcagcgagcctcggtacactgatttccgatcaaaagaatcatcatctttaccttgacttttcagggaattactgaactttcttctcagaagatagggcacagccattgccttggcctcacttgaagggtctgcatttgggtcctctggtctcttgccaagtttcccagccactgcgagggagaaatatctggagggcaaagaagagacttatgttattgttgaacctccagccacagggaggagcatgggcatgggtcagctggatgtaaggatggatgctctctatacatgctgggttggggatgctgggactgcacagccacccccagtatgccgctccaggactctgggactagggcgccaaagtgtgcaaatgaaaatacaggatacccagggaactttgaatttcagattgtgaaaagaaaacaaatcttgagactccacaatcaccaagttaaaggaaaaagtcaagctgggaactgcttagggcaaagctgcctcccattctattcacagtcatccccctgaggctcacctgcatagctgattgtcctttcccctatcgcttctgtaaaaatg

SEQ ID NO: 162962 - DNA, 1247 bp, Homo Sapiens
gagtgccttgtgacactatagaacagttggtcttaaaagcaggctgtactggtccggaattcccgggatattgtcgacccacgcgtccgtgatggcctcccaccattccaagcggagaggccgggcgtcttctgagagtcagggtctaggtgctggagtgcgcacggaggccgatgtagaggaggaggccctgaggaggaagctggaggagctgaccagcaacgtcagtgaccaggagacctcgtccgaggaggaggaagccaaggacgaaaaggcagagcccaacagggacaaatcagttgggcctctcccccaggcggacccggaggtgggcacggctgcccatcaaaccaacagacaggaaaaaagcccccaggaccctggggaccccgtccagtacaacaggaccacagatgaggagctgtcagagctggaggacagagtggcagtgacggcctcagaagtccagcaggcagagagcgaggtttcagacattgaatccaggattgcagccctgagggccgcagggctcacggtgaagccctcgggaaagccccggaggaagtcaaacctcccgatatttctccctcgagtggctgggaaacttggcaagagaccagaggacccaaatgcagacccttcaagtgaggccaaggcaatggctgtgccctatcttctgagaagaaagttcagtaattccctgaaaagtcaaggtaaagatgatgattcttttgatcggaaatcagtgtaccgaggctcgctgacacagagaaaccccaacgcgaggaaaggaatggccagccacaccttcgcgaaacctgtggtggcccaccagtcctaacgggacaggacagagagacagagcagccctgcactgttttccctccaccacagccatcctgtccctcattggctctgtgctttccactatacacagtcaccgtcccaatgagaaacaagaaggagcaccctccacatggactcccacctgcaagtggacagcgacattcagtcctgcactgctcacctgggtttactgatgactcctggctgccccaccatcctctctgatctgtgagaaacagctaagctgctgtgacttccctttaggacaatgttgtgtaaatctttgaaggacacaccgaagacctttatactgtgatcttttacccctttcactcttggctttcttatgttgctttcatgaatggaatggaaaaaagatgactcagttaaggcaccaaaac

SEQ ID NO: 162963 - DNA, 2055 bp, Homo Sapiens
  misc_feature (135)..(136): n is a, c, g, or t
  misc_feature (192)..(192): n is a, c, g, or t
aaggggccttttaatcccctaacccatttggccaggatagggaaaaaccggaattgcaaaaagccggtttcctgggagaccaggaaatgggaagtttttaagttacaaagggaaaagggaggggggaagggagannaaaaattctgaagcggcccagttctgggaggatgagggagggagggcaattccctnaatgtccatttgaattcggaagggacaggcagcccggggcggactggagacggcggctcgccttgggaccctctgagcttgcgggccccgctgagcacccaaaggccggccctagagtccaggagaagagcgcagcggcgcggagctcccaggcgttccccgcagcgcgtcctcggtcctggaaccaccgcgccgcgcgtcctggcttccacatctgccccatttgcccgcggatcttgactttttcttggccggccaaggcctcggttctcctcccccccagcaggggctgcccgcggctgccgggacctccttggtcctgatgcctggcagaatcgaaggggtgagggtacgctctctgcagcagaaagccctgggcttaaagtcctatttattatttggcgttgccacttactggtcggtggctttggtagggcgcgtttctgagcctcagtttccccatttgtaaagccgaagtacatagcgctttccctgcagagttagaaatttcgacgatgtgccgcgcgctctagagcgcgctcagcaagcgggtcccaccgtgcccaaggcaggaccgcggcgcgatgtcacctatgcaaagtcgccgcaactcacgggaatcgcagctgtgtgctcaactttcccctccccgccgccgtctttctccccaaactggcttgggggtcgagtatccggggctctcccccgcactggcgcttcccgcgcgggcgccccaggtgtccgttccgttccgccctctgcctggcagggcatccagaggtgtccgcgctcccggagctgggcggagcggggcgcagcccacgtggttcgggcgggaggcgccgggacgtggccagttgcccgcctgccccggagagccaggcgctaaccagccgctctgcgccccgcgccctgcttgcccccattatccagccttgccccggcgccctgacctgacgccctggcctgacgccctgcttcgtcgcctcctttctctcccaggtgctggaccagggactgagcgtcccccggagagggtccggcgtgaccccgacaagaagcagaaatggggaagaaactggatctttccaagctcactgatgaagaggcccagcatgtcttggaagttgttcaacgagattttgacctccgaaggaaagaagaggaacggctagaggcgttgaagggcaagattaagaaggaaagctccaagagggagctgctttccgacactgcccatctgaacgagacccactgcgcccgctgcctgcagccctaccagctgcttgtgaatagcaaaaggcagtgcctggaatgtggcctcttcacctgcaaaagctgtggccgcgtccacccggaggagcagggctggatctgtgacccctgccatctggccagagtcgtgaagatcggctcactggagtggtactatgagcatgtgaaagcccgcttcaagaggttcggaagtgccaaggtcatccggtccctccacgggcggctgcagggtggagctgggcctgaactgatatctgaagagagaagtggagacagcgaccagacagatgaggatggagaacctggctcaaaggcccaggcccaggcccagccctttggcagcaaatccctcacagatgagtcctgctcagagaaggcagcccctcacaaggctgagggcctggaggaggctgatactggggcctctgggtgccactcccatccggaagagcagccgaccagcatctcaccttccagacacggcgccctggctgagctctgcccgcctggaggctcccaacaggatggccctggggacttgctgctgcactcgggtcgaatgtcatcaggaatgagcagctgcccctg

SEQ ID NO: 162964 - DNA, 983 bp, Homo Sapiens
caggcctggtaccggtccggaattctccgggatatcgtcgacccacgcgtgcggctcagagaaggcagcccctcacaaggctgagggcctggaggaggctgatactggggcctctgggtgccactcccatccggaagagcagccgaccagcatctcaccttccagacacggcgccctggctgagctctgcccgcctggaggctcccacaggatggccctggggactgctgctgcactcgggtcgaatgtcatcaggaatgagcagctgcccctgcagtacttggccgatgtggacacctctgatgaggaaaacatccgggctcacgtgatggcctcccaccattccaagcggagaggccgggcgtcttctgagagtcagatctttgagctgaataagcatatttcagctgtggaatgcctgctgacctacctggagaacacagttgtgcctcccttggccaagggtctaggtgctggagtgcgcacggaggccgatgtagaggaggaggccctgaggaggaagctggaggagctgaccagcaacgtcagtgaccaggagacctcgtccgaggaggaggaagccaagggacgaaaaggcagagcccaacagggacaaatcagttggggcctctcccccaggcggacccggaggtgggcacggtgcccatcaaaccaacagacaggaaaaaagcccccaggacctggggaccccgtcaagtacaacaggaccacagatgaggagctgtcagagctggaaggacagagtggcagtgacggcctcagaagtccagcacgccgagagcgaggttccgacctggatcccgggattgcagctgaaggcgcggcccccgggaagcctcgggaagccggaggaataaaccccattttcccccaggggggaatcggcagcgcagcccctgaccccataggcggcggggcctctggaaaaaccccaagaaaagttcgaaaacggggcaaaccaa

SEQ ID NO: 162965 - DNA, 395 bp, Homo Sapiens
  misc_feature (331)..(331): n is a, c, g, or t
  misc_feature (364)..(364): n is a, c, g, or t
ggcaatggctgtgcctagtcttctgagaagaaagttcagtaattccctgaaaagtcaaggtaaagatgatgattcttttgatcggaaatcagtgtaccgaggctcgctgacacagagaaaccccaacgcgaggaaaggaatggccagccacaccttcgcgaaacctgtggtggcccaccagtcctaacgggacaggacagagagacagagcagccctgcactgttttccctccaccacagccatcctgtccctcattggctctgtgctttccactatacacagtcaccgtcccaatgagaaacaagaaggagcaccctccacatgggactnccacctggcaagtggaacagcgacattgcagtncctgcaattgcttcacctggggttttaattg

SEQ ID NO: 162966 - DNA, 1063 bp, Homo Sapiens
ttttttttcaaggacagatatcaatgaaaacttttatttactggtaaaatataaaaatccaggtctcttaaatccacacaatctctccaaatatttggcaagattgattccaagtccatatgggtggataacaagaacaaaggggtctctgctcagagagacgtattgtcgttcagagttctgccctgcttccctctaaatgctcaccaacctgggactcttctaaagtgggcagacaagccctattctaagcgtaggaatagccccatttgtgcgtgacactaagttcctccaatggtccaaactgagcgtggatgactatccaacatcacacacaaatgcacatcccctctctttacaagacatgcagaatctcaagatatgtcaagatatgcagcaagtttaatacctgaaggttaacataaatgacaacaggacacagatgcaatgctacagtcaaatgtggttggggatggaagggggcagagggacactggatatcatcacagcaaccagtgagtgagtcctctggtgccctgaggaggttgtgagccacttgactcgtgtcacaaagaatggagtaaactaacaactctgaaagacaagagggtggcagcattgctgagatgagactcaaggcaggggtctgcagctctgtcacagagtgttaatgctcaacgatgcctgggctcaagagcgttctggtcagcattttaacatcagaagaagggcttcttcaggacacactcccttctcttaacatgaggtgaagaaacccatcccattctgaaaccaggtcccataataccttggtcttttgatacacagcagcactacacaccactgtgccccccagccagcttcactctgtctgctaagcacccactctgcaaacagatctcagagtgaacaaatccagaggaggtgggaggagccaccatggtgggatgtgagggacaggagttggctggaggagcagatgggtcccatgtcaggaacctcctaggcatcatgaagattgctatcactcagaagcaccttttccccaggtatgtgaggctgg

SEQ ID NO: 162967 - DNA, 418 bp, Homo Sapiens
  misc_feature (180)..(180): n is a, c, g, or t
  misc_feature (404)..(404): n is a, c, g, or t
ttatgttaaacccttccaggtattaaacttgcctgccaaatccttgaacatatccttgagattcctgccatgtccttgtaaagagaggggatgtgcatttgtgtgtgatgttggatagtcatcccacgcctcagtttggacccattggaggaacttagtgtcacgcacaaatggggctantcctacgcttagaatagggcttgtctgcccactttagaagagtcccaggttggtgagcatttagagggaagcagggcagaactctgaacgacaatacgtctctctgagcagagacccctttgttcttgttatccacccatatggacttggaatcaatcttgccaaatatttggagagattgtgtggatttaagagacctggatttttatattttaccagtaaanaaaagttttcattg

SEQ ID NO: 162968 - DNA, 345 bp, Homo Sapiens
tagaggatcccggtgatccgtacatatcaaacaactttgcatttccataatgtagttaagtttctctcataggtttccaacctcggttccggcttttactgctgctatcacagctgtttcctcatatccctcagaatcttggctgctgtctgtgtcatatccagtgccattgtcactcttaactttgccagttattttctctcctggagcaagaatctgggatttacttgaacttattatatgtgcagaagctcgactctgaggtacaactcggtcatgtttatatgatccttttccttgactatgatatagatgtggattcccatgttgtttaaaaccattggg

SEQ ID NO: 162969 - DNA, 188 bp, Homo Sapiens
cgtgggtgcctagaggatccccgtcaacgctcagccacttccctcgctgccaagttaggtcttcttccaataatataagatgctagaagacttagatcatgatcttatttctactttaaggttcgatagtccctcttaatgatttcctgtttacgcttaactgcttgcgctggacgcgtgacagggta

SEQ ID NO: 162970 - DNA, 363 bp, Homo Sapiens
tgatcacggcgtccagccatgtaacaggttctgaaagacaattcaggagaatggatacggtccttaaagaatcccctagcgcccccagaggttacagtgaaatgacttaagaaccgcaagatgactaacataaaagacagaaatagaatttgaagtagccttctctgtttaacaagctctcaggtgatgtcgattcaaggaccatattttgaattgcaagatgctaaagagaaagaaatacctgagataccctggcccacctctgaactcaaagggtacaggcatctggatcacaaggattctgaacttagatgtctttgcctagaaagcctctcctgactcactgtggctgagcgttaaggg

SEQ ID NO: 162971 - DNA, 812 bp, Homo Sapiens
  misc_feature (193)..(201): n is a, c, g, or t
tactcagcacatgcctcacaaattcctgaccaggcctgggtaagaatcagtccaattaactattagttacagcaagcaaaacaaaacatcaacatgatgttaaattcaccttgcttgatattcttgccaaaacaggaattgaggaattaagacacacaggtgatttcaaccagaacataacaggggaactggnnnnnnnnngacaaaatgtagatgttacttgtttgaagcaaacctgtccacttagagccatttattgcctttttgagactcatggctaattcttgaaaggaccacattgagtttgtcagtatatgatgtatcctttagtttgaaagtcgttaagaggggtgtaagggagaggcaggagggcgggaaggactaaaaaggcacagggtggagtgtttgctgacgccatcgtggtaattatccaagagagtgtgttcgctgggcccttcctgagacctccagagatgggtctgatttcttcaggcaaaagcagcaaaatcttcctcagagagtcaaggtcaacttttattgcacaagaaccaaaattatttccctccccactttcctgagctggagacctccacatgcaatgtctggattctcatctgcttgcacctctgaccagcagggtgcactcaaacaaaacgcctcagaaagcaccttcttcaaagggaaacatgaggtattccgatggcccaagcaatctggccgatcagtcaccattctcaagcaacttctgtaagttattttgtatcttttctaatttcactatgttggctgagcgtttcaggtccgagctgatt

SEQ ID NO: 162972 - DNA, 498 bp, Homo Sapiens
tggagacctctacagagatacagaattatacgctggaggagcagctggggttactaacctccattgtggacacccataatactgaacaggcagcaccatctggcctgaggtcacaagtacaattcaatgtggaggttctctgtcaagagcttacagctaacatagtgaaattagaaaagatacaaaataacttacagaagttgcttgagaatggtgactgatcgaccagattgcttgggccatcggaatacctcatgtttccctttgaagaaggtgcttcctgaggcgttttgtttgagtgcaccctgctggtcagaggtgcaagcagatgagaatccagacattgcatgtggaggtctccagctcaggaaagtggggagggaaataattttggttcttgtgcaataaaagttgaccttgactctctgaggaagattttgctgcttttgcctgaagaaaacagacccatctctggagtctcagataggggtaccgacc

SEQ ID NO: 162973 - DNA, 225 bp, Homo Sapiens
aacaacaacaacaaaaaaaggcgaggaggtagacccacttgagatggttctgttgcggagagtctctgaaatcagaaagcgccagtccgcaaaaacgaggaaacccgacgtgtccggcggaaggaacctgccagctacaaaggccactgaggcgagaaagagattggtcactgaaagaactcaaagaagtcctgtgtggctgagcgtgaacggggatcctcgaga

SEQ ID NO: 162974 - DNA, 530 bp, Homo Sapiens
tcgtgctggctgattcttgagggtccccctgccacgctccagccacgcccctgcttacacaccctaatgccagccctggactctcttcctcggcagcccctccctcaactctgcagctcctctcgcacccagaggagctcctttccccagcaggcctcactggtaggatcctgaccatcttctccaaaccttccccaggagagactctgcctttagggtcatccaagtatccctgctctcagaaccggaggtccactggttttctataatgtactctttccctcctgccacatcctgcccccttcacattcacgagtcattaccagccagggaaggtcatccaagtttcctccagcatgggcgatatctttgggaccgagactttccttggagagctgctgagagcggacagtcccaaaaacaagtgtcaaagggcccaagggaaaggggactgtgccctggaggctcacttcacagggatcagtgtttgctccacagctgtagctctgggctgacgccccccagacccc

SEQ ID NO: 162975 - DNA, 1055 bp, Homo Sapiens
agcggcagacgaagggggacaagcacgagaacgggcaggacctgctgctgctggacgtggctcccctgtcgctggagctggagacggccggaggcgtgatgactgccctgatcaagcgcaactccaccatccccaccaagcagacgcagatcttcaccacctactccgacaaccaacccggggtgctgatccaggtgtacgagggcgagagggccatgacgaaagacaacaatctgttggggcgcttcgagctgagcggcatccctccggcccccaggggcgtgccccagatcgaggtgaccttcgacatcgatgccaacggcatcctgaacgtcacggccacggacaagagcaccggcaaggccaacaagatcaccatcaccaacgacaagggccgcctgagcaaggaggagatcgagcgcatggtgcaggaggcggagaagtacaaagcggaggacgaggtgcagcgcgagagggtgtcagccaagaacgccctggagtcctacgccttcaacatgaagagcgccgtggaggatgaggggctcaagggcaagatcagcgaggccgacaagaagaaggtgctggacaagtgtcaagaggtcatctcgtggctggacgccaacaccttggccgagaaggacgagtttgagcacaagaggaaggagctggagcaggtgtgtaaccccatcatcagcggactgtaccagggtgccggtggtcccgggcctgggggcttcggggctcagggtcccaagggagggtctgggtcaggccccaccattgaggaggtagattaggggcctttccaagattgctgtttttgttttggagcttcaagactttgcatttcctagtatttctgtttgtcagttctcaatttcctgtgtttgcaatgttgaaattttttggtgaagtactgaacttgctttttttccggtttctacatgcagagatgaatttatactgccatcttacgactatttcttctttttaatacacttaactcaggccattttttaagttggttacttcaaagtaaataaactttaaaattc

SEQ ID NO: 162976 - DNA, 610 bp, Homo Sapiens
actcagcagagcagtcagaggtcggcagcccctgcccacgagctccagccggccctgcatggccttatgctggaacgtctctggaatcttttccctttctttctgtgttggctgtgtcggggtggtctttgggaagcactatcatccaagggtccctcactccgtggctctctctctgcccttccaggctgagcagcgtgttatgtcccgggtacactctctggagcggcgtctggaagctcttgctgctgaattttcctccaactggcagacggaggccatgcggctggaacgtctggagctgcgtctgctgaggagctcctcagcagaggcaggtcttgaccacctactccgacaaccgagccggggtgctgatccaggtgtacgagggcgagagggccatgacgaaagacaacaatctgttgggcgcgcttcgagctgagcggcgtccctccggcccccaggggcgtgcccccagatcgaggtgaccttcgacatcgatgccaacggcatcctgaacgtcacggacacggacaagagcaccggcacggccaacacgatcccatcaccaaggcaagggccgcctgagcaggaggaatcgagcgctgtg

SEQ ID NO: 162977 - DNA, 432 bp, Homo Sapiens
  misc_feature (8)..(8): n is a, c, g, or t
  misc_feature (32)..(33): n is a, c, g, or t
  misc_feature (427)..(427): n is a, c, g, or t
ggtcagcntttccagcagcggcagcgcgagannggtgtcagccaagaacgccctggagtcctacgccttcaacatgaagagcgccgtggaggatgaggggctcaagggcaagatcagcgaggcggacaagaagaaggttctggacaagtgtcaagaggtcatctcgtggctggacgccaacaccttggccgagaaggacgagtttgagcacaagaggaaggagctggagcaggtgtgtaaccccatcatcagcggactgtaccagggtgccggtggtcccgggcctggcggcttcggggctcagggtcccaagggagggtctgggtcaggccctaccattgaggaggtggattaggggcctttgttctttagtatgtttgtctttgaggtggactgttgggactcaaaggacttcgctgctggaaanactga

SEQ ID NO: 162978 - DNA, 536 bp, Homo Sapiens
tgaattttaaagtttatttactttgaagtaaccaacttaaaaaatggcctgagttaagtgtattaaaaagaagaaatagtcgtaagatggcagtataaatccatctctgcatgtagaaaccggaaaaaaagcaagttcagtacttcaccaaaaaatttcaacattgcaaacacaggaaattgagaactgacaaacagaaatactaggaaatgcaaagtcttgaagctccaaaacaaaaacagcaatcttggaaaggcccctaatctacctcctcaatggtggggcctgacccagaccctcccttgggaccctgagccccgaagcccccaggcccgggaccaccggcaccctggtacagtccgctgatgatggggttacacacctgctccagctccttcctcttgtgctcaaactcgtacttctcggccaaggtgttggcgtccagcacgagatgacctcttgacacttgtcagcacctcttctggtggcctgatgatcttgccttgagcccccatcctccaggggctcttcatgtt

SEQ ID NO: 162979 - DNA, 834 bp, Homo Sapiens
ggctagtttgtggctcagcctgtatccggcacttgggagccaagtggaagatcgctgaggccagagttcaagacgcctgggctacatagcggacccctatctgtattagaaaaaaatctgatttaattcttttatttatcataaggggtttaattcctgaagtaaaggtttgcacctattaaacttaaaactgccaaatgatttttgttcttttatgtgcgtgataaaaatacaaagaatggtgtggccacctcctccctttcaagctagggcagcaggtagctcttcccagcccctgagcccagccccttcccaagtggtgccggacaaaaaactacatggccctttcgtgtcttgggggtggaaagggagggatgaattggggtgatagaaccctggtgaattcagagtaatctttctttagaaaactggtgttttctaaagaaacaggataggagtttagagaaggcaccaaagctttcactttggtttggcaccagtttctaaccatctgttttttctaccctagctatcttttattggtaaaatataaatgtataattatgtttgtagagctttaccaaggagtttccctccttttttgtttgttgattagcaaatttttgattctccattttccaaaagtaagagactccagcatggccttctgtttgccccgcagtaaagtaacttccatataaaatggtatttgaaagtgagagttcatgacaacagaccgttttccatttcatctgtattttatctccgtgactccaacttgtgggtttgttctgtttttccatgagaataaaatactggcggtttttttaaaaa

SEQ ID NO: 162980 - DNA, 1424 bp, Homo Sapiens
  misc_feature (1318)..(1326): n is a, c, g, or t
cctgatgaaagacgtgctgggcatggcgcaggacgagatggcccaggcctttgaggattggaataagacagagctagactcattcctgattgaaatcacagccaatattctcaagttccaagataccgatggcaaacacctgctgccaaagatcagggacagcgcggggcagaagggcacagggaagtggacctccatctccgccctggaatacggcgtacccgtcaccctcattggagaagctgtctttgctcggtgcttatcatctctgaaggatgagagaattcaagctagcaaaaagctgaagggtccccagaagttccagtttgatggtgataagaaatcattcctggaggacattcggaaggcactctacgcttccaagatcatctcttacgctcaaggctttatgctgctaaggcaggcagccaccgagtttggctggactctcaattatggtggcatcgccctgatgtggagagggggctgcatcattagaagtgtattcctaggaaagataaaggatgcatttgatcgaaacccggaacttcagaacctcctactggacgacttctttaagtcagctgttgaaaactgccaggactcctggcggcgggcagtcagcactggggtccaggctggcattcccatgccctgttttaccactgccctctccttctatgacgggtacagacatgagatgcttccagccagcctcatccaggctcagcgggattacttcggggctcacacctatgaactcttggccaaaccagggcagtttatccacaccaactggacaggccatggtggcaccgtgtcatcctcgtcatacaatgcctgatcatgctgctcctgtcaccctccacgattccacagaccaggacattccatgtgcctcatggcactgccacctggccctttgccctattttctgttcagttttttaaaagtgttgtaagagactcctgaggaagacacacagtttatttgtaaagtagctctgtgagagccaccatgccctctgcccttgcctcttgggactgaccaggagctgctcatgtgcgtgagagtgggaaccatctcccttgcggcagtggcttccgcgtgccccgtgtgctggtgcggttcccatcacgcagacaggaagggtgtttgcgcactctgatcaactggaacctctgtatcatgcggctgaattccctttttcctttactcaataaaagctacatcacactgatgctctttctcccaattcttagtctcacctcggccacatggagccattatccccattggcagcaaagatttttctttnnnnnnnnngactagaataacacaagaaaccacatttcaggattatgcttcactcagaggatgcagtccagatcgagtgactgggatcctctagaacagctatacat

SEQ ID NO: 162981 - DNA, 1082 bp, Homo Sapiens
  misc_feature (919)..(919): n is a, c, g, or t
gagcgaggcctgggtggcgaattcggcacgaggcccaagctgacatcgcgctgatcggattggccgtcatgggccagaacttaattctgaacatgaatgaccacggctttgtggtctgtgcttttaataggactgtctccaaagttgatgatttcttggccaatgaggcaaagggaaccaaagtggtgggtgcccagtccctgaaagagatggtctccaagctgaagaagccccggcggatcatcctcctggtgaaggctgggcaagctgtggatgatttcatcgagaaattggtaccattgttggatactggtgacatcatcattgacggaggaaattctgaatatagggacaccacaagacggtgccgagacctcaaggccaagggaattttatttgtggggagcggagtcagtggtggagaggaaggggcccggtatggcccatcgctcatgccaggagggaacaaagaagcgtggccccacatcaagaccatcttccaaggcattgctgcaaaagtgggaactggagaaccctgctgtgactgggtgggagatgagggagcaggccacttcgtgaagatggtgcacaacgggatagagtatggggacatgcagctgatctgtgaggcataccacctgatgaaagacgtgctgggcatggcgcaggacgagatggcccaggcctttgaggattggaataagacagagctagactcattcctgattgaaatcacagccaatattctcaagttccaagacaccgatggcaaacacctgcttgccaagatcagggacagcgcgggggcagaagggcacagggaagtggaccgccatctccgccctgggatacggcgtacccgtcaccctcattgggagaagctgtctttgctcggtgcttatcatctctgaaggatganagaattcaagctagcaaaaagctgaaaggtccccagaagattcagttttgatggggaataaaaaatcatttcctgggagaacattcggaagggattctacgcctccaagatcatctcttaacgctcaaaggctttatggctgcctaaagcaaggcaacccccc

SEQ ID NO: 162982 - DNA, 939 bp, Homo Sapiens
  misc_feature (87)..(87): n is a, c, g, or t
  misc_feature (92)..(92): n is a, c, g, or t
  misc_feature (98)..(98): n is a, c, g, or t
  misc_feature (100)..(153): n is a, c, g, or t
  misc_feature (550)..(550): n is a, c, g, or t
cgcgagtcgacaaagtggagcgggggttgcgaggtcagatgcttgggggatatatgtcttatggatatgtcgggagaataggttatnggtgntgtatnannnnnnnnnnnnnnnnnnnnnnnnnnnnnnnnnnnnnnnnnnnnnnnnnnnnnnaggaccacgcggtagtaatccatggtggtcgttgtaatatcgttttgttggatcttttggtatgctcccgtttcccatcgggggatcccccttaattggggggtccatgcatggattggtggttggcccgctgtagcagcataaagcctggagcgtaagagatgatctggaaagcgtagagtcctttccaaaggtcctccaggaatgatttcttatccccatcaaactggaacttttggggacccttcagctttttgctagcttgaattctgtcatccttcagaggatgataagccccgagcaaagacagtttcttcaatgagggtgacgggtacgccgtattccagggcggagatggcggtccacttccctgtgcctttctgccccgcgctgtccntgatctttggcagcaggtgtttgccatcggtgtcttggaacttgagaatattggctgtgatttcaatcaggaatgagtctagctctgtcttattccaatcctcaaaggcctgggccatctcgtcctgcgccatgcccagcacgtctttcatcaggtggtatgcctcacagatcagctgcatgtccccatactctatcccgttgtgcaccatcttcacgaagtggcctgctccctcatctcccacccagtcacagcagggttctccagttcccacttttgcagcaatgccttggaagatggtcttgatgtggggccacgcttctttgttccctcctggcatgagcgatgtcagcttgggccatggcggcggacagagcagaaccgaagag

SEQ ID NO: 162983 - DNA, 916 bp, Homo Sapiens
ctcttcggttctgctctgtccgccgccatggcccaagctgacatcgctcatgccaggagggaacaaagaagcgtggccccacatcaagaccatcttccaaggcattgctgcaaaagtgggaactggagaaccctgctgtgactgggtgggagatgagggagcaggccacttcgtgaagatggtgcacaacgggatagagtatggggacatgcagctgatctgtgaggcataccacctgatgaaagacgtgctgggcatggcgcaggacgagatggcccaggcctttgaggattggaataagacagagctagactcattcctgattgaaatcacagccaatattctcaagttccaagataccgatggcaaacacctgctgccaaagatcagggacagcgcggggcagaagggcacagggaagtggaccgccatctccgccctggaatacggcgtacccgtcaccctcattggagaagctgtctttgctcggtgcttatcatctctgaaggatgagagaattcaagctagcaaaaagctgaagggtccccagaagttccagtttgatggtgataagaaatcattcctggaggacattcggaaggcactctacgcttccaagatcatctcttacgctcaaggctttatgctgctaaggcaggcagccaccgagtttggctggactctcaattatggtggcatcgccctgatgtggagagggggctgcatcatttagaagtgtattccctaggaaaataaaggatgcattttgatcgaaaccccggaacctcagaaccctcctactggaacgacctttcttttagtcaacttggttgaaaacttgcccagaactcctggtcggcgggggcgttccgccaccgggggccccaggcctgggcattccccatgccccccgttt

SEQ ID NO: 162984 - DNA, 461 bp, Homo Sapiens
ggctggagttgttcactttagccgagaagcaggcgtcagggtccatctgatacttggctgctattccgaagcgcgtgttactgtttcctgctgtccaggccagattgacagcggtctcccacttcttgttcactttctggtaaatggagccgcccaactctgtcccttatcttcagtcacatgctggcagaaatcaaagcaatctttcccaatggtcaattccaggggagataactttcgtatcacaaaagcagatgctgctgaattctgggagaaagttttttggagacaaaactatcgtaccatgggaaagtattcagacagtgccttcatgaggtccaccagattagctctggcctggaagccatggctctaaaatccaccactgatttaacttgccatgattacatttccgtttttgaatttgatatctcgtaccacggctatttcccccttccggc

SEQ ID NO: 162985 - DNA, 1852 bp, Homo Sapiens
  misc_feature (452)..(460): n is a, c, g, or t
  misc_feature (1577)..(1586): n is a, c, g, or t
  misc_feature (1701)..(1701): n is a, c, g, or t
  misc_feature (1782)..(1782): n is a, c, g, or t
ccaggctggtacgctccggattaccgggatatcgtcgaccacgcgtcgcggacgcgtgggctgcctccgcgtcgcagcccccgccgtagccgcctccgagcccgccgccacatcctctgagcagaagatggctgtgccacccacgtatgccgatcttggcaaatctgccagggatgtcttcaccaagggctatggatttggcttaataaagcttgatttgaaaacaaaatctgagaatggattggaatttacaagctcaggctcagccaacactgagaccaccaaagtgacgggcagtctggaaaccaagtacagatggactgagtacggcctgacgtttacagagaaatggaataccgacaatacactaggcaccgagattactgtggaagatcagcttgcacgtggactgaagctgaccttcgattcatccttctcacctaacactgggnnnnnnnnntgctaaaatcaagacagggtacaagcgggagcacattaacctgggctgcgacatggatttcgacattgctgggccttccatccggggtgctctggtgctaggttacgagggctggctggccggctaccagatgaattttgagactgcaaaatcccgagtgacccagagcaactttgcagttggctacaagactgatgaattccagcttcacactaatgtgaatgacgggacagagtttggcggctccatttaccagaaagtgaacaagaagttggagaccgctgtcaatcttgcctggacagcaggaaacagtaacacgcgcttcggaatagcacccaagtatcagattgaccctgacgcctgcttctcggctaaagtgaacaactccagcctgataggtttaggatacactcagactctaaagccaggtattaaactgacactgtcagctcttctggatggcaagaacgtcaatgctggtggccacaagcttggtctaggactggaatttcaagcataaatgaatactgtacaattgtttaattttaaactattttgcagcatagctaccttcagaatttagtgtatcttttaatgttgtatgtctgggatgcaagtattgctaaatatgttagccctccaggttaaagttgattcagctttaagatgttacccttccagaggtacagaagaaacctatttccaaaaaaggtcctttcagtggtagactcggggagaacttggtggcccctttgagatgccaggtttcttttttatctagaaatggctgcaagtggaagcggataatatgtaggcactttgtaaattcatattgagtaaatgaatgaaattgtgatttcctgagaatcgaaccttggttccctaaccctaattgatgagaggctcgctgcttgatggtgtgtacaaactcacctgaatgggacttttttagacagatcttcatgacctgttcccaccccagttcatcatcatctcttttacaccaaaaggtctgcagggtgtggtaactgtttctttttgtgccattttggggtggaagaaggtggatgtgatgaaacccaataattcagggacttattcccttctggggttgtgnnnnnnnnnngcccttgcaccagagtatgaaatagcttccaggagctccagctataagcttggaagtgtctgtgtgattgtaatcacatggtgacaacactcagaatctaaatttggacttctgntgtattctcaccactcaatttgtttttttagcaggtttaatgggtacatttttagaggctcccattttggttggaatttangatccttccccttccaaatggcggaaattaacaacacctttaaaaaactttggataaaaatatttggaaa

SEQ ID NO: 162986 - DNA, 1169 bp, Homo Sapiens
  misc_feature (337)..(345): n is a, c, g, or t
  misc_feature (647)..(661): n is a, c, g, or t
  misc_feature (770)..(791): n is a, c, g, or t
  misc_feature (802)..(810): n is a, c, g, or t
  misc_feature (1055)..(1055): n is a, c, g, or t
ggctagaaatggctgcaagtggaagcggataatatgtaggcactttgtaaattcatattgagtaaatgaatgaaattgtgatttcctgagaatcgaaccttggttccctaaccctaattgatgagaggctcgctgcttgatggtgtgtacaaactcacctgaatgggacttttttagacagatcttcatgacctgttcccaccccagttcatcatcatctcttttacaccaaaaggtctgcagggtgtggtaactgtttcttttgtgccattttggggtggagaaggtggatgtgatgaagccaataattcaggacttattccttcttgtgttgtgnnnnnnnnnggcccttgcaccagagtatgaaatagcttccaggagctccagctataagcttggaagtgtctgtgtgattgtaatcacatggtgacaacactcagaatctaaattggacttctgttgtattctcaccactcaatttgttttttagcagtttaatgggtacattttagagtcttccattttgttggaattagatcctccccttcaaatgctgtaattaacaacacttaaaaaacttgaataaaatattgaaacctccgtggccgtccggctcccccccacccgaaatataccgagtagaaaannnnnnnnnnnnnnntccatgtcttccgcgacttttgctcggagcgcggcttaccacacaaccccccccaccaccgcgttttggcttattcccgtcaccactcccgcttgttttttctctttgnnnnnnnnnnnnnnnnnnnnnntggagaaaaannnnnnnnnataaaaccatatttccgacttggggcgccgccgcgcgccccccgggagggaactgcgacacacgggggcgggacacatcgcgcttctcacccgaggacagaaagtcttcgtaactaactaaatacaggacttgttttgtcccgccccaccggacaaaacacaacacgcgccccgcctcttatacgggcaccatccggggctgttgttcatcaatctcctcccctaccaggtggctgcctgtccangcagacgcttctgcaacgagcactccccactcaacgacttgcttgcgtctgtgggtgagcgattcgcagatgccacaattgaccacgccgaccccccccgactgtaacgacgtg

SEQ ID NO: 162987 - DNA, 1316 bp, Homo Sapiens
  misc_feature (73)..(73): n is a, c, g, or t
gaaacccaggttaaccccaccccccttgccaagaccctttttgggggtaaaaaggaggattgatggattgaanctggggggtgggaaaacaggtcaatgaaaagatctgtctaaaaaaaagtccccattccagggtgagtttggtacaccaccatcaaagcaggcgagcctctcatcaattaagggttagggaaccaaggttcgattctcaggaaatcacaatttcattcatttactcaatatgaatgtacaaagtgcctacatattatccgcttccacttgcagccatttctagataaaaaagaaacctggcatctcaaaggggccaccaagttctccccgagtctaccactgaaaggaccttttttggaaataggtttcttctgtacctctggaagggtaacatcttaaagctgaatcaactttaacctggagggctaacatatttagcaatacttgcatcccagacatacaacattaaaagatacactaaattctgaaggtagctatgctgcaaaatagtttaaaattaaacaattgtacagtattcatttatgcttgaaattccagtcctagaccaagcttgtggccaccagcattgacgttcttgccatccagaagagctgacagtgtcagtttaatacctggctttagagtctgagtgtatcctaaacctatcaggctggagttgttcactttagccgagaagcaggcgtcagggtcaatctgatacttggctgctattccgaagcgcgtgttactgtttcctgctgtccaggcaagattgacagcggtctccaacttcttgttcactttctggtaaatggagccgccaaactctgtcccgtcattcacattagtgtgaagctggaattcatcagtcttgtagccaactgcaaagttgctctgggtcactcgggattttgcagtctcaaaattcatctggtagccggccagccagccctcgtaacctagcaccagagcaccccggatggaaggcccagcaatgtcgaaatccatgtcgcagcccaggttaatgtgctcccgcttgtaccctgtcttgattttagcattttttttcccagtgttaggtgagaaggatgaatcgaaggtcagcttcagtccacgtgcaagctgatcttccacagtaatctcggtgcctagtgtattgtcggtattccatttctctgtaaacgtcaggccgtactcagtccatctgtacttggtttccagactgcccgtcactttggtggtctcagtgttggcggacgcgtgggtcgacgatatcccggaaactccggacctgtaccagcctt

SEQ ID NO: 162988 - DNA, 989 bp, Homo Sapiens
gggcgctcgctcggctccgctccctggctcggctccctgcctccgcgtcgcagcccccgccgtagccgcctccgagcccgccgccacatcctctgagcagaagatggctgtgccacccacgtatgccgatcttggcaaatctgccagggatgtcttcaccaagggctatggatttggcttaataaagcttgatttgaaaacaaaatctgagaatggattggaatttacaagctcaggctcagccaacactgagaccaccaaagtgacgggcagtctggaaaccaagtacagatggactgagtacggcctgacgtttacagagaaatggaataccgacaatacactaggcaccgagattactgtggaagatcagcttgcacgtggactgaagctgaccttcgattcatccttctcacctaacactgggaaaaaaaatgctaaaatcaagacagggtacaagcgggagcacattaacctgggctgcgacatggatttcgacattgctgggccttccatccggggtgctctggtgctaggttacgagggctggctggccggctaccagatgaattttgagactgcaaaatcccgagtgacccagagcaactttgcagttggctacaagactgatgaatttccagcttcacactaatgtgaattgacgggacagagttggcggctccatttacccagacagtgaacaagaagttggagacgcgctgtcaatcttgcctggacagcaggaaaccagtaacacgcgcttcggaaatagcagccaagtatcagattgacccttgacgcctgcttctcggtaaaggtgaacaactcccagccctgataggtaaggaaacactcagaatcttaaggccaggtattaactgacccgtcagctcccctggatggcaacaccgtaatgctgtggcccaactggccaagacggattcacgcttatgatccggccctgtgtattacttatgggtagtacttca

SEQ ID NO: 162989 - DNA, 1007 bp, Homo Sapiens
  misc_feature (660)..(660): n is a, c, g, or t
aaagcccaggctggtaccggtcccgaattcctcgggatatcgtcgacccacgcgtccgggatttcgacattgctgggccttccatccggggtgctctggtgctaggttacgagggctggctggccggctaccagatgaattttgagactgcaaaatcccgagtgacccagagcaactttgcagttggctacaagactgatgaattccagcttcacactaatgtgaatgacgggacagagtttggcggctccatttaccagaaagtgaacaagaagttggagaccgctgtcaatcttgcctggacagcaggaaacagtaacacgcgcttcggaatagcagccaagtatcagattgaccctgacgcctgcttctcggctaaagtgaacaactccagcctgataggtttaggatacactcagactctaaagccaggtattaaactgacactgtcagctcttctggatggcaagaacgtcaatgctggtggccacaagcttggtctaggactggaatttcaagcataaatgaatactgtacaattgtttaattttaaactattttgcagcatagctaccttcagaatttagtgtatcttttaatggtgtatgtctggggatgcaagtattgctaaaatatgttagccctccaggttaaagttgnattcagcttttaaaatgttaccccttcccagaggtacagaaagaaacctattttccaaaaaaaggtccttcagtggtgactccggagaactggtgggcccttgagatgccggttccttttcttcgactgggtgccgcggaaccgtattgtgcccgtggcactccttgcgtctgcagcgatcgcggtcgggatcacctcggccccccatgtggagcccctcggtcgcaccccccgcggggttgaggcttgcgtccccccttccttccagccgggggcgtcttccccgggcggcgcgacgcccgtttcccatgcgcctcgtgcagctgtcttgattctttgtccttccc

SEQ ID NO: 162990 - DNA, 885 bp, Homo Sapiens
ctcctggctcggctccctgcctccgcgtcgcagcccccgccgtagccgcctccgagcccgccgccacatcctctgagcagaagatggctgtgccacccacgtatgccgatcttggcaaatctgccagggatgtcttcaccaagggctatggatttggcttaataaagcttgatttgaaaacaaaatctgagaatggattggaatttacaagctcaggctcagccaacactgagaccaccaaagtgacgggcagtctggaaaccaagtacagatggactgagtacggcctgacgtttacagagaaatggaataccgacaatacactaggcaccgagattactgtggaagatcagcttgcacgtggactgaagctgaccttcgattcatccttctcacctaacactgggaaaaaaaatgctaaaatcaagacagggtacaagcgggagcacattaacctgggctgcgaccatggatttcgacattgctgggccttccatccggggcgctctggtgctaggttacgagggctggctggccggctaccagatgaattctgagactgcaaaatcccgagtgacccagagcaactttgcagttggctacaagactgatgaaattccagctttcacactaaatgtgaatgaccggacagagtttggcggctccatttaccacaaagtgaaacaaaaagtggagaccgctgtcaatcttgccctggacagcaggacaacagtaacacgcgcttcggaatagcagccaagtatcagattgaccctgacgcctgcttctcgggtaaagtggaacaattccagcctgataggtttagggatacactcaggattctaaaggccaggtattaactggcctgttcggtctttgggtggc

SEQ ID NO: 162991 - DNA, 961 bp, Homo Sapiens
aaccccctccagggtgggccctgggtttgggggccctttgtgttgtttccaagcccgccccgggaaagcccagagtttcaaaagccttccctcccacccggaaattttccccatcccattttcttggggggcccagttttcaagaaggattcagaacccccttcccagaaagctgtttccacattcaaacccccctttgccctggctggaggtaccccggagtactcggggtccccctttctgcctggcctgcggctggggggcccctgggcccttcagccccttgacaggaaggtggaccccccctgcaaaaggaagttgcaggagacgcctgaagggggctgctggggagcgccgacaagggcagcttcgaggtggccacgcagtatggctgggtgctggatgctgaggtgctgctggacagtgagggcgagtttctgcccgtaagggactttgtggcacctcaccttgcccagccaacatgggagccacgtcaccacctccacgggtctatagaggctagcgttccttgcggtgggagttccccaacttcaacagccggaagcaaggacttgctgggtcgctttgttctggcccggcgacacatagtggctgcaggcttcctgatagtggacgtcccattctatgagtggctggaactcaagtctgaatggcagaaaggcgcctacctcaaggacaagatgcgcaaagcggtggctgaggagctggccaagtgacttgtgccagcagcatggactgcgtgcctctccgccggaggtctagctgtgggcggccaagaagggtcacccttgaggacaaacctctgtgcaggaccttggccagagtggggagggtggccagccactctgagggacagaacgtcctcttgtgtataataaacctttaattttggtgttggacccctggggccttcccaggcttggtcaccctctgcactgtc

SEQ ID NO: 162992 - DNA, 760 bp, Homo Sapiens
gcatcaaccagaaagtcagctttattagcccaccaccagcagaggagcaggggagatagctgggaactgcgccaggagagcagggtcctgacccgggccttcaggaggtgaggccagctggtgggcaggaggctgtggtagaggcagctcagttctaggagctctggccctggctgaagctggatgagctctgctccttgaggatgggccgggtctgacggctcgaagaggacgaggaggaggtgaagacctcgcgggaagaataggattggccagatgcttgctgggaggaaaggtgggcatcctcgccctccagcaggcggcggtaggtggcaatctcctgctccagccgcgtcttcacatccagcaagatctggtactcctggctctgctgctccatctcacagcgtagctgggccagctgctcctccacactgccaatcagtccctggatctgggacagctgcatgcagtagcggcctttggtctcctccaggctgttctccagggatgctttcatgctgagctgggactgcaaaatgggctgcgcattctcaatggtggccgcaatgatctcctccctcatgttctcgattctctctgcatgcgtactgtcttggcagagctcgctgtgccacatgcctctggtaccagtcacggatcttcacttccaggtcggcgtaggcctcctccagagcacgcaccttgtccaggtaggaggccaggcggtcatagaggttctgcatggtcaccttctcac

SEQ ID NO: 162993 - DNA, 1085 bp, Homo Sapiens
gacttcaggctcaagtatgagaatgagctggccctgcgccagggcgttgaggctgacatcaacggcttgcgccgagtcctggatgagctgaccctggccaggactgacctggagatgcagatcgagggcctgaatgaggagctagcctacctgaagaagaatccacgaagaggagatgaaggagttcagcagccagctggccggccaggtcaatgtggagatggacgcagcaccgggtgtggacctgacccgtgtgctggcagagatgagggagcagtacgaggccatggcggagaagaaccgccgggatgtcgaggcctggttcttcagcaagactgaggagctgaacaaagaggtggcctccaacacagaaatgatccagaccagcaagacggagatcacagacctgagacgcacgatgcaggagctggagatcgagctgcagtcccagctcagcatgaaagctgggctggagaactcactggccgagacagagtgccgctatgccacgcagctgcagcagatccaggggctcattggtggcctggaggcccagctgagtgagctccaatgcgagatggaggctcagaaccaggagtacaagatgctgcttgacataaagacacggctggagcaggagatcgctacttaccgcagcctgctcgagggccaggatgccaagatggctggcattggcatcagggaagcctcttcaggaggtggtggtagcagcagcaatttccacatcaatgtagaagagtcagtggatggacaggtggtttcttcccacaagagagaaatctaagtgtctattgcaggagaaacgtcccttgccactccccactctcatcaggccaagtggaggactggccagagggcctgcacatgcaaactccagtccctgccttcagagagctgaaaagggtccctcggtcttttatttcagggctttgcatgcgctctattccccctctgcctctccccaccttctttggagcaaggagatgcagctgtattgtgtaacaagctcatttgtacagtgtctgttcatgtaataaagaattacttttccttttgcaaatatc

SEQ ID NO: 162994 - DNA, 448 bp, Homo Sapiens
cggccagatccaggagatgattggcagcgtggaggagcagctggcccagctccgctgcgaaatggagcagcagaaccaggagtacaagatcctgctggacgtgaagacgcggctggagcaggagatcgccacctaccgccgcctgctggaagcgaggacgcccacctctcctcctcccagttctcctctggatcgcagtcatccagagatgtgacctcctccagccgccaaatccgcaccaaggtcatggatgtgcacgatggcaaggtggtgtccacccacgagcaggtccttcgcaccaagaactgaggctgcccagccccgctcagcctaggaggccccccgtgtggacacagatcccactggaagatcccctctcctgcccaagcacttcacagctggaccctgcttcaccctcaccccctcctggcaatcaatacagcttcat

SEQ ID NO: 162995 - DNA, 798 bp, Homo Sapiens
gctacacaacttggggcccctctcctctccagcccttctcctgtgtgcctgcctcctgccgccgccaccatgaccacctccatccgccagttcacctcctccagctccatcaagggctcctccggcctggggggcggctcgtcccgcacctcctgccggctgtctggcggcctgggtgccggctcctgcaggctgggatctgctggcggcctgggcagcaccctcgggggtagcagctactccagctgctacagctttggctctggtggtggctatggcagcagctttgggggtgttgatgggctgctggctggaggtgagaaggccaccatgcagaacctcaatgaccgcctggcctcctacctggacaaggtgcgtgccctggaggaggccaacactgagctggaggtgaagatccgtgactggtaccagaggcaggccccggggcccgcccgtgactacagccagtactacaggacaattgaggagctgcagaacaagatcctcacagccaccgtggacaatgccaacatcctgctacagattgacaatgcccgtctggctgctgatgacttccgcaccaagtttgagacagagcaggccctgcgcctgagtgtggaggccgacatcaatggcctgcgcagggtgctggatgagctgaccctggccagagccgacctggagatgcagattgagaacctcaaggaggagctggcctacctgaagaagaaccacgaggaggagatgaacgccctgcgaggccaagtggggtggtgaagatcaaggtggaaaatggac

SEQ ID NO: 162996 - DNA, 1073 bp, Homo Sapiens
ggcctgggtggcgaattcggcacgagggcttctgagacagggttgctccgtccgtgctccgcctcgccatgacttcctacagctatcgccagtcgtcggccacgtcgtccttcggaggcctgggcggcggctccgtgcgttttgggccgggggtcgcttttcgcgcgcccagcattcacgggggctccggcggccgcggcgtatccgtgtcctccgcccgctttgtgtcctcgtcctcctcggggggctacggcggcggctacggcggcgtcctgaccgcgtccgacgggctgctggcgggcaacgagaagctaaccatgcagaacctcaacgaccgcctggcctcctacctggacaaggtgcgcgccctggaggcggccaacggcgagctagaggtgaagatccgcgactggtaccagaagcaggggcctgggccctcccgcgactacagccactactacacgaccatccaggacctgcgggacaagattcttggtgccaccattgagaactccaggattgtcctgcagatcgacaacgcccgtctggctgcagatgacttccgaaccaagtttgagacggaacaggctctgcgcatgagcgtggaggccgacatcaacggcctgcgcagggtgctggatgagctgaccctggccaggaccgacctggagatgcagatcgaaggcctgaaggaagagctggcctacctgaagaagaaccatgaggaggaaatcagtacgctgaggggccaagtgggaggccaggtcagtgtggaggtggattccgctccgggcaccgatctcgccaagatcctgagtgacatgcgaagccaatatgaggtcatggccgagcagaaccggaaggatgctgaaagcctggttcaccagcccggactgaagaaattgaaccggggaggtcgcctggccaacacggaacaacttccaaaagaacagggtccgagggttactgacctggcgggccaacctttcagggtcctttgaaattgagctgccgtccccagcttgaacattgaaaactgcccttgggaaaaacaccctggccaaaaaaccgag

SEQ ID NO: 162997 - DNA, 698 bp, Homo Sapiens
gcctgagtggcgatttcagacgaggcagcttctgagacagtgttgctccgtccgtgctccgcctcgccatgacttcctacagctatcgccagtcgtcggccacgtcgtccttcggaggcctgggcggcggctccgtgcgttttgggccgggggtcgcttttcgcgcgcccagcattcacgggggctccggcggccgcggcgtatccgtgtcctccgcccgctttgtgtcctcgtcctcctcggggggctacggcggcggctacggcggcgtcctgaccgcgtccgacgggctgctggcgggcaacgagaagctaaccatgcagaacctcaacgaccgcctggcctcctacctggacaaggtgcgcgccctggaggcggccaacggcgagctagaggtgaagatccgcgactggtaccagaagcaggggcctgggccctcccgcgactacagccactactacacgaccatccaggacctgcgggacaaaattcttggtgccacctttgagaactccaggattgtcctgcagatcgaccacgcccgtctggctggagatgaattccgaaaccagtttgaaacggaacaagctctgcgcatgatcgtggaaggcccaaatcaacggcctgcccagggtgcttggatgaactgaacctgaccagggacccaactggcagatgcaaaatccaaggcctgaaag

SEQ ID NO: 162998 - DNA, 999 bp, Homo Sapiens
tgctccaggcggcgacttgatgtccatgagccgctggtactcctgattctgccgctcactatcagctcgcacatcgcccagctgggcttcaataccgctgatcagcgcctggatatgcgccagctgggctccaaagcgcgcctccgtttctgccagtgtgtcttccaaggcagctttcatgctcagctgtgactgcagctcaatctcaagaccctgaagggtgcgccgcaggtcagtaacctcggacctgctcatctggagctgctccgtgtggccagcgacctcccggttcaattcttcagtccggctggtgaaccaggcttcagcatccttccggttctgctcggccatgacctcatattggcttcgcatgtcactcaggatcttggcgagatcggtgcccggagcggaatccacctccacactgacctggcctcccacttggcccctcagcgtactgatttcctcctcatggttcttcttcaggtaggccagctcttccttcaggccttcgatctgcatctccaggtcggtcctggccagggtcagctcatccagcaccctgcgcaggccgttgatgtcggcctccacgctcatgcgcagagcctgttccgtctcaaacttggttcggaagtcatctgcagccagacgggcgttgtcgatctgcaggacaatcctggagttctcaatggtggcaccaagaatcttgtcccgcaggtcctggatggtcgtgtagtagtggctgtagtcgcgggagggcccaggcccctgcttctggtaccagtcgcggatcttcacctctagctcccgttggcgcctccagggcgcgcaccttgtccaggtaggaggccaggcggtcgttgaggttctgcatggttagcttctcgttgcccgccagcagcccgtcggacgcggtcaggacgccgccgtagccgccgccgtagccccccgaggaggacgaggacacaaagcgggcggaggacacggatacgccgcggc

SEQ ID NO: 162999 - DNA, 862 bp, Homo Sapiens
ccgggggtaaggggtcccttccttcccatccctctaccccagaagacaccctccaaaaggacagcagaagccccagagcctgctgcctcagaggaccttggaggcagacaaattgttgtagtgatcttcctgtccctcgagcaggctgcggtaggtggcaatctcctgctccagccgcgacttgatgtccatgagccgctggtactcctgattctgccgctcactatcagctcgcacatcgcccagctgggcttcaataccgctgatcagcgcctggatatgcgccagctgggctccaaagcgcgcctccgtttctgccagtgtgtcttccaaggcagctttcatgctcagctgtgactgcagctcaatctcaagaccctgaagggtgcgccgcaggtcagtaacctcggacctgctcatctggagctgctccgtgtggccagcgacctcccggttcaattcttcagtccggctggtgaaccaggcttcagcatccttccggttctgctcggccatgacctcatattggcttcgcatgtcactcaggatcttggcgagatcggtgcccggagcggaatccacctccacactgacctggcctcccacttggcccctcagcgtactgatttcctcctcatggttcttcttcaggtaggccagctcttccttcaggccttcgatctgcatctccaggtcggtcctggccagggtcagctcatccagcaccctgcgcaggccgttgatgtcggcctccacgctcatgcgcagagcctgttccgtctcaaacttggttcggaagtcatctgcagccagacgggcgtgtcgattcctcgtcggaatcgccacccaggcctcgcttcct

SEQ ID NO: 163000 - DNA, 718 bp, Homo Sapiens
ggggctcctcccgcgaatcgcagcttctgagacagggttgctccgtccgtgctccgcctcgccatgacttcctacagctatcgccagtcgtcggccacgtcgtccttcggaggcctgggcggcggctccgtgcgttttgggccgggggtcgcttttcgcgcgcccagcattcacgggggctccggcggccgcggcgtatccgtgtcctccgcccgctttgtgtcctcgtcctcctcggggggctacggcggcggctacggcggcgtcctgaccgcgtccgacgggctgctggcgggcaacgagaagctaaccatgcagaacctcaacgaccgcctggcctcctacctggacaaggtgcgcgccctggaggcggccaacggcgagctagaggtgaagatccgcgactggtaccagaagcaggggcctgggccctcccgcgactacagccactactacacgaccatccaggacctgcgggacaagattcttggtgccaccattgagaactccaggattgtcctgcagatcgacaacgcccgtctggctgcagatgacttccgaaacaagtttgagacggaacaggctctgcccatgaacgtggagggcgacatcaacggcctgcccagggtgctggatgaactgaccctgggcaagacccaacctggaaaagcaaaacgaaagggctgaaaggaaaaaactggcctacctgaaaaaagaa

SEQ ID NO: 163001 - DNA, 864 bp, Homo Sapiens
ttggaggcagacaaattgttgtagtgatcttcctgtccctcgagcaggctgcggtaggtggcaatctcctgctccagccgcgacttgatgtccatgagccgctggtactcctgattctgccgctcactatcagctcgcacatcgcccagctgggcttcaataccgctgatcagcgcctggatatgcgccagctgggctccaaagcgcgcctccgtttctgccagtgtgtcttccaaggcagctttcatgctcagctgtgactgcagctcaatctcaagaccctgaagggtgcgccgcaggtcagtaacctcggacctgctcatctggagctgctccgtgtggccagcgacctcccggttcaattcttcagtccggctggtgaaccaggcttcagcatccttccggttctgctcggccatgacctcatattggcttcgcatgtcactcaggatcttggcgagatcggtgcccggagcggaatccacctccacactgacctggcctcccacttggcccctcagcgtactgatttcctcctcatggttcttcttcaggtaggccagctcttccttcaggccttcgatctgcatctccaggtcggtcctggccagggtcagctcatccagcaccctgcgcaggccgttgatgtcggcctccacgctcatgcgcagagcctgttccgtctcaaacttggttcggaagtcatctgcagccagacgggcgttgtcgatctgcaggacaatcctggagttctcaatggtggcaccaagaatcttgtcccgcaggtcctggatggtcgtgtagtagtggctgtagtcgcgggagggcccaggcccctgcttctggtaccagtcgcggatcttc

SEQ ID NO: 163002 - DNA, 932 bp, Homo Sapiens
  misc_feature (172)..(172): n is a, c, g, or t
ggggcccaggcgggcctccccgggttcaaatttcttccaatgccggggttggtgaaaccagggtttcaggcatccttcccggtttctgcttcggcccatgacctcattattgggcttcggcatgtcactcaggattctgggcgagatcggttcccccgaggcgggatcccancttccacactgaacctggcctcccacttggccccctcagcgtactgatttcctcctcatggttcttcttcaggtaggccagctctcccttcaggccttcgatctgcatctccaggtcggtcctggccagggtcagctcatccagcaccctgcgcaggccgttgatgtcggcctccacgctcatgcgcagagcctgttccgtctcaaacttggttcggaagtcatctgcagccagacgggcgttgtcgatctgcaggacaatcctggagttctcaatggtggcaccaagaatcttgtcccgcaggtcctggatggtcgtgtagtagtggctgtagtcgcgggagggcccaggcccctgcttctggtaccagtcgcggatcttcacctctagctcgccgttggccgcctccagggcgcgcaccttgtccaggtaggaggccaggcggtcgttgaggttctgcatggttagcttctcgttgcccgccagcagcccgtcggacgcggtcaggacgccgccgtagccgccgccgtagccccccgaggaggacgaggacacaaagcgggcggaggacacggatacgccgcggccgccggagcccccgtgaatgctgggcgcgcgaaaagcgacccccggcccaaaacgcacggagccgccgcccaggcctccgaaggacgacgtggccgacgactggcgatagctgtaggaagtcatggcgaggcggagcacggacggagcaaccctggtctcagaagctgcgatt

SEQ ID NO: 163003 - DNA, 715 bp, Homo Sapiens
caggggttcgggttccccctggggccccaggggggttttaaagttttccatttcccgaggcccacccctttggggccaggggcccgttttggaattgttcggggccctttcccaccggttttaattgggggccagaaggcctggtttcccgttcttcaaaactgggttttgggaagtcaatctgcaggccagacggggggttgtcgattctgcaggaccaatcctggagttctcaaatggtggcaccaagaatcttgtcccgcaggtcctggatggtcgtgtagtagtggctgtagtcgcgggagggcccaggcccctgcttctggtaccagtcgcggatcttcacctctagctcgccgttggccgcctccagggcgcgcaccttgtccaggtaggaggccaggcggtcgttgaggttctgcatggttagcttctcgttgcccgccagcagcccgtcggacgcggtcaggacgccgccgtagccgccgccgtagccccccgaggaggacgaggacacaaagcgggcggaggacacggatacgccgcggccgccggagcccccgtgaatgctgggcgcgcgaaaagcgacccccggcccaaaacgcacggagccgccgcccaggcctccgaaggacgacgtggccgacgactggcgatagctgtaggaagtcatggcgaggcggagcacggacggagcaaccctggtctcagaagc

SEQ ID NO: 163004 - DNA, 919 bp, Homo Sapiens
tttgccccattcggcccaaggtgggggcttgcaaattaccgcgtggatccagcggccctggaatatggcgccccagcttggggctcccaaagccgcccccttccggttttgtgcccagggggttcttcccaagggcaagcttttcatgttccagctggggactgcaggttccatttccaaggcccctgaaagggtgccgccggcaggttcagtaaccttcgggacctgctcatctggaggctgctccgttgtggccaggcgacctccccggttcaattcttcagtccggctggtgaaccaggcttcagcatccttccggttctgctcggccatgacctcatattggcttcgcatgtcactcaggatcttggcgagatcggtgcccggagcggaatccacctccacactgacctggcctcccacttggcccctcagcgtactgatttcctcctcatggttcttcttcaggtaggccagctcttccttcaggccttcgatctgcatctccaggtcggtcctggccagggtcagctcatccagcaccctgcgcaggccgttgatgtcggcctccacgctcatgcgcagagcctgttccgtctcaaacttggttcggaagtcatctgcagccagacgggcgttgtcgatctgcaggacaatcctggagttctcaatggtggcaccaagaatcttgtcccgcaggtcctggatggtcgtgtagtagtggctgtagtcgcgggagggcccaggcccctgcttctggtaccagtcgcggatcttcacctctagctcgccgttggccgcctccagggcgcgcaccttgtccaggtaggaggccaggcggtcgttgaggttctgcatggttagcttctcgttgcccgccagcagcccgtcggacgcggtcaggacgccgccgtagccg

SEQ ID NO: 163005 - DNA, 877 bp, Homo Sapiens
tcctacagctatcgccagtcgtcggccacgtcgtccttcggaggcctgggcggcggctccgtgcgttttgggccgggggtcgcttttcgcgcgcccagcattcacgggggctccggcggccgcggcgtatccgtgtcctccgcccgctttgtgtcctcgtcctcctcggggggctacggcggcggctacggcggcgtcctgaccgcgtccgacgggctgctggcgggcaacgagaagctaaccatgcagaacctcaacgaccgcctggcctcctacctggacaaggtgcgcgccctggaggcggccaacggcgagctagaggtgaagatccgcgactggtaccagaagcaggggcctgggccctcccgcgactacagccactactacacgaccatccaggacctgcgggacaagattcttggtgccaccattgagaacttcaggattgttctgcagatcgacaacgcccgtcttgctgcagatgactttcgaaccaagtttgagacggaacaggcttttcgcatgagcgtggaggccgacatcaacggcctgcgcagggtgctggatgagctgaccctggccaggaccgacctggagatgcagatcgaaggcctgaaggaagagctggcctacctgaagaagaaccatgaggaggaaatcagtacgctgaagggccaagtgggagggccaggtccagtgtggaagctggatcccggctccgggcacccgatccccccaaggatcctgaagggacattgcgcaagccaatatggaaggccatgggccgaaccaaaaacccggaaaggatagctggaaaccctgggtttcaccccaacccgggaaatggaaaaaaattggaaacccgggggagggtccc

SEQ ID NO: 163006 - DNA, 930 bp, Homo Sapiens
tgccaagggggtatgcataggaatcgcggataactacgattggcggagtatgggagcccgagtggcgctgtgatattgagggcatttgcagacagggtccggctgcaggaatttcttggggggggatatcgaatacccccgagagcgggaattcacaccttcccacagctgagcgtgggccttcccacttggcccccttcagggttactgatttccctcctccatggttcttcttcagggtaggccagctctttccttcaggccttcgatctgcatctccaggtcggtcctggccagggtcagctcatccagcaccctgcgcaggccgttgatgtcgccctccacgctcatgcgcagagcctgttccgtctcaaacttggttcggaagtcatctgcagccagacgggcgttgtcgatctgcaggacaatcctggagttctcaatggtggcaccaagaatcttgtcccgcaggtcctggatggtcgtgtagtagtggctgtagtcgcgggagggcccaggcccctgcttctggtaccagtcgcggatcttcacctctagctcgccgttggccgcctccagggcgcgcaccttgtccaggtaggaggccaggcggtcgttgaggttctgcatggttagcttctcgttgcccgccagcagcccgtcggacgcggtcaggacgccgccgtagccgccgccgtagccccccgaggaggacgaggacacaaagcgggcggaggacacggatacgccgcggccgccggagcccccgtgaatgctgggcgcgcgaaaagcgacccccggcccaaaacgcacggagccgccgcccaggcctccgaaggacgacgtggccgacgactggcgatagctgtaggaagtcatggcgaggcggagcacggacggagcaaccctggtctcagaagctgcgattcg

SEQ ID NO: 163007 - DNA, 794 bp, Homo Sapiens
gccaacggcgagctagaggtgaagatccgcgactggtaccagaagcaggggcctgggccctcccgcgactacagccactactacacgaccatccaggacctgcgggacaagattcttggtgccaccattgagaactccaggattgtcctgcagatcgacaacgcccgtctggctgcagatgacttccgaaccaagtttgagacggaacaggctctgcgcatgagcgtggaggccgacatcaacggcctgcgcagggtgctggatgagctgaccctggccaggaccgacctggagatgcagatcgaaggcctgaaggaagagctggcctacctgaagaagaaccatgaggaggaaatcagtacgctgaggggccaagtgggaggccaggtcagtgtggaggtggattccgctccgggcaccgatctcgccaagatcctgagtgacatgcgaagccaatatgaggtcatggccgagcagaaccggaaggatgctgaagcctggttcaccagccggactgaagaattgaaccgggaggtcgctggccacacggagcagctccagatgagcaggtccgaggttactgactgcggcgcacccttcagggtcttgagattgagctgcagtcacagctgagcatgaaagctgccttggaagacacactggcagaaacggaggcgcgctttggagcccagtgcgcatatccaggcgctgatcagcgggtattgaagccccacctggggcaatgtgccgaactgaataagtgagcgggccagaaatcaggaggtacccgccgg

SEQ ID NO: 163008 - DNA, 713 bp, Homo Sapiens
gtggcgattctccacgaggggggtacggcggcggctacggcggcgtcctgaccgcgtccgacgggctgctggcgggcaacgagaaagctaaccatgcaaaacctcaacgaccgcctggcctcctacctggacaaggtgcgcgccctggaggcggccaacggcgagctagaggtgaagatccgcgactggtaccagaagcaggggcctgggccctcccgcgactacagccactactacacgaccatccaggacctgcgggacaagattcttggtgccaccattgagaactccaggattgtcctgcagatcgacaacgcccgtctggctgcagatgacttccgaaccaagtttgagacggaacaggctctgcgcatgagcgtggaggccgacatcaacggcctgcgcagggtgctggatgagctgaccctggccaggaccgacctggagatgcagatcgaaggcctgaaggaagagctggcctacctgaagaagaaccatgaggaggaaatcagtacgctgaggggccaagtgggaggccaggtcagtgtggaggtggattccgctccgggcaccgatctcgccaagatcctgagtgacatgcgaagccaatatgaggtcatggccgagcagaaccggaaggatgctgaagcctggttcaccagcgcggaccgaacgaattgaaccggagaggtcgcttggccacacgagagcag

SEQ ID NO: 163009 - DNA, 589 bp, Homo Sapiens
  misc_feature (454)..(454): n is a, c, g, or t
ccagccctggaggctgggatctgccgctccctccagccaccagggggcaggagtgcactacctgctgtcagtcaccagagtggccgctcagtgcccagcccgccagcctcgctcttggaggctgctctttatcctgcctgtggttttcagctcagagctggacttctatttataagttacctgtatttatatttatatgcccgctctcatggtgaaggctggacaaggtgctcctctggcccctccttcttacctcagatgcctgaacagaacaaggcaaacccgtagcagcctctcaggagctgacaggtcctctttcggggctcaggagggtgggcacacacccagcggcctgcagagtaagcttattacccacaactgtgcccgctttgtgcttctaaggtgcacacctagcctaggtgagacactgcagccaggcaaccaccgacacacngccccttctcaaagccagaggtgagtggggcaggtgcccggggctgggtgagtggaattaggacacacacaggcttgggcttcaagttcattttattgatgcattggttggacacaataaaacccacaattgtta

SEQ ID NO: 163010 - DNA, 528 bp, Homo Sapiens
aagtaagcgactttggtctcctccaggctgttctcccagggatgctttcatgctgagctgggactgcagctcaatctccaggttctgcatggtgcgccggagctccgagatctcgctcttgccgctctgcaccagctcgctgttggtggccaactcgcggttcagctcctctgtcttggtgaagaaccattcctcggcaatcttgcggttcttctctgccatcttctcatactggtcacgcatctcgttcagaatgcggctcaggtccacgccaggtgcagcgtccatctccacattgacatctccacccacctggcctctcagggcattcatctcctcctcgtggttcttcttcaggtaggccagctcctccttcaggctctcaatctgcatctccaggtcagctctggccagggtcagttcgtccagcaccctgcgcaggccattgatgtcggcttccacactcatgcgcaggttcaactctgtctcatacttggtgcggaagtcatccgcggccagacgggcatt

SEQ ID NO: 163011 - DNA, 417 bp, Homo Sapiens
ggcaaaacggggaggttcccccaactcctaaagccctactcccttctctctctagccctccttcaggaggtggtggtagcagcagcaatttcccacatcaatgtagaagagtcagtggatggacaggtggtttcttcccacaagagagaaatctaagtgtctattgcaggagaaacgtcccttgccactccccactctcatcaggccaagtggaggaactgccagagggcctgcacatgcaaactccagtccctgccttcagagagctgaaaagggtccctcggtcttttatttcagggctttgcatgcgctctattccccctctgcctctccccaccttctttggagcaaggagatgcagctgtattgtgtaacaagctcatttgtacagtgtctgttcatgtaataaagaattac

SEQ ID NO: 163012 - DNA, 401 bp, Homo Sapiens
  misc_feature (28)..(28): n is a, c, g, or t
tctcgttccaaaaagcggctcaggtccnacgcccaggtgcagcgtccatctccacattgaacatctccaccaacctggcctctcagggcattcatctcctccctcgtggttcttcttcaggtaggccagctcctccttcaggctctcaatctgcatctccaggtcagctctggccagggtcagttcgtccagcaccctgcgcaggccattgatgtcggcttccacactcatgcgcaggttcaactctgtctcatacttggtgcggaagtcatccgcggccagacgggcattgtcaatctgcagaaggacattggcattgtccactgtggctgtgagaatcttgttcctcaggtcctcaatggtcttgaagtagggactgtagtctttgatctcagcaggcc

SEQ ID NO: 163013 - DNA, 1304 bp, Homo Sapiens
tgctcgtgtggtagctagtactccgagctgctacagcattaggctctggatggtgactatggtgagcggctttgggggtgtcgatgggctgctggctggaggtgagaaggccaccatgcagaacctcaatgaccgcctggcctcctacctggacaaggtgcgtgccctggaggaggccaacactgagctggaggtgaagatccgtgactggtaccagaggcaggccccggggcccgcccgtgactacagccagtactacaggacaattgaggagctgcagaacaagatcctcacagccaccgtggacaatgccaacatcctgctacagattgacaatgcccgtctggctgctgatgacttccgcaccaagtttgagacagagcaggccctgcgcctgagtgtggaggccgacatcaatggcctgcgcagggtgctggatgagctgaccctggccagagccgacctggagatgcagattgagaacctcaaggaggagctggcctacctgaagaagaaccacgaggaggagatgaacgccctgcgaggccaggtgggtggtgagatcaatgtggagatggacgctgccccaggcgtggacctgagccgcatcctcaacgagatgcgtgaccagtatgagaagatggcagagaagaaccgcaaggatgccgaggattggttcttcagcaagacagaggaactgaaccgcgaggtggccaccaacagtgagctggtgcagagtggcaagagtgagatctcggagctccggcgcaccatgcaggccttggagatagagctgcagtcccagctcagcatgaaagcatccctggagggcaacctggcggagacagagaaccgctactgcgtgcagctgtcccagatccaggggctgattggcagcgtggaggagcagctggcccagcttcgctgcgagatggagcagcagaaccaggaatacaaaatcctgctggatgtgaagacgcggctggagcaggagattgccacctaccgccgcctgctggagggagaggatgcccacctgactcagtacaagaaagaaccggtgaccacccgtcaggtgcgtaccattgtggaagaggtccaggatggcaaggtcatctcctcccgcgagcaggtccaccagaccacccgctgaggactcagctaccccggccggccacccaggaggcagggaggcagccgccccatctgccccacagtctccggcctctccagcctcagccccctgcttcagtcccttccccatgcttccttgcctgatgacaataaagcttgttgactcagct

SEQ ID NO: 163014 - DNA, 513 bp, Homo Sapiens
  misc_feature (37)..(37): n is a, c, g, or t
  misc_feature (156)..(156): n is a, c, g, or t
gatgaaagcgatgcagatccgctatccgtcgacgganaagcggatctgccagtgtgtcttccaaggcagctttcatgctcaagctgtgactgcagctcaatctcaagaccctgaagggtgcgccgcaggtcagtaacctcggacctgctcatctgnagctgctccgtgtggccagcgacctcccggttcaattcttcagtccggctggtgaaccaggcttcagcatccttccggttctgctcggccatgacctcatattggcttcgcatgtcactcaggatcttggcgagatcggtgcccggagcggaatccacctccacactgacctggcctcccacttggcccctcagcgtactgatttcctcctcatggttcttcttcaggtaggccagctcttccttcaggccttcgatctgcatctccaggtcggtcctggccagggtcagctcatccagcaccctgcgcaggccgttgatgtcggcctccacgctcatgcgcagatccgctatccgt

SEQ ID NO: 163015 - DNA, 387 bp, Homo Sapiens
  misc_feature (251)..(251): n is a, c, g, or t
  misc_feature (256)..(256): n is a, c, g, or t
  misc_feature (299)..(299): n is a, c, g, or t
  misc_feature (305)..(305): n is a, c, g, or t
  misc_feature (326)..(326): n is a, c, g, or t
  misc_feature (335)..(335): n is a, c, g, or t
  misc_feature (364)..(364): n is a, c, g, or t
aagaattgatcaggaggtcgcgtggccacacgaagcacctcaagatgagcaggtccgaggttactgacctgcggcgcaccctccagggtctttgagattgagctgcagtcacagctgagcatggtatgtgtccccccaccgccgccgcttccctgtgcaattcacacttatacccttgcagcctagggcagcctggccggtggctgtgcccatgccctctccgggaaccaggctctgctgagtcacaaccncgctntccctatcctcagaaagctgccttggaagacacactggcaganacggangcgcgctttggagcccagctngcgcatatncaggcgctgatcagcggtatttgaaggcnagttggggaattgttgcggaggt

SEQ ID NO: 163016 - DNA, 931 bp, Homo Sapiens
  misc_feature (448)..(449): n is a, c, g, or t
  misc_feature (491)..(491): n is a, c, g, or t
  misc_feature (530)..(530): n is a, c, g, or t
acaacgcccgtctggctgcagatgacttccgaaccaagtttgagacggaacaggctctgcgcatgagcgtggaggccgacatcaacggcctgcgcagggtgctggatgagctgaccctggccaggaccgacctggagatgcagatcgaaggcctgaaggaagagctggcctacctgaagaagaaccatgaggaggaaatcagtacgctgaggggccaagtgggaggccaggtcagtgtggaggtggattccgctccgggcaccgatctcgccaagatcctgagtgacatgcgaagccaatatgaggtcatggccgagcagaaccggaaggatgctgaagccaagttcaccagccggactgaagaattgaaccgggaggtcgctggccacacggagcagctccagatgagcaggtccgaggttactgacctgcggcgcacccttcagcnngtcttgagattgagctgcagtcacagctgagcatgaaagctngccttggaagacacactggcagaaacggaggcgcgcttntggagcccagtctggcgcatatccaggcgctgatcagcggtattgaagcccagctgggcgatgtgcgagctgatagtgagcggcagaatcaggagtaccagcggctcatggacatcaagtccgcggctggagcaggagattgccacctaccccagcctgcctcgaggaacgggaagatcactacaaccattttgtctgccctccaaggtcctcctgagggcagcaagcctctgggggcttctgcttgtccctttgggaggggtggccttctggggtaaaggggatggggaaaggaaagggacccctttaccccccgggttctttctccttggcacctggccaatcaaaaattttatgggttcccaaggggaaaattacacttcttcccccccgcccctctc

SEQ ID NO: 163017 - DNA, 1130 bp, Homo Sapiens
  misc_feature (1048)..(1048): n is a, c, g, or t
ccgggggtcgcttttcgcgcgcccagcattcacgggggctccggcggccgcggcgtatccgtgtcctccgcccgctttgtgtcctcgtcctcctcggggggctacggcggcggctacggcggcgtcctgaccgcgtccgacgggctgctggcgggcaacgagaagctaaccatgcagaacctcaacgaccgcctggcctcctacctggacaaggtgcgcgccctggaggcggccaacggcgagctagaggtgaagatccgcgactggtaccagaagcaggggcctgggccctcccgcgactacagccactactacacgaccatccaggacctgcgggacaagattcttggtgccaccattgagaactccaggattgtcctgcagatcgacaacgcccgtctggctgcagatgacttccgaaccaagtttgagacggaacaggctctgcgcatgagcgtggaggccgacatcaacggcctgcgcagggtgctggatgagctgaccctggccaggaccgacctggagatgcagatcgaaggcctgaaggaagagctggcctacctgaagaagaaccatgaggaggaaatcagtacgctgaggggccaagtgggaggccaggtcagtgtggaggtggattccgctccgggcaccgatctcgccaagatcctgagtgacatgcgaagccaatatgaggtcatggccgagcagaaccggaaggatgctgaagcctggttcaccagccggactgaagaattgaaccgggaggtcgctggccacacggagcagctccagatgagcaggtccgaagttactgacctgcggcgcacccttcagggtcttgagattgagctgcagtcacagctgagcatgaaagctgccttggaagacacactggcagaaacggaggcgcgctttggagcccagctggcgcatatccaggcgctgatcagcggtattgaagcccagctgggcgatgtgcgagctgatagtgagcggcagaatcaggagtaccagcggctcatggacatcaagtcgccgcctggagcangaggattgcaacctaccgcagcctgctcgaagggacagggaaaatcccctaccaccaattttgtcctgcgcttccaagggta

SEQ ID NO: 163018 - DNA, 1380 bp, Homo Sapiens
  misc_feature (918)..(939): n is a, c, g, or t
  misc_feature (983)..(983): n is a, c, g, or t
ccccattggaggacctcccaggtatttgtccatgcaggaacgaacaacgcccccgtctgggctgcagaatgactttccgaccccaaagttggagccggaactaggctcttcagcatgagctttgaggcccatcatcaacgacctgcgcagggtgctggatgagctgaccctggccaggaccgacctggagatgcagatcgaaggcctgaaggaagagctggcctacctgaagaagaaccatgaggaggaaatcagtacgctgaggggccaagtgggaggccaggtcagtgtggaggtggattccgctccgggcaccgatctcgccaagatcctgagtgacatgcgaagccaatatgaggtcatggccgagcagaaccggaaggatgctgaagcctggttcaccagccggactgaagaattgaaccgggaggtcgctggccacacggagcagctccagatgagcaggtccgaggttactgacctgcggcgcacccttcagggtcttgagattgagctgcagtcacagctgagcatgaaagctgccttggaagacacactggcagaaacggaggcgcgctttggagcccagctggcgcatatccaggcgctgatcagcggtattgaagcccagctgggcgatgtgcgagctgatagtgagcggcagaatcaggagtaccagcggctcatggacatcaagtcgcggctggagcaggagattgccacctaccgcagcctgctcgagggacaggaagatcactacaacaatttgtctgcctccaaggtcctctgaggcagcaggctctggggcttctgctgtcctttggagggtgtcttctgggtagagggatgggaaggaagggacccttacccccggctcttctcctgacctgccaataaaaatttatggtccaaggggannnnnnnnnnnnnnnnnnnnnnctcgaggcatctatgtcggatgcggaacctcaagaggtaatganaatggcacgataacaattgtggttttattgggtccaaccaatgcatcaataaatgaacttgaagcccaagcctgtgtgtgtcctaattccactcacccagccccgggcacttgccccactcacctctggttttaaaaaggggcgggggtccggggttgcctggctgcagtgcctcccctaggctagggggtgcccccttaaaaccacaaagcggggcacagttggggggtaaataagctaacctccttcagccccttgggtggtggccccacccttcctgaaccccccaaaaaaaggacctgttcacctccccggggaagggctggtctccgggtttttgccctttggttctcggttccagggctatctttgaggggaaaaaaaggggaagggccca

SEQ ID NO: 163019 - DNA, 888 bp, Homo Sapiens
gcttctgagacagggttgctccgtccgtgctccgcctcgccatgacttcctacagctatcgccagtcgtcggccacgtcgtccgtcggaggcctgggcggcggctccgtgcgttttgggccgggggtcgcttttcgcgcgcccagcattcacgggggctccggcggccgcggcgtatccgtgtcctccgcccgctttgtgtcctcgtcctcctcggggggctacggcggcggctacggcggcgtcctgaccgcgtccgacgggctgctggcgggcaacgagaagctaaccatgcagaacctcaacgaccgcctggcctcctacctggacaaggtgcgcgccctggaggcgccaacgggagctagaggtgaagatccgcgactggtaccagaagcaggggcctgggccttcccgcgactacagccactactacacgaccatccaggacctgcgggacaagattcttggtgccaccattgagaactccaggattgtcctgcagatcgacaatgcccgtctggctgcagatgacttccgaaccaagtttgagacggaacaggctctgcgcatgagcttgggaggccgacattcaacggcctgcgcagggtgctggatgagctgaccctgggccaggaccgacctggagatgcaaatccaaaggcctgaaaggaaaaaactggcctacctgaaagaagaacccatgaaggaggaaaatccgtacccttgagggggccaaagtggggaggcccaaggtcaaaggtgggaagttggattccgcctcccggggaacccgatcttccccaaagaatcctgaagtgaacattgccaaagcccaatatggaggggccatggggcccgacccaaaaacccggaaagggatgcctgtcac

SEQ ID NO: 163020 - DNA, 1124 bp, Homo Sapiens
  misc_feature (700)..(700): n is a, c, g, or t
  misc_feature (705)..(705): n is a, c, g, or t
  misc_feature (1003)..(1003): n is a, c, g, or t
  misc_feature (1027)..(1027): n is a, c, g, or t
  misc_feature (1036)..(1036): n is a, c, g, or t
  misc_feature (1041)..(1041): n is a, c, g, or t
  misc_feature (1046)..(1046): n is a, c, g, or t
  misc_feature (1057)..(1057): n is a, c, g, or t
  misc_feature (1074)..(1074): n is a, c, g, or t
  misc_feature (1104)..(1104): n is a, c, g, or t
tgatgggtcggtgcagactccgggagtcctttgtgattttccccttgggccccataaaattttttattggcaagttcaggagaaaggagcccgggggtaaggggtccccttcctttcccatccctcttcgccagaagacacccttccaaagggccagcagaggccccagagcctgcgccttcagaggggctttggaggcagacaaattgttgtagtgatcttcctgtccctcgagcaggctgcggtaggtggcaatctcctgctccagccgcgacttgatgtccatgagccgctggtactcctgattctgccgctcactatcagctcgcacatcgcccagctgggcttcaataccgctgatcagcgcctggatatgcgccagctgggctccaaagcgcgcctccgtttctgccagtgtgtcttccaaggcagctttcatgctcagctgtgactgcagctcaatctcaagaccctgaagggtgcgccgcaggtcagtaacctcggacctgctcatctggagctgctccgtgtggccagcgacctcccggttcaattcttcagtccggctggtgaaccaggcttcagcatccttccggttctgctcggccatgacctcatattggcttcgcatgtcactcaggatcttggcgagatcggtgcccggagcggaatccacctccacactgacctggcctcccancttgngcccctcagcgtactgatttcctcctcatggttcttcttcaggtaggccagctcttccttcaggccttcgatctgcatctccaggtcggtcctggccagggtcagctcatccagcaccctgcgcaggccgttgatgtcggcctccacgctcatgcgcagagccagttccgtctcaaacctttcaaaggaaatagttgcagccaggcagagcttcctcagcatctctgaagacttccctacctccccagagttcaggagtccataggggggttagcttcaggccatctaggctaaggtnagggcagattctaaaccccccaanccctacccncagtnctggnttcttgcaagnccccaaggacaagaganaatcaattgggttcgggaagttcatcttgnaagcccagacggggcgtttt

SEQ ID NO: 163021 - DNA, 688 bp, Homo Sapiens
  misc_feature (48)..(48): n is a, c, g, or t
  misc_feature (251)..(251): n is a, c, g, or t
caaggctgccaaatcaatctccctggaatctgggccaagctgcaatgnaagtaagcgactttggtctcctccaggctgttctcccagggatgctttcatgctgagctgggactgcagctcaatctccaggttctgcatggtgcgccggagctccgagatctcgctcttgccgctctgcaccagctcgctgttggtggccaactcgcggttcagctcctctgtcttggtgaagaaccattcctcggcatccntgcggttcttctctgccatcttctcatactggtcacgcatctcgttcagaatgcggctcaggtccacgcaaggtgcagcgtccatctccacattgacatctccacccacctggcctctcagggcattcatctcctcctcgtggttcttcttcaggtaggccagctcctccttcaggctctcaatctgcatctccaggtcagctctggccagggtcagttcgtccagcaccctgcgcaggccattgatgtcggcttccacactcatgcgcaggtacaactctgtctcatacttggtgcggaagtcatccgcggccagacgggcattgtcaatctgcagaaggacattggcattgtccactgtggactgtgagaatcttgttcctcaggtcctcaatggtccttgaagtagggactgtagtctttgatctcagcaggcc

SEQ ID NO: 163022 - DNA, 698 bp, Homo Sapiens
  misc_feature (643)..(643): n is a, c, g, or t
  misc_feature (684)..(684): n is a, c, g, or t
ggtgcgcacaacagtgagctggtgcagagtggcaagagtgagatctcggagctccggcgcaccatgcaggccttggagatagagctgcagtcccagctcagcatgaaagcatccctggagggcaacctggcggagacagagaaccgctactgcgtgcagctgtcccagatccaggggctgattggcagcgtggaggagcagctggcccagcttcgctgcgagatggagcagcagaaccaggaatacaaaatcctgctggatgtgaagacgcggctggagcaggagattgccacctaccgccgcctgctggacctgagccgcatcctcaacgagatgcgtgaccagtatgagaagatggcagagaagaaccgcaaggatgccgaggattggttcttcagcaagacagaggaactgaaccgcgaggtggccaccaacagtgagctggtgcagagtggcaagagtgagatctcggagctccggcgcaccatgcagtccttggagatagagctgcagtcccagctcagcatgaaagccaccctggagggcaacctggcggagacagagaaccgctactgcgtgcagctgtcccagatccagggggctgattggcagcgttgaggagcagctggcccagctttcgctncgagatgggagcagcagaaccagggaattacaaaatccttncttggatgttgaag

SEQ ID NO: 163023 - DNA, 796 bp, Homo Sapiens
  misc_feature (26)..(26): n is a, c, g, or t
  misc_feature (73)..(73): n is a, c, g, or t
  misc_feature (390)..(442): n is a, c, g, or t
tccaggtcagtcctgccagggtcagnttatccaaccaccgggcgcaggccattgacgtcggcttccacagttntgccgcagggccagttcgtgttcatactttggtcctaaagtcatcgggctgccagcctggcattgtcaatcttgcaaaatgggctgcgcattctcaatggtggccgcaatgatcttgttcctcaggtcctcgatggtcttgaagtagggactgtagtctttgatctcactgggccgctgcctctggtaccagtcacggatcttcacttccaggtcggcgttggcctcctccagagcacgcaccttgtccaggtaggaggccaggcggtcattgaggttctgcatggtcaccttctcactgcccaccagaagcccatnnnnnnnnnnnnnnnnnnnnnnnnnnnnnnnnnnnnnnnnnnnnnnnnnnnnngcaccaaggccaccaccatatcctcccccgaagccactaccaaagctgctgctgctgctgaagccaccgccatagccgccccccagcccgcaggctcccccagaggagaagcgagaggagacagacaggccgcccccgtaggtgctgggggcacggcaggaccctccggccaggacggaggagatgcggctggagccgcccccgatgccgcctccgatgccgcaggagcccttcatggagctggaggaggtgaactggcggctgcaggtggtcatggtgccaaggagggaggtgagcgagtgagcagttggctgaaagaaggaaaggtgctcaggaaggctgagagcgtgctgt

SEQ ID NO: 163024 - DNA, 1018 bp, Homo Sapiens
  misc_feature (922)..(922): n is a, c, g, or t
  misc_feature (931)..(931): n is a, c, g, or t
  misc_feature (950)..(950): n is a, c, g, or t
  misc_feature (960)..(960): n is a, c, g, or t
  misc_feature (966)..(966): n is a, c, g, or t
  misc_feature (985)..(985): n is a, c, g, or t
  misc_feature (990)..(990): n is a, c, g, or t
ctggtacctcctgccagcatctcttgggtttgctgagaactcacgggctccagctacctggccatgaccaccacatttctgcaaacttcttcctccacctttgggggtggctcaacccgagggggttccctcctggctgggggaggtggctttggtggggggagtctctctgggggaggtggaagccgaagtatctcagcttcttctgctaggtttgtctcttcagggtcaggaggaggatatgggggtggcatgagggtctgtggctttggtggaggggctggtagtgttttcggtggaggctttggagggggcgttggtgggggttttggtggtggctttggtggtggcgatggtggtctcctctctggcaatgagaaaattaccatgcagaacctcaatgaccgcctggcctcctacctggacaaggtacgtgccctggaggaggccaatgctgacctggaggtgaagatccatgaatggtaacagaagcagaaccaaaacagcccagaaatgcgactacagacaatactatcaagaacattgaagagctccgaggaaaagatcatggccaccaccatcgacaactcccgggtcatcctggagatcgacaatgccaggctggctgcggacgacttcaggctcaaagtatgagaatgaactggccctgcgccagggcgtttgaggctgacatcaacggcttgcgccgagttcctggatgagctgaccctggccaggactgacctggagatgcagatcgagggcctgaatgaggagctagcctacctgaagaagaaccacgaagaggagatgaaggagttcagcagccagctggccggccaggtcaatgtgggagatggacgcagcaccgggtgttggacctgacccgtgttgttggcagagatgaggggagcagtacgangccatggcngagaagaaccccccggatnttcgaaggcntggttntttaagcaagattttaggnacttnaacaaagaagttgggctttccaacaaca

SEQ ID NO: 163025 - DNA, 931 bp, Homo Sapiens
gctcctcccgcgaatcgcagcttctgagaccagggttgctccgtccgtgctccgcctcgccatgacttcctacagctatcgccagtcgtcggccacgtcgtcgttcggaggcctgggcggcggctccgtgcgttttgggccgggggtcgcttttcgcgcgcccagcattcacgggggctccggcggccgcggcgtatccgtgtcctccgcccgctttgtgtcctcgtcctcctcggggggctacggcggcggctacggcggcgtcctgaccgcgtccgacgggctgctggcgggcaacgagaagctaaccatgcagaacctcaacgaccgcctggcctcctacctggacaaggtgcgcgccctggaggcggccaacggcgagctagaggtgaagatccgcgactggtaccagaagcaggggcctgggccctcccgcgactacagccactactacacgaccatccaggacctgcgggacaagattcttggtgccaccattgagaactccaggattgtcctgcagatcgacaacgcccgtctggctgcagatgacttccgaaccaagtttgagacggaacaggctctgcgcatgaaccgtggaggccgacatcaacggcctgcgcagggtgctggatgagctgaccctggccaggaccgacctggagatgcagatcgaaggcctgaaggaagagctggcctacctgaagaagaaccatgaggaggaaatcagtacgctgaggggccaagtgggaggccaggtcagtgtggaaggggattccgctccgggcaccgatctcgccaagaatctgagtggaatgcgaaagccaatatgaaggccttggcccgaacaaacccgggaaaggattgctgaagaccttgggttcacccagcccgggactggaagaaaattggaaaccgggggaaggccccc

SEQ ID NO: 163026 - DNA, 986 bp, Homo Sapiens
agattcttggtgccaccattgagaactccaggattgtcctgcagatcgacaacgcccgtctggctgcagatgacttccgaaccaagtttgagacggaacaggctctgcgcatgagcgtggaggccgacatcaacggcctgcgcagggtgctggatgagctgaccctggccaggaccgacctggagatgcagatcgaaggcctgaaggaagagctggcctacctgaagaagaaccatgaggaggaaatcagtacgctgaggggccaagtgggaggccaggtcagtgtggaggtggattccgctccgggcaccgatctcgccaagatcctgagtgacatgcgaagccaatatgaggtcatggccgagcagaaccggaaggatgctgaagcctggttcaccagccggactgaagaattgaaccgggaggtcgctggccacacggagcagctccagatgagcaggtccgaggttactgacctgcggcgcacccttcagggtcttgagattgagctgcagtcacagctgagcatgaaagctgccttggaagacacactggcagaaacggaggcgcgctttggagcccagctggcgcatatccaggcgctgatcagcggtattgaagcccagctgggcgatgtgcgagctgatagtgagcggcagaatcaggagtacccagcggctcatggacatcaagtcgcggctggagcaagagattgccaccttaccgcaacctgctccaaggacaagaagatccctacaacaattttgtctgcctcccaaggccctctggaggcaacaaggctctggggccttctgctggccccttggaggggtggcctcctgggtaacagggatgggaaaggaaagggacccctttaccccccggtttttttctcctggaactggggcaataaaaaattttatggggcccccggggcgacacacaagtaatggccctccacacctccgaggcgctatctcttgggc

SEQ ID NO: 163027 - DNA, 655 bp, Homo Sapiens
ccattacggcctaagtagcgagggctgcgtggcgtaaacagcacgagggatgactgtccgaaccaatttcccagacggaacaggctctgcgcatgagcgtggaggccgacatcaacggcctgcgcagggtgctggatgagctgaccctggccaggaccgacctggagatgcagatcgaaggcctgaaggaagagctggcctacctgaagaataaccatgaggaggaaatcagtacgctgaggggccaagggggaggccaggtcagagtggaggtggattccgctccgggcaccgatctccccaagatcctgactgacatgcaaacccaatatgacgccatggcccgagcagaaccgcaaggatgccgaagcctggagcaccacccggactgaagaagtgaaccgcggcaggccgctgcgccacacccagcagccgcagacgagcagggcccccaagttacctgacgcgtgcgccacacccttcaggctctgtgagacccagctgcagtcacagccgcaccatgaaagctgaataggaagacacactggcacatcccctgtggccctcaacagatagcggagctgcatcgctgtcaacgctcggccccggcgcgtaagctcccgggcaccattgcggcccatgtgtcccgtctagt

SEQ ID NO: 163028 - DNA, 839 bp, Homo Sapiens
atttcggcacagggaaacacctgaagggtacaaagtcatgtacacccccatggctcctggtaactacctgatcagcgtcaaatacggtgggcccaaccacatcgtgggcagtcccttcaaggccaaggtgacaggccagcgtctagttagccctggctcagccaacgagacctcatccatcctggtggagtcagtgaccaggtcgtctacagagacctgctatagcgccattcccaaggcatcctcggacgccagcaaggtgacctctaagggggcagggctctcaaaggcctttgtgggccagaagagttccttcctggtggactgcagcaaagctggctccaacatgctgctgatcggggtccatgggcccaccaccccctgcgaggaggtctccatgaagcatgtaggcaaccagcaatacaacgtcacatacgtcgtcaaggagaggggcgattatgtgctggctgtgaagtggggggaggaacacatccctggcagcccttttcatgtcacagtgccttaaaacagttttctcaaatcctggagagagttcttgtggttgcttttgttgcttgtttgtaattcattttatacaaagccctccagcctgtttgtggggctgaaaccccatccctaaaatattgctgttgtaaaatgccttcagaaataagtcctagactggactcttgagggacatattggagaatcttaagaaatgcaagcttgttcagggggctgagaagatcctgagtacactaggtgcaaaccagaactcttggtggaacagaccagccactgcagcagacagaccaggaacacaatgagactgacatttc

SEQ ID NO: 163029 - DNA, 387 bp, Homo Sapiens
tggcgaagcgtagtacccaactcctctctactcttatccttttatcctctgtctctgcttatcacctctcttgcgtatttctggatctccttccctcctttctcgtccaaatcatgaaatgtttggccttagtcaatgtctatgcccgtcacataacagccgaggcaccgaggcccacagggaagcagctgggagcttggaaacctggtctcttgaatttcaaacctggtttcttacaggtggttgtctggggtgggtggagtggcgacaggatagagctgaaggactatgcaaatgaggaagtaagtcagggcgggctttgagaaggggacccatatcctacaggcaaaaagcaggctaggtgaccttgggtactacgctttggca

SEQ ID NO: 163030 - DNA, 1147 bp, Homo Sapiens
  misc_feature (460)..(591): n is a, c, g, or t
gacttgctggccatctactgccgcaacgaggccggggcaggaggaagtggggatgccgcctctgcccccgccacagcagccccctcctccttctccacctcaaccttctcgcctggccccctacccacatcctgccaccacccgaggggaccgcaagcaaaagaagagagaccagaacaagtcggcggctctgaggtaccgccagcggaagcgggcagagggtgaggccctggagggcgagtgccaggggctggaggcacggaatcgcgagctgaaggaacgggcagagtccgtggagcgcgagatccagtacgtcaaggacctgctcatcgaggtttacaaggcccggagccagaggacccgtagctgctagaagggcaggggtgtggcttctgggggctggtcttcagctctggcgccttcatccccctgcctctaccttcattccaaacccctctcnnnnnnnnnnnnnnnnnnnnnnnnnnnnnnnnnnnnnnnnnnnnnnnnnnnnnnnnnnnnnnnnnnnnnnnnnnnnnnnnnnnnnnnnnnnnnnnnnnnnnnnnnnnnnnnnnnnnnnnnnnnnnnnnnnnntcaacccgttcttccccaccaaaccacccaactccctctctactcttatccttttatcctctgtctctgcttatcacctctcttgcgtatttctggatctcctttcctcctttctcgtccaaatcatgaaatgtttgggcttagtcaatgcctatgcccgccaacctaaacagcccgaggcccccgagggcccacagggcaaagccaacctgggcagccttgggaaaaccctgggccctcccttggaatttttcacaacccttgggttttcccctaacagggtgggtctggccctgggactcgtgggccgggaactcggcccgcccgggtataacaaccctttaaaggacctattgcccccatggagggaaaccaaagctcccgggcgcccggccttctttaacaagggggggaccccctttattcctcccccgggccaaacaaactccggcttatacgtgcccccttgggggaaacctatacccctcaagtgggagggcgcggcttcaaaaggggggtccccccgctttcgtcacttccccggagaaaagagatc

SEQ ID NO: 163031 - DNA, 737 bp, Homo Sapiens
  misc_feature (24)..(24): n is a, c, g, or t
  misc_feature (80)..(80): n is a, c, g, or t
  misc_feature (129)..(129): n is a, c, g, or t
  misc_feature (477)..(497): n is a, c, g, or t
  misc_feature (598)..(617): n is a, c, g, or t
tgggaaccttggaaaacccggtcnccttgaaatttccaaccccggtttccttacaggtggttgtcctggggtgggtggantggccgacaggatagagcctgaaggacctatgccaaatgaggaagtaanttcagggcgggctttgaaaaggggacccatatccctacaggcaaaaagcaggctaggtgaccttgggacactacgcctaagggagggaggctaaaggcagcccaggtttgcagtgcgggaagatgagcaggccagtgggaggaggggcagggcagggctgtagttggtgactgggtgttcattttagctctaagaaaaaaaatcagtgtttcgtgaaggtgttggagaggggctgtgtctgggtgagggatggcggggtactgatttttttgggaggttatgagcaaaaataaaacgaaacatttcctctagatgatacctcgcccccaaccccctctccgtagtctnnnnnnnnnnnnnnnnnnnnngcaactccaacacccactacctcccctcgtccttctttgatttatctacttccatgaccgccatcccgttaaaaattttttggtcacccttcgcccccctnnnnnnnnnnnnnnnnnnnncctcccttggggccccgccggggcgccagctggtgtaagggaaaacggggcctatatagtgtggttccctagaaaaacaccgggggactagaaacagacggggttgggttatttcccccc

SEQ ID NO: 163032 - DNA, 345 bp, Homo Sapiens
  misc_feature (68)..(68): n is a, c, g, or t
  misc_feature (98)..(98): n is a, c, g, or t
  misc_feature (319)..(319): n is a, c, g, or t
  misc_feature (323)..(323): n is a, c, g, or t
acctcctgggcctcaaacgatcctcctgcccttggcctcccaaagtgcctgggattacaagcataagnccactgcacccagcccgagaggggtttggnaatgaaggtagaggcagggggatgaaggcgccagagctgaagaccagcccccagaagccacacccctgcccttctagcagctacgggtcctctggctccgggccttgtaaacctcgatgagcaggtccttgaagtactggatctcgcgctccacggactctgcccgttccttcagctcgcgattccgtgcctccagcccctgggactcgccctccagggcntcancctctgcccgcttccgctggcg

SEQ ID NO: 163033 - DNA, 185 bp, Homo Sapiens
tagccggaccggcatcacaaaacgggtgatagtatttggccataatgagtgacagaaattctacgcttatccttaaaggctatgaagtaagttgtatgctgacaaatgcatatacctctcatgacatgtgtctgcctgcctgtccactcatcagacaggaaccacatggtcaccagatgcttgtg

SEQ ID NO: 163034 - DNA, 432 bp, Homo Sapiens
caccagccttctctcaccccttcaccccatctcactccctgctgccacaggggctttgcatgtgctgctgctggatctgttggaacactcttctctcttctcctagtttacctttagctttcagctgtgggttactttctaactaagttaaatcccccattaatgagccctctttatcataccattgatctctcctttgtggcacttctcacacatgaagtttttcagtccctaccactagactgaaagccctatgagggcagacagtgtctgtttttgcttcccattgactcctaggacttgtacctaatagtcttaagggcagactgtgtactgggcacatagtaggtgctcagtaaatatctgctgtgtgaatcaatgaaaaacacaaattacatttttaaaaaacactagagggagagctggctgagc

SEQ ID NO: 163035 - DNA, 399 bp, Homo Sapiens
gctccagccaacttccttgatgttggtggtggtgctacagtccatcaagtaacagaagcatttaagcttatcacttcagataaaaaggtactggctattctggtcaacatttttggaggaatcatgcgctgtgatgttattgcacagggtatagtcatggcagtaaaagacttggaaattaaaatacctgttgtggtacggttacaaggtacacgagtcgatgatgctaaggcactgatagcggacagtggacttaaaatacttgcttgtgatgacttggatgaagctgctagaatggttgtaaagctctctgaaatagtgaccttagcgaagcaagcacatgtggatgtgaaatttcagttgccaatatgatctgaaaacccagtggatggctgaagg

SEQ ID NO: 163036 - DNA, 562 bp, Homo Sapiens
ctattcgcggtccgggaccttataaaactgccctgtgatgactgtgatgaagccgctaagaatggttgtaaagctctctgaaatagtgaccttagcgaagcaggcacatgtggatgtgaaatttcagttcccaatatgatctgaaaacccagtggatggctgaaggtgttaaatgtgctataatcattaagaatactgtgttctgtgttattgttctttttctttttagtgtgtggagattgtaattgccatctaggcacacaaacatttaaaaggatttggactgcatttaattgtaccattcagaatggactgtttgaacgaagcatgtataatgcagtcatcttctttctttcgtcgcagccagtccttttttgcttctcctacaaaacgtaacttgcaattcgccagtctattattgctggatacaaagttcttcattgataagagtcctataaataagataaatacgaagataaagctttattctttagtgttaaaatacagtatatctaataactagcctcattagtagagcagtatattaaaacaatgttttatg

SEQ ID NO: 163037 - DNA, 1052 bp, Homo Sapiens
cggacgctacggacgcgcggaaagggggctgtgcttcagttgcatgactgaaacgggaggcaggaggcggctatcgctgcgtggcgtctgtgcccagcatacccggcctgaaccgcacacagctggtcaacgtggccatttttggcccccctgggatgccattcaaggagagaaagctctgggtgaaagagaatatggtgttgaacctgtcttgtgaagcgtcagggcacccccggcccaccatctcctggaacgtcaacggcacggcatagtgaacaagaccaagatccacagcgagtcctgagcaccctgaatgtcctcgtgaccccggagctgttggagacaggtgtttgaattgcacggcctccaacgacctgggcaaaaacaccagcatcctcttcctggagctggtcaatttaaccacctctcacaccagactccaacacaaccactggccgcagcacttccactgccagtcctcataccagagccaacagcacctccacagagagaaagctgccggagccggagagccggggcgtggtcatcgtggctgtgattgtgtgcatcctggtcctggcggtgctgggcgctgtcctctatttcctctataagaagggcaagctgccgtgcaggcgctcagggaagcaggagatcacgctacccccgtctcgtaagagcgaacttgtagttgaagttaagtcagataagctcccagaagagatggcctcctgcagggcagcagcggtgacaagagggctccgggagaccagggagagaaatacatcgatctgaggcattagccccgaatcacttcagctccccttccctgcctggaccattcccagctccctgctcactcttctctcagccaaagcctccaaagggactagagagaagcctcctgctcccctcgcctgcacaccccctttcagagggccactgggttaggacctgaggacctcacttggcctgcaaggcccgcttttcagggaccagtccaacacatctcctccacgtagagtgaagctcatcccaagcaaggagccccg

SEQ ID NO: 163038 - DNA, 933 bp, Homo Sapiens
tgtgactataacagctcgcgttaataagcaggcggtacgggtccggaattcccgggatatcgtcgacccacgcgtccggatcacgctgcccccgtctcgtaagagcgaacttgtagttgaagttaagtcagataagctcccagaagagatgggcctcctgcagggcagcagcggtgacaagagggctccgggagaccaggagagaaatacatcgatctgaggcattagccccgaatcacttcagactcccttccctgcctggaccattcccagctccctgctcactcttctctcagccaaagcctccaaagggactagagagaagcctcctgctcccctcgcctgcacaccccctttcagagggccactgggttaggacctgaggacctcacttggccctgcaaggcccgcttttcagggaccagtccaccaccatctcctccacgttgagtgaagctcatcccaagcaaggagccccagtctcccgagcgggtaggagagtttcttgcagaacgtgttttttctttacacacattatggctgtaaatacctggctcctgccagcagctgagctgggtagcctctctgagctggtttcctgccccaaaggctggcttccaccatccaggtgcaccactgaagtgaggacacaccggagccaggcgcctgctcatgttgaagtgcgctgttcacacccgctccggagagcaccccagcagcatccagaagcagctgcagtgttgctgccaccaccctcctgtctgcctcttcaaagtctcctgtgacattttttctttggtcagaagccaggaactggtgtcattccttaaaagatacgtgctgggattacaggtgtgagccgcatgcccggcgggcttttaacttttaattgtcctaatgttaaggtcaacttgtgggtgttaagaacagtga

SEQ ID NO: 163039 - DNA, 744 bp, Homo Sapiens
ggtcgactactactactaaattcgcggccgcgtcaacatctcattctctcatctcctggtgcagtaactaggggagaatccttacattaagatggtagaatttccatcattctaggtctttgagtggccatatggagcacaccatacccagccaacccattgtggacatggaatgtaagaaatcaaccttggttgctaagctgctgagactctggggttaatttgctactgcagcataacctagtccatcctgatgcatgtagcatgcaaaccacttatgttgacccttagtcatggtcagtgctccacagatgttggttacttttggtaggaagatagattgcctctgaaagttttgttagctgatctcatgatgccaatgttgctattttgtaattggataaattggacttggctctctttccagcatgtgggagagaaagatagactgagagacaataaggcactattatcttcagtttctgtccttggatgcccttggtggcaatgaacaatgcatgcccctctgagaaagctggacctaaaggagaatgggaggtgataccagaattgggaaagtccaaggccccaggcattccctagtctggagacaactttgagtccttggtgggaagattctccaagggaacataaatgcttctactatctagttcgtctcttcgagaattaacactttctattatccattccagtagctaaagaagtaccgatgggctcttggaa

SEQ ID NO: 163040 - DNA, 521 bp, Homo Sapiens
cttccgctccagccacgactgtttgagtgctccagccacatgggctgcctggtcctcgcagaagtggggttcttcagccaggaggacctggacaagtatgacatcatgttactggacacctggcaggaggtaaggtggctatccctgcctggtggggctgtgaacgggggtgtgtttctgtttgtgtaactgggtgtgtgtgtatctagccatctgcctctgtacacagggctgtgggtgagtctgaccctgtcactgagcaattgcattgcggtgcatatgagaccatggatgagtgtgcatcaccaggtggcagcagtgagactccgggagattaggagtgtgttggaactcaggggtaactgagaccatgtttgcagttgtgtgtggccctgtgtgccttatgatactatgtgtggctccagcgacagtgcctgcggccgagcatgtgtcggtgctgcatgagtgactgtgattggaatgcccaatcgcatcacttcatgtgtgtggcttggctggag

SEQ ID NO: 163041 - DNA, 1442 bp, Homo Sapiens
ggagtcggtaccaatgcagggactcgggcaggtcaaggcctggtggctgctggccctatcgggcccctttgtctcatgaagattgagcacttctcctgtccccagccaactgtcctgtccaggggcataggagatagcccccaagttctatagctatagggttcccatcagttgaaacagatttgctttttcgctattcctcttcgtagccccaaattcgttgttggaggcggtctccgctgtgtcatgccatgagcaaagagtgaagagagctgtgtccacagcacgaaggggtctccttggccagtgtccaagccccctttcctggatatcttcagccttaaagaacagtcacaaggccacccattggttgaggaagtcattggagaatgggagtttcggaatctggctgccgagtgacagcatccctgaatcatgcgttccctgcttggcccagctttccttccatcctccaccccagggaggatgcagggactggccagaatggaggaagagctggaaagactcgtgggcctcagtccctcattgcaggctgaaggtgggcagcggagcacatagtcttgtcccttccaaagcatggccagtttagactgattcttcctatctggcttctaaagtctagcaccctcctaaagttactcaccttccctggctctgcggcctggattaagctcatttctattttgcaacccattcccccattttcctctctttcctctcaaatcctagaaaatacatatggtggggaagctaaggaaatttctattggcttttccccctttctgctgctttgtgccaaagctagaatggaacagtcagccccctctcccttcagccctctgttcctccccacatcgactctggccggaaccatccatcttactgttctcctgcatctaaacctttttgccaccatctccctctgccatctcttacttcagtctccctcctgctctgccagcatggagagtgagggaggcttccaaaaatgcacattctgttcagatgaaaggaaaaggctggggtgggactggtggatccatcgtggacctgttgggctcatgtggtgtggtgtccggagactgtgacttcctgagggtttaaagactaaaatgggatggactgaggcgcgtgctgtgtgcaccacggagggctggcctctgcctggctcggtgggtgcagatgaacacacgtggggaatcactgtcaaatccagtactgtgccccacaaaaaagctgagtttattgctcacgggaaactctgcctcgaggcaggcaaaaatgctattacgggttgtattaggagaatatgggttttctcagttttcccagaatgaggaagctcctcaatgcccctataggaactactttgaaaagttaatgcaaacctttgaaagaaaggaagaaagaaaaaaacaaag

SEQ ID NO: 163042 - DNA, 840 bp, Homo Sapiens
  misc_feature (476)..(476): n is a, c, g, or t
  misc_feature (556)..(567): n is a, c, g, or t
ccccgccctacgacaccctcttggtgttcgactatgagggcagcggctccgacgccgcgtccctgagctccctcacctcctccgcctccgaccaagaccaagattacgattatctgaacgagtggggcagccgcttcaagaagctggcagacatgtacggtggcggggaggacgactaggcggcctgcctgcagggctggggaccaaacgtcaggccacagagcatctccaaggggtctcagttcccccttcagctgaggacttcggagcttgtcaggaagtggccgtagcaacttggcggagacaggctatgagtctgacgttagagtggttgcttccttagcctttcaggatggaggaatgtgggcagtttgacttcagcactgaaaacctctccacctgggccagggttgcctcagaggccaagtttccagaagcctcttacctgccgtaaaatgctcaaccctgtgtcctgngcctgggcctgctgtgactgacctacagtggactttctctctggaatggaaccttcttaggcctcctggtgcaacttaannnnnnnnnnnnaatgctatcttcaaaacgttagagaaagttcttccaaagtgcaccccagagctgctgggcccactggccgtcctgcatttctgggttccagaaccccaatgcctcccattccggagggatctcctgcggtttttatactgaatggtgcctagggttgcccccttaatttttttattttcccctgttgcggttgctaataaatgaaaggggggagggacaatccgggtatattggacctagaaactctttttatttaaaaaaaccctttttccc

SEQ ID NO: 163043 - DNA, 708 bp, Homo Sapiens
  misc_feature (448)..(458): n is a, c, g, or t
attatctgaacgagtggggcagccgcttcaagaagctggcagacatgtacggtggcggggaggacgactaggcggcctgcctgcagggctggggaccaaacgtcaggccacagagcatctccaaggggtctcagttcccccttcagctgaggacttcggagcttgtcaggaagtggccgtagcaacttggcggagacaggctatgagtctgacgttagagtggtggcttccttagcctttcaggatggaggaatgtgggcagtttgacttcagcactgaaaacctctccacctgggccagggttgcctcagaggccaagtttccagaagcctcttacctgccgtaaaatgctcaaccctgtgtcctgggcctgggcctgctgtgactgacctacagtggactttctctctggaatggaaccttcttaggcctcctggtgcaacttaannnnnnnnnnnaaatgctatcttcaaaacgttagagaaagttcttcaaaagtgcagcccagagctgctgggcccactggccgtcctgcatttctggtttccagaccccaatgcctcccattcggatggatctctgcgtttttatactgagtgtgcctaggttgccccttattttttattttccctgttgcgttgctatagatgaagggtgaggacaatcgtgtatatgtactagaacttttttattaaagaaacttttccc

SEQ ID NO: 163044 - DNA, 1163 bp, Homo Sapiens
aacggtgggctatcctttatccaaatcagatagtgtttaggctctttttcatcaaatataaaaatccagcccagttcatggctcgttcggcagcaaccctgagacactttacagccctagaccctaaaatgtcaaaaggccgtcttattctcaatatacattttattacccaatctgctcccgacattaaataaaactccaaaaattaaattccggccctcgaaccccacaacaggacttaattaacctcgccttcaaggtgtacaataatagaggcagccaagtagcaacatatttctgagttgcaattccttgcctccactgtgagacaaacctcagccacatctccagcacaaaagaacctcaaaacgcctaaaccacagcggccaggcattcctccagaaccgcctcccccagcagcttgctacaagtgccagaaatctggccaccagaccaaggaatgcccgcagcccaggattcctcctaagccgagtcccatctgtgcaggaccccactggaaatcggactgtccaactcacctggcagccactcccagagcccctggaaactctggcccaaggctctctgactgactccttcccagatcttctcggcttagcagctgaagactgatgctgcccgatcgcctcggaagctccctggaccatcacagaatcccagcttcgggtaactctcacagtggagggtaagtccgtccccttcttaatcaatacggaggctacccactccacattaccttcttttcaagggcctgtttcccttgcctccataactgttgtgggtattgacggccaggcttctaaacccctgaaaactccccaactctggtgccaacttggacaacactcttttatgcactcttttttagttatccccacctgcccacttcccttattaggccgaaatattttaaccaaattatctgcttccctgactattcctggactacagccacatctcattgctgcccttcttcccaatccaaagcctcctttgtgtcctctaacatccccacaatatcaccccttaccacaagacctcccttcagcttaatctctcccactctaggttcccacgccgcccctaatcccacttgaagcagccctgagaaacatcgtccattctctctccataccaccccc

SEQ ID NO: 163045 - DNA, 1107 bp, Homo Sapiens
  misc_feature (41)..(41): n is a, c, g, or t
tattggtgggctcgggtggtgctccggaaaaataaaacaanatagtgttgaagtatggggccggcgaaaattttttgggggtggtatggagagagaatggacgatgtttctcagggctgcttcgagcgggattaggggcggcgtgggaacctagagtgggagagattaagctgaaggaagattttgtggtaaggggtgatattgtggggttgttagaagaaacatttgtcatatagaatgattggtgatggcctggatacagttttgtatgaattgaaaaactaaatggaataagagaaggagaaaaacaggtataaaaggtctaagaattgggaggacctaggacatctgattagagagtgcctaaggagattcagcatagtcctgccagcaaagattatttgtttacttcaggagttaagagtggcagtttggggatagcacgaggagatatcagctgtgatggcttggagaaacagtgtaaactggcagtgtaaacaagagcagggcatgtatgagtagttgagaacggtgaataggagtatgactagacagaagatagtagggatgacaagtttttgggggcacagtctaagttggtctggtgtctggaatgagactggggcctaataaaaaggagcgtccatacaggagctcaaatgggctgtaccctgtagcattccgaggacaggcctgaattctgagaagggaaagtggtaaaagtattgtccagtcctttttaagttggtggctgagcttggtgaggtgtgtttttaaaagaccattagtccgttctacctttcctgaagacggaggaccgtaagggatataaaggtttcactgaatactaagagcctgaaaaactgcttggctgatttgactaataaaggctcatctgttatcagactgtatagaggcgggaaggctaaactgaggaattatatctaacagaatggaagaaatgactgtggtggccttctcagaccctgtaggaaaggcctgtacctatccagtgaaagtgtctacctagactaagaggtgttttagttacctgactcaggtcatgttgagtaaagctaatttgccagcctgggattgggctatcaa

SEQ ID NO: 163046 - DNA, 759 bp, Homo Sapiens
  misc_feature (34)..(34): n is a, c, g, or t
  misc_feature (47)..(47): n is a, c, g, or t
  misc_feature (52)..(52): n is a, c, g, or t
  misc_feature (81)..(81): n is a, c, g, or t
tttttcccccttttcccccagaaaaaagcagagnaagggggtagagnccaanggagagaaagggggttgggggtacttggnccctgttccctggaaaaagcagagaagggggtagagacaaaggagagaagggggttggggtacttgccctctccccggaaaaagcagagaaggggtagagacaaggagagaaggggttggggtacttgccctgtccctgaaaaagcagagaaggggtacttgccgctaagggtgaaggaccaaagcaggtgtccctgcgtggtctgacacccttgaaacgtgggtgtataatcagagaggcgtccctgcaatgattaaacaccaagggaaggctgccttcccagtccgtgactggcgccggagttttgggtacacggataaaacatgtctcctttgtctctaccagaaaatgaaaggaattgaaattaagagaaggaagagattgaagtatgtgagccaagattgaaaggagaaagaggttgagggatagtgagggaggttggagaagagagtaaaaacaggccacttaccagatttgaaattggtgagatgttccttgggctggtcagtctgaggacctgaggtcgtaggtggatctttctcacggagcaaagagcaggaggacaggggattgatctcccaagggaggtcccccgatccgagtcacggcaccaaatttcacgcgcgtccgtgtgaagagaccaacaaaaaggctttgagtcagcactaaaactgttt

SEQ ID NO: 163047 - DNA, 544 bp, Homo Sapiens
cgtggcagaggtgatgcagcatcctaatgaaggcgcactggtgcttggcctacacagcaacgtgaaggatgtctctgtgcctgtggcagaaataaagatctactccctggtccagccaacccattgaccatgaaggaatcaaatccaagctttctgatcgttctcctgatattgacaattattctgaggaagaggaagagagtttctcatcagaacaggaaggcagtgatgatccattgcatgggcaggacttgttctacgaagacaaagatcaccggaaagtgaagaagacccggaggaaactaacctcaacctctgccatcacaaggcaacctaacatcaaacagaagtttgtggccctcctgaagcggtttaaagtttcagatgaggtgggctttgggctggagcatctgtgatggtcctgcaggcttccgaggcaatcgggcagtgtcagtcttcagctgctaagcctagaagatctgggaaggtgtcagtcagagagccttgggccagagttccaggctctggaatgctgccacgttat

SEQ ID NO: 163048 - DNA, 204 bp, Homo Sapiens
cgtgagccccctagaccatcacggatgccgagcttcgggtaactctcacagtggaaggttcccacgccgcccctaatcccgctcgaagcagccctgagaaacatcgcccattctctctccatatcaccccccaaaaatttttgccaccccaacacttcaacactattttgttttatttttcttattaatataagacggcaggaa

SEQ ID NO: 163049 - DNA, 289 bp, Homo Sapiens
ccggtccgtatacgctcagccacactactgctacaactcattctgcctccactgccaccagcagcctctagcgggtttgatgttcccacctatcccagaacattgagccttcccacttaactccgcagaaaggatgccaggaattttttacaagtgcaatgctagcaaaggctggggaaaatgagacaaaaaacctgatttccaagagcagacaagttttacaaggggcagtcttcttcgctgaagttgactaaattttagccacgggttggcttgtctgagcgtgaca

SEQ ID NO: 163050 - DNA, 258 bp, Homo Sapiens
accacgctcaagccaacggcaatcataatcttgtaaatgagtctccccgttgatggggatcttggctggctagtatcaacagtgttggtagagagcatccttgtatatttatttttgccatacttctacaagtccggattcctaggacttgggtcaaagggaaagaacattttaaattttgatggctgaattttcttccagataggttgccccagttgatatgcccacccaagaatgtgtagagtacctgtcttcgag

SEQ ID NO: 163051 - DNA, 666 bp, Homo Sapiens
  misc_feature (361)..(383): n is a, c, g, or t
  misc_feature (436)..(533): n is a, c, g, or t
  misc_feature (543)..(557): n is a, c, g, or t
gggatggctttaggcacttttgtgccagagcttgtgagggtgacagaagagggtccaggctggaaacctgaactttctgggtgggagaaccaggtggtgcctgccgaggtcttggcgtttgggccggtgctggagcctgtccagctggcccgggccctggcctggttctcaagtgtttcctagacagagaggcacctgggtcagtattagtctatttatcagaggtgtaaataatctatgtatagtttttctccttttagattattttgtatttgtttaaaagaagttttgtcaaaatacaaaaatataaagaaatgactgaaagttgttgacagggtttttaagaaataattattctaannnnnnnnnnnnnnnnnnnnnnnccttgtaaactagcgccaaggaactgcagcaaataaactccaactctgcccannnnnnnnnnnnnnnnnnnnnnnnnnnnnnnnnnnnnnnnnnnnnnnnnnnnnnnnnnnnnnnnnnnnnnnnnnnnnnnnnnnnnnnnnnnnnnnnnncccttggcgnnnnnnnnnnnnnnnaaaaagtttttaaaaccttccgttgggcgcggggccccaaaaggaaaggaaacggggccatacttgttcccaaggaaaccggggccataaaaagggctgggttcccccc

SEQ ID NO: 163052 - DNA, 1130 bp, Homo Sapiens
gagcgaggcctgggtggcgaattcggcacgaggggacctgacgctatggagctctcggagttttgtgggggacggctgtgagtggggggttcctgctgcgggatgagaacgtagacgccagtggctcactcgctcctggcaccttccctttcaggctccagatggaccctgggaaggacaaagagggggtgccccagccctcagggccgccagcaaggaagaaatttgtgatacccctcgacgaggatgaggtccctcctggagtggccaagcccttattccgatctacacagagccttcccactgtggacacctcggcccaggcggcccctcagacctacgccgaatatgccatctcacagcctctggaaggggctggggccacgtgccccacagggtcagagcccctggcaggagagacgcccaaccaggccctgaaacccggggcaaaatccaacagcatcattgtgagccctcggcagaggggcaatcccgtactgaagttcgtgcgcaatgtgccctgggaatttggcgacgtaattcccgactatgtgctgggccagagcacctgtgccctgttcctcagcctccgctaccacaacctgcacccagactacatccatgggcggctgcagagcctggggaagaacttcgccttgcgggtcctgcttgtccaggtggatgtgaaagatccccagcaggccctcaaggagctggctaagatgtgtatcctggccgactgcacattgatcctcgcctggagccccgagaggctggttgatgtcctgcacgagcccttcttgaaagtaccctgatgaccccagaaaccagcggacctcctgatgtagaagctagagcaggacttcgtctcccgggtgactgaatgtctgaccaccgtgaagtcagtcaacaaaacggacagtcagaccctcctgaccacatttggatctctggaacagctcatcgccgcatcaagagaagatctggccttatgcccaggcctgggccctcagaaagcccggaggctgtttgatgtcctgcacgagcccttcttgaaagtaccctgatgaccccagctgccaaggaaacccccagtgtaataataaatcgtcctcatagaacgcggggcc

SEQ ID NO: 163053 - DNA, 1056 bp, Homo Sapiens
  misc_feature (579)..(592): n is a, c, g, or t
  misc_feature (594)..(732): n is a, c, g, or t
  misc_feature (734)..(751): n is a, c, g, or t
cacctgaagccaggcaactccgggatccaccaagaagaggaagaagcagagtcaggaaagccggatgccagagacagtgccccaagaggagatgccagggccgccactgaattcagagtctggggaggaggctcccacaggccgggacaagaagcggaagcagcagcagcagcagcctgtgtagtctgcccccgggaaactgaggaactaaagaaagctgaaggtgcacacctgggccaccagaaggtgacacccccagaatccctccccagagactgcaccagcgcagccagcaggagcctggcctgggaggacgatttattattacactgggggtttccttggcagctggggtcatcagggtactttcaagaagggctcgtgcaggacatcaaacagcctccgggcctggatgggagggagaaaaaaatgaggaaccagtcattaaaggagctgtttcctgggtaaatctagagtggggttttggttctttattttcccctataccctcaagcatttatccattgagttaccaacaatccagttacaatctttttaagctattattattattattannnnnnnnnnnnnngnnnnnnnnnnnnnnnnnnnnnnnnnnnnnnnnnnnnnnnnnnnnnnnnnnnnnnnnnnnnnnnnnnnnnnnnnnnnnnnnnnnnnnnnnnnnnnnnnnnnnnnnnnnnnnnnnnnnnnnnnnnnnnnnnnnnnnnnnnnannnnnnnnnnnnnnnnnnaccaaagacggggcttcacccccttagccaggatgggctccgatctcctgaccctctgatgggcctggcccaacctccccgtgcttgggattatagggggggacccccctgcgcccgggctaaagtcacccttatttttttgccaccaggcccccctgggggctccccaccgttggaaccgcaccgggttggcatccttggccttaatgtcgatactttcccccccctgggggttcccaaacgatccccccggcccttaaacctcccgaagaaaacctcgggccctaaaaggggctcccacacaa

SEQ ID NO: 163054 - DNA, 1039 bp, Homo Sapiens
  misc_feature (45)..(54): n is a, c, g, or t
  misc_feature (120)..(120): n is a, c, g, or t
  misc_feature (145)..(153): n is a, c, g, or t
ggtgtgagcccccaggggcccatatatccattcgccctttttttnnnnnnnnnntccgcacaagagagagcgcccccggaaggttttcctaactccgtcgcgtcatgtgttctgggttgnagtattatttttttccggggccctnnnnnnnnnccagatttttttatttcccccgggggggttttcccttggcacagcttggtgttcctccaggggtcctttccaaggaaggggcttggtgcaggggcatcaaaaccagccttccgggccttccaggggaagatttccaaaaggtggccaatttggggcccacgggaattaccacctttttttaagccccagctttcccttggaggggccctggcttgggggatcttttcacaatccccactgggacaagccagggacccgcaagggggaagtttttcccccaggctctgcagcccgcccatggatgtagtctgggtgcaggttgtggtagcggaggctgaggaacagggcacaggtgctctggcccagcacatagtcgggaattacgtcgccaaattcccagggcacattgcgcacgaacttcagtacgggattgcccctctgccgagggctcacaatgatgctgttggattttgccccgggtttcagggcctggttgggcgtctctcctgccaggggctctgaccctgtggggcacgtggccccagccccttccagaggctgtgagatggcatattcggcgtaggtctgaggggccgcctgggccgaggtgtccacagtgggaaggctctgtgtagatcggaataagggcttggccactccaggagggacctcatcctcgtcgaggggtatcacaaatttcttccttgctggcggccctgagggctggggcaccccctctttgtccttcccagggtccatctggagcctgaaagggaaggtgccaggagcgagtgagccactggcgtctacgttctcatcccgcagcaggaaccccccactcacagccgtcccccacaaaactccgagagctccatagcgtcaggtc

SEQ ID NO: 163055 - DNA, 275 bp, Homo Sapiens
gctcatggctgttcttgaggatccccgccttagtggtactgtccgcagtgcgcgatcagggcgtagtttgagtttgatgctcaccctgatcagaggattgagtaaacggctaggctagaggtggctagaataaataggaggcctaggttgaggttgaccagggggttgggtatggggaggggggttcatacgtagaagagcgatggtgagagctaaggtcggagcagttccacttaggccctaacctgacttgatctcggaactcgtggtcatat

SEQ ID NO: 163056 - DNA, 228 bp, Homo Sapiens
gctgttctagaggatcccgcctaagtggaactgcgtcggtgcgccgatcaggcgtagtttgagtttgatgctcaccctgatcagaggattgagtaaacggctaggctagaggtggctagaataaataggaggcctaggttgaggttgaccagggggttgggtatggggaggggggttcatagtagaagagcgatggtgagagctaaggtcggagcagttccacttagg

SEQ ID NO: 163057 - DNA, 515 bp, Homo Sapiens
gtatcgtatcatgtcatgctgttccagtgtaaacccggcgcctaccgggtcctgaattggaataagcctgcggatacattaccacttgattagtactatatattatgactgtttgatatatctagcatagttcttcaaatgcatactccctgagggaagaaactttgacttacatgtatccaccagagcaatgcagcacaatgttggacaatacacatatttgctataatgggcaaccaaagaatctcatcactggggtcaggattagaaactctactataactcaatctcaggcaatcagaatatatcctaaaataatgctctgcattgcaataatcaagaattaacattaggtcgggcatggtgacagcactaatcagaggtgttctagtgttgtgataaggggtggagaggttaaaaggagcccacttatttagtaatgttgatagtaagaatgatggctaaggtgacttcatatgagattgtttgggctactgctcgcagtgcgccgatca

SEQ ID NO: 163058 - DNA, 610 bp, Homo Sapiens
gtctgcgatgacgcataaaactcttcaccaaacgagccctataaccgccacatctaccatcaccctctacatcaccgccccgaccttagctctcaccatcgctcttctactatgaacccccctccccatacccaaccccctggtcaacctcaacctaggcctcctatttattctagccacctctagcctagccgtttactcaatcctctgatcagggtgagcatcaaactcaaactacgccctgatcggcgcactgcgagcagtagcccaaacaatctcatatgaagtcaccctagccatcattctactatcaacattactaataagtggctcctttaacctctccacccttatcacaacacaagaacacctctgattactcctgccatcatgacccttggccataatatgatttatctccacactagcagagaccagccgaacccccttcgaccttgccgaaggggagtccgaactagtctcaggcttcaacatcgaatacgccgcaggccccttcgccctattcttcatagccgaatacacaaacattattataataaacaccctcaccactacaatcttcctaggaacaacatatgacgcattctcc

SEQ ID NO: 163059 - DNA, 334 bp, Homo Sapiens
tggtcccatcatggtctgaagtggcttcctaatgtggagtctattgaaaagatttaaaaacatactacccatagccacctgaggcaagggagagcagacaagacaagcagcaaacaaaagcctgggaaggaggaagctgatgggagcaagatgcgcccatcagcatttccccacagctcgttgttcctccttcctcttttctggtgacctttctactgattgcattgtacctctttcccctgatgggagcaagacgcgcgcatcttctcccatcagcattactaataagtggctcctttaacctctccacccttatcacaacacaagaacacct

SEQ ID NO: 163060 - DNA, 689 bp, Homo Sapiens
  misc_feature (36)..(37): n is a, c, g, or t
  misc_feature (106)..(106): n is a, c, g, or t
gccaacatcatcgtagcggaatcgggggtatgctgnntcgaatcataagaacagggaggttagaagtagggtcttggtgacaaaatatgtggtgtagagttcaggngagagtgctggagattgtaatgggtatggagacatatcatataagtaatgctagggtgagtggtaggaagttttttcataggaggtgtatgagttggtcgtagcggaatcgggggtatgctgttcgaattcataagaacagggaggttagaagtagggtcttggtgacaaaatatgttgtgtagagttcaggggagagtgcgtcatatgttgttcctaggaagattgtagtggtgagggtgtttattataataatgtttgtgtattcggctatgaagaatagggcgaaggggcctgcggcgtattcgatgttgaagcctgagactagttcggactccccttcggcaaggtcgaagggggttcggttggtctctgctaatgtggagataaatcatattatggccaagggtcatgatggcaggagtaatcagaggtgttcttgtgttgtgataagggtgaagaggttaaacgagccacttattagtaatgttgctagtagaatcgatgcttactgtgacttcatattagacatgtcgggctacttggtcgagtgcgccgatcacgtcgtagtttgagcttgatgc

SEQ ID NO: 163061 - DNA, 913 bp, Homo Sapiens
gggtccggtgtcggggcacagttgaagaagcgaccgagggactgggagtcgttagtgaggatgacgcggcatggcaagaactgcaccgcaggggccgtctacacctaccacgagaagaagaaggacacagcggcctcgggctatgggacccagaacattcgactgagccgggatgccgtgaaggacttcgactgctgttgtctctccctgcagccttgccacgatcctgttgtcaccccagatggctacctgtatgagcgtgaggccatcctggagtacattctgcaccagaagaaggagattgcccggcagatgaaggcctacgagaagcagcggggcacccggcgcgaggagcagaaggagcttcagcgggcggcctcgcaggaccatgtgcggggcttcctggagaaggagtcggctatcgtgagccggcccctcaaccctttcacagccaaggccctctcgggcaccagcccagatgatgtccaacctgggcccagtgtgggtcctccaagtaaggacaaggacaaagtgctgcccagcttctggatcccgtcgctgacgcccgaagccaaggccaccaagctggagaagccgtcccgcacggtgacctggccccatgtcagggaagcccctgcgcatgtcggacctgacgcccgtgcgacttcacaccgctaagacagctccgtggaaccgcgtggggctcatcacccgcagcgagccgctacgtgtgtgccgtgacccgcgacagcctgagcaacgccaccccctgcgctgtgctgcggccctctggggctgtggtcaccctcgcaatgcgtggagaagctgattcggaaggacatggtggaccctgtgactggagacaaactcacagaccgcgacatcatcgtgctgcagcggggcggtaccggtt

SEQ ID NO: 163062 - DNA, 1193 bp, Homo Sapiens
gggctctcgccgtggcgggaaaacggcggccgcggcgtctcctccgggacgctgaggggcccgaggagaccgtgaggctctggcctgcagctcgcgccgccatggacgctgccgaggtcgaattcctcgccgagaaggagctggttaccattatccccaacttcagtctggacaagatctacctcatcgggggggacctggggccttttaaccctggtttacccgtggaagtgcccctgtggctggcgattaacctgaaacaaagacagaaatgtcgcctgctccctccagagtggatggatgtagaaaagttggagaagatgagggatcatgaacgaaaggaagaaacttttaccccaatgcccagcccttactacatggaacttacgaagctcctgttaaatcatgcttcagacaacatcccgaaggcagacgaaatccggaccctggtcaaggatatgtgggacactcgtatagccaaactccgagtgtctgctgacagctttgtgagacagcaggaggcacatgccaagctggataacttgaccttgatggagatcaacaccagcgggactttcctcacacaagcgctcaaccacatgtacaaactccgcacgaacctccagcctctggagagtactcagtctcaggacttctagagaaaggcctggtgcaggcggcttgctgggggatgtgagcgctcaggacgtgatgaggtactcgtggttctggagctctaaaaacacttctgatgcatgaaaaatgtgtgatggtgcaaggaatggattcaggatgttgttggagaaacaagtttgtgattagtccttaaaacttagctccctgggacattcttcaattccacatctgtttctagaaaccagccctttttccccccacttttgagaaataaaaaagccttaggtaaataagtcattctccctagcagagccacttgggtctcctgcatggaagccatcacacttgggcaggtgttcagtgactggtaggtgtagatacagcaggagtggccatgtggtccacggctttttaccccttcttgatcctcatttcttgggctgaatttaaactctctcacagaggtggctcacagaaaaagatggcagagggtgcaaccaacaatgctgaccggtgcttatcctcctagccctggggcatctatggtcggggggcgg

SEQ ID NO: 163063 - DNA, 936 bp, Homo Sapiens
ggggggaaaacggcggccgcggcgtctcctcccggacgctgaggggcccgaggagaccgtgaggctctggcctgcagctcgcgccgccatggacgctgccgaggtcgaattcctcgccgagaaggagctggttaccattatccccaacttcagtctggacaagatctacctcatcgggggggacctggggccttttaaccctggtttacccgtggaagtgcccctgtggctggcgattaacctgaaacaaagacagaaatgtcgcctgctccctccagagtggatggatgtagaaaagttggagaagatgagggatcatgaacgaaaggaagaaacttttaccccaatgcccagcccttactacatggaacttacgaagctcctgttaaatcatgcttcagacaacatcccgaaggcagacgaaatccggaccctggtcaaggatatgtgggacactcgtatagccaaactccgagtgtctgctgacagctttgtgagacagcaagaggcacattgccaagctggataacttgaccttgatggagatcaacaccagcggggactttcctcacacaagcgctcaaccacatgtacaaactccgcacgaacctccagcctctggagaggactcagtctcaggacttctagagaaaggcctggtgcaaggcggcttgctggggggatgtggagcgctccaggacgtgatgaagggactccggggttccgggagctctaaaaaacacttccttgatgcatgaaaaaatggggtgatggcggcaaggaaatgggattccaggatgttggtttggaaaaaaacaagtttgggggatttagccctttaaaaccttaacctcccctgggggacatttctttcatttcccccattcctggtttccagaaaaaaccaacccctttttttcccccccacacttttgg

SEQ ID NO: 163064 - DNA, 783 bp, Homo Sapiens
ggatggagatcaacaccagcgggactttcctcacacaagcgctcaaccacatgtacaaactccgcacgaacctccagcctctggagagtactcagtctcaggacttctagagaaaggcctggtgcaggcggcttgctgggggatgtgagcgctcaggacgtgatgaggtactcgtggttctggagctctagaaacacttctgatgcatgaaaaatgtgtgatggtgcaaggaatggattcaggatgttgttggagaaacaagtttgtgattagtccttaaaacttagctccctgggacattcttcaattccacatctgtttctagaaaccagccctttttccccccacttttgagaaataaaaaagccttaggtaaataagtcattctccctagcagagccacttgggtctcctgcatggaagccatcacacttgggcaggtgttcagtgactggtaggtgtacatacagcaggagtggccatgtggtccacggctttttaccccttcttgatcctgatttcttgggctgaatttagactctctcacagaggtggctcacagagaaggatggcagatggtgcagccaacaatgctgaccggtgcttatcctctaagccctgatccacaataaaaatggaccccaactccatttcgcccctcccggttatatccagaacaaacatgttcggtccggcctccggcccctcgaagaaagctttcctaagaacaatttccttttgggccgccggcgggcccccagaaaaggtaaacgcggacacact

SEQ ID NO: 163065 - DNA, 422 bp, Homo Sapiens
cctaactggaactgctcgccgctggagattgaggcggagaaccattactggctgagcatgccctacatgacccgggagcaggagcgcggcacgccgggtgcgcaggagggaggccttcgaggccataaaggcggccgccacttccaagttccccccgcatagattcattgcggaccagctcgaccatctcaatgtcaccaagaaatggtcctaatcctgagtcgtcacccttggattttatggatcacggagctgaccatctttacctggtcctggaactgaaaaactgtagcttgtgtgaaaatgagcctttggaccagtctttattaaaacaaacaaacatgagtagtctgcatatcgaatatctagagctctaaaccccccaatacttaaaagtctaattgctgtcctgcttatctcct

SEQ ID NO: 163066 - DNA, 974 bp, Homo Sapiens
ttttttaagaagggttttttatttatttccaggtttcttggtgccaattaactttaaaaaggttttcaaaaagccaaaaattccaaatttttgctttaaaaggggaacccattggtaaaagttaaacaatttctttgggtatttaccatgccttccgtaatgatcccatttcaaaacccatagagaaattacacctttgtgtcactgtttcaagagacaaacagatttgaacagctaaaacatcttaaaaatgcaccaagcttatgaagtctcaaacaaaacttgaatttttctgtacatactcctgtcaaatgaagtaatttcctgtacaccacttctcttgcaaactgtcttctatttcctttcatttgacctagatcgactacgagacctagagaaggatcgggacggcttgtgatttctctcccgagacagcgatctctctcttctcctatctctagaaagggacctgctccggctgcgagagaagcttctccttcttggagatctgcgacgaggtggaggactcctcctacgataatcatctcgagggcgacgaccccaagagggaggtgggccacgatttctacttcttttttcaccattcgacagttccactcttacacggcagccacatagtgttcttccatctagctctcggactgcatcagctgcatctcggggatcttcaaattcaacaaaagcaaagccgggtgggtttctagcaacccacacacttcggagtggtccatagtagccaaaagcccgttccaattccgtcttgttgccattgtttccaagattgcctacataaaccttacagtccaatggacaggaatcacgatgcatttcgagatctagggttaaaaaatgcggcggctcaaatccacacgctccgatgagtcttcccgctttcctccggcccaacaccaaccaactctctcactcacccggcgtccacgaaatggcggccc

SEQ ID NO: 163067 - DNA, 1282 bp, Homo Sapiens
  misc_feature (651)..(659): n is a, c, g, or t
  misc_feature (1055)..(1063): n is a, c, g, or t
gggatccccgagatgcagctgatgcagtccgagagctagatggaagaacactatgtggctgccgtgtaagagtggaactgtcgaatggtgaaaaaagaagtagaaatcgtggcccacctccctcttggggtcgtcgccctcgagatgattatcgtaggaggagtcctccacctcgtcgcagatctccaagaaggagaagcttctctcgcagccggagcaggtccctttctagagataggagaagagagagatcgctgtctcgggagagaaatcacaagccgtcccgatccttctctaggtctcgtagtcgatctaggtcaaatgaaaggaaatagaagacagtttgcaagagaagtggtgtacaggaaattacttcatttgacaggagtatgtacagaaaattcaagttttgtttgagacttcataagcttggtgcatttttaagatgttttagctgttcaaatctgtttgtctcttgaaacagtgacacaaaggtgtaattctctatggtttgaaatggatcatacgaggcatgtaataccaagaattgttactttacaatgttcccttaagcaaaattgaatttgctttgaacttttagttatgcacagactgataataaacctctaaacctgcccagcggaagtgtgnnnnnnnnnaaatttaaatacagaaacaactggcaaaaattgaaactaagatttacttttttttccatagctggggatataggctgcagctatagttgaaaaagccagtctttaaaaactgctgtggaaacacaggcccatcagggaaaacgaaatgctgcactaattaaattagaggttttgaaaaatccaactctcatcctgggcagaggttgcctagttggtatagaatgttaagtttcaagaaagtttacctttgctttaggtcataagttccttatttgattgctgtatatggatacatggctgttcgtgacattctttatgtgcaaattgtgatttcaaaaatgtcctgccagtttaagggtacattgtagagccgaactttgagttactgtgcaagannnnnnnnnaacatgcggtcattggtaatatggtttggtgagaatcctggggataaagtttggtttacaaatggtctcttaaactggaaagccggttttgtcctcggcaaactcaaatctgtgagcttggtaccaagtccaggtataagcattcctattggaagccatactatatatgtgcttgtaaaggtgcttgggaattactaaaatattagcataatggcgaat

SEQ ID NO: 163068 - DNA, 817 bp, Homo Sapiens
  misc_feature (742)..(742): n is a, c, g, or t
  misc_feature (778)..(778): n is a, c, g, or t
gggatggaagaacactatgtggctgccgtgtaagagtggaactgtcgaatggtgaaaaaagaagtagaaatcgtggccacctccctcttggggtcgtcgccctcgagatgattatcgtaggaggagtcctccacctcgtcgcagatctccaagaaggagaagcttctctcgcagccggagcaggtccctttctagagataggagaagagagagatcgctgtctcgggagagaaatcacaagccgtcccgatccttctctaggtctcgtagtcgatctaggtcaaatgaaaggaaatagaagacagtttgcaagagaagtggtgtacaggaaattacttcatttgacaggagtatgtacagaaaattcaagtttcgtttgagacttcataagcttggtgcatttttaagatgttttagctgttcaaatctgtttgtctcttgaaacagtgacacaaaggtgtaattctctatggtttgaaatggatcatacgaggcatgtaataccaagaattgttactttacaatgttcccttaagcaaaattgaatttgctttgaacttttagttatgcacagactgataataaacctctaaacctgcccagcggaagtgtgtttttttttaaatttaaatacagaaacaactggcaaaaattgaactaagatttacttttttttccatagctgggatataggcttgcagctatagttgaacaaggcagtcttttaaaaactgctgttganaacacagggccatcaggggaaaacggaaatggctgncactatttaaatttaggagggtttttggaaaaattccca

SEQ ID NO: 163069 - DNA, 1336 bp, Homo Sapiens
  misc_feature (517)..(517): n is a, c, g, or t
  misc_feature (909)..(917): n is a, c, g, or t
ctcacctcaccatttctagcttgttgaaacccaaaactaatctccaagaaggagaagcttctctcgcagccggagcaggtccctttctagagataggagaagagagagatcgctgtctcgggagagaaatcacaagccgtcccgatccttctctaggtctcgtagtcgatctaggtcaaatgaaaggaaatagaagacagtttgcaagagaagtggtgtacaggaaattacttcatttgacaggagtatgtacagaaaattcaagttttgtttgagacttcataagcttggtgcatttttaagatgttttagctgttcaaatctgtttgtctcttgaaacagtgacacaaaggtgtaattctctatggtttgaaatggatcatacgaggcatgtaataccaagaattgttactttacaatgttcccttaagcaaaattgaatttgctttgaacttttagttatgcacagactgataataaacctctaaacctgcccagcggaagtgtgatttttttnaaatttaaatacagaaacaactggcaaaaattgaactaagatttacttttttttccatagctgggatataggctgcagctatagttgaacaagcagtctttaaaaactgctgtgaaacacaggccatcagggaaaacgaaatgctgcactattaaattagaggtttttgaaaaatccaactctcatcctgggcagaggttgcctagttggtatagaatgttaagtttcaagaaagtttacctttgctttaggtcataagttccttatttgattgctgtatatggatacatggctgttcgtgacattctttatgtgcaaatttgtgatttcaaaaatgtcctgccagtttaagggtacattgtagagccgaactttgagttactgtgcaagannnnnnnnncatgctgtcatttgtaatatgttttgtgagaatccttgggattaaagttttggttacaaattgttctttaacttgaaagcctgtttttccttgcaaactcaaatctgtgagcttggtaccaagtccaggtataacattcctattggaagccatacttatattttcttgtaaagtgcttttgaattaataaaatattagcataattgtgtatagtcagttgaacccactgttaccattgttcttatcccatgggaagcagttggttacacgattcttattttataagaaacagctgagaggcactatggattagtcttctgaagtgaaggaaatatacgatgtcacctaagtgatagttaacccatttttcgactaaggcatcagaacccagttccgggtccataatcttcaggtgacca

SEQ ID NO: 163070 - DNA, 1082 bp, Homo Sapiens
gtgcgtccagaccgctgctcacgcccgatggccagccagtccagctgaatgaaacctgggtcaacagccatgtggacaactgcaccgtgtacctctgtgaggctgagggtggagtccatttgctgaccccacagccctgcatcctgcccagatgtgtccagctgcagggggagcctcaggaaaaccggctgctgctactcctgtgaggaggactcctgtcaagtccgcatcaacacgaccatcctgtggcaccagggctgcgagaccgaggtcaacatcaccttctgcgagggctcctgccccggagcgtccaagtactcagcagaggcccaggccatgcagcaccagtgcacctgctgccaggagaggcgggtccacgaggagacggtgcccttgcactgtcctaacggctcagccatcctgcacacctacacccacgtggatgagtgtggctgcacgcccttctgtgtccctgcgcccatggctcccccacacacccgtggcttcccggcccaggaggccactgctgtctgagaacgttctgcctccatccccatgctctgtccacctggagccaggatgtgcattgtctgatcatgaaaaccttgggcctcctctgcggagccccccggcctgtgtgtggcaccccgcgctccgtgctcctgctgcccaccccgtgggtgaaaccggccccagaagggtgaggggccagcaggacccctttcgggagggcgccactcaggagtcctaccctgggagagcctgtggcccaccttggccttgcccctccctgatgtcactgggacgccctggaacaaactaagcatgtgcgggcctatgtgtccctgccacggccggagcgcccgcgcagcacggattccagctggccacctccggccgctggggcagacaggctgggtccaggaagggcaacttgcctgccagaaacttgccaagggaaggggggccgcctgtccctggccggctgcaggggaaactcagggcttagggcgccacgggccatgctctaaagaggggggaaagaatactcgaaaggccccctttggtttaactcgcgctaa

SEQ ID NO: 163071 - DNA, 507 bp, Homo Sapiens
cctaaactggaactgctcgctacctcccgcttgatcttcttcttcctctgctggaagggcgactggcctgccgatcatctcgtacaggaggcaagccgagcgccaaccagtcagggctgaacgtgtacccgttcatttccttcaccacctccggacccatgtaacccaccggtgcccacaacgcccttttgatggtctggccctcgggcacatgcacagctagtcccaggtcagagatgcggatgtggccgtggtcatccagcaagatgttctcgggcttcaggtccctgtacacgatgcgctcccggagcaggtcctccaggccacagcagatctcggcggcgtagaagacggcacgcgcttcggggaagccagcctggcccatgtggtagatgtggaacttgaggtcgcccccagttcatcagtgtcagcaccaggcacagcgcgtccattggtctcataggcgtagcacaagctcactacaaacctactgtcacgtttctcata

SEQ ID NO: 163072 - DNA, 1003 bp, Homo Sapiens
  misc_feature (872)..(872): n is a, c, g, or t
gctgggtggcgaattcggcacgagggcggcgcagtctcggtaggcggtatgagtttggctgggggccgggcaccccggaagaccgctgggaaccggctttctgggcttttggaggcagaggaggaagatgagttctaccagacgacttatgggggtttcacagaggaatccggagatgatgagtatcaaggggaccagtcagacacagaggacgaagtggactctgactttgacattgatgaaggggatgaaccatccagtgatggagaagcagaagagccaagaaggaagcgccgagtagtcaccaaggcctataaggaacctctcaagagcttaaggcctcgaaaggtcaacaccccggctggtagctctcagaaggcgcgagaagagaaggcactactgccattagaactacaagatgacggctctgacagtcggaagtctatgcgtcagtctacagctgagcatacacgacaaacgttccttcgggtacaggagaggcagggccagtcaagacggcgaaaggggccccactgtgagcggccactaacccaggaggaactgctccgggaggccaagatcacagaagagcttaatttacggtcactggagacatatgagcggctcgaggctgataaaaagaagcaggttcataagaagcggaagtgcccggggccataatcacctatcattcagtgacagtgccacttgttggggagccaggccccaaggaagagaacgttgacatagaaggacttgatcctgctccctcggtgtctgcattgactcctcatgctgggactggacccgtcaacccccctgctcgctgctcacgtaacttcatcactttttagtgatgatgcaactttccnaggaatgggttcccccaagggcgggccccacaaaaagtccttggttccgggaggtctggtccaggtgaccccctccgtcccagccccttattaccggggaaccctggttaaaaggacattaccccctaatc

SEQ ID NO: 163073 - DNA, 962 bp, Homo Sapiens
  misc_feature (799)..(801): n is a, c, g, or t
  misc_feature (806)..(806): n is a, c, g, or t
  misc_feature (809)..(809): n is a, c, g, or t
  misc_feature (811)..(812): n is a, c, g, or t
  misc_feature (814)..(814): n is a, c, g, or t
  misc_feature (816)..(816): n is a, c, g, or t
gtgccgaatcggcacgaggagagcttaatttacggtcactggagacatatgagcggctcgaggctgataaaaagaagcaggttcataagaagcggaagtgccccgggcccataatcacctatcattcagtgacagtgccacttgttggggagccaggccccaaggaagagaacgttgacatagaaggctctttgtgtttttccttgtcttttgtcctcagacttgatcctgctccctcggtgtctgcattgactcctcatgctgggactggacccgtcaacccccctgctcgctgctcacgtaccttcatcacttttagtgatgatgcaactttcgaggaatggttcccccaagggcggcccccaaaagtccctgttcgtgaggtctgtccagtgacccatcgtccagccctataccgggaccctgttacagacataccctatgccactgctcgagccttcaagatcattcgtgaggcttacaagaagtacattactgcccatggactgccgcccactgcctcagccctgggccccggcccgccacctcctgagcccctccctggctctgggccccgagccttgcgccagaaaattgtcattaaatgaagagatgtctagtcctcagaaacttctttccctgccctgattggggctcttgctgttccgtttcttctccctgcttctcccctttgtcatctctgatctttgcctaatctgtttctttttccttttccccctagttcttacagggtttcgttgtgttttttaatctaataaaatagaaacgatcccccccnnnccaanaanannananaaaaacctcgaagggcatctaattgtcggggggccggaaaaaagagggaaatggaaatgggcccatgggtccatagcctggtttccctggaacccagcttttctttggtacaaaagtgggtaaaaactggcccgggttctccccca

SEQ ID NO: 163074 - DNA, 1231 bp, Homo Sapiens
agttctaccagacgacttatgggggtttcacagaggaatccggagatgatgagtatcaaggggaccagtcagacacagaggacgaagtggactctgactttgacattgatgaaggggatgaaccatccagtgatggagaagcagaagagccaagaaggaagcgccgagtagtcaccaaggcctataaggaacctctcaagagcttaaggcctcgaaaggtcaacaccccggctggtagctctcagaaggcgcgagaagagaaggcactactgccattagaactacaagatgacggctctgacagtcggaagtctatgcgtcagtctacagctgagcatacacgacaaacgttccttcgggtacaggagaggcagggccagtcaagacggcgaaaggggccccactgtgagcggccactaacccaggaggaactgctccgggaggccaagatcacagaagagcttaatttacggtcactggagacatatgagcggctcgaggctgataaaaagaagcaggttcataagaagcggaagtgccccgggcccataatcacctatcattcagtgacagtgccacttgttggggagccaggccccaaggaagagaacgttgacatagaaggacttgatcctgctccctcggtgtctgcattgactcctcatgctgggactggacccgtcaacccccctgctcgctgctcacgtaccttcatcacttttagtgatgatgcaactttcgaggaatggttcccccaagggcggcccccaaaagtccctgttcgtgaggtctgtccagtgacccatcgtccagccctataccgggaccctgttacagacataccctatgccactgctcgagccttcaagatcattcgtgaggcttacaagaagtacattactgcccatggactgccgcccactgcctcagccctgggccccggcccgccacctcctgagcccctccctggctctgggccccgagccttgcgccagaaaattgtcattaaatgaagagatgtctagtcctcagaaacttctttcctgccctgattggggctcttgctgttccgtttcttctcactgcttctcccctttgtcatctctgatccttgcccaatccggttcctttttccttttcccctagggtcttacggggttccttgggggttttttatctaataaaatagcacggatccccgcaccggggcgaagcggtgccgggccgccct

SEQ ID NO: 163075 - DNA, 693 bp, Homo Sapiens
  misc_feature (162)..(218): n is a, c, g, or t
tgatctaggaggatccccgcctaaagtggaactgaccgtttccgacctgggccggttcacccctccttaggcaacctggtggtcccccgctcccgggaggtcaccatattgatgccgaacttagtgcggacacccgatcggcatagcgcactacagcccagnnnnnnnnnnnnnnnnnnnnnnnnnnnnnnnnnnnnnnnnnnnnnnnnnnnnnnnnngagtgagctaccatgcccggcctggtgaacttctttccataagaattttaaagtaacaaaataagcgcaaaagtgaaacaattgaaggatatttaatgcaaagttagcatcccacccccttcactcccacaccctagagtcaccagtatttgctgttctcctatacatttaatcgttgacactttatatacagctatttctaccattcatatatcagtgaaaacaaaacataagcagcaagacatgctaagcagcaaaagggagagtcttttcctttttctgcacccagcagctctccaggtcctcaggggaagggccctctggtcaggctgggccctgagtgaaggagggaacttttccaggtgctccttgtcttctgagatgttgggcccctcttgggatggagatgaagcagaatccactggtgaaatcattagacttggagacaccagcacacaccttttctctaagaagt

SEQ ID NO: 163076 - DNA, 737 bp, Homo Sapiens
  misc_feature (476)..(532): n is a, c, g, or t
acttcttagagaaaaggtgtgtgctggtgtctccaagtctaatgatttcaccagtggattctgcttcatctccatcccaagaggggcccaacatctcagaagacaaggagcacctggaaaagttccctccttcactcagggcccagcctgaccagagggcccttcccctgaggacctggagagctgctgggtgcagaaaaaggaaaagactctcccttttgctgcttagcatgtcttgctgcttatgttttgttttcactgatatatgaatggtagaaatagctgtatataaagtgtcaacgattaaatgtataggagaacagcaaatactggtgactctagggtgtgggagtgaagggggtgggatgctaactttgcattaaatatccttcaattgtttcacttttgcgcttattttgttactttaaaattcttatggaaagaagttcaccaggccgggcatggtagctcactcnnnnnnnnnnnnnnnnnnnnnnnnnnnnnnnnnnnnnnnnnnnnnnnnnnnnnnnnnctgggctgtagtgcgctatgccgatcgggtgtccgcactaagttcggcatcaatatggtgacctcccgggagcgggggaccaccaggttgcctaaggaggggtgaaccggcccaggtcggaaacggagcaggtcaaaactcccgtgctgatcagtagtgggatcgcgcccacaacccacgcgcccacaacccacaacccatgacg

SEQ ID NO: 163077 - DNA, 309 bp, Homo Sapiens
ggtccctgattgcgaggaatgctgagtgcagtggctattcacaggcgcgatcccactactgatcagcacgggagttttgacctgctccgtttccgacctgggccggttcacccctccttaggcaacctggtggtcccccgctcccgggaggtcaccatattgatgccgaacttagtgcggacacccgatcggcatagcgcactacagcccagaactcctgggctcaagcgatcctcccacctcagccttcctaatagctgggattacaggcgtgtgccaccatgcccagctaatttttatatttttact

SEQ ID NO: 163078 - DNA, 668 bp, Homo Sapiens
  misc_feature (116)..(285): n is a, c, g, or t
  misc_feature (315)..(454): n is a, c, g, or t
actcaagagtctgagccaggaggttcacccgagcccagaagttaaagcctgaagtgagccgtgattatgccactaaactctggcaacagagcgagaccctgtctcgggagacacannnnnnnnnnnnnnnnnnnnnnnnnnnnnnnnnnnnnnnnnnnnnnnnnnnnnnnnnnnnnnnnnnnnnnnnnnnnnnnnnnnnnnnnnnnnnnnnnnnnnnnnnnnnnnnnnnnnnnnnnnnnnnnnnnnnnnnnnnnnnnnnnnnnnnnnnnnnnnnnnnnnnnnnnnatatctgattaagaatttcaaggctggagnnnnnnnnnnnnnnnnnnnnnnnnnnnnnnnnnnnnnnnnnnnnnnnnnnnnnnnnnnnnnnnnnnnnnnnnnnnnnnnnnnnnnnnnnnnnnnnnnnnnnnnnnnnnnnnnnnnnnnnnnnnnnnnnnnnnnnnnnnnngcctggtggtgtgcacctgtactcccaactacttgggaggctgaggtgggaggatcgcttgagcccaggagttctgggctgtagtgcgctatgccgatcgggtgtccgcactaagttcggcatcaatatggctcccggcccttgctcattattttaaaaacatattttgcctatagttaaagtactatgataatgttgattgggttgacgtcag

SEQ ID NO: 163079 - DNA, 383 bp, Homo Sapiens
  misc_feature (139)..(197): n is a, c, g, or t
agtgctatgctgaggtgactctagaggattcactggtctgaacttaggcaacctggtgggtccccgctcccgggaggtcaccatattgatgccgaacttagtgcggacacccgatcggcatagcgcactacagcccagnnnnnnnnnnnnnnnnnnnnnnnnnnnnnnnnnnnnnnnnnnnnnnnnnnnnnnnnnnnatgagccactacgcccggcagtaagattaattttaatttctcaaacatactgaagaggaggtatgaacacaaaatgctgagcatggctgctgtgaggagtcaggtgtgtaattccagcagtgattgtgtcaggctttacacgtgcactgcaacctggcaaaaattcctgtttgtggaggtagcact

SEQ ID NO: 163080 - DNA, 928 bp, Homo Sapiens
cagtacctataggcgctaggtactactccaaccatacctctgccccagctactgctccgtggcctcccaacacaagctgaccctgtccgaagtgaccggggcagggactctgcgtaggagcagttcccaaaacccatcaggccctgtgtaataccacccagaaggcgagcgacggggtcctactatctggctgctcccgccgggaccatctgggcttgcaacaccgggctcactccctgcctatctaccactgtactcaacctcaccaccgattactgtgtcctggttgagctctggccaaaggtgacctaccactcccctggttatgtttatgaccagtttgagagaaaaaccaaatataaaagagagccggtgtcattaactctggccctgctgttgggaggacttactatgggcggcatagctgcaggagtaggaacagggactacagccctagtggccaccaaacaattcgagcagctccaggcagccatacatacagaccttggggccctagaaaaatcagtcagtgccctagaaaagtctctgacctcgttgtctgaggtggtcctacagaaccggagaggattagatctgctgttcctaaaagaaggaggattatgtgctgccctaaaagaagaatgctgtttctatgcagaccacactggcgtagtaagggatagcatggctaagctaagagaaaggctaaaccagaggcaaaaattgttcgaatcaggacaagggtggtttgagggactgtttaacaggtagccatggttcacgaccctgatatccaccattatgggccctctgatagtacttttaattaatcgctactcctcggaccctgcattctcaaccgcttggtccagtttgtaaaagacagaatttcggtggtgcaggtcctggttctgaccaacagtatcac

SEQ ID NO: 163081 - DNA, 411 bp, Homo Sapiens
actttctggaaaatctggtaatcaccggccgtatggctattcgctacgctggctccggcgtctcggcggattgaagggccactgatggcaatgcttttgtcggttgttgttgccgggtagacgcctactcctattccgcccgtgagttcggccactcctggaacgttgcgggccgtgttcatatgagacctgccgaccacggccagcaccttttcgcctggctggcggttttgcagcatgcgcgtggcgtagtagttgaactcctgcaggcgagtaatgccccgatcgttgtctccgacgtttttgtagacaatctgccatatccgagcgtcgggtcagataatgatggtcgaggggttaatctttatccgtgttcacgagcagtcatacactcgataccacaatcaggcc

SEQ ID NO: 163082 - DNA, 213 bp, Homo Sapiens
atatggacggcgtggcgctaccgaattgggtctgatgcggcgcgaccgtgtcgaaggctgcctgttcggcaacggcgagcgtaccggtaacgtcgacctggtgaccgtggcgttgaacatgtacacccaggacctcgaccctcagttggacttctccgacatcgacggcatccgcaaatgtcgtcgaagagtgcagccagatcccggttcacc

SEQ ID NO: 163083 - DNA, 1307 bp, Homo Sapiens
  misc_feature (40)..(40): n is a, c, g, or t
ggtcctgggcatttataccttcacgaagcgggtagccttngaggagatggagaataagccccggaaacagcagggctacagcaccgtgtcccacttcaacattgtgcactacgactgccatctggctgccgtcaggttggctcgaggccgggaagagtgggagagtgccgccctgcagaatgccaacaccaagtgcaacgggctccttccggtctggggacctcatgtccctgaatcagcttttgccacttgcttggcaagacacaacacttacctccaggaatgtacaggccagcgggagcccacgtatcagctcaacatccacgacatcaaactgctcttcctgcgcttcgccatggagcagtcgttcagcgcagacactggcgggggcggccgggagagcaacatccacctgatcccgtacatcattcacactgtgctttacgtcctgaacacaacccgagcaacttcccgagaagagaagaacctccaaggctttctggaacagcccaaggagaagtgggtggagagtgcctttgaagtggacgggccctactatttcacagtcttggcccttcacatcctgccccctgagcagtggagagccacacgtgtggaaatcttgcggaggctgttggtgacctcgcaggctcgggcagtggctccaggtggagccaccaggctgacagataaggcagtgaaggactattccgcttaccgttcttcccttctcttttgggccctcgtcgatctcatttacaacatgtttaagaaggtgcctaccagtaacacagagggaggctggtcctgctctctcgctgagtacatccgccacaacgacatgcccatctacgaagctgccgacaaagccctgaaaaccttccaggaggagttcatgccagtggagaccttctcagagttcctcgatgtggccggtcttttatcagaaatcaccgatccagagagcttcctgaaggacctgttgaactcagtcccctgaccaccacacagcagctgcggcggcgaagacgaagctggcttgccttccaccctctgttctccctccttgtgcattaagttccctccgcgggatgctgcattgttaccccgccctcccctctctcatttttcttggtgtggcttggggtttttaggcttcctgttttatctcgtgtgtgtggtgcaccagctatgaggttgtctgtaacccaagccatcaaagggcctgtacatacctaggagccatgagcttgtcccggccagcttcatacttgagtgtgcacatcttgaaaaccgtcgaattcgat

SEQ ID NO: 163084 - DNA, 511 bp, Homo Sapiens
ctgattgagtacagcaacctcaagaacatgcccatggaggcagctgccgacacagccctgaaaaccttccagtaggagttcatgccagtggagaccttctcagagttcctggatgtggccggtcttttatcagaaatcaccgatccagagagcttcctgaaggacctgttgaactcagtcccctgaccaccacacagcagctgcggcggcgaagacgaagctggcttgccttccaccctctgttctccctccttgtgcattaagttccctccgcgggatgctgcattgttaccccgccctcccctctctcatttttcttggtgtggcttggggtttttaggcttcctgttttatctcgtgtgtgtggtgcaccagctatgaggttgtctgtaacccaagccatcaaagggcctgtacatacctaggagccatgagttgtcccggccagcttcatacttgagtgtgcacatcttgagaaataaacaagtgacttaacacacattgtaaaaaa

SEQ ID NO: 163085 - DNA, 1051 bp, Homo Sapiens
ggccacatcgatatatccctgcccagtcgaagctccgccaccctgtaggcttctgtctcatggtaattactgggcctggcctctgtaagcctgtgtatgttatcaatactgtttcttcctgtgagttccattatttctatctcttatgggcaaagcattgtgggtaattggtgctggctaacattgcatggtcggatagagaagtccagctgtgagtctctccccaaagcagccccacagtggagcctttggctggaagtccatgggccaccctgttcttgtccatggaggactccgagggttccaagtatactcttaagacccactctgtttaaaaatatatattctatgtatgcgtatatggaattgaaatgtcattattgtaacctagaaagtgctttgaaatattgatgtggggaggtttattgagcacaagatgtatttcagcccatgccccctcccaaaaagaaattgataagtaaaagcttcgttatacatttgactaagaaatcacccagctttaaagctgcttttaacaatgaagattgaacagagttcagcaattttgattaaattaagacttgggggtgaaactttccagtttactgaactccagaccatgcatgtagtccactccagaaatcatgctcgcttcccttggcacaccagtgttctcctgccaaatgaccctagaccctctgtcctgcagagtcagggtggcttttcccctgactgtgtccgatgccaaggagtcctggcctccgcagatgcttcattttgacccttggctgcagtggaagtcagcacagagcagtgccctggctgtgtccctggacgggtggacttagctagggagaaagtcgaggcagcagccctcgaggccctcacagatgtctaggcaggcctcatttcatcacgcagcatgtgcaggcctggaagagcaaagccaaatctcagggaagtccttggttgatgtatctgggtctcctctggagcactctgccctcctgtcacccagtagagtaaataaacttccttggctcctgaaaaa

SEQ ID NO: 163086 - DNA, 547 bp, Homo Sapiens
gcgactctagggatcgctatcctaaacagccctgtgcactccaccgtcttcccagcactgcagggcgcccagaccaaaatgagtgccagcgaccccaactcctccatcttcctcaccgacacggccaagcagatcaaaaccaaggtcaataagcatgcgttttctggagggagagacaccatcgaggagcacaggcagtttgggggcaactgtgatgtggacgtgtctttcatgtacctgaccttcttcctcgaggacgacgacaagctcgagcagatcaggaaggtgagcagggaaccccaagggcccacagccgcctcctgccacccactcctgcccatggggcctggaaggctccaacagccaggcatgaaggcttggtcggaggtgctcaactgaaacaaggtgaaaactgagtagactcgccctcatggtttttaggcctgggctcagaagcctcatgaacaaatctcgaaagagcagatacaaatcactattcatttaggccttatcccatgtgccattgaccaggatcctctagagtcga

SEQ ID NO: 163087 - DNA, 947 bp, Homo Sapiens
aggacggatatccagtgccttatcccatgtgccattgaccaggatccttactttagaatgacaagggacgtcgcccccaggatcggctatcctaaaccagccctgttgcactccaccttcttcccagccctgcagggcgcccagaccaaaatgagtgccagcgaccccaactcctccatcttcctcaccgacacggccaagcagatcaaaaccaaggtcaataagcatgcgttttctggagggagagacaccatcgaggagcacaggcagtttgggggcaactgtgatgtggacgtgtctttcatgtacctgaccttcttcctcgaggacgacgacaagctcgagcagatcaggaaggattacaccagcggagccatgctcaccggtgagctcaagaaggcactcatagaggttctgcagcccttgatcgcagagcaccaggcccggcgcaaggaggtcacggatgagatagtgaaagagttcatgactccccggaagctgtccttcgactttcagtagcactcgttttacatatgcttataaaagaagtgatgtatcagtaatgtatcaataatcccagcccagtcaaagcaccgccacctgtaggcttctgtctcatggtaattactgggcctggcctctgtaagcctgtgtatgttatcaatactggttcttcctgtgagttccattatttctatctcttatgggcaaagcattgtgggtaattggtgctggctaacattgcatggtcggatagagaagtccagctgtgagtctctccccaaagcagccccacagtggaacctttggctggaagtccattgggccaccctgttcttggccatggaggactccgagggttccaagtatactcttaaggacccactcttgtttacaacatatatattctaatgtattgcgtaaaacattagcaatccacaaagggg

SEQ ID NO: 163088 - DNA, 714 bp, Homo Sapiens
  misc_feature (60)..(60): n is a, c, g, or t
agggaagtcctagggtggtttcagtttctcccagacatacctaaatttttacattcaatnccttttaaagaaaatctgtatttcaaagaatctttctctgcagtaaatctcgcaggggaatttgcactattacacttgaaagttgttattgttaaccttttcggcagcttttaataggaaagttaaacgttttaaacatggtagtactggaaattttacaagacttttacctagcacttaaatatgtataaatgtacataaagacaaactagtaagcatgacctggggaaatggtcagaccttgtattgtgtttttggccttgaaagtagcaagtgaccagaatctgccatggcaacaggctttaaaaaagacccttaaaaagacactgtctcaactgtggtgttagcaccagccagctctctgtacatttgctagcttgtagttttctaagactgagtaaacttcttatttttagaaagtggaggtctggtttgtaactttccttgtacttaattgggtaaaagtcttttccacaaaccaccatctattttgtgaactttgttagtcatcttttatttggtaaattatgaactggtgtaaatttgtacagttcatgtatattgattgtggcaaagttgtacagatttctatattttggatgagaaatttttcttctctctataataaatcgtttcttatcttggcatttcaaa

SEQ ID NO: 163089 - DNA, 487 bp, Homo Sapiens
  misc_feature (20)..(20): n is a, c, g, or t
  misc_feature (38)..(38): n is a, c, g, or t
  misc_feature (44)..(44): n is a, c, g, or t
  misc_feature (51)..(51): n is a, c, g, or t
  misc_feature (60)..(60): n is a, c, g, or t
  misc_feature (68)..(68): n is a, c, g, or t
actggaatttacaagccttncccagccctaaatatganaaatgncataagncaaaccagnaagcatgncccggggaaatggtcagcccttgcattgtgtttttggccttgaaagtagcaagtgaccagaatccgccatggcaacaggctttaaaaaagacccttaaaaagacactgtctcaactgtggtgttagcaccagcccagctctctgtacatttgcctagccttgtagttttcctaagactgagtaaacttcttatttttagaaagtggaggtcctggtttgtaactttccttgtacttaattgggtaaaagtcttttccacaaaccaccatctattttgtgaactttgttagtcatcttttatttggtaaattatgaactggtgtaaatttgtacagttcatgtatattgattgtggcaaagttgtacagatttctatattttggatgagaaatttttcttctctctataataaatcgttt

SEQ ID NO: 163090 - DNA, 1183 bp, Homo Sapiens
caggaaagcgatacaggagaggataacaggcaaagagataacaggatacagttgacatagcatataggagggactatgtgcaatagaggaactcagtgagattctctcagatccgaagtgatgataccaaaggatttgttgaccccaacactgaagaaaatcttacctatctgcaactaaaagaaagatgcattaaggatgaggaaacagggctctgtcttctgcctctgaaagaaaagaagaaacaggtgcagacatcacaaaagaataccctcaggaagcgtagagtggtcatagttgacccagaaaccaataaagaaatgtctgttcaggaggcctacaagaagggcctaattgattatgaaaccttcaaagaactgtgtgagcaggaatgtgaatgggaagaaataaccatcacgggatcagatggctccaccagggtggtcctggtagatagaaagacaggcagtcagtatgatattcaagatgctattgacaagggccttgttgacaggaagttctttgatcagtaccgatccggcagcctcagcctcactcaatttgctgacatgatctccttgaaaaatggtgtcggcaccagcagcagcatgggcagtggtgtcagcgatgatgtttttagcagctcccgacatcaatcagtaagtaagatttccaccatatccagcgtcaggaatttaaccataaggagcagctctttttcagacaccctggaagaatcgagccccattgcagccatctttgacacagaaaacctggagaaaatctccattacagaaggtatagagcggggcatcgttgacagcatcacgggtcagaggcttctggaggctcaggcctgcacaggtggcatcatccacccaaccacgggccagaagctgtcacttcaggacgcagtctcccagggtgtgattgaccaagacatggccaccaggctgaagcctgctcagaaagccttcataggcttcgagggtgtgaagggaaagaagaagatgtcagcagcagaggcagtgaaagaaaaatggctcccgtatgaggctggccagcgcttcctggagttccagtacctcacgggaggtcattgttgacccggaagtgcatgggaggataagcaccgaagaagccatccggaaggggttcatagatggccgcgccgcacagaggc

SEQ ID NO: 163091 - DNA, 601 bp, Homo Sapiens
ggtactagtgggaatttggtgccagtaaccaccaattaaagaacgaatgtctcgggcagtatcagatagcagttgaatcaccttgtgctgctccatccactgtggattattatcctatggcagaaaagctttataattgctggcttaggacagagcaatactttacaataaaagctctacacattttcaaggagttatgctggattcatggaactctaattctgtacataaaaattttaaagttatttgtttgctttcaggcaagtctgttcaatgctgtactatgtccttataagagaatttggtaatttggttgatgtggtaagcggataggtgagttttgtataaatcttttgtgtttgagatcaagctgaaatgaaaacactgaaaaacatggattcatttctataacacatttatttaagtatataacacgttttttggacaagtgaagaatgtttaatcattctgtcatttgttctcaatagatgtaactgttagactacggctatttgaaaaaatgtgcttattgtactatattttgttattccaattatgagcagagcagatccgctatccgtcggggatcctctagagcgac

SEQ ID NO: 163092 - DNA, 615 bp, Homo Sapiens
  misc_feature (212)..(212): n is a, c, g, or t
tacgtagcagcgcacacatcaatgaatatttactctcctccattctccatcactttttttgctatcaagaactccggaccttgccatggagaagtttagagtggaactcttgtggagagctggtttattttctgccctgtgcgacgagtttcagctgaccaagaaaggagtcaagttattaaaaagcatcacaatgtagatctccaggctgntttttggtttttggtggtaaagactggggaaagggggactatttattctgccttaaatcaatggcaaataagtcaagatgacattttgtgaatgtagactatggatacactcctaatagattgatgtagtcataaaagggggtcaagtagatgtttttctgttatgtaagcaacaatttttccgtgtcttattgagtatggctagcgattatttattacatgctagatgggttctttgcatgtgggttccatataggtgcagaaatttcctcagccactggagggatttcgaccatatttgtcatttggatgagctgttattagattgaaatctacacatcatttcattaaaaattgtgcctagaaaacagcaagctgtgcacatggcgagtgaattcagcca

SEQ ID NO: 163093 - DNA, 866 bp, Homo Sapiens
gggaagaagagggaggcgaggaggaagaggaggcggccatgtatgaggaggagatggaaagggaagagatcaccacgaagaagagaaaactggggaagaacccagacgttgacacaagcttcttgcctgatcgagaccgtgaggaggaggagaatcggcttcgggaagagctgcggcaggagtgggaagccaagcaggagaagatcaagagtgaggagatcgagatcaccttcagctactgggatggctctgggcaccggcggacagtcaagatgagaaagggcaacaccatgcagcagttcctgcagaaggcgctcgagatccttcggaaagacttcagtgagctgaggtccgcaggggtggagcagctcatgtacatcaagggaggacttgatcatccctcaccatcacagcttctacgacttcatcgtcaccaaggcacgggggaagagtggaccactcttcaactttgatgttcatgacgatgtgcggttgctcagtgacgccactgtggagaaggatgagtcccatgcaggcaaggtggtgctgaggagctggtacgagaagaacaagcacatctttcccgccagccgctgggaaccctacgaccctgaaaagaagtgggacaagtacacgatccgctgagcatccaggaggctgcgcggccccggctcctcagctccctcagtgtgccccgtggtgtcaccgggactccaggcacccgctcccctgcgaccatgccaggcacgctgggaggaggacggcagctgctcgtgtcctgcccctgccacatcagtgactgctttattcttttccaataaagaagtgcacgtgtcagagctggagcgcctgcattgtgagaaacc

SEQ ID NO: 163094 - DNA, 964 bp, Homo Sapiens
  misc_feature (824)..(824): n is a, c, g, or t
  misc_feature (853)..(853): n is a, c, g, or t
  misc_feature (858)..(858): n is a, c, g, or t
  misc_feature (875)..(875): n is a, c, g, or t
  misc_feature (893)..(893): n is a, c, g, or t
  misc_feature (909)..(910): n is a, c, g, or t
cctgggtggcgaattcggcacgagggggcccggcgcgacctgcaggagcgtagagagcgcgggactagagtgcagagctccgggacgtggatcggagccggcgcgatgggcggagagcaggaggaggagcggttcgacggcatgttgctggccatggctcagcagcacgagggcggcgtgcaggagcttgtgaacaccttcttcagcttccttcgacgcaaaacagactttttcattggaggagaagaagggatggcagagaagcttatcacacagactttcagccaccacaatcagctggcacagaagacccggcgggagaagagagcccggcaggaggccgagcggcgggagaaggcggagcgggcggccagactggccaaggaagccaagtcagagacctcagggccccagatcaaggagctaactgatgaagaggcagagaggctgcagctagagattgaccagaaaaaggatgcagagaatcatgaggcccagctcaagaacggcagccttgactccccagggaagcaggatactgaggaagatgaggaggaagatgagaaggacaaaggaaaactgaagcccaacctaggcaacggggcagacctgcccaattaccgctggacccagaccctgtcggagctggacctggcggtccctttctgtgtgaacttccggctgaaagggaaggacatggtggtggacatccagcggcggcacctccgggtggggctcaaggggcagccagcgatcattgatggggagctctacaatgaagtgaaggtggaggagagctcgtggctcattgaggacggcaaggntggtgactggtgcatctggagaagatcanataanaatggagtgggtggagncccgcttgggtgtccagntgaccccctgagatcnnacaccaaggaaagattaaacccctggagaaaatttccaaagcctggtcaaggac

SEQ ID NO: 163095 - DNA, 978 bp, Homo Sapiens
gtcgttgggcccggcgcgacctgcaggagcgtagagagcgcgggactagagtgcagagctccgggacgtggatcggagccggcgcgatgggcggagagcaggaggaggagcggttcgacggcatgttgctggccatggctcagcagcacgagggcggcgtgcaggagcttgtgaacaccttcttcagcttccttcgacgcaaaacagactttttcattggaggagaagaagggatggcagagaagcttatcacacagactttcagccaccacaatcagctggcacagaagacccggcgggagaagagagcccggcaggaggccgagcggcgggagaaggcggagcgggcggccagactggccaaggaagccaagtcagagacctcagggccccagatcaaggagctaactgatgaagaggcagagaggctgcagctagagattgaccagaaaaaggatgcagagaatcatgaggcccagctcaagaacggcagccttgactccccagggaagcagcaggatactgaggaagatgaggaggaagatgagaaggacaaaggaaaactgaagcccaacctaggcaacggggcagacctgcccaattaccgctggacccagaccctgtcggagctggacctggcggtccctttctgtgtgaacttccggctgaaagggaaggacatggtggtggacatccagcggcggcacctcccgggtggggctcaaggggcagccagcgatcattgatggggagctctacaatgaagtgaagggggaggaaagctcgtggcctcattgaagacggccaggtggtggactgttgcatctgggagaagatccataaacatgtgagtggttggaaaccccctttggggttccagtggaacccttgagaatccaccacccaaggaaggattttaacccctgaagaaaattctccaggcgctgtctcaaaaccccgggggacggagggaaggat

SEQ ID NO: 163096 - DNA, 959 bp, Homo Sapiens
  misc_feature (185)..(262): n is a, c, g, or t
  misc_feature (783)..(783): n is a, c, g, or t
  misc_feature (924)..(924): n is a, c, g, or t
atggggggagagagccgccaacccgcttattctattgggcccgggattttccttagggaaaacaggttaggggcccgggttcgggtttcattggtgggggcccgggggcgcccaacgaaaatgggctagaaagacttttcggagggccgaagcccggccacatttttagttggatggatattggnnnnnnnnnnnnnnnnnnnnnnnnnnnnnnnnnnnnnnnnnnnnnnnnnnnnnnnnnnnnnnnnnnnnnnnnnnnnnncaaatcgttttaatgtgtaacagtaggccaactggggaggacaaggtcccaagacccagcctttctcctgatgccccgggacctgtgtgcctgggccagtcccatgcctgccccaagccctgaggcccacaagtcccagagaagagtgggaaagaaagttgggtggttgcagctcagccccaagagttcagggaggaaaaaacaggggctagttgaatttagccttggaaaaatccatctccggatgttgatccatgaacttcttcagaatctcctgtttcttctgttcgtctgaagttggcagccccatggacttctgtcgctggtcatacatcatcttttccaccatgctgcgagtctcactgtccaggtctgacagcttggaattctcagggttaatcttcttggtgttgatctcagggtcactggacaccaagcggctccaccactccatcttattgatcttctccagatgcacagtcaccaccttgccgtcctcaatgagccacgagctctcctcnaccttcacttcattgtagagctccccatcaatgatcgctggctgccccttgagccccacccggaggtgccgccgctggatgtccaccaccatgtccttccctttcagccggaagttcacacagaaagggaccgccaggtcnagctccgacagggtctgggtccagcggtaattggg

SEQ ID NO: 163097 - DNA, 219 bp, Homo Sapiens
ttggtcaagaaccactgttttaatagctttaaccacaaaacatccacattgttccctaaagttatgctaagagtaaaacgagtaactggttaactgcccatgatacatcaatttaatggaaaattatgcaactgtcaacaagaataagcatatctatatgtattgatatagaaacaatctctaatatagtgttaagtgaaataagcaatatgcagaact

SEQ ID NO: 163098 - DNA, 554 bp, Homo Sapiens
atatatgctcacgctcgtctggtgggcgcattcacccacgctggccggcagccccccaagggtgcccaggcatttctgcacatggggtggtggggggagagcttgaagaccacgggattccactggcttttactaaaaatacagactcctgggcccatgcccggaggttccactgcaacaggtcaagtggacctgggagtgtgtgcttttcatcttctatcccataatatctggtggaaaaatatgtcacatcatatacgtcatgaacagaaagagaaactggacatgtgtgatcctacctgactccaaaacggaaacattccattctgaaaagcaaaactagaaggctgatagaagaaaaggcaggaacgtgaaggcaggacccagggccagggtaaggtgttttcacaagagcacagaccatagagcaggtgaacagggaaacctctgctcttccgtgcagtgaaggactccacgggccaagttaacagaccctcaccagaaagcatgaaggcatccccagtgtctaaagttacaaaggctaaatagctaaa

SEQ ID NO: 163099 - DNA, 473 bp, Homo Sapiens
cacgtggtcttcagcacagagcgctacaacccagagtctttacttcaggaaggtgagggacgtttggggaaatgttctgctcgagtgtttttcaagaatcagaaacccagaccaaccatcaatgtaacttgtacacggctcatcgagaaaaagaaaagacaacaagaggattacctgctttacaagcaaatgaagcaactgaaaaaccccttggaaatagtcagcatacctgataatcatggacatattgatccctctctgagactcatctgggatttggctttccttggaagctcttacgtgatgtgggaaatgacaacacaggtgtcacactactacttggcacagctcatctagtgtgaggcagtggactttggtctccatcagaaaaagtgacagacatctcaaccagactttcatataactcagtgacaagacgaaaatgaggactccatgaccttccatattctaag

SEQ ID NO: 163100 - DNA, 660 bp, Homo Sapiens
tgtaacgtggatacacagctcatcgagaaaaagaaaagacaacaagaggattacctgctttacaagcaaatgaagcaactgaaaaaccccttggaaatagtcagcatacctgataatcatggacatattgatccctctctgagactcatctgggatttggctttccttgaaagctcttacgtgatgtgggaaatgacaacacaggtgtcacactactacttggcacagctcactagtgtgaggcagtggaaaactaatgatgatacaattgattttgattatactgttctacttcatgaattatcaacacaggaaataattccctgtcgcattcacttggtctggtaccctggcaaacctcttaaagtgaagtaccactgtcaagagctacagacaccagaagaagcctccggaactgaagaaggatcagctgtagtaccaacagagcttagtaattgctaaaaagaaaaaatgatctttttccgacttctaaacaagtgactatactagcataaatcatccttctagtaaaacagctaacggtatagacattctaataactttgggcaaaacctatgaaaacaagtaaaaactcagaaatgcaaagatgttggtattttgtctcagtctgctttagcttctaactctggagcctcatag

SEQ ID NO: 163101 - DNA, 826 bp, Homo Sapiens
cgatatgacgggagcaagcgcacgctgaggaggatcggcggccggtgagggggaagcaagtctggtctctgtgattgaagaagtcggctctgggctccagtgcgggaatcacacacatacctcagaatgccgggtctaagttgtagattttatcaacacaaatttcctgaggtggaagatgtagtgatggtgaatgtcagatccattgctgaaatgggggcttatgtcagcttgctggaatacaacaacattgaaggcatgattcttcttagtgaattatccagaaggcgtatccgttctatcaacaaactcatccgaattggcaggaatgagtgtgtggttgtcattagggtggacaaagaaaaaggatatattgatttgtcaaaaagaagagtttctccagaggaagcaatcaaatgtgaagacaaattcacaaaatccaaaactgtttatagcattcttcgtcatgttgctgaggtgttagaatacaccaaggatgagcagctggaaagcctattccagaggactgcctgggtctttgatgacaagtacaagagacctggatatggtgcctatgatgcatttaagcatgcagtctcagacccatctattttggatagtttagatttgaatgaagatgaacgggaagtactcattaataatattaataggcgcttgaccccacaggctgtcaaaattcgagcagatattgaaagtggcttggttatggttattgaaggcatttgatgcctgtaaaagaagccccaaagagcagggtttgaaattgttcctaccgaaaaacatggccccattaaaaatttattct

SEQ ID NO: 163102 - DNA, 537 bp, Homo Sapiens
  misc_feature (456)..(456): n is a, c, g, or t
  misc_feature (500)..(500): n is a, c, g, or t
  misc_feature (509)..(509): n is a, c, g, or t
tgcggccgctcctgcgatacgctcaacaaccgatgtgagggctcctcggtccagacacggacctgccacattcaggagtgtgacaagagatttaaacaggatggtggctggagccactggtccccgtggtcatcttgttctgtgacatgtggtgatggtgtgatcacaaggatccggctctgcaactctcccagcccccagatgaacgggaaaccctgtgaaggcgaacgcagggagaccaaagcctgcaagaaagacgcctgccccatcaatggaggctggggtccttggtcaccatgggacatctgttctgtcacctgtggaggaggggtacagaaacgtagtcgtctctgcaacaaccccacaccccagtttgggaggcaaggactgcgttggtgatgtaacagaaaaccagatctgcaacaagcaggactgtccaattgatggatgcctgtncaattcctgcttttccggcgtgaagtgtacttgcttccctgatngcagcttgnaaatgttggtcttgtcccctggttcagt

SEQ ID NO: 163103 - DNA, 652 bp, Homo Sapiens
gaccaccgcatttcggaagactggctttctctggcttcatcttcatcttttctttaggctttggcttctgttctttacctgagcttagaaacttcattgtcgctgcggcgtgtttgaggatacagtcattactgcagtacaccgagtcgggctgcgccacgtgacagcacccggggccaatacattttgaggcaccaggcgcctctatcacaggctggaagatcttgagtttcttcttgccacttggatttgcagctttctcaattctaccctttatccctggtcttcgctagacttctgctctatggttcctatacttgtacaatcggtgccatcagcatctccaggtctccatttagcttcctgctgatctgccgtttctgaatgagtctcatcctgcacttgcagaatggtgcagtttgggcagatatagtcttccccattcctttccaaaagcctccctcgagcctcagaaatgcccacacaatcgccatgaaaccattcttcacagcggtcacagcaaatcataaacctgttgttgtgaggctggcggcaaatgcaatacagggcgttggggtcgtaaccctcacattcaggcttcgtcggcccaagtctccaggctcctcatcttgatgtcctgacccccggtcct

SEQ ID NO: 163104 - DNA, 525 bp, Homo Sapiens
  misc_feature (226)..(306): n is a, c, g, or t
  misc_feature (309)..(309): n is a, c, g, or t
acagaggatccccagctcgtacatacctgcacagctcattttccttctgaaagaaactactacctaggagaatctaagctatagcagggatgatttatgcaaatttgaactagcttctttgttcacaattcagttcctcccaaccaaccagtcttcacttcaagagggccacactgcaacctcagcttaacatgaataacaaagactggctcaggagcagggcttnnnnnnnnnnnnnnnnnnnnnnnnnnnnnnnnnnnnnnnnnnnnnnnnnnnnnnnnnnnnnnnnnnnnnnnnnnnnnnnnnttnggtgtatatcttggtgtgtctccctgtttatgtgtgccaacgggagtattttcacaaagttcaaaacagccacaataatcagagatggagcaaaccagtgccatcaagtcttaatgcaaattgaaagtgctgcaaagggaagcagattctggtatatgtggataaatacccaccaagagcacatgggtagcagggaagaagtaaaaaaagcgaaga

SEQ ID NO: 163105 - DNA, 523 bp, Homo Sapiens
  misc_feature (231)..(308): n is a, c, g, or t
ctagaggatcccccagccctcacatacctgcacagttcattttccttctgaaagaaactactacctaggagaatctaagctatagcagggatgatttatgcaaatttgaactagcttctttgttcacaattcagttcctcccaaccaaccagtcttcacttcaagagggccacactgcaacctcagcttaacatgaataacaaagactggctcaggagcagggcttgcgcnnnnnnnnnnnnnnnnnnnnnnnnnnnnnnnnnnnnnnnnnnnnnnnnnnnnnnnnnnnnnnnnnnnnnnnnnnnnnnatggtgtatatcttggtgtgtctcccggtttatgtgtgccagggaagtattttcacaaagtccaaaacagccacaatattcagagatggggcaaaccagtgccatccagtctttatgcaattgaaaaggctgcaaaggggaagcagattcggtatatgtgggtaactacccacaaagagcaatggttagcaggaaagatgtaaaaaaagagaggg

SEQ ID NO: 163106 - DNA, 565 bp, Homo Sapiens
  misc_feature (92)..(173): n is a, c, g, or t
ggctcccaaccaaccagtcttcacttcaagagggccacactgcaacctcagcttaacatgaataacaaagactggctcaggagcagggcttnnnnnnnnnnnnnnnnnnnnnnnnnnnnnnnnnnnnnnnnnnnnnnnnnnnnnnnnnnnnnnnnnnnnnnnnnnnnnnnnnntgtgtatatctttgtgtgtcttcctgtttatgtgtgccaagggagtattttcacaaagttcaaaacagccacaataatcagagatggagcaaaccagtgccatccagtctttatgcaaatgaaatgctgcaaagggaagcagattctgtatatgttggtaactacccaccaagagcacatgggtagcagggaagaagtaaaaaaagagaaggagaatactggaagataatgcacaaaatgaagggactagttaaggattaactagccctttaaggattaactagttaaggattaatagcaaaagatattaaatatgctaacatagctatggaggaattgagggcaagcacccaggactgatgaggtcttaacaaaaaccagtgtggcctccc

SEQ ID NO: 163107 - DNA, 586 bp, Homo Sapiens
gctcacagttaaaacaaaattagtggtaaaatagaaaaaaggaaatgtttagtacagaaagtaccagccacagtaccctcataactccatctccttccccaggcatcactctttccagccacttcaatcctaaagcagtgagaccctcattttaacacacagagcctccctgcctaccctccttccctgtaacgtgagctactgtagtccatttattagttcttcggttaagcttcagtagacatttggagcacaattccaaaggtaaatcaatctataggcctaagccttagataccaacatcaggaaagccccattcagatctttggaatttacagtcttgtaagttatttgcaaaagcaggcgtctgtcttaatattgccatcagttatcctataaaggttgcaaacttcgaaatcccctggcagccttccaatatctctacctagacacacacaggataatacattcagatttcctctggccaattcagaagtgaatctggtaataaacagtctcatcgacaggctctttggtcttgatttacagacactgtgaaacactagaaatcaatacccacgccatc

SEQ ID NO: 163108 - DNA, 446 bp, Homo Sapiens
tagaaggagtcgatgctgaggatgggcacggcccaggagaacaacataagcggaagatcgtcctggacccttcaggctccatgaacatctacctggtgctagatggatcagacagcattggggccagcaacttcacaggagccaaaaagtgtctagtcaacttaattgagaaggtggcaagttatggtgtgaagccaagatatggtctagtgacatatgccacataccccaaaatttgggtcaaagtgtctgaagcagacagcagtaatgcagactgggtcacgaagcagctcaatgaaatcaattatgaagaccacaagttgaagtcagggactaacaccaagaaggccctccaggcagtgtacagcatgatgagctggccagatgacgtccctcctgaaggctggaaccgcacccgccatgtcatcatcctcatgactgatgga

SEQ ID NO: 163109 - DNA, 651 bp, Homo Sapiens
gccgcagctgccgccccgcctctttggagtctctcgcggctcaaagcgcggcctgcgtcgcttccggcagttcccgaccgcgggcgatggctgccgctgggggcgcccggctgctgcgcgccgcttctgctgtcctcggcggcccggccggccggtggctgcaccacgctgggtcccgcgctggatccagcggcctgctgaggaaccgggggccgggcgggagcgcggaggcgagccggtcgctgagcgtgtcggcgcgggcccggagcagctcagaagataaaataacagtccactttataaaccgtgatggtgaaacattaacaaccaaaggaaaagttggtgattctctgctagatgttgtggttgaaaataatctagatattgatggctttggtgcatgtgagggaaccctggcttgttcaacctgtcacctcatctttgaagatcacatatatgagaagttagatgcaatcactgatgagaagaatgacatgctcgatctggcatatggactaacagacagatcacggttggctgccaaatctgtttgacaaaatctatggacaatatgactgttcgagtgcctgaaacacgtggctgatgccagacaatccattgatgtgggcaagacctcctgaactagaacaa

SEQ ID NO: 163110 - DNA, 304 bp, Homo Sapiens
aaagtatctatggatcacctgaaggggcataggaatcactgtcatacacagagtctattgtctcatgatttaacagtgctaggattctcccccgatagggagccactctatctgtatgttctagctggtaacatgattaggtcactagaacacactggaaaacaaaagaactccacctaccttccatttctttttcttgccaatcagagcggtgatctttcatggtttctcgttttatgctcgtgctaaatcttttactgatatgccaagctgagcagtgttggtagtcaagacttatgcttta

SEQ ID NO: 163111 - DNA, 204 bp, Homo Sapiens
cctaacaatggtttaacttaatttatgccagcctcaggctgcctttagctcctagaggtctcaccctagtctttgtacttggcccctacatctcagaaccaccaacagcccacttgaattcttctcttccccaacacgttaaaacttgcgtcacgtaagtatcctatcctccaggtcacaaaagtcctaatcttcatggatggt

SEQ ID NO: 163112 - DNA, 170 bp, Homo Sapiens
gaagaatataagatgtatctgtgaactaattctattttaaaatatttatttagaaaaaaaattcataaaaatgttaacagtgattagcatatctgtattaatgaacagtggttacttgagctttcttttaaagaaaattttccaggtagttctcttatgtaccagcagag

SEQ ID NO: 163113 - DNA, 196 bp, Homo Sapiens
cctggatcattatgattagctgaagaagacatgccccatctaaaggaagtagctaccactcaactgttgctcacttaggctatgagggaatatgggcctaaggctaccagatcctcagttttttcgagagaagccttgaatacagatttgctaaaaatagaaattttaatgtagaattaacttatcattgatggtg

SEQ ID NO: 163114 - DNA, 329 bp, Homo Sapiens
caatataagtatggaaacactccaaaaatttgcattaaaatacctttcaaatcaagagctgtcctgctggcaaatctggaaacaggttgcaagtgaattaaccaggtgtcttcaggggaagagtccccagttattacaaggtgactctattcaggtttctgaaaatgagaacaatataatgaaccctaaaggagatagctctatttatattgaaaatcaagagcttccatttgggagaacccagcattcttgcgggaatacatatctgagtgagtcacagattcagagtagaggtaagcaaattgatgtggatgcgcagatacggggta

SEQ ID NO: 163115 - DNA, 347 bp, Homo Sapiens
atgcaggtgatccatcaagtgcaggctctgtaagagaaagtgctcctaaccgaaattagccgggaagcctctcaggttttaagtaaagaaaacctgtctttgactacaaagccacgtttcatgtttctttcttctttctttaactcttacaggcatgactatggtcagtgagccaattctagtccattgcctgtttttgtgcagagagcaagctaagaatagatttgcatttggaaatggttgaaaaaaatcaaaataagactatttggtgatatgtagaaatcatatgaaatccagatttcagggcccataacatagttttatgggaacagtcacactcgtttatg

SEQ ID NO: 163116 - DNA, 1224 bp, Homo Sapiens
  misc_feature (1060)..(1060): n is a, c, g, or t
  misc_feature (1136)..(1136): n is a, c, g, or t
  misc_feature (1214)..(1214): n is a, c, g, or t
gcacgagggggacctcatagccgtgcaaggtggagtgaggaaatgcggatgtcctcaccactcgcctttaaaatcgcgcgttgtcattgctgcctcgcgtaaaggttcccccggcgctcttcacccacagcgccccgggcgtacaatctcgccagcccggagcccaccgcacgcatcctcctcgcccggcgcgcagcggacagcctcctacgtcacgccagcgccgcgcggcaaggaaggcccccttctccgcctccgcctcctcccgacgccggcgccgctttctggaaggttcgtgaaggcagtgagggcttaccgttattacactgcggccggccagaatccgggtccatccgtccttcccgagccaacccagacacagcggagtttgccatgcccgagaatgtggcaccccggagcggggcgactgccggggctgccggcggccgcgggaaaggcgcctatcaggaccgcgacaagccagcccagatccgcttcagcaacatttccgccgccaaagcggttgctgatgctattagaacaagccttggaccaaaaggaatggataaaatgattcaagatggaaaaggtgatgtaaccattacaaatgatggtgctaccattctgaaacaaatgcaagtattacatccagcagccagaatgctggtggagctgtctaaggctcaagatatagaagcaggagatggcaccacatcagtagtcatcattgctggctccctcttagattcttgtaccaagcttcttcagaaagggattcatccaaccatcatttctgagtcattccagaaggccctggaaaagggcattgaaatcttgactgacatgtctcgacctgtggaactgagtgacagagaaactttgttaaatagtgcaaccacttcactgaactcaaaggtggtttctcagtattcaagtctgctttctccaatgagtgtaaatgcagtgatgaaagtgattgacccagccacagccaccagtgtagatcttagagatattaaaatagttaagaagcttggtgggacaattgatgactgtgagnttggtgggaagggctggttctcacccaaaagtgtcaaattctggcataaccagagttgaaaaggccaagattgggngcttattcagttttgcttatctgctcccaaaacagacatggataaatcaaaatagtggttttctggactatgccccanaatgggaccg

SEQ ID NO: 163117 - DNA, 1006 bp, Homo Sapiens
gctctacagaaatctattctaagagatgctcttagtgatcttgcattacactttctgaataaaatgaagatcatggtgattaaggatattgaaagagaagacattgaattcatttgtaagacaattggaaccaagccagttgctcatattgaccaatttactgctgacatgctgggttctgctgagttagctgaggaggtcaatttaaatggttctggcaaactgctcaagattacaggctgtgccagccctggaaaaacagttacaattgttgttcgtggttctaacaaactggtgattgaagaagctgagcgctccattcatgatgccctatgtgttattcgttgtttagtgaagaagagggctcttattgcaggaggtggcgctccagaaatagagttggccctacgattaactgaatattcacgaacactgagtggtatggaatcctactgcgttcgtgcttttgcagatgctatggaggtcattccatctacactagctgaaaatgccggggctgaatcccatttctacagtaaccagaagctaacaaaccggcactgcccagggcagaaaaaaactgcaggctattaatgtcccgaaagggggggtatttctcaatcattttgggacgaatctgagtggcgcaggatacggctgcagatccagtggagccggttttcgactctttgcgaaactggaaacctggctcgggaggtatttctccaacaatcatcactcatggtgggggaaccgacgtccggatagagccgcggataaagctcgacctacgcacgcatgcatccagtcccgccagcttattcccggggctccgaaatcggaaaggaaacaacgtcgcgctcggggcgtgtcccgcccgctctctgagaaggaagcgactttgcgcacccccggatacttctccatgggtcggcgtcgcgaatctctcccgaatagtacccgatgtatttttcccgcccgcgcaggaaaatccgggcgcccctag

SEQ ID NO: 163118 - DNA, 1761 bp, Homo Sapiens
  misc_feature (1660)..(1668): n is a, c, g, or t
  misc_feature (1670)..(1685): n is a, c, g, or t
ctaccattctgaaacaaatgcaagtattacatccagcagccagaatgctggtggagctgtctaaggctcaagatatagaagcaggagatggcaccacatcagtagtcatcattgctggctccctcttagattcttgtaccaagcttcttcagaaagggattcatccaaccatcatttctgagtcattccagaaggccctggaaaagggcattgaaatcttgactgacatgtctcaacctgtggaactgagtgacagagaaactttgttaaatagtgcaaccacttcactgaactcaaaggtggtttctcagtattcaagtctgctttctccaatgagtgtaaatgcagtgatgaaagtgattgacccagccacagccaccagtgtagatcttagagatattaaaatagttaagaagcttggtgggacaattgatgactgtgagttggtggaagggctggttctcacccaaaaagtgtcaaattctggcataaccagagttgaaaaggccaagattgggcttattcagttttgcttatctgctcccaaaacagacatggataatcaaatagtggtttctgactatgcccagatggaccgagtgctgcgagaagagagagcctatattttaaatttagtgaagcaaattaaaaaaacaggatgtaatgtccttctcatacagaaatctattctaagagatgctcttagtgatcttgcattacactttctgaataaaatgaagatcatggtgattaaggatattgaaagagaagacattgaattcatttgtaagacaattggaaccaagccagttgctcatattgaccaatttactgctgacatgctgggttctgctgagttagctgaggaggtcaatttaaatggttctggcaaactgctcaagattacaggctgtgccagccctggaaaaacagttacaattgttgttcgtggttctaacaaactggtgattgaagaagctgagcgctccattcatgatgccctatgtgttattcgttgtttagtgaagaagagggctcttattgcaggaggtggtgctccagaaatagagttggccctacgattaactgaatattcacgaacactgagtggtatggaatcctactgcgttcgtgcttttgcagatgctatggaggtcattccatctacactagctgaaaatgccggcctgaatcccatttctacagtaacagaactaagaaaccggcatgcccagggagaaaaaactgcaggcattaatgtccgaaagggtggtatttccaacattttggaggaactggttgtccagcctctgttggtatcagtcagtgctctgactcttgcaactgaaactgttcggagcattctgaaaatagatgatgtggtaaacactcgataatctggataactgactagcaccattatgatcaccagtattgtggctggaatggaagaagatcaccttggtgttccttgtttggaagattatttcctctgaatttctgggcttggtcttccagttggcatttgcctgaagttgtattgaaacaatttaatgaaaatattaaatatttggtttcaaaaggcagatttatcttctcccaacattctgttatttctgatacttttgaaaaactaataaaaactaataaaagaagcccnnnnnnnnnannnnnnnnnnnnnnnnccatgtcggccgcctcggcccctcaaaaaactttctaaaccatttcttttggggcgcgggccccaataaggtaagg

SEQ ID NO: 163119 - DNA, 426 bp, Homo Sapiens
atcaaagctgatttcaaattatactacagggctcgggtaattaaaacagcatggtgttggtacaaaaacaggtacataaaccaatagaacagaacagagagcctattttaaaaatcaggggttttaaaatcgtaggccacacacctatgataacctgatctttgacaaagctgacaaaaacaagcaatggggaaaagactccctattcagtaagtggttctgggataactggctagccataagcagaagactgaagctacatagtacccctcctttacatcatatacaaaaatcaactcaagatgcgttaaagacttaaacgtaaaactatgaaaacccgggaagacaacctaagcaaaaccatcctggacacaggaatgggcagatttcatgacaaagacaccaaaagcgatcgccttggcgttg

SEQ ID NO: 163120 - DNA, 925 bp, Homo Sapiens
gactctagagatgccccctcctcagcagacgcagctccaagatcacccaccgtatccactgggaatctgccagcctcctgcgatcagaagagaccaaggaaaatgagggtttcacagtcacagctgaaggaaaaggccaaggcaccttgtcggtggtgacaatgtaccatgctaaggccaaagatcaactcacctgtaataaattcgacctcaaggtcaccataaaaccagcaccggaaacagaaaagaggcctcaggatgccaagaacactatgatccttgagatctgtaccaggtaccggggagaccaggatgccactatgtctatattggacatatccatgatgactggctttgctccagacacagatgacctgaagcagctggccaatggtgttgacagatacatctccaagtatgagctggacaaagccttctccgataggaacaccctcatcatctacctggacaaggtctcacactctgaggatgactgtctagctttcaaagttcaccaatactttaatgtagagcttatccagcctggagcagtcaaggtctacgcctattacaacctggaggaaagctgtacccggttctaccatccggaaaaggaggatggaaagctgaacaagctctgccgtgatgaactgtgccgctgtgctgaggagaattgcttcatacaaaagtcggatgacaaggtcaccctggaagaacggctggacaaggcctgtgagccaggagtggactatgtgtacaagacccgactggtcaaggttcagctgtccaatgactttgacgagtacatcatggccattgagcagaccatcaagtcaggctcggatgagctgcgtctgctgaggagagctgcgtctgctgaggagagctgcgttactgaggagggctgcgtctgctgaggggagct

SEQ ID NO: 163121 - DNA, 554 bp, Homo Sapiens
tcggtcctcatcagcagacgcagtccaagatcaccaccgtatcacgtgggaatctgcagcctcctgcgatcagaagagacaaggaaacatgagggtttcacagtcacagctgaaggaaaaggccaaggcacctggtcggtggtgacaatgtaccatgctaaggccaaagatcaactcacctgtaataaattcgacctcaaggtcaccataaaaccagcaccggaaacagaaaagaggcctcaggatgccaagaacactatgatccttgagatcgtgtaccaggtaccggggagaccaggatgccactatgtctatatgggacatatccatgatgacgggcttggctccagacacagatgacctgaagcagctggccaatggtgttgacagatacatctccaagtatgagctggacaaagccttctccgataggaacaccctcatcatctacctggacaaggtctcacactctgaggatgacggtctagctttcaaagttcaccaatactttaaggtagagcttatccagcccggagcagtcaaggggggatcct

SEQ ID NO: 163122 - DNA, 605 bp, Homo Sapiens
cagtcaagtttacgcctattacaacttgggggaaagttgtacccggttctaccatccggaaaaggaggatggaaagctgaacaagctctgccgtgatgaactgtgccgctgtgctgaggagaattgcttcatacaaaagtcggatgacaaggtcaccctggaagaacggctggacaaggcctgtgagccaggagtggactatgtgtacaagacccgactggtcaaggttcagctgtccaatgactttgacgagtacatcatggccattgagcagaccatcaagtcaggctcggatgaggtgcaggttggacagcagcgcacgttcatcagccccatcaagtgcagagaagccctgaagctggaggagaagaaacactacctcatgtggggtctctcctccgatttctggggagagaagcccaacctcagctacatcatcgggaaggacacttgggtggagcactggcctgaggaggacgaatgccaagacgaagagaaccagaaacaatgccaggacctcggcgccttcaccgagagcatggttgtctttggtgccccaactgaccacacccccattcccccactccagataaagcttcagttat

SEQ ID NO: 163123 - DNA, 589 bp, Homo Sapiens
gagatataactgaagctttatctggagtgggggaatgggggtgtggtcagttggggcacccaaagacaaccatgctctcggtgaaggcgccgaggtcctggcattgtttctggttctcttcgtcttggcattcgtcctcctcaggccagtgctccacccaagtgtccttcccgatgatgtagctgaggttgggcttctctccccagaaatcggaggagagaccccacatgaggtagtgtttcttctcctccagcttcagggcttctctgcacttgatggggctgatgaacgtgcgctgctgtccaacctgcacctcatccgagcctgacttgatggtctgctcaatggccatgatgtactcgtcaaagtcattggacagctgaaccttgaccagtcgggtcttgtacacatagtccactccgggctcacaggccttgtcaagccgttcttccagggtgagcttgtcatccgacttttgtatggagcaattctcctcagcacagggcacagttcattacggcaaacttggttcagcttcaacctcttttcccgaggtagaaccgggtaaactttctccagttgtaaaagg

SEQ ID NO: 163124 - DNA, 507 bp, Homo Sapiens
atagatcgagctcggtacctcctcagcagacgcagctcggatgcggagggctgtgagattccgcagtaaccttcgatactcaaagtaactcagctgggggctccaatatatgcttggatgctcatttaacctgaacgtgtaagtcttggtgagcccacaaggcagtgtcttgccaagtggcatcaagggagctgtgatccgtagaccagcaccttccagaatcacatcatgggcagatgggtgtctgcctcctctgtccacacggtagtcaaaggacaggcttggcccatagctcacctgttgattcccaagaaatttggcaggagccacaaaatagacagggtctagtcgttgggctgagctaaacacatcttgatggcgctgtgaccattggagctttgcaggagacccatttcgttggacagccttccagccatcaacatcttgatgaaaggtagaggtgatcttatggacactgtattctgcagagctgcgtctgctgaggag

SEQ ID NO: 163125 - DNA, 825 bp, Homo Sapiens
agcagacgcagctccaccagttagagaataaatgggatttgcatgaactccatctctgacctgaaatacagactgcggatgttaagtatccttattcttctgattgttattaacaggtccttatgtcgtcagaagatcgagaagctcaggaggatgaattgctggccctggcaagtatttacgatggagatgaatttagaaaagcagagtctgtccaaggtggagaaaccaggatctatttggatttgccacagaatttcaagatatttgtgagcggcaattcaaatgagtgtctccagaatagtggctttgaatacaccatttgctttctgcctccacttgtgctgaactttgaactgccaccagattatccatcctcttccccaccttcattcacacttagtggcaaatggctgtcaccaactcagctatctgctctatgcaagcacttagacaacctatgggaagaacaccgtggcagcgtggtcctgtttgcctggatgcaatttcttaaggaagagaccctagcatacttgaatattgtctctccttttgagctcaagattggttctcagaaaaaagtgcagagaaggacagctcaaggcttctcccaacacagagcttagattttggaggagctgcctggatcttgatgtagaccaagaaggaaattgccgcgtcgacacagccttggccggatgctggactcactgtcccccttcgcatcccaggaaaattttggtacttttgaccccacctcagcaaaagctatagatgtctggatgtcgaatgagacgcttgagcggctacgcagctaaggtgttc

SEQ ID NO: 163126 - DNA, 1109 bp, Homo Sapiens
  misc_feature (330)..(352): n is a, c, g, or t
ctagaggatcccctctcagcagacgcagctcactaagacaagaatactgtacacccgaaggactcattatgacccagaaatctttattacaaaaatattttgcaagccaaaaagtttaagttgcaactatatacaaaatggggcctgtttccttcccagcagtcttaaaataaactcctgaaaccatgctccttccgcagggttggttcgacctcttccttttcctggggttcaatacacaaggtatgtggattctccaggttgccaggctaaagctaaagctatacatcttccttggccttattcccttatttccccctccaagaattnnnnnnnnnnnnnnnnnnnnnnnggcaccaagaaaacattcctttaaaatactgaatgtgtgtgtgcatgcgtgtgcacacgtatgtgctgtctctgggtaaaagagagggagacgaaggtttacaagccaatcttttggaatttggaactagcctgagccaggtggctgggtcactgtggctcccagatgccacacgggagctctggccaaagctgtccacatggtctgttggctcagctaattcctggatgccatcattgaaatcaccaggtgaccatcccccagagagctgggtctatgctgagctcctgcagtttcacctgtaggacctccaggaatgggcaggatggctcagctacttttacagcctgagccagaaatcccttgggcatcccaaggccaggagtcatgaacattagcgtctcaactctaagagttatagtgaagactgaataaatagggcttgcgacatctgcttgccctgggcccggtcaggccctcacacccgactggaagggtgggggttaaagggtaactgggtcacaccctctggccaaccttctgggacagagggggaatcagcccgagcttcacagctgcaccatccccctggctgtcttcaatttattccagtttgatcccagtagggtttgagagcagaaatggaagatttcttcttcaaggatcagctcagaaagccgggatgggggcggtcactaaaggggtaggatagacggccagggccactatccctaccctctgtgtgttcctaaagtcc

SEQ ID NO: 163127 - DNA, 698 bp, Homo Sapiens
ggacgcgtgggggacgcgtctgtagagttacaggaagagaagggccgccctccagagggccgggagcgccccagcgcgggtccggggtcgaggtaaaatgtcggttccaggaccttaccaggcggccactgggccttcctcagcaccatccgcacctccatcctatgaagagacagtggctgttaacagttattaccccacacctccagctcccatgcctgggccaactacggggcttgtgacggggcctgatgggaagggcatgaatcctccttcgtattatacccagccagcgcccatccccaataacaatccaattaccgtgcagacggtctacgtgcagcaccccatcacctttttggaccgccctatccaaatgtgttgtccttcctgcaacaagatgatcctgagtcagctgtcctataacgccggtgctctgacctggctgtcctgcgggagcctgtgcctgctggggcgcatagcgagctgctgcttcatccccttctgcgtggatgccctgcaggacgtggaccattactgtcccaactgcagagctctcctgggcacctacaagcgtttgtaggactcagccagacgtggagggagccgggtgccgccggaagtcctttccacctctcatccagcttcacgcctggtggaggttctgccctggtggtctcacctctccagggggccca

SEQ ID NO: 163128 - DNA, 852 bp, Homo Sapiens
gggcgcccgagaggccagctcagacctcccggctcgacaggcggcgcgggcggcggtaaaatgtcggttccaggaccttaccaggcggccacgtgggccttcctcagcaccatccgcacctccatcctatgaagagacagtggctgttaacagttattaccccacacctccagctcccatgcctgggccaactacggggcttgtgacggtgcctgatgggaagggcatgaatcctccttcgtattatacccagccagcgcccatccccaataacaatccaattaccgtgcagacggtctacgtgcagcaccccatcaccttttggaccgccctatccaaatgtgttgtccttcctgcaacaagatgatcgtgagtcagctgtcctataacgccggtgctctgacctggctgtcctgcgggagcctgtgcctgctggggtgcatagcgggctgctgcttcatccccttctgcgtggatgccctgcaggacgtggaccattactgtcccaactgcagagctctcctgggcacctacaagcgtttgtaggactcagccagacgtggagggagccgggtgccgcaggaagtcctttccacctctcatccagcttcacgcctggtggaggttctgccctggtggtctcacctctccagggggcccaccttcatgtcttcttttggggggaatacgtcgcaaaactaacaaatctccaaaccccagaaattgctgcttggagtcgtgcataggacttgcaaagacattccccttgagtgtcagttccacggtttcctgcctccctgagaccctgagtcctgccatctaactgtgatccattgcctatccgaatatctc

SEQ ID NO: 163129 - DNA, 204 bp, Homo Sapiens
atctcttataggaacctatctttaagctccagagttcactaagtattagcaagcacatttttaaatgccatatttcttcctcccattcctccccttcacactctttaacctaaatttcgtgttcaatggagtgaatctggaggcactgccttgacatttcactataagaactgaaagactgggagctgcgtctgctgcaggcag

SEQ ID NO: 163130 - DNA, 1072 bp, Homo Sapiens
tgctataccatagaagcagatggctgaactcaatactcatgtgaatgtcaggaaaagatctatgcagttagatcagttgttcgcaacaaaagcaataatgaaatagtcctggtgctccaagagtttgattttaatgtggataaagccgtgcaagcctttgtggatggcagtgcaattcaagttctaaaagaatggaatatgacaggaaaaacgaagaacaataaaagaaaaagaagcaagtccaagcagcatcaaggcaacaaagatgctaaagacaaggtggagaggcctgaggcagggcccctgcagccgcagccaccacagattcaaaacggccccatgaatggctgcgagaaggacagctcgtccacagattctgctaacgaaaaaccagaccttatccctcgtgagaaaaagatctcgatacttgaggaaccttcaaaggcacttcgtggggtcacagaaggcaacagactactgaaacagaaactatccttagatgggaaccccaaaactatacatggaacaacagagaggtcagatggcctacagtggtcagctgagcagccttgtaacccaagcaagcctaaggcaaaaacatctcctgttaagtccaatacccctgcagctcatcttgaaataaagccagatgagttggcaaagaaaagaggcccaaatattgagaaatcagtgaaggatttgcaacgctgcaccgtttctctaactagatatcgcgtcatgattaaggaagaagtggatagttccgtgaagaagatcaaagctgcctttgctgaattacacaactgcatcattgacaaagaagtttcattaatggcagaaatggatcaagttacagaagaagccatggaaatcctgactgctcgtcagaagacagcagaagaactaaagagactcactgaccttgccagtcagaatggcagagatgcaggtgggccgaaactcagggccgaaatttagcctttggtcggggagccgtaaatttgtacgagggagcccggggaaagcgtggccgggtttcctggggacaattcggaacaagttgaaaggccca

SEQ ID NO: 163131 - DNA, 1342 bp, Homo Sapiens
  misc_feature (1098)..(1098): n is a, c, g, or t
gggggagccggcgctcgacacagagagctcttcagaaaccaggctgctttcaggaacattgctgtggattcccagggcctattccgctagaagcagatggctgaactcaatactcatgtgaatgtcaaggaaaagatctatgcagttagatcagttgttcccaacaaaagcaataatgaaatagtcctggtgctccaacagtttgattttaatgtggataaagccgtgcaagcctttgtggatggcagtgcaattcaagttctaaaagaatggaatatgacaggaaaaaagaagaacaataaaagaaaaagaagcaagtccaagcagcatcaaggcaacaaagatgctaaagacaaggtggagaggcctgaggcagggcccctgcagccgcagccaccacagattcaaaacggccccatgaatggctgcgagaaggacagctcgtccacagattctgctaacgaaaaaccagcccttatccctcgtgagaaaaagatctcgatacttgaggaaccttcaaaggcacttcgtggggtcacaggcccaaatattgagaaatcagtgaaggatttgcaacgctgcaccgtttctctaactagatatcgcgtcatgattaaggaagaagtggatagttccgtgaagaagatcaaagctgcctttgctgaattacacaactgcatcattgacaaagaagtttcattaatggcagaaatggataaagttaaagaagaagccatggaaatcctgactgctcgtcagaagaaagcagaagaactaaagagactcactgaccttgccagtcagatggcagagatgcagctggccgaactcagggcagaaattaagcactttgtcagcgagcgtaaatatgacgaggagctcgggaaagctgcccgggttttcctgtgacatcgaacagctgaaggcccaaatcatgctctgcggagaaattacacatccaaagaacaactattcctcaagaactccctgcagctccctgctgcctctgctgaatgcgcacgcagcaacctctgggaaacagagtaacttttcccgaaaatcatccactcacaataagccctctgaaggcaaaagcgngaaaccccaaaatggtgagcagtctccccagcaccgcgaccctctcaccagacatgccggcaacaagcagaaggatcttctaccaaagacggagatttatccacagtaacataacacaggctaaaggcccgcaagtcgcaggcaggggaatgaagcgagcacgggaagggcacagcgcacgacacgagacagcgacaagggtcgggcaaaacaagggggcaaatcaaaggtcctggggagaaac

SEQ ID NO: 163132 - DNA, 1059 bp, Homo Sapiens
tcgacccacgcgtccgcgacccacgcgtccgctcacaataagccctctgaaggcaaagcggcaaaccccaaaatggtgagcagtctccccagcaccgccgacccctctcaccagaccatgccggccaacaagcagaatggatcttctaaccaaagacggagatttaatccacagtatcataacaacaggctaaatgggcctgccaagtcgcagggcagtgggaatgaagccgagccactgggaaagggcaacagccgccacgaacacagaagacagccgcacaacggcttccggcccaaaaacaaaggcggtgccaaaaatcaagaggcttccttggggatgaagacccccgaggccccggcccattctgaaaagccccggcgaaggcagcacgctgcagacacctcggaggccaggcccttccggggtagtgtcggtagggtttcacagtgcaatctctgccccacgagaatagaagtttccacagatgcagcagttctctcagtcccggctgtgacgttggtggcctgagctaggaggaaaaagagcagttttcactcagttttggttccctgcccgaggtgctgacccaattcgctgccaaaagagtgtcaatcagaatatacaaatcccgtatggttgtgtcatcctctcttaatcatttttactaattctaataatcagctctagcttgcttcataattttcatggctttgcttgatctgttgatgctttctctcatcaagactttgcagcattttagccaggcagtatttactcattattaggaaaatcaagatgtggctgaagatcagaggctcagttagcaacctgtgttgtagcagtgatgtcagtccattgattgtctttagagagttaatgttacaaaaaagaattcttaataatcagacaaacatgatctgctgaggacacatgcgcttttgtagaatttaacatctggtgtttttctgaaaaaatatatatacatatattgcctttatttgaagacaaattaaaatatgctgcatttgcaacgccacacaaaacaacacaaaaaaa

SEQ ID NO: 163133 - DNA, 743 bp, Homo Sapiens
cacaactgcatcattgacaaagaagtttcattaatggcagaaatggataaagttaaagaagaagccatggaaatcctgactgctcgtcagaagaaagcagaagaactaaagagactcactgaccttgccagtcagatggcagagatgcagctggccgaactcagggcagaaattaagcactttgtcagcgagcgtaaatatgacgaggagctcgggaaagctgcccggttttcctgtgacatcgaacagctgaaggcccaaatcatgctctgcggagaaattacacatccaaagaacaactattcctcaagaactccctgcagctccctgctgcctctgctgaatgcgcacgcagcaacctctgggaaacagagtaacttttcccgaaaatcatccactcacaataagccctctgaaggcaaagcggcaaaccccaaaatggtgagcagtctccccagcaccgccgacccctctcaccagaccatgccggccaacaagcagaatggatcttctaaccaaagacggagatttaatccacagtatcataacaacaggctaaatgggcctgccaagtcgcagggcagtgggaatgaagccgagccactgggaaagggcaacagccgccacgaacacagaagacagccgcacaacggcttccggcccaaaaacaaaggcggtgccaaaaatcaagaggcttcctggggatgaagaccccgaggccccggcccattctgaaaagcccg

SEQ ID NO: 163134 - DNA, 1133 bp, Homo Sapiens
gggagtgctcatgctcgctgcaggggtcggaggtcagggcgagcgtctcgcaggccgtaggaggaagatggcggtggagtcgcgcgttacccaggaggaaattaagaaggagccagagaaaccgatcgaccgcgagaagacatgcccactgttgctacgggtcttcaccaccaataacggccgccaccaccgaatggacgagttctcccggggaaatgtaccgtccagcgagttgcagatctacacttggatggatgcaactttgaaagaactgacaagcttagtaaaagaagtctacccagaagctagaaagaagggcactcacttcaattttgcaatcgtttttacagatgttaaaagacctggctatcgagttaaggagattggcagcaccatgtctggcagaaaggggactgatgattccatgaccctgcagtcgcagaagttccagataggagattacttggacatagcaattacccctccaaatcgggcaccacctccttcagggcgcatgagaccatattaaattctatttactatttgttgaatttatttttccgtcagttatgtaaaataaacatactcttcttcctcccctgattattgccattaagcctttaaattctaaacaaattataatgcatcatctatttaggagttagatttggatgtgctattgtatgattacgaatagtctgtatgtttcaagcccttctgtaaaatatgaagaaaagtgctcttagcattctgtgtaaaactgtactgttaaatatatgtgtgtaatcagcctgagtgtgaaagttaatggaggcctgggaacagggtttatacgaagtagtggaggagcgtatggttaagcccaaaggggcagaacaagaaagccacgggattgtatgaaatcaaacatgagtttgtggtgtagactgctgtatgcagttggaaaggacacgtgagagtgagctcaagtggcagcagaggcagtttggaataagctgcggcaaagttgaagaagctgtgttggacgagattgccccgccttgatcagggtaccatgacataaaaggttaaagaacaggcaacacaatgagcacttaagtttttaacatgtggggaataggccgcatccaaag

SEQ ID NO: 163135 - DNA, 1726 bp, Homo Sapiens
tgctcttccggctgcatataaaagtaaaatttcaagcaaagctggaacatgaatatattcacaattttaaacttctgcaagcatcatttaagcgaatgaacgtcgataaggtaattccagtggagaagctagtgaaaggacgtttccaggacaacctggattttatgcaatggtttaagaaattctatgatgctaactacgatgggaaggagtatgatcctgtagaggcacgacaagggcaagatgcaattcctcctcctgaccctggtgaacagatcttcaacctgccaaaaaagtctcaccatgcaaactcccccacagcaggtgcagctaaatcaagtccagcagctaaaccaggatccacaccttctcgaccctcatcagccaaaagggcttcttccagtggctcagcatccaaatccgataaagatttagaaacgcaggtcatacagcttaatgaacaggtacattcattaaaacttgcccttgaaggcgtggaaaaggaaagggatttctactttgggaagttgagagagatcgagctactctgccaagaacacgggcaggaaaatgatgacctcgtgcagagactaatggacatcctgtatgcttcagaagaacacgagggccacacagaagagccggaagcagaggagcaagcccacgaacagcagcccccgcagcaggaagagtactgacccaccccggctgctcttgacacttccattgtgtgtgggaacgtttcttctggagaattggaacatgtgtggccccaagctcaacagaaaccagttgttcccaatctgccgttaccatcaacgcactgttgcatatgccagccactgcgcttggttcccattttctttgccaaggtgtattagcggacggccctctggccacctacccgagagatcgtagggtcacatacatccaacttcaccacttggctgcttgagattggttctgctcttttcttcatttctttccagaacaactctttcccaccccaacaccactgccaccacccctctttttatcctggtgtgaaacaatggtaatctgatatatggtatttatattggcatttttcaacccagggtcactagatgtcacacacatttgtggtgctttgatgtttgcaagtctaacctctgaacataaatttggtcaaataattggaacaaagggaaacagatacttgatatgaaagccataatgacggtgacttgtgtcgtgggggtaaacataaggtcattttctccctctactcacaatactaaagggaaaaaatggattcaaagctaggatttcagggcccagcagtgttcctccatcagcatgttagacaactacacagtatgttgttagttttgaaagacattcactcaaggaaaacaccatctcaactgtgcccgctcaccatgtccccttgcccccatgtagtccatttcccaggttatgctcttttcgtttctcagggtcctctttggtgggcagccactccccgagatgttgccatcagttgttctgcagtccaaagagggtatggttaggtacgggtcttcctgccgcattcctctccctctttgtgtaggtttcagccacaaaactgtcattcactctatggggacccatagctacaagggtaatcttcaggagtgcacccctgacgctccaaggctctgcaccatgtccacacacttgctgtaaggctagatacgagacc

SEQ ID NO: 163136 - DNA, 1189 bp, Homo Sapiens
  misc_feature (386)..(404): n is a, c, g, or t
gggagaaggagcaaagctctggcccggcgtgtagcgggcgcactacggggacgctgggccgggcaccgggctgtgtggagaagtgagcgcgctcgtctgacccccgtgcccgccaccccgagccactaacggcgatctcccaaggcctgcccgaggcctctgtcctctgtcctcagccccgcagcggcaacgtcttgcactcggcgagctcgccgctcccgaccctcccgcgcccccgccctgccgcgctgctccccgcccagccgcgggtctgtggtccaagccgccccgaagcagcccgaacaagatcactcaaggtgaaggataatctactaataccagcactttgaatgaaaatttgtttctctgccacaaactgaacatcnnnnnnnnnnnnnnnnnnnctctcggggggggagttgaaacctaattttgtggcgtagcagctatgcagcttgaaatccaagtagcactaaattttattatttcgtatttgtacaataagcttcccaggagacgtgtcaacatttttggtgaagaacttgaaagacttcttaagaagaaatatgaagggcactggtatcctgaaaagccatacaaaggatcggggtttagatgtatacacataggggagaaagtggacccagtgattgaacaagcatccaaagagagtggttgggacatggatgatgttcgtggcaatctgccacaggatcttagtgttgggatcgacccatttgaggtttcttaccaaatgggtgaaaagggaccagtgaaggtgctttacgtggatgataataatgaaaatggatgtgagttggataaggagatcaaaaacagctttaacccagaggcccaggtttttatgcccataagtgacccagcctcatcagtgtccagctctccatcgcctccttttggtcactctgctgctgtaagccctaccttcatgccccggtccactcagcctttaacctttaccactgccacttttgctgccaccaagttcggctctaccaaaatgaagaatagtggccgtagcaacaaggttgcacgtacttctcccatcaacctcggcttgaatgtgaatgacctcttgaagcagaaagccatctcttcctcaatgcactctctgtatgggcttggcttgggtagccagcagcagcacagaacagcagcaagccagcca

SEQ ID NO: 163137 - DNA, 616 bp, Homo Sapiens
taagcgacaagtgataaactgacatatactattcaccccagcatgaggatacctcttctgcaatgatgtggacaaatatatttattaaagcaaggtaaactttagcctcagatatagataactctcactcagaggaaagaaagaattttttgatcataggaaaaattggcttgtgccttttccccttcaaaggaacatttataaaaaccttataacttcagtgaaatacacaaaatgacttatgctgacctggacttttatcccctttggaaaaatcgactaaaatatatatctttcaatttccccctgaatattaaaaacctgactaaagaaaaagatgtttcctatgaagtgtcctctttgtaataacaataggattttacaaaaatattgattaaaccaaggtagagaaactttgtcttaactcaataaagattctgagttttagttagaaccctaaatccttgctaaaatgaaaacattttacttcaattttatatgtatctataacattcctccttttcctaacataaaaatttgttaacgtctgacttggttagtaatgatgcttggaagatgaagaccactgaactcgaacccatcttttctgtgaaac

SEQ ID NO: 163138 - DNA, 555 bp, Homo Sapiens
  misc_feature (16)..(16): n is a, c, g, or t
  misc_feature (42)..(42): n is a, c, g, or t
  misc_feature (57)..(57): n is a, c, g, or t
  misc_feature (80)..(80): n is a, c, g, or t
gaaaccctaaggcccnacctttggtttggagtaaccacaagngatatttaccatttnccatatacctagtgatatgcccngttgccatacctgggcaaaataaaactgatagtaagtcctataataataaaagaaacaacaattacctaagtaaacaattcctagatgatggaagagtaaccctcccatctaagcctacagaccttagatgtctaaaaatatgtgtcctgatctgtacagttagtgggagcacactatataaatccctttgcatgacaccattcaacaatattttttaaaatctacaaaattttaaagtttcacttccctagcaaaatatcttcagtcaagaaattagtctttgaaaattatgaaaattgttgtgggaaatatttatacaaattattactgataatgcacatatattttgaaacattgtttctagaagcaataaaatataacctatttaggagataacccaaatgatttgtaaaaaaattaacttgtagaaaagggaaggatgttgtgtaaaatcaagtcaattatttgaggttt

SEQ ID NO: 163139 - DNA, 969 bp, Homo Sapiens
ctacggattcactgggccgtcgattaaaatccaggcaaacagtccttgaccatcgactaacggattgctacaggaccttatcaaagataccaggaaccttataggacatatgctacttatatagtatgcagagaatgaatagtcaaggtcaaggacaaacacaatcactgtgcctatatcatgattctttggtataatcaaagctaatttaaaagtattactttaggtagaggtaaataaaagcgaaatcaacccaggttgttttacttggtttggcctataccttgtttggttcccctggattatatgaagaaaacataggaatttttcggttctcttcctctgacaaacgattactctggatttcatcttcggggacaaatgctattggctgcgtcagcttcttaggcccagtccaacactgctcaggtgaaaaatcaataacatttgccacatggagacgggggcctttaccctgtgctgcctgttttcccttgtcctggagtaatgatgggctctcagctgtgccactatcacccactgatgtagctgagaacagtgagtgagaagcaaagggttcacctctcataagttgaaactcttcaagacgttttttcattatcatctcttggtaaaaactttccaggttgtccatgggatcacctttgttcttcttttggggttcatcttggtaataaagagccttaaggaaggagtgacgatcagctccctgaaataaagacttttctatttccatttctcgccgggtcagctgtttgctctttgcaaatctctgtggcaggcaaagaatgcgctgacgctccgagatcctttcttcaatatcttgaagacggttctgtattgcttcaggagttgccctcagtttggtcttcttttcaccagaaacatggtcttccagatcaagattctgttcattaagccttatcctgagaaagagttccggcctcc

SEQ ID NO: 163140 - DNA, 609 bp, Homo Sapiens
catggattggctatactgtcacaaaagtcatatagtctaataagagaagtcttaatggcctctgatgaataacgtaactccagttacacggtgacttacaatagcatacagagatttgatgaaaggacgtcaaacaatgtggcgatctcgtggaaagttatctttcccgctctttgctgtggtcatagtgtcttgcagaaaggatggccccgatgcagcagcagcgccagctgtaataaaaaataattcacactatcagactagcaaggcactagaactggaaaagaccacagaaaacaaagaatccaaccctttcatcttacaggtgaacaaactgtgatgatgcacatgtatgtgtttagtaagctgtgagcaccgtaacaaaatgtaaatttgccattattaggaagtgctggtggcagtgaagaagcacccaggccacttgactcccagtctggtgccctgtctacaccagacaacacaggagctgggtcagattcccctcagctgcttaacaaagttcctcgaacagaaagtgcttacaaagctgccttctcggatactgaaaggtcgagttatctgaactgcactgattgtatcgcagttgac

SEQ ID NO: 163141 - DNA, 829 bp, Homo Sapiens
gtgactctgaggatcccgctttggatgcggctattacaatgggccccaacacataaaacatacagcagccacaaaataattagaaacaatgttaagtaatgcccactaaattttgaatagcaaaatatagcatagaagtataaaacaaatgtatttcttatccctacaaaaaaaggggcatctttttggttttgttattgctgtttgtataaaaactatggtgtgtgcatgtgggtgtatgtgtattccttatagaaaacttgaaaaatacagaggtaacttagaaagaattaccttcccctaccagcctcaggatctcctgataccaattcaataaccacttaaaaacccacaggccaaacctctctttaggctctcaaatatctctactgttgcctgtctcccaggatgacaactagggctattaaggctatgactctaatctaaaactttttgttcttccaattttagagctagacagtatcttaaaagttcattcattcctatccattatgcctgtccctatttattcagcaggaagcagccatggagaagttaagtgaattgcccaggagtcatatctgagcaggatggagactaaccctctaatcgttaggccaggcagggctctgtccaagtgaacacattgagaatgaatcttcacaagagataggtcttcagttattacgtagttagactattaatgagcctggaaggcagaccacaatggatctgtacaaccagaagaaagcagctgggcaaacttctggctcctaacaggcaattacattggctctaaaaagaagttgcaaatagccgcatccaaagc

SEQ ID NO: 163142 - DNA, 350 bp, Homo Sapiens
cgttggatgcggcatatacaagaggaaaaaatatcataatcattaatgattttaagtcaaatattactcaatcacaaaatttaagccattcttttatacctgaattaacaaagagatccaatacattatccctcatttaaaaattaaagaaggcactactccattctaaaatatatttattaattcacaaggtattaattataatataggagtataaattatcatttaaaatgctgtgatgtattatattccatcaattcctaagctttactaattataggtaaaaatctaactaaaaatagatgatttagttagattgcaactgacatatattgcattttcctggtgct

SEQ ID NO: 163143 - DNA, 845 bp, Homo Sapiens
  misc_feature (627)..(665): n is a, c, g, or t
ttccacggagctatgaggagcaggaagaacgccgtgtttcctgaaatgaggctcgcataccagtcccagccagaggcaacgcgacacgaacttcacacggagcttaaaataaccttgaataacgcagtgagaaagtcattccttttttagttctcctgacgactgtcaaggagagaggctcagccgggtgctagaatatttttgaatgcctaaccctttgctactcttttgaacaagaaaagcagccctcgggctcaaaaaatggagctggcaacagccatccagcgagtagggaaacacctttgtttgcttttcagtgtctttggcttctgtgtggcttgtttcttcctctctgtgccaaatggaacaggttttccatttggaaagtttccacatataaaactttcccccacctaaagaaatgcacaagtctctcttgctttctaaaggtgattggcacctgagtaagtaacaggggtttggagaatgagaaattcatttgaaaatgtagggtcggggatgatggcccatgcctgtaatcctagcactttgggaggctggggccagaggatcacctgaacccaggagttcgagacctgctgtgcaatagagtcagaccctgtctcnnnnnnnnnnnnnnnnnnnnnnnnnnnnnnnnnnnnnnntagccaggtgtggcagcatgtgcttaggaggctgaggcaggaggatcacttcagcctgggagatcaaggctgcagtgatgcagagagctgtgaccacgccactgcactacgacgtgcacttacagacgtgagacatatgttcggacacacaagatatcagtaagtgcaaagtttctgcta

SEQ ID NO: 163144 - DNA, 692 bp, Homo Sapiens
tgttctagaggatctcgcttggatgcggctattgcttcacctagttaacttttctgttatggagacagcttcttttcttatattttatgaaccaacctctggtagcttcacttttcttctgcagcttcctcacttctctcggctttacagaattgaagagcgttggagccttatctgaaataggctttggcctaagtgtgcctggttggatcttttatacagaccactaaaactttcttcaaatcaacagtataaagccgttttacttcttatcagtcatttgctcactggagtaatcgtttacttttaatttcctttaagaactttgcatttgccttcacaagcttggctaaatgtttggcacaagaagcccagcttttggcctgtatcagcttttgatatatcatcttcactaagcttaatcatttctagctttttatttaaagtgagagacatgcaacttttcctttctcttgaacccttagaggccactgtagggctgtaattggtctcatttcaatattgttgtgtttcaggaaatagatagacagggtaaaggcccctcccaaggagatggggagagacaggaatggccagtttgtagcacagtcagacatttattaagttcactgtcttaaatgggtgtggtttgtggtgcccaagacaattacatagtataccaagatcctgtg

SEQ ID NO: 163145 - DNA, 638 bp, Homo Sapiens
tctacaggatctctcgatgcggctatttagtccaaactaatgtatagcctccatgtattgatgtatgactttgcctgtaacctctgtctccccacctctaaaaactcgtacatgtcagccatgagagggttcagatctgaagcatgacctgccccattctccttggcaggtgccttgcaataaatgcctcactttctcttgctgcaaatcccaatgacagtatttggctttcctgtgctgggcaggccgacccaagtttggttgacaacaatctgaagcctccaaatagatccaagccagttaattatgagagcaaatcagaccctggacccagtctagtttctactgtgacttccaaatccagttcagataaaacatttgctcaaagaaacttggaaagcttaaaacacaaatccatggagcttcagaatctaacagagaacttaccaatgatcccagttgcagcaagagagtaatggacataatggcctggtggatttctcacatggtcacatgatgttcctgaggaatgctataagctgatacttcagattccactgattgatgccatctgttaaaagaaaaagtttaaacaaattttatgcaacagaatttaattgagcaaaaaactatctgtg

SEQ ID NO: 163146 - DNA, 815 bp, Homo Sapiens
tgtgactctagcaggatcccgccttggatgcggctatttgactagtaactgttaaattcaggtgattcacacatttggttaatgaaggacaccatgaaacctaacatagttgagacatattcctggaatttctgaatccacaatgattaccacctttgttttaataaaagtgtccaagaagagactggactgtagatgagacactgaactttcactagaaaaacataaatgcacttatatgccaagccctcacactgctaagcaaagaccccctgagtcaagaacatcacagagtatgcgtctcaaatcttaactatgccaacatttcacggtttgaaaaaagtaaactttatacagtgtcctatatgtcactgttgcataaactaaaagataaaacacacagcaattcaatgatgattgatgaaaacttataggttcgctaaattacactcacctggaaacaatgcattataatgcagattcttcttttttcaaagaagggtatcacattctctagagaaaatactgcctttcaggggtcagtattataaatccgccaagtgatcccagttcaaaattgaaatgttttgtcacctaacatcaaagctttaaaaatgtttttacacttaccttcatttaagaaaaaggataaatgaccctcttacagttaccataaaatattattataaaaaatattttcccaatctgattttatactcaagggtagagaatatgtcgtttatctcttttgtcgcacatagtacctagcaaacggtattaacaatatgcttgctgagtgtgcttaatatttgctg

SEQ ID NO: 163147 - DNA, 687 bp, Homo Sapiens
ttcagaggatctcgcttggatgcggctatttcatcccggtacagaaccttgtgaaggaatattcacagttggagcagagatacgacaaccttcgggatgaaatgaccatcataaagacaaactccaggtcataggcggaacccatcaaaccaaagtagcttagaatctgactccaattacccctccatctccacatctgagatcggagacactgaggatgccctccagcaggtggaggaaattggcctggagaaggcagccatggacatgacggtcttcctgaagctgcagaagagagtacgggagctggagcaggagaggaaaaagctgcaagtgcagctggagaagagagaacagcaggacagcaagaaagtccaggcggaaccaccacagactgacatagatttggacccgaatgcagatctggcctacaatagtctgaagaggcaagagctggagtcagagaacaaaaagctgaagaatgacctgaatgagctgaggaaagccgtggccgaccaagccacgcagaataactccagccacggctcccccagatagctacagcctcctgctgaaccagctcaagctggcccacgaggagctcgaggtgcgcaaggaggaggtgctcatcctcaggacccagatcgtgagcgccgaccagcggcgactcggcgggaggaacgcgga

SEQ ID NO: 163148 - DNA, 827 bp, Homo Sapiens
tagaggatctcgacgttggatgcggctatcacaattataccaaatcaaactgtaacgttttgctatttacagaagggagtttaaaaatggtatcaaaattacatatactacagtcaagatagacaagggagctgcacacggagtagtgaggtaccgtctacatttcacattattctgggcaccacaaaatatacaaaactttatcagggaaactaagattcttttaaattagaaaatattctctatttgaattatttctgtcacagtaaaaataaaatactttgagttttgagctactggattcttattagttccccaaatacaaagttagagaactaaactagtttttcctatcatgttaacctctgcttttatctcagatgttaaaataaatggtttggtgctttttataaaaagataatctcagtgctttcctccttcactgtttcatctaagtgcctcacatttttttctacctataacactctaggatgtatattttatataaagtattctttttcttttttaaattaatatctttctgcacacaaatattatttgtgtttcctaaatccaaccattttcattaattcaggcatatcttaactccactgcttacctactttcttcaggtaaagggcaaataatgatcgaaacaataattatttattacataatttagttgtttctagactataaatgttgctatgtgccttatgttgaaaaaatttaaaagtaaaatgtctttccaaattatttcttaattattataaaaatattaagacatagcactaaattcctcgacagtgttttcagaagaaatagag

SEQ ID NO: 163149 - DNA, 668 bp, Homo Sapiens
tgttcagaggatctcgcttggatgcggctattggctatgaagatcagtatatcatgaaaaaaacataaagtttgaaggtaaacgaactatgtggttgtctttttattaataccaactttaagcagttggattcattacttgattcttagaaagacacattgataaagtatgtaaagccccaacaaattaagtgcatatataaggtatggactttttaaaatgaaaaactccaaatatcttacaaataattctgttcattatatctatacaatgcaccattcaattcactcattacaatactttgcaccaaaccttgctatctgcaatcttaacactcctcaaatatgagaaaaacacatagtttccactgttctaagaagcgaaatttataaagtcaacacaatatattatcaaggattataggtctaaaacagtttttaaagacaatttatacacattgaaatgggtgctttgcttaattaaaaagctagaaataaagcttcttgcaatttaataaacaaggttgcagttaacagcagattttttacattgcaacattcaactatcatcatggagatatcaataaaggtaaagagtggtatatatatttcttctgaaaacactgtcgaggaacttaagtgctattgtcttaatattttataataata

SEQ ID NO: 163150 - DNA, 721 bp, Homo Sapiens
cggctatcccgccgcataagcaggcagagtctttcatatgctcaaacactggaatctttggttgctaccatatcagctggcttgcagacaagaagccaaccattttaagaatgttttaagtgaacaacttgcaaaccccagggatggaaaaaccctaagaatgcacaattgtgagcatttaacaaccatcacaactgtggctgaagactgttcatgccgttcttctgaaatgagatctcaaagcagtatagttcaaaacaaaaggttttaacaaaaaattggcatatgcacaatttctccaccaatttttgtgtgtcaaccatttagttaacttttccacttgaaaaaatgcaatagaaaaccggacaccatgtttcactatctcagttaatattcacaattacagaggctacaactcaggatacagcatcaccaatgctgcccagagtcagtttatactgaaattaagttctttacaccaagtaaatggttgtccacaaccactggctagtgtacatatgaactaaaatttctagatttggggagaaacaaatgctgctccgatcatctgctctgcttcttctgttcctcaattcatgcttagaaacctgtgggggtttgggcctgctgaccctgcccactggaagaggctgcctgctgtgctgctttctgctttaacattgtccaatcaaatgtagtctatgatgtcaggtcctgaaag

SEQ ID NO: 163151 - DNA, 539 bp, Homo Sapiens
ggccaaaaagtacagagacaacaggacaaggcaacacataccatacagagaagataaaaacctcactggcactggcccgatatgctagcatcaatgcacatcctggtattgagcagagtcgctcgagatgacatggaatcattaggatatgtttcgatgtattttaatagaaccagcctgccatgtgcaagggctaaaggctgcaacaagagaaacaaaaatatgaaaagattagtgaaaagaagatgtccacgccgtgttgaagtttaatgtaaggggtttcctgcagaatttgcaatgtactgaaactattgtcgtgggctacgctatgaggaagccccagattacatgtatctgaggcagctattccgcattcttttcaggaccctgaaccatcaatatgactacacgtttgattggacaatgttaaagcagaaagcagcacagcaggcagcctcttccagtgggcagggtcagcaggaccaaagccccacaggctagcaaactgacaaaaacaagagtacaggaaggttgtacgg

SEQ ID NO: 163152 - DNA, 653 bp, Homo Sapiens
aagaagcttccttaggcagctgatacataacatgtgttttcagggtctttatcttaatgcagactttctcggtcatataataactcacttgggttttcatcccattaatatgacctctttttttctggctcgtttgagttcaagttccttaagccatccatgagtttctggcaaagtatttggtctccactttatacacctgttttattttccaagggcaatgaaacgttcattatatagtaacacacaataaataactcactgttaactctaaaagtaagaatgggaagggtgcctattgcatagcatatacagaaaaatcaagtgaggcgcgggataggaacggtacgtacagcaactccacttaatgggattttcctgtttgttgttgtagtggttgttgtcgttgttcacataattaacactaataaattcttccagtgtttatttttttctcgaaaaaaaatttgcttcttgtctctctcacttacaaagtaggtgaaatgtagaataaggccttcaacattttttgtgtcagatgccagttttaacaaacagaacacaaacttccaaagtgtctgaactagtaccgccttttcaaaaattttttaacactgatgaaccaaggctctcttatgttttcttgttacaag

SEQ ID NO: 163153 - DNA, 336 bp, Homo Sapiens
atgcggactattgctttgaaaatgtgcaggataattgctgcctacgtccactttacattgatttcaagagggacctagggtggaaatggatacacgaacccaaagggtacaatgccaacttctgtgctggagcatgcccgtatttatggagttcagacactcagcacagcagggtcctgagcttatataataccataaatccagaagcatctgcttctccttgctgcgtgtcccaagatttagaacctctaaccattctctactacattggcaaaacacccaagattgaacagctttctaatatgattgtaaagtcttgcaaatgcagctctaatt

SEQ ID NO: 163154 - DNA, 268 bp, Homo Sapiens
gattcagaggatttaggtgaaatgatacacgacccaaaggtacaatccaacttctgtgctggagcatgcccgtatttatggagttcagacactcagcacagcagggtcctgagcttatataataccataaatccagaagcatctgcttctccttgctgcgtgtcccaagatttagaacctctaaccattctctactacattggcaaaacacccaagattgaacagctttctaatatgattgtaaagtcttgcaaatgcagctaaaatt

SEQ ID NO: 163155 - DNA, 1036 bp, Homo Sapiens
atggatgcggctatcgcaaatgtctggagaggatactgtacttgggcttctttcagcatgcttcaacagagtggcagcaaccaagctggagtccaagccccctgataaaaagcagccaatccttctgtctgtcatcaaacgtttctttacagcattattaaaaaggatcctgaggttgtacttcacagtttctatctcaaaacctggaaagagtttctccacattgtcatagagggcgtgcaggggttcatcccgacagtgatgatatttaaccatttccacggatgcaactttgccatttggctttaaatccaaaacttcatagtgtccaggaagaaaaggctccacttttaaaaagggagtcgcggagtgcttcaatgtaacaagacctttagcttctgaacatacagccaaaaatccatcttctgtcattgctttaaacaaaggtctgactccatatgtatctctacccaggaacactttcttattggcagtatccagtaaaacaaatgcaaacacaccatccaacatacaaattgtttgctcaattcctcctttgtcataaagatgaaggattatctcaccatccactttggtctggtattcaaattcaaaatgctgttgcatcttcttatggttgtagatttcaccattgtaacagagccacaaatacggatatttcttcactcgaattggctgcattccaaacagcgggtcaactaccgccaaccggtgaaatccaaagcagcagttggtgtatccattgacattctcaaaacggaatgcatctggacctctgtgtgcaatcttcatagcactcagacactgaacagaaaggcaatcatcactgccaaacagcgcccaaatgccacacatggtgcaatgaagctataagctttcttcaagtgatttattcagatgtgattgaagaaaatctgggcgtaagcaggtcagggtgatgtggcgggctgaggccagggatgtggacagcttgacgggcggcgaggccgctggcgcttataccgacctggctccc

SEQ ID NO: 163156 - DNA, 748 bp, Homo Sapiens
tagaatgttaatgaagacactgtttcctaacatcagtgagatacatcctgtgaagttaaacattcatatttactgagtacctactaggtaccaagtactcttttaggcactggaaatacagtgatggacaacacaggtaaaaaatcgctgccccctcagagctgacattctggggtggaccgttcattttgccacgtactaacgttctgcacaaaagacaggctagactcttgtctagattgtttaaaagaaacttttcaaattggttacattaattttagtttattttcacaagtaaaaatggctttttatttagattctttctgtcccaggctgttgatcttaaaactagttgatttaaagagtttttttgcacaacatttcaattatatttgtgaacttagaaattaacttacaatctaaccagccatcatatcatatcctatcaggctagatatctcaatagtagactgaatactaagctaattttttttacatgtcaatattggcacaaactggaatgaaagaatagtttgattcagacctgctccactatgtgttgctaaaacacatgctatgagcactccaggaaacactatattttttccaaaaaatatgtgattatatatgttaaagtatagataacatttcacacttggacacatatgtgcatttactgtatttcttggtaagcatatttttggggaaagggctgctgatatgatacaagtagacaaaatttaaatga

SEQ ID NO: 163157 - DNA, 655 bp, Homo Sapiens
tttccaaggacatggaccactcatagtaacaagaaagaacagagaggcatctcctataaaaatggacttggctccttccaaggacatgggaccacccaaaggatacaagatagtcccagccaaggattcggtattactctcagaaatagaggtggcacaggctaatgacattatatcatacacagaaatatcctctgctgagaaggtggcttagtcctcacaaacagaggtagccctggccagggacatgacactgcccccggaaaccaacgtgatctagaccaaggagtaaagcactacctatagaaagcagaggtggccccagtcaaggacatggctcaactcccagaaacagaaatagccccggccaaggatgtggctccgtccacagtaaaagaagtgggcttgttgaaggacatgtctccactatcagaaacagaaatggctctgggcaaggatgtgactccacctccagaaacagaagtagttctcatcaagaacgtatgtctgcctccagaaatggaggtggccctgatctgaggatcaggtcccagccctcaaaacagaagcacccctggctaaggatggggttctgaccctggccaacaatgtgactccagccaaagatgtccaccactcttggaaaagtggaaga

SEQ ID NO: 163158 - DNA, 1525 bp, Homo Sapiens
gtagaggtccccggcacgaggcaaagatataaaacgtgctgcaggtgctggaatgatatcaaaaaagcataccctcgggaaagtctgggtacagaagacatctgaaatgaatacagataaacagtatttttgtcgtactcatttgggacaccttctaaatcccggagacctggtgttagggtttgatttggccaactgtaacttaaatgatgagcatgtcaacaaaatgaactcagatagagttccagatgtggtattaatcaagaagagctatgaccggaccaaacgtcagcgtcgtagaaactggaaattgaaagagcttgcaagagagagagaaaacatggatacagatgatgaaaggcaataccaagattttcttgaagatcttgaagaagatgaggcaattcgaaaaaatgtcaacatttacagagattcagccatccctgtggaaagtgacaccgatgatgaaggagcacctcgaattagtctggctgagatgcttgaagaccttcatatttcccaagatgccactggtgaagaaggtgcatcaatgctgacataatgagatgttgtagactgtttccatacatgggcttaagaagttggacagagttaccttaagtgtctctactatctttgcctccagatttcaagaggagaaatttagttttaaacctgaataaacatgtttgttttcagtgctcactcaaaccactaaaacagatggatagctttgaggttttagataaggaaagattatggagaatgtagttgttatttgatttttggcaattttacatttggaattttatcactgtgcttttttatatgaggcactgtagtattttcacatagtatagtactctggatgtaaaagctcaaaaattgtgattccttgaacgttcactaaatcttcaagcaaaaacacatttttacattatttttacgttgattattttagtgaaagaccatatgaagaagcatttttaatattaacttgttacatactttgatccactttacatcatttttatgttgttgaggtagggaaattagggttcagtttatcactggacattcaggaggcaagtcaatcttttttatttccttataaaattaactcttcaaaagctgttaaacagagagttatcttaattttttattgcagtaggaggaaatatatttaaaatatttgtagatttatagcaaatagagactcgttatttaaaggttaaataacaatttgttcttttgttgtttttgccagtttagggcagtagctgcttttgtcataaatatcttcctaccacatcaaaaatgctgcttttaaaatttttgtttataaattgagaaggaattttctctctataagtttctgtcattgaacagatcaccacttaaaaagaatattacgaatccagcatgaagataatgtctaataaaatcaggtacatactgtatccagcttaaagctgattcatgagaacgcttccagatatagctgtttcctgctgatcagctttcc

SEQ ID NO: 163159 - DNA, 1008 bp, Homo Sapiens
  misc_feature (129)..(189): n is a, c, g, or t
tcagtgaatgagcagtacattcggaggctggctgcagaagcaacagaatggcagcgatctggagctcctccgccttccggatctgcagtcagtactgctccccagcctaaaccagctgacaaaatgtcnnnnnnnnnnnnnnnnnnnnnnnnnnnnnnnnnnnnnnnnnnnnnnnnnnnnnnnnnnnnncgaatgcaggaaattgaggaaatggagaaagagtcgggccctgggcaaaaaagaccaaacaagcaagaagaatcagagagtcctgttgaaagacccttgaaagagaacccacctaataaaatgacccaagaaaaacttgaagagtcaagtaccagttggccaggatcaaacgctgatggaacgtgatacagagggtggtgcagcagaaattaattgcaatggagtgattgaagtcattaattatactcagaacagtaagaatgaaacattgagacataaagaggatctacataatgctaatgactgtgatgtccaaaatgtgaatcaggaatctagtttcctaagctcccaaaatggagacagcatgcacatctcaagaaacagactcttgtacacctataacatctgaggtgtcagacaccatggtgtgccagtcttcctcaactgtaggtcagtcattcagtgaacaacacagttagccaacttcaagaaagcattcggggcagagataccctgggaagatgaaccagagcaagaacctaacggacccactgggacaacaaagggaagatccccgggctgggaaatttttcttggttaattcccccttggagccaaaaaaatgggcggaaaaggctcaagggggaagaattgcttgaccctttggaaaagtggttgttgggatggcaccacaacattttccactggaagaaaaattcccaaaccaagggcaattaaccccttccccttggggaagggttcttaactccggggattcttggcgcttataaatataacccccctggggtgtgggaaact

SEQ ID NO: 163160 - DNA, 1370 bp, Homo Sapiens
  misc_feature (493)..(553): n is a, c, g, or t
ggaggggaagaaatttgtggcaatgaaagtagttaaaagtgctgaacattacactgaaacagcactagatgaaatccggttgctgaagtcagttcgcaattcagaccctaatgatccaaatagagaaatggttgttcaactactagatgactttaaaatatcaggagttaatggaacacatatctgcatgggatttgaagttttggggcatcatctgctcaagtggatcatcaaatccaattatcaggggcttccactgccttgtgtcaaaaaaattattcagcaagtgttacagggtcttgattatttacataccaagtgccgtatcatccacactgacattaaaccagagaacatcttattgtcagtgaatgagcagtacattcggaggctggctgcagaagcaacagaatggcagcgatctggagctcctccgccttccggatctgcagtcagtactgctccccagcctaaaccagctgacaaaatgtcnnnnnnnnnnnnnnnnnnnnnnnnnnnnnnnnnnnnnnnnnnnnnnnnnnnnnnnnnnnnncgaatgcaggaaattgaggaaatggagaaagagtcgggccctgggcaaaaaagaccaaacaagcaagaagaatcagagagtcctgttgaaagacccttgaaagagaacccacctaataaaatgacccaagaaaaacttgaagagtcaagtaccattggccaggatcaaacgcttatggaacgtgatacagagggtggtgcagcagaaattaattgcaatggagtgattgaagtcattaattatactcagaacagtaataatgaaacattgagacataaagaggatctacataatgctaatgactgtgatgtccaaaatttgaatcaggaatctagtttcctaagctcccaaaatggagacagcagcacatctcaagaaacagactcttgtacacctataacatctgaggtgtcagacaccatggtgtgccagtcttcctcaactgtaggtcagtcattcagtgaacaacacatttagccaacttcaagaaagcattcggggcagagataccctgggaagatgaacaagagcaagaacataacggacccactgggacaacaaagggaagatccccgggctgggaaatttttcttggttaattcccccttggagccaaaaaaatgggcggaaaaggctcaagggggaagaattgcttgaccctttggaaaagtggttgttgggatggcaccacaacattttccactggaagaaaaattcccaaaccaagggcaattaaccccttccccttggggaagggttcttaactccggggattcttggcgcttataaatataacccccctggggtgtgggaaact

SEQ ID NO: 163161 - DNA, 617 bp, Homo Sapiens
tcccctctgccactttccaaggagctgaaaggagtgagcagcagccaggaaaatggcaaggtctggagcgtggcaagcacagtacggtttcgtgtggaccgtaaggacgacggtggtatcatcatctgtgaggcgcagaaccaggcgctgccctccggacacagcaagcagacgcagtacgtgctggatgtgcagtactcccccacggcccggattcatgcctcccaagctgtggtgagggagggagacacgctggtgttgacgtgtgctgtcacggggaaccccaggccaaaccagatccgctggaaccgcgggaatgagtctttgccggagagggcggaggccgtgggagagacgctcacgctgccgggtctggtatccgcggataacggcacctacacttgcgaggcgtccaataagcacggccatgcgagggcgctctacgtacttgtggtctacgaccctggtgcggtggtagaggctcagacgtcggttccctatgccattgtgggcggcatcctggcgctgctggtgtttctgatcatatgtgtgctagtgggcatggtctggtgctcggtacggcagaagggttcctatctgacccacgaagccagtgg

SEQ ID NO: 163162 - DNA, 1124 bp, Homo Sapiens
aaaatgaccgtgtatatgctcacaaatatttcttcattgatatcacatattacttgacaactatacaactaaactgatctgtggaattttcatggcatcatttttataattatgttttctcacctatactgtccaaatgtggtactgatttttgtcactgtgttagttctgtatcctgtctttcgaatccctatatccgagaattgtggctgagcaattgttaatgaatcactcttctgtcatccatcacaggagcgaagtgggaaagtcctctgaggattttctcagcaatggaagttgtactgggactttctgtgcagacaagaaagtacagtaaaactgaagtttgatcaatgctggggctgttctggactaatgttcattgttcgataaatttctttaagtagtaacagagcagtatcttcagattcccaatagcataagtgactctgaagagcgaaaaggtattcattaaaactctctattggtttttcttggagaacgtagtcaattcggcggcctccatttaacattccaacctttcctaagtagtcctcatccttggaaaaatctggactttcaacaaccttttctgcttcaactacttgcttttcttcttcttctttgatctgattggccaccttctccaattcttcttgcaactgggttgaagacgtatgagcacgggcaaactcatttaatgtctgccaagcacttttgagagagctaataaaaccctgcttcaaatcagatcccatacgagagagactctctttcaattctaaatgaagtctttttctgcctttgtgatgtggaatgagaacagcttttaggtccaaatctggaacaatcataggttctaatctatatgccactggatcaagcggatgataaatattgaagaaccctttacaggtaggaaggctgtaattctcatctatcctatcaactcctcgaatagtgagaaacatagcaattggagaccccaaggcaaagaatatctctggttcaaaatctaatgagttgtaagcaacagaaacctgtccggcgccaacttcaaaagattcataattcacacacacagaagacacgcaagcaccaactgagttcctctttggctcatt

SEQ ID NO: 163163 - DNA, 408 bp, Homo Sapiens
  misc_feature (297)..(305): n is a, c, g, or t
gtcatagtagaacccacatacattttagtgacttatgttaaacactactatttattactataaaacaattcaccacaacatagcaatgcaaaccaagcttactgaaaatactaaatgtggttattctaaattacagctcttttgcaaaatttaacttaattttgcaaaaatcaggcattcatgctgtttactcatatataaatcaccatatttcctctccagtaatgtggatactaactttgtcacttgtgttttctgcaaagagaaaagtattttaaaatattactaccacatcannnnnnnnnaatcttccaaggccaggttcttcaaagtatcacacaggagctgttagaagaaatttcagtccaacaaaattaaaattattataagatactaaaagacttacct

SEQ ID NO: 163164 - DNA, 658 bp, Homo Sapiens
gtaccggacacactgtaacccgatcagctatacctttgtgaagctccatgaagcttttatagctagtctcaagctctacttaaaatccggtcggtttccttgtcataggagttgggtagcgaatactctgaatccataccatgaagcaaatgacgacctcatgatgattatggatgaccggcttattgcaaataccttgcactggtggcacttgggtccagataacactggtgatatcatgaccctgaaattcttgactggacttcagaatatcataagcagcatggctactgttcacttggatcactgcagatgggagtttagattgccaaggaaacccaggtgaacaagaagctttagtttcttctttgcattactgtgaagtagtcactgctctgaccactcttggaaacggtggctcttttgttctaaagatgtttactatgttagaacattgttccataaacttgatgtacctgctaaactgttgtttagaccaagtccatgtattcaaacctgctactagcaaggcaggaaactccgaagtctatgtggttagcctccactataaggggagagaggccatccatcctctgtaatctaagatgaacttgaatttgggactgaaatgaaaggaagccctttcccacatgtgatt

SEQ ID NO: 163165 - DNA, 1127 bp, Homo Sapiens
ccctgccaggtccgcgatccagggctgggcgctcctgaagaaggggtctgcgatggatatgctggctgtcttttccaggccgaggagggaatttctgatgatgcaggatacacccccaccagagctgcctctcatgatcacagatgctgctactgcatacaggcccactccatctgcaaccacaggtgcttccacagccgggatgttctctcccttggtgtcgctccactttatttggggttgggggtaccagccagtggacctgcactccagatggatccctccatcctcataacccttcacttcaatgtgaagatcagaacccaatgctgcaaccttcagctccaccagggctttttcgtagaagtcaccatcttggaaataacacaagtactttccactgtcagaggcttgtgacgttgtgtattcggagagcagccttccctgcagtgatgccatcccgcagaatcgaagttctccctcgatacggtgcactctgcctgtcttccacttcctttccatctgcatacacgttcaccacctgccttaggctggaactcacccacttcagctccatggtctctgcactcatggtcgggaacaggtgacagggcagatcagcgtctgtcacccaccatggccaggatgggcccagagggtccaagcacagaaaactgagctgagtgaggcatgagcagctgaagcaaaaggaggcagacacgaaagttgagcagaaggaaggccaggaaacttgccatatgcattcatgctgcatatcaggagatactggaaagtggggggcagacactatgacctggaagaagctacagaattccaaatggaaacctccacttccctagagctaactcaagtatggtgaccgaagaagatctttcctctgccaaaaattctgtccttcaatgtcttcagctttgagtcccaacattgaaaatcacctcttagcattcccctctgaaaatcacagcccacagaagaaaggcagttaatagttctccattctttctactatggttaaatctccttcagcatgtaagaatgttcttctccatcctgcaagggacagacagaggtgaatgtcacgagacactgctaagcagatgaggtgg

SEQ ID NO: 163166 - DNA, 729 bp, Homo Sapiens
  misc_feature (121)..(146): n is a, c, g, or t
  misc_feature (171)..(412): n is a, c, g, or t
tcacgcaggacttcactcatctgcacaatcgccgaaaacatgcttcaaatatcgatctttgaaaagacaccatgcagaaaataagctttcctctgatgtgcggtattgtcttcaatgctannnnnnnnnnnnnnnnnnnnnnnnnnagagacggagtctcgctctattggnnnnnnnnnnnnnnnnnnnnnnnnnnnnnnnnnnnnnnnnnnnnnnnnnnnnnnnnnnnnnnnnnnnnnnnnnnnnnnnnnnnnnnnnnnnnnnnnnnnnnnnnnnnnnnnnnnnnnnnnnnnnnnnnnnnnnnnnnnnnnnnnnnnnnnnnnnnnnnnnnnnnnnnnnnnnnnnnnnnnnnnnnnnnnnnnnnnnnnnnnnnnnnnnnnnnnnnnnnnnnnnnnnnnnnnnnnnnnnnnnnaccgcgcccggcctttcttcagtgcaatttctaaagagaaacttaaatcctgttgtattctttcaacacaagcaatgatacttctcagagtctgctcaaaagctcagctctgtggactccgtgacaaaatgtacgcgtccactgccgaccctcttggtttctgaaaccaacctttcttcctgctctcctctttaagagcaaaccccaacatgtataaggtcacagcaagtggtagccaggaaaagctgtgggacccctcatttgagtcacatccatatggcatggagaaagaaaacctctctgccagaaggaactga

SEQ ID NO: 163167 - DNA, 1036 bp, Homo Sapiens
  misc_feature (16)..(16): n is a, c, g, or t
  misc_feature (35)..(35): n is a, c, g, or t
  misc_feature (46)..(46): n is a, c, g, or t
  misc_feature (55)..(55): n is a, c, g, or t
  misc_feature (93)..(94): n is a, c, g, or t
  misc_feature (97)..(98): n is a, c, g, or t
  misc_feature (110)..(110): n is a, c, g, or t
  misc_feature (122)..(122): n is a, c, g, or t
  misc_feature (132)..(132): n is a, c, g, or t
  misc_feature (135)..(135): n is a, c, g, or t
  misc_feature (140)..(140): n is a, c, g, or t
  misc_feature (155)..(156): n is a, c, g, or t
  misc_feature (170)..(170): n is a, c, g, or t
  misc_feature (202)..(202): n is a, c, g, or t
aatgaccaggggctcnacttttgaaatggaaaggnaatttaagttnaaaatcatnaagccctttcccacaaggaaccccaggaggaagattgnnagnnaagtgccggggnccacctcatcanagatgcttantgnagccntgcaggtgcttgggnnttgatgaaatcccncagtgtagtcagaaaagctgttgaattaagancaaggcccaggctccaaaaagtgccctcatggcaggcacatcaattcgaggcctggattgctgctttcaattactggcatccagaaattgtgtattcagggggcgacgatggccttctgaggggctgggacaccagggtacccggcaaatttctcttcaccagaaaaagacacaccatgggtgtgtgcagcatccagagcagccctcatcgggagcacatccagacaacgggaagctatgatgaacacatcctactgtgggacacacgaaacatgaagcagcccgttggcagatacgcctgtgcagggtggggtatggagaatcaagtggcaccctttccaccacacaccatgctcctggccgcctgcatgcacagtggctttaagatcctcaactgccaaaaggcaatggaggagaggcaggaggcgacggtcctgacatctcacacattgcccgactcgctggtgtatggagccgactggtcctggctgctcttccgttctctgcagcgggccccctcgtggtcctttcctagcaacctaggaaccaagacggcagacctgaagggtgcaagcgagttgccaacaccctgtcatgaatgcagagaggataacgatggggagggccatgccagaccccagagtggaatgaagccactcacagagggcatgaggaagaatggcacctggctgcaggctacagcagccaccacacgtgactgtagcgtgaacccagaagaagcagactcagccttcagcctcctgcctctcctccattgccttttggcagttgaggatcttaaagccactgtgcatgcaggcggcagatgaggtg

SEQ ID NO: 163168 - DNA, 636 bp, Homo Sapiens
  misc_feature (56)..(56): n is a, c, g, or t
ctcacaacccacggcagggagattggccgccgcgcactttgacgcaagaggggagntggaggaatatttccgggacattggcgttcccatgagcagtgtgcggctgccctgctattttgagaacctcctctcgcacttcttgccccagaaagccccagacggaaagagctacttgctgagcttgcccacaggtgacgttcccatggatggcatgtccgtgtctgacctgggtcctgtggtgctcagccttttgaagatgccagaaaaatacgtcggccagaacatcgggctgagcacttgcaggcacacggccgaggagtacgctgccctgctcaccaagcacacccgcaaggtcgtgcacgatgccaagatgactcctgaggactacgaaaagcttggctttcccggtgcccgggacctggccaacatgttccgtttctatgccctgagacccgaccgtgacatcgagctgaccctgagactcaaccccaaggccctgacgctggaccagtggctggaacagcacaaaggggacttcaacctgctgtgacctgcccgcctcgcggccccttgtggggatcgggggcaccagaggggcagaggcaccaacatctgaataaagccattgttctcccg

SEQ ID NO: 163169 - DNA, 1149 bp, Homo Sapiens
  misc_feature (1057)..(1057): n is a, c, g, or t
  misc_feature (1101)..(1101): n is a, c, g, or t
ggggggattggcggctgcagccaggggtcctccgacgctgggcttccgtgagcggcgctctgccaggtggggccggagctgcggggagggagttggcgcctagcgcgcagctccatccccgcctctgcagtggactcggccgcacaatcggggtcccgggctcctggaacttgtcccgcccaggccgcggcgaggaggtcactccagcagatctctggaccggattcgtcccattctcgtcctcatggtggacaagaaactggtggtggttttcggaggcacaggtgcccagggtggctccgtggcccgcacactcctggaagatgggacattcaaggttcgagtggtgacccgaaaccctaggaagaaggcagcaaaggagctgaggctgcaaggtgcagaagtagtgcagggagaccaagatgaccaggtcatcatggagctggccctgaatggggcttacgccaccttcatcgtgaccaattactgggagagctgcagccaggagcaggaggtcaagcaggggaagctgctcgctgatctggccaggcgcctgggcctccactatgtggtctacagcggcctggagaacatcaagaagctgacggcagggagattggccgccgcgcactttgacggcaaaggggaggtggaggaatatttccgggacattggcgttcccatgaccagtgtgcggctgccctgctattttgagaacctcctctcccacttcttgccccagaaagccccagacggaaagagctacttgctgagcttgcccacaggtgacgttcccatggatggcatgtccgtgtctgacctgggtcctgtggtgctcagccttttgaagatgccagaaaaatacgtcggccagaacatcgggctgagcacttgcaggcacacggccgaggagtacgctgccctgctcaccaagcacacccgccaaggtcgtgcacgatgccaagatgactcctgaggactacgaaaagcttggctttcccggtgcccggggacctggcccacatgttcccgttctatgcccctgagacccgaccgntgacatcgagctgaacccctgagactcaaccccaaaggccctgnacgcttggaccagtgggctgggaacagcaccaaagggggactttcaac

SEQ ID NO: 163170 - DNA, 586 bp, Homo Sapiens
  misc_feature (55)..(121): n is a, c, g, or t
tccttccaagtctagcatttggggtatggaaaattgttgtggtgtgtggtagggnnnnnnnnnnnnnnnnnnnnnnnnnnnnnnnnnnnnnnnnnnnnnnnnnnnnnnnnnnnnnnnnnnnctccactggccagcttgggcctcatcctcatgtcatccttctaggaaggcgcctgccccatcttgtctgccggcagcatgcatccaaggccagagctcaggcctgcagactgggctggtgcctcctccgcttcagggtatgggagttggtgaaggggctttcaaaaaataataagaaaaaaaaggtaaagtctttggtagctttcgatccactcagatcctggaaggcagcaaggttttgtggatctagattcattaggaatgtcttcttgtcagccaggccaggacccgggcttgccaagagcagaggccctcccagcaaccaggataccaccactttgggggctttgtgtacagaggtccagggtctgagaccccataggctgcagaaatctggggcagccacttcatcaagaagcccctatacaggggccaagaactcaaaaaccagcgtgcacaatacacg

SEQ ID NO: 163171 - DNA, 839 bp, Homo Sapiens
tgcgactgccagtctgcagaaagctggacttcggcaatgcagtgtgacttgcctatgagagaaaatgctttcccacttcaaaggagactaggacaggcagaacaacaaagcagcaggaaacagggcaacagcaatcactcgttttcatctgggttttgagggtcaaagattttgacgtgcgtaaaggggaaaagccctttgcgcccgttcacttcgccttcccactggccatttatattcatccttgtgactttcacgatgtcaccaacctctaatgccaaggcagtcttgtcataagcacaggctactcttttctggattgctttcgcaaagacaggtccattctgtgtggatggcaaaggggtgattgctgccccaggagaaccggaaactgcaggtagaggagttgtggtctgaggttgagcgtatgcatgagcaggttctgggatcccataactgttggaattcctatttccatgctttccgtgtggtgaggatctcacaagcttttcgacataagggacaggaatcatcccaacccggccatccttgtaccgggcactccaccactgttcttcaagcttctctattatcactaggatctcacccttattaaaagggcaggtcttcggcatcattcccaggaaaatcatacagagtccgtacatattccaggttatcttctgctgtaggcaggtagggtgctgagacagaatcccattggtgggcttggatacctgggcgccaggctcgataagggtaggtggtgtccaggtagtagatcttgtaaactccagcgggccggcaaatggtcaattccggtcccgcatcttaaacgg

SEQ ID NO: 163172 - DNA, 1622 bp, Homo Sapiens
  misc_feature (648)..(700): n is a, c, g, or t
  misc_feature (704)..(704): n is a, c, g, or t
cacagaacatgacccagtccaaaacagaataggaaacttgaagaccttaggaatgtcgcacacgtaggaaacttaacaaaggctctaagaaacaaaacacctgagcctgaacgtgtgggtccccaggtaaggttcaattatagtatagtacataggtgacccaagattcaccagcacatcattctttatttttctaggcacaaatagaatcaaattgactcccactaccagaagccctgaaaaatagccatgagggccaaggaactctatgtattttaaagttaagcagttaggacttctctctagcctgtgagccatcctagtaaccttcccctaaccctgcaaaagcaagcaagcaagcagggcagcctaattggagccctttaggctgcaggagggatggcaaaaccagaagagagaacaccccacccctctcacctcaagctttaaagggctgagtacccgcgccccgatcggcatactgctcccgctcatacccgggccatgtcgtacagagaattccgcgcggctgctgaagcttgggacaactcactctcatgcccgtaaccgtagccctctccaacagtggggactggggctgtagcgcgacgcagggggctccgatcccgcccgtaatatgaagtggannnnnnnnnnnnnnnnnnnnnnnnnnnnnnnnnnnnnnnnnnnnnnnnnnnnnctcntgaggtcggcaacaggtgtctatcgtagggatcgagagaggtggaggtgaggtgactggccatggctgtatgctggacttgtggcagctgggacaagggtctgctctgcgtaatgatacacggaggcagctgcagctgccactgcctcataggaccgggcagcacggcagcgcttgtagtaggcatcgagcgctccgtacgcgttgttgtaatacaatgaatccccatagctcatggtgtaaggcgtacgcactgctccgtattgctcattatattgctcggtcaagtctgccacgcggcctgaacgatctatcggacactctttggaccagtgcccctctttcccgcaccgatagcagccgctctggtctcccatcccgggcgcagtcctaagccggctggtggacaactgcacgtgcattcgtttgccttgaaactctgtgttatcaaggcccctgatggcctccactgcatcctctgcccgctccatgtgtacgaaggcataatctttcacgatgtcacattcgatgaccggaccatactcctcaaacttggctcgaagctccttattggtgcaggtgggactgatgttgcccacatgcaactttgttgaggttttgctcttattcttgctggcttccacgttgatgttcaccccatgaagcttgtaatggtgcaggttgcgtatggcatcctcagctgccgtcttgtcttctatgtgcacaaagccgtaattcttaatgatgtcacattccagcaccttcccatactgctcgaagagtgagcgaatctcctgctctagtagcctcccggggcaggtttccgatgaacagcttcaccatcctgacaagagcccgcacaagaaaccagcagggcctcctcctcgcggcgcggacgcttctgacaaaacgctaaaat

SEQ ID NO: 163173 - DNA, 500 bp, Homo Sapiens
agaggatccggttcgacccaagcgtctctgccgctcatgtgtacgaagggcataatctttcacggatgtcacagtcgatgaccgaaccatactcctcaaaacttggctcgaagctcctgagtggtacaagtgggacggatgttaccccacatgcaacatggttgaagcttttgctcttattcttgctggcttccacgttgatgttcaccccatgaagcttgtaatggtgcaggttgcgtatggcatcctcagctgccgtcttgtcttctatgtgcacaaagccgtaattcttaatgatgtcacattccagcaccttcccatactgctcgaagagtgagcgaatctcctgctctgtagcctcccggggaaggtttccgatgaacagcttcaccatcctgacaagagcctccgggtggcggcagcgacggcggctcccacgtcagagagaaccttacaaaatggcgacggccgctcgagcctggacgcgaacgggccctccc

SEQ ID NO: 163174 - DNA, 1034 bp, Homo Sapiens
  misc_feature (964)..(976): n is a, c, g, or t
cccacaagggccgcgaggaggaggccctgctggtttctgtgcgggctcttgtcaggatggtgaagctgttcatcggaaacctgccccgggaggctacagagcaggagattcgctcactcttcgagcagtatgggaaggtgctggaatgtgacatcattaagaattacggctttgtgcacatagaagacaagacggcagctgaggatgccatacgcaacctgcaccattacaagcttcatggggtgaacatcaacgtggaagccagcaagaataagagcaaaacctcaacaaagttgcatgtgggcaacatcagtcccacctgcaccaataaggagcttcgagccaagtttgaggagtatggtccggtcatcgaatgtgacatcgtgaaagattatgccttcgtacacatggagcgggcagaggatgcagtggaggccatcaggggccttgataacacagagtttcaagacatccagctctgtcacccaagctgcagtgtggtggcatgattgtagctcactgtaactttgaactcctgagctcaagggatcctcccgcccttggcctcccagagtttttgcagggactatatgtgagccactgcgtctggtccaaatgtagtttttcaagagtaatgctttaataaactgatttttttccccccgcaacaaaaagcagtccacaccgcaactccgaggccctctattgccgggggggccggagaaagcaggtaattgaaaatgggcgcccatgggccattagcctgttttccctggaccccagcttttctttgtaacaaagcggggtaaaactttgtccgggtcctccccttatagtggaagcccgcattatatttcccaaaaaaccccccggttttacccctggcatcttacgggaattcgggcgttgcagctacccccggggaattttataaccccccgcccttaatggaagcccggcgccnnnnnnnnnnnnnggggggcacccgaaaaggggggactctcctccctgccagagaatccctcttttttcta

SEQ ID NO: 163175 - DNA, 1859 bp, Homo Sapiens
gggagaagcgtccgcgccgcgaggaggaggccctgctggtttctgtgcgggtgagactccgagcctttccactgcctttcttgtactgtgttaaatcttctctcactcccttgggcttcgggggtgtcctggtaggtccgcagtctccacacccgtcactgagagccgacctcggtcctcggcattgcgcggctcttgtcaggatggtgaagctgttcatcggaaacctgccccgggaggctacagagcaggagattcgctcactcttcgagcagtatgggaaggtgctggaatgtgacatcattaagaattacggctttgtgcacatagaagacaagacggcagctgaggatgccatacgcaacctgcaccattacaagcttcatggggtgaacatcaacgtggaagccagcaagaataagagcaaaacctcaacaaagttgcatgtgggcaacatcagtcccacctgcaccaataaggagcttcgagccaagtttgaggagtatggtccggtcatcgaatgtgacatcgtgaaagattatgccttcgtacacatggagcgggcagaggatgcagtggaggccatcaggggccttgataacacagagtttcaaggcaaacgaatgcacgtgcagttgtccaccagccggcttaggactgcgcccgggatgggagaccagagcggctgctatcggtgcgggaaagaggggcactggtccaaagagtgtccgatagatcgttcaggccgcgtggcagacttgaccgagcaatataatgagcaatacggagcagtgcgtacgccttacaccatgagctatggggattcattgtattacaacaacgcgtacggagcgctcgatgcctactacaagcgctgccgtgctgcccggtcctatgaggcagtggcagctgcagctgcctccgtgtataattacgcagagcagacccctgtccaagctgccacaatgtccagaataacagccatggccagtcacctcacctccaactctctcgatccctacgatagacacctgttgccgacctcaggagcggtgctgccacagctgctgctgcagcagcagccgctgctgctgttactgcagcttccacttcatattacgggcgggatcggagccccctgcgtcgcgctacagccccagtccccactgttggagagggctacggttacgggcatgagagtgagttgtcccaagcttcagcagccgcgcggaattctctgtacgacatggcccggtatgagcgggagcagtatgccgatcgggcgcggtactcagccttttaaagcttgaggtgggatgtgtgtgggctgaaattccgagctgcggttgtgcatgagaatacacccttcgtggtaccccatctccgggacgttctcggctctgtgcgttcagtccctcaggaaccgtggaccttaatttaccttgctaagttcagaccttctcttcctttcctttcccttcctctcctgcccattttcctgttcttctgtccttcaatacttctgtagcttcccattcatgttctcttctcccagcaggcctcattgtgtgcagaaactgtggtgggggctgtgctgtctcctccctgcctcctgcctcctgcggctgttggatttgggaatgaccttggtgagagtctcactgctccagggtctctttttggtccaaaggctagacctatagagttggatcacctttttgttcctttccggctgaacatacatgggtttttcaactttaccacaacaatagcaccaagagacgacgcgaaacatgcgacaaccccagacgaccacacgtacccacaagaacacggggggcgcggccagaaaaccccgg

SEQ ID NO: 163176 - DNA, 776 bp, Homo Sapiens
cggcaagcacggggcagcgcttgttagtaggccatcgaggcgctcccgtacgcgtttgttgtaatacaaatgaatcccccataggttcatgtgtaaggcgtacgcactgctccgtattgctcatatattgctcgggtcaagtctgccacgcggcctgaacgatctatcggacactctttgacccagtgcccctctttcccgcaccgatagcagccgctctggtctcccatcccgggcgcagtcctaagccggctggtggacaactgcacgtgcattcgtttgccttgaaactctgtgttatcaaggcccctgatggcctccactgcatcctctgcccgctccatgtgtacgaaggcataatctttcacgatgtcacattcgatgaccggaccatactcctcaaacttggctcgaagctccttattggtgcaggtgggactgatgttgcccacatgcaactttgtggaggttttgctcttattcttgctggcttccacgttgatgttcaccccatgaagcttgtaatggtgcaggttgcgtatggcatcctcagctgccgtcttgtcttctatgtgcacaaagccgtaattcttaatgatgtcacattccagcaccttcccatactgctcgaagagtgagcgaatctcctgctctgtagcctcccggggcaggtttccgatgaacagcttcaccatcctgacaagagcccgcacagaaaccagcagggcctcctcctcgcggcgcggacgcttctgacaaaacgctaaaatggcccc

SEQ ID NO: 163177 - DNA, 777 bp, Homo Sapiens
  misc_feature (119)..(119): n is a, c, g, or t
accccttgaaatgggaaaggttcccacgaagttattccaagggaccagaaggacccaggacaaattggcccgcgaggaggcaaagggaaagggaaagggaagaggaagggtcttgaacnttaggcaaggtacaatttaaggtccccgggtttcctgaaggggacctgaaccgcccagagcccgaggaacctccccggagaatgggggtcccccgaagggggggtattcttcatgcacaacccgcaggctcggaatttcagcccaacacacatccccacctggaaactctgtgttatcaaggccccctgatggcctcccactgcatcctctgcccgctccatgtgtacgaagccataatctttcacgatgtcacattcgatgaccggaccatactcctcaaacttggctcgaagctccttattgggtgcaggtgggactgatgttgcccacatgcaactttgttgaggttttgctcttattcttgctggcttccacgttgatgttcaccccatgaagcttgtaatggtgcaggttgcgtatggcatcctcagctgccgtcttgtcttctatgtgcacaaagccgtaattcttaatgatgtcacattccagcaccttcccatactgctcgaagagtgagcgaatctcctgctctgtagcctcccggggcaggtttccgatgaacagcttcaccatcctgacaagagcccgcacagaaaccagcagggcctcctcctcgcggcgcggacgcttctgacaaaacgctaaaatggcggcccc

SEQ ID NO: 163178 - DNA, 674 bp, Homo Sapiens
atttgctattaatttaagaccttagtctgaggttgtttagcctccccagttactctctggccttcaagctcttttcattgttagagattactgtgatactgggggagaagggtacaagtaaacttaaaaggagtgtcaagttatcagactttgtaaagatgttgaagttttaaatgggaaagcccttttgagctttgctgtaaagccgctgtattgtgctctctttcaggtgggatgtgtgtgggctgaaattccgagctgcggttgtgcatgagaatacacccttcgtgggtaccccatctccgggacgttctcggctctgtgcgttcagtcccttcaggaaccctgggaccttaatttaccttgctaagttcagaccttcccttcctttcctttcctttcctctcctgcccattttcctgttcttctgtccttcaatacttctgtagcttcccattcatgttctcttctcccagcaggcctcattgtgtgcagaaactgtggtgggggctgtgctgtctcctccctgcctcctgcctcctgcggctgttggatttgggaatgaccttggtgagagtctcactgctccagggtctctttttggtccaaaggctagacctatagagttggatcactttttttctttccggtgaaataaatggtttttcaactta

SEQ ID NO: 163179 - DNA, 424 bp, Homo Sapiens
ctcgtggggtggctcgtagcgggctcgttggggggcttgccctggaggaagcggctgacgatctgccgctgaatcttctccagatcgaactcctgcacggtctctctgccctcctccacctggtactggcagttggagagaatcagtggagtcaggtcccgctccacttcataactgatgacatgcagttcagtgacctcggcggcatccacggaatagctgttgttttccttggagagtttttccacggcgtagacaatttcattgtgtaggcgaatcacagtagctgacgagagcggtagcacagaggcccaggccccgtcggcgtggcaagaggatctcaaactcagtgtccagatccaagtcagtgctgcagtagtctttgggtaggttgatcacaccacgtgccggatcctgtagagtc

SEQ ID NO: 163180 - DNA, 440 bp, Homo Sapiens
tgtattggtggtgctgccacgactggaactatgaacatctctttatggacatcaagaacaaaatggcacaggtcattactgcgtgtgtggctgagctacaagtctcctggaatgtaaacaatgttggtttatttccaatttcatctaatcttcattgtcatctctcaatgaacagtactcataaaatgatgagaaagtttcagaacatgtatgtacatggttcagaaacagctcggctttcaaaaagctgtcagctcaggtagcacgccttggtcttgaattcggtgctacgctgacagctctccttctgaatgcaaaggcaccagtccatgatcaagtccacgccgcagacgaggagagaggagtcttctctccaaagtcatccaaagatagctgaggaaataattctatctcatttctcgatccatttcagcacagca

SEQ ID NO: 163181 - DNA, 1374 bp, Homo Sapiens
gggagtgcggctgcgccggccggtagctgcagctggagcagtggcgtttggaggagactcggatataccttctcagaagctgcacaggaggaaagcagtgacaaagaaagaagttgtcattctttgcacgaaactggatggcttctacagggagccaggcctctgatatagacgagatttttggattcttcaacgatggcgaacctcccaccaaaaagcccaggaagctgcttccaagcttaaaaactaagaagcctcgagaacttgtgctagtgattggaacaggcattagtgctgcagttgcgccccaagttccagccctcaaatcctggaaggggttaattcaggccttactggatgctgccattgattttgatcttttagaagatgaggagagcaaaaagtttcagaaatgtctccatgaagacaagaacctggtccatgttgcccatgaccttatccagaaactctctcctcgtaccagtaatgttcgatccacatttttcaaggactgtttatatgaagtatttgatgacttggagtcaaagatggaagattctggaaaacagctacttcagtcagttctccacctgatggaaaatggagccctcgtattaactacaaattttgataatctcttggaactgtatgcagcagatcaggcgaaacagcttgaatcccttgaccttactgatgacgaaaaaggtcctcgagtgggctcacgagaagcgtaagctgagcgtgttgcatattcacggagtctacaccaaccctagtgggcattgtccttcatccagctggatatcagaacgtgctcaggaacactgaagtcatgagagaaattcagaaactctacgaaaacaagtcatttcttttcctgggctgtggctggactgtggatgacaccactttccaggcccttttcttggaggctgtcaagcataaatctgacctagaacatttcatgctggttcggagaggagacgtagatgagttcaaaaagcttcgagaaaacatgctggacaaggggattaaagtcatctcctatggagatgactatgccgatcttccagaatatttcaagcgactgacatgtgagatctccacaaggggtacatcagcagggatggtgagagaaggtcagctaaatggctcatctgcagcacacagtgaaataagaggctgtagtacatgagcgagctagagaaatcaccaccgtttagaccaagctgtaaggccctactacagacagtgtttaacaagtaaacttacaagaacccaacacaattcccagaaagtaacaatagccagaggttgaagggcgaggtagaagaggggggactgtcgcagcgtaatccttcataccacctggtt

SEQ ID NO: 163182 - DNA, 1043 bp, Homo Sapiens
ttacacttttccccagtttatcgccaatcagaaaaagaaggcatctttgtaccagaaatctcagcaaaagccctaatattcacactagattaggcctgggtcacatgtccaccctgaccaatcactgtggccaggaggatgatacatgctaattagcttattctatatcacggacaacacctttggggaaaagggtgggggtcagcctccccacaatcacatggattccccaagtggaaactaggagcagggagttgcttgggtggccgctaacaccaggctactcttattttagcttgctaagttgagatcagctagacctgctttcttttctcctcagtcttgcatttccctcaatacaagctgcagcctctttcctcgtttctagtctcagaaggaaggagagggaagccattctcctctagggactcttcagtctcatttagatgatagtccctttttttctacctccatattagagatggagctccttccttttcctgtttcttaatttttgtcttctcattcctgcttccctctcaccctattgccagttccaccaactagagtgaaagacttcctagccatttcattaaatctattctgtatccaccaggtggcagcatcttgtcatacgtgtcaggacttaggactgcggggtttaggttagatgtcacggaaaaagctagttctgtggtcaggcggcaccaaatgagaaaggaatgcagaccctccagatgtatccttgggaaaagcagtaaaccaactaatatttattgaagacctactttgtcctctacatagggtagcttctgtcagggaatcttggttcttcccaagaaacactgattttctttcagggagacttcatgtgttcatttatttccaccacagcagattttaagaaattataatatgtaatattggatatctataaagagtatatctaacgtgaataaattatgaagcatactaatgagtacctatgacccataacacatatacgattataaccattttaaaataccagaaaaagacaacaa

SEQ ID NO: 163183 - DNA, 615 bp, Homo Sapiens
ctgagaatctggacgaggacactgaggcgacgtaccctaaggaacagtaacagtatctccaagtacacgctggaacacagttcccaaaggagcccctgctgtacagccgtgacatcagccgctcagaatcccttcgttgttccagcagctattcacagcagatcttccggccctgtgacctaatccatggagaggtcctggggaagggcttctttgggcaggctatcaaggtgacacacaaagccacgggcaaagtgatggtcatgcaagagttaattcgatgtgatgaggagacccagaaaacttttctgactgaggtgaaagtgatgcgcagcctggaacaccccaatgtgctcaagttcattggtgtgctgtacaaggataagaagctgaacctgctgacagagtacattgaggggggcacactgaaggactttctgcgcagtctggatccgttcccctggcagcagaaggtcaggtttgacacaggactcgcctccggaatggcctatttgcactctatgtgcatcatccaccgggatctgaactcgcacaactgcctcatcaagttggacaagactgtggtggtgtcagactttggcctgtcacggctca

SEQ ID NO: 163184 - DNA, 519 bp, Homo Sapiens
agatttctcctcaccaccatcatcaccagcagactcaccaatacctgcagcatggagccagagcgcagccccaaggccaagacaaagccgctgaaacatgagcagaaacacaccctccagacagcaccaggaaacgccgaagaagaaaacaggctatggtgaactaaacggtaatgctggagaaagagaaatatctttaaagaacctgagttctgatgaagcgcaccaacccgtatttccagggtcctcaatggcaaccagcaagttgtagacactagcctgaagcagactgtaaaggccaacacgctttgggcacagcacggaattccaaacccaagaatttcattcagaaaaacagtatggacaaaaagaatgggaagtcttatgaaaatcaatctggagagcatcggtctgtagataagtctgatactataccaattccaaatggtgtggtcacacataattctggttatattactaatggtaatatgggtcaaggagcagataaggtggaggtgt

SEQ ID NO: 163185 - DNA, 910 bp, Homo Sapiens
actgagatgccttatggagaagtaccccaccctctatgaagacagaatcactctctgccattcattctgcctgatgctaacaacacgcagatgataaagggagtgtcccagacctagctggatcaagggaaataccaggagacctggagagcaggccctggacccacagtgccaagcctcagagtaagcagacattgggaaagttgccaaccacttggtagaccactaggttctctgttttcccttccctttccttttcaaatcccacagtttcctgttggggagaagctgtaattagcctagtccaggtaccagatcccagctaggggcgcagctgcttggataactccaagaaaacctgggcaccagtatttttccaattataaggactgtggcataaatttttaaatgagttatattgaaaccagatttctccagctgccaagggaagaaggtagggctggactccctgctgtggcccagcccttgttaggggttggtctctcactgcagccagacaggatgatcctgggttctggggagggtaagctgccccttgccgagttctgcaccgaataaagagtccaaacccgctgcttccgtgtcctgagagatgggtaaatgggtgatggatggagcagactgaagagacagcagatgactcagtggtggaagaaggggggaagatgctgggctggctagctaatgttcccccctttcagcgatttacaggaaatggagcccagcttggtcatgaagttggtttgcttccactgtgcgatgcactcctcagaaattttgaagtcagcctgcaacttctcgaagactttcttcttgggcttgagctcctcatctggttggcccttttcatagcccttcacaaacacgtgctcaccaggagcagagcccc

SEQ ID NO: 163186 - DNA, 1332 bp, Homo Sapiens
ttgtgatcctacgagatgagaaatggggtggaaacaaaacctacacagcttacgtggacctggaaaaggactttgctgctgaggttgtacatcctggagacctgaagaattctgttgaagtcgcactgaacaagttgctggatccaatccgggaaaagtttaatacccctgccctgaaaaaactggccagcgctgcctacccagatccctcaaagcagaagccaatggccaaaggccctgccaagaattcagaaccagaggaggtcatcccatcccggctggatatccgtgtggggaaaatcatcactgtggagaagcacccagatgcagacagcctgtatgtagagaagattgacgtgggggaagctgaaccacggactgtggtgagcggcctggtacagttcgtgcccaaggaggaactgcaggacaggctggtagtggtgctgtgcaacctgaaaccccagaagatgagaggagtcgagtcccaaggcatgcttctgtgtgcttctatagaagggataaaccgccaggttgaacctctggaccctccggcaggctctgctcctggtgagcacgtgtttgtgaagggctatgaaaagggccaaccagatgaggagctcaagcccaagaagaaagtcttcgagaagttgcaggctgacttcaaaatttctgaggagtgcatcgcacagtggaagcaaaccaacttcatgaccaagctgggctccatttcctgtaaatcgctgaaaggggggaacattagctagccagcccagcatcttccccccttcttccaccactgagtcatctgctgtctcttcagtctgctccatccatcacccatttacccatctctcaggacacggaagcagcgggtttggactctttattcggtgcagaactcggcaaggggcagcttaccctccccagaacccaggatcatcctgtctggctgcagtgagagaccaacccctaacaagggctgggccacagcagggagtccagccctaccttcttcccttggcagctggagaaatctggtttcaatataactcattttaaaaatttatgccacagtccttataattggaaaaatactggtgccccaggttttcttggagttatccaagcagctgcgccccctagcctgggatctggtacccgggactaaggctaattacagctttctcccaaacaggaaaactgtggggatttgaaaaagggaaaggggaagggaaaaacaggaaaaccctagtcggtccctaccaagtgggtttgggcaaccttttctcccaatggtcctgcctttacctcctggaaggcctttgggcacct

SEQ ID NO: 163187 - DNA, 1156 bp, Homo Sapiens
tgaattgcagctccaggctgaactccagcggctcctcagaagattcctttgttgaaattaggatggctgaaggagacgcagacgggttaggtaaaagaaatcaggcatagtcctgggcccacgtagaacagtctccactggcacgagcagatctgcagatggggccaagaatggccattgagtcatgagaatgagaaattgaaggaagagctaggaaaactaaaagggaaatcagaaaggtcatctgaggaccccactgatgactccaggcttcccagggccgaagcggagcaggaaaaggaccagctcaggacccaggtggtgaggctacaagcagagaaggcagacctgttgggcatcgtgtctgaactgcagctcaagctgaactccagcggctcctcagaagattcctttgttgaaattaggatggctgaaggagaagcagaagggtcagtaaaagaaatcaagcatagtcctgggcccacgagaacagtctccactggcacgagcagatctgcagatggggccaagaattacttcgaacatgaggagttaactgtgagccagctcctgctgtgcctaagggaagggaatcagaaggtggagagacttgaagttgcactcaaggaggccaaagaaagagtttcagattttgaaaagaaaacaagtaatcgttctgagattgaaacccagacagaggggagcacagagaaagagaatgatgaagagaaaggcccggagactgttggaagcgaagtggaagcactgaacctccaggtgacatctctgtttaaggagcttcaagaggctcatacaaaactcagcgaacctgagctaatgaagaagagacttcaagaaaagtgtcaggcccttgaaaggaaaaattcttgcaattccatcagagttgaatgaaaagcaagagcttgcttatactaacaaaaagttagagctacaagtggaaagcatgctatcagaaatcaaaatggaacagctaaaacagaggatgaaaagtccaaattaactgtgctacagatgacacacaacaagcttcttcaagaacataataatgcattgaaaacaattgaggactacagaaaagagtcagaaaagtggaaaggcatgctgaaggactgatgaaaactggactggcagaaag

SEQ ID NO: 163188 - DNA, 726 bp, Homo Sapiens
ggagttgaatgaaaagcaagagcttgtttatactaacaaaaagttagagctacaagtggaaagcatgctatcagaaatcaaaatggaacaggctaaaacagaggatgaaaagtccaaattaactgtgctacagatgacacacaacaagcttcttcaagaacataataatgcattgaaaacaattgaggaactaacaagaaaagagtcagaaaaagtggacagggcagtgctgaaggaactgagtgaaaaactggaactggcagagaaggctctggcttccaaacagctgcaaatggatgaaatgaagcaaaccattgccaagcaggaagaggacctgggaaaccatgaccatcctcagggcttcagatgggaagtttactgttctgattttcatgcttgaaagagcagcgagagagaaaattcatgaggaaaaggagcaactggcattgcagctggcagttctgctgaaagagaatgatgctttcgaagacggaagcaggcagtcccttgatggagatgcacaagtcgtcatgggggcgaagaaccagtgaactctgacccgcagggctttaccttgttcccaaaaaaggagctgaaggaacaggggaactgggcgggcaaaacaggggaaattatttcccgaatttcccttcccggggccccccaattgggtgggaaaaaggttccctggcccttgaaacttaaaaaacccccttttaacaagat

SEQ ID NO: 163189 - DNA, 867 bp, Homo Sapiens
gtatcagcaagtctcctaacgcctcagcccgggatcgcctctccttcctgctgccagcagcttccccccattcaactggccagggagaggactattcgtcagaaagactggccacgaggccaagaagacggtgtgtcctacacgagctgatcagagcgcccgccctgtgccgtcccagagctgcctgcagcccaactcggagtccacacctccgagctgcctcgcgagctggagccacaagaagcacagaagttcctaagccaaacagaaaggcagccccaatgcagctgttcccatagctggagccatggaggtgtctggtgattctggagcaagggtgtgtgtgtgtatcagagagagaactcggagggcaagccataaggaagtaaaactcaggatatgctcacgacttaggtgtgaatattcagtcttccccaaatcaaatcacctctgactttggggaagctgaacgacctcctatgacaaagcctgggggtcttcacagggcacgtagctcagagtcctcttacagtcctgtgtgttggctggacgtttgccttctgctggtcccaacaccaacacagcttgaaatctgaactgaagccaagttgtgcctcaggaatttgtccagcctggccacaaatcaggctgtgacctgcacggggatctttgctgcacaaagtggggtataagggggcttttagaaataaaagacaatgaaagcagcttcatttaagaaatatctatatgcacaaaaaagaaaatagctcccacttggctacaaataccacttgagatgattacccctgtgagagctgagtgcaccccagttttctttgcccatctcctgctactcctggctcattc

SEQ ID NO: 163190 - DNA, 1153 bp, Homo Sapiens
  misc_feature (241)..(241): n is a, c, g, or t
cggggagggctacatttaagcctttgaaagtgaagcggtgaacattcccccagggggacagcatgaaatgattcttctgacatgaagagtcccttgaaaaaactggattcaaaagtcaagcaggccaaatctcacacctcatgaatccagggaggtacacaatgaagaagagcttctgcctaaaggaacaaaggctgtctgggaggcctgagagtccattaaaagacaccgcatttaactncaacaaaaagaagagcagcaccacccaccagtggtgccccagacacacctctcctccaagctttgggctgctcctcttggagtctacacttagaccctgggggtgggggtgggcacacaaatggacagagtggtctaaatgcaggtctcctggggttctgcgaaatctagccagaagcatctccatctcggtgtccatttcgatccaactaagcttccagtaaagacactgcagcaatgtaaacatgcaacctaagctagcatgaggttctagatagtaagcctgaactaggaataaggcaactgaactgtgactttcgggccagggtcatccagctgcaattatccaggattggcctggcttctctagggattcattctggcctgaacttcctggtaatcatgacatgaacttctggcttctgaattttaagtaaatactttgaatatataaatttgggaggtgaaacaggtttacccttttcaagtctccatgacttgggcacttaagtttactttcacactaaggaagccttatcatagatgctctttactgtctatcatatccattcctagcattaaaggtgaaaattagtatgatcacagactctctttaggatattctctcttaactctctcataatattacatactcaaaagcataatttcgattcaagaatcccttgattcgtctggtcaccgaagcccactgagactacacttgaggtgcaatcacacctactggtgcgtccactttatggaagtcacgtggcttcctggacaccatctcccggtgtctgcaacactcggtagcccactatagctttctcgttcccagatgatgcataaggtattcatttttgcttgcttaatttacatactatctgtgattactaactgattgcacatttga

SEQ ID NO: 163191 - DNA, 237 bp, Homo Sapiens
aggagagctgcttcgtgatgaaaggaagaacccagattcacagtatggtgaacttattgaaaagtacattaaagaaggaaagattgtaccagttgagataaccatcagtttattaaagagggaaatggatcagacaatggctgccaatgctcagaagaataaattcttgattgatgggttccagaaatcagacacctcaggagggacagaccatggatgggaagcagatgaggtgcc

SEQ ID NO: 163192 - DNA, 1594 bp, Homo Sapiens
ccgcttacatcgggatgatacatatctcgtagagatcgtggtacactgaggacatagcaaatatgcgagtaaatacttattaagctgaagtgaactaacaaaaaccattaattacaccatgtctaacaaccaaaccagctattgcttttcagtgttttggtgatacgttggagtaggaagtcatattcaaattggttagatccttggaagaaatagtagtatttgtttttagagtagaagactgcatcaattttaggcccgattcctaggaagttctaggtaatcagttagggataaccagggtccatcatctgtctcctttcatcatacctccaatactggttatctacaaagaagtaggtcctataaaaacgtgggttaaaaacagctgcatcaatttttttcacaaagttaggaaaaccaaaagaatgtatgctcttgggataatttggctctggtcttaaattgctaattaaccagtatttgtcatctttaaaaagaaaaacttgatttctggcttcaatttcataagcagcttcaatgccagatggcaaggttggccataaggaagaaattaaattaacactggtctttggtctctcagaaaccttcagccagaagaacctgtctttgaagaaaaagatcttatttcccacggtagtgacagcatcaaaactcaaattggggtcacagagagctggttctgaattgtcaggatttggcaagcgttggttctcttttgggtctccatacagggactgaatgccacgtatgtcatcagcagagaggcgaaatgtgttgatgtcaacatatttgtaggtggggaacattacggcctttggatcactagaatggccaagacctaaggaatggccaatctcgtgaacagcagtgaggaacaagtttgtgcctcctgaatgtgtagtccagaattcgtcctcatcgaaatgtgcatcccctccaatgccagatccaggtccaaaagcatgggctaggattccacctttgccatcaaaagcatggaagtctccatgagctccacgggcaaaaaccaccaaaatgtcagccatgcctgtgttaatcttgctgaatttcaagggggtaacattactccatacttggaaagctttccggattgcgtagtcaacatcctcacggttcatgtcaggtgtgtaattattgattctgtaggtgatataatgtttcctccatacgggcccccctggcatttccctgaaatgatggacatcggggactccacatcgaggtgcgtgcatcatctccagggtagatgtgtccagttgcccggtcactttcagacccaagaagtgctgcatttcttggattttttccttcattaagtttccactatatttcatttttgtcactggaagtttgtttatctcaaggccataaaatttttctaagtatctttcaccaaatagcacattatttttttccaggcttgtagagctgttcaggggaagagctccagaagcagtggcctgcaggagcagtattagaagaaacttcattgtaaacttctaaacggatcattcagtttactgtgttcctttctcgtggggtaggagat

SEQ ID NO: 163193 - DNA, 231 bp, Homo Sapiens
  misc_feature (157)..(189): n is a, c, g, or t
tgatataaaacaaaagtccagtaaccgggaatatgagacacgtggccatgcctaaaggatcgcaagacaggcagagaggccgggactgatatgcaggaatcccagcctactgtgggcttggatgatgaaactccacaactactaggacctactcacnnnnnnnnnnnnnnnnnnnnnnnnnnnnnnnnnccaatcaccagatatgagcatgccagccgaagacacagggca

SEQ ID NO: 163194 - DNA, 297 bp, Homo Sapiens
gagctcggtaccgcaccacctgatctgcattaggcaggggtgcaggtgggctgagtgaactttgccttcaaaacctgcttgtctgtcctggacctttgatgaaatgggtatcccggtcacgcagatctgagacagtggggaccgccgaggccagtagtgggctatgcttgagcagggatgagaagggccgcggcagcacgcagccttgacccacgcctgcgtctctgtggtgcaaggccagagggctctctctagaacctgaccgtgcactccatctcctgggagccacttttggcg

SEQ ID NO: 163195 - DNA, 332 bp, Homo Sapiens
ccacctgatctgcctcatcgacatcctcaatgtcttcttccagagggatccctctttgctgctgcataagctgctcctagggaccagtggagagggcaaggcgtaagggggaaagctccccgccaatggcgcggtccacccccagccaggaactgctccgggccacccagctccatcagtatgtggagggctttctcttccatgcggctcttgccagctcaggtcattcgggcgctgcttaagcctaatgtccaggcccagcaggacttgcagctgttgctggagctgctggagaagatgggactctgttactggctcaataaacccaaggg

SEQ ID NO: 163196 - DNA, 372 bp, Homo Sapiens
ccaccacctgatctgcaccacctcatctgcttctaaccacagcagcatactgcttcaagtattctcctcctatgtaaggtcgagataattttgtcacatatgaattttaggtggacatctcatttcctcacatattagacatcttgctggggtcacagcttctttgttccatttgtctttcgttcttgttttttaataagacattgcaaacagtagctatttcttaaagtgacataattttcgctcttgcattctgataaaaatgaacatacttaagcctcttccttgcaccctgaccctggtgctctagcataatgcaacaaatcctacgctcaatggtttgcagggccatccacgcaggcagatgaggtg

SEQ ID NO: 163197 - DNA, 223 bp, Homo Sapiens
ccgctcagttccagcactcacagcctccatttcctcaactagaaatcaaggacgggtggggtacccttcaactctcctagttctctgccagtttctctctacacatggtatctacctctgtatcgggctgccagatcaaaatatcataaaccacggcagctgtacaaacaatggaaattcatttcccacagttgtggaggctgggaaagtccaagactgaggg

SEQ ID NO: 163198 - DNA, 166 bp, Homo Sapiens
cctcctctgcccctcctcagctgctctaagagatgaaggagagcgtgtcacctcgaggcaaaagagttgggagccattgagacgggccactctctccttcatctcttagagcagctgacagctcccatatggaggctgctcctttattctcgtggcagatgaggtg

SEQ ID NO: 163199 - DNA, 233 bp, Homo Sapiens
ccacctcatctgcccattctcttaaagactacaagtggcactgccttcaggaacacctcaggaggtcagcattcagtcatcttcaacgcctccaatgcacctggtctgtgctccacacattacatgctctataaatgcattttggcctttgtttacattatgtactgtgagaataagatattcaattaaaatagtttatcagttcattcatctgaacagagcccagaagggtc

SEQ ID NO: 163200 - DNA, 357 bp, Homo Sapiens
ccacctcatctgccaacactgacagtggaagcctctgtcccatctgcccagtgctccccgccaaggacagagtcagggccttaggaaagctgtttttggcacctgagtgcatgtgtgtgtgtgttttcaaacagggttccactccagtggagagagagaaaaagactttggtcgacatggacatcagttaaaacctctatccagaaactaactaaccagtgttaacttgtgcgtcatagctagaggttctcgggacttcattattttcagccactttcctcccagaaaacactggccatctcatgaatgaagctgttagccaaggttagaatatgcaagcagatgaggtgaagtgtc

SEQ ID NO: 163201 - DNA, 246 bp, Homo Sapiens
ctagcggatcctacacaccagctcatctgcacactttcctggtgtaatcggagcccctgtcatggacgacttgaatatcaaggaatatcaagggagagagagctctttaaatcatgtgacccaagtccttcgtttacacagataaagtgatgtgcaggcagaatcttttgaattcttaatgtgcaaccaactacaaattagctaggctacaactatgtgatcacatcatgttgtatatgagcagac

SEQ ID NO: 163202 - DNA, 471 bp, Homo Sapiens
agaggttgagaagatcaaggaacagatcagtgaaaataagaatgtgtcagtagacatggaaaagctacagccgttgtatgaaactcttaaacagaggggagaggaaatgattgctagaatctggggggactgataaagacatatctgccaaagctgttcaggataagcttgaccaaatggttttcatttgggagaacatacacacactggtggaagagagggaagccaaactactggatgtgatggagctagcagaaaagttctggtgtgatcacatgtcattgatagttaccattaaagatactcaagatttcatccgggacctggaagatcctggaattgatccttcagtagtaaaacaacagcaagaagcagcagagaccataagggaagaaatagatggactacaggaggagctggatatagttattaacctaggttctgaactcattgcggcatgtggggagcctg

SEQ ID NO: 163203 - DNA, 389 bp, Homo Sapiens
gaggaagatgtcacgaggactatccttgtagctagctggctagatatcttgtagtggtggtacactagtcgttccatcagtgtgtagtcaaccgaaggagagtcttggcaggaacggaaatagagcttgcccatgtttcatggagaactctttcttctggctgtgggttctgtgagagaacgagacaggtaacaaggatgttggggtctcagatggtgtgaaggttaacgtctgtgtttcagctgttgttccctcttcttctgcaatggtctggcttgaggttaactcaggaggctcctcctgggacatatttagagtggatgttggagaaagtgtcagagctgaagtctgaagatgcaccaatatgttgggctgccttgccatggaag

SEQ ID NO: 163204 - DNA, 366 bp, Homo Sapiens
tcagctacatgagtgtatgatgtagtgcccagacaatccttccattgtggcccagggaagccaaaagatgggacacccctgcatatcattgtacctatgagaggtattggtacaaatacatacacacaaaagattatttcattctcaaactacatcaagaaaaagataatggctttcatacttacacaaattaacttctgaaacaaagctagggattgcatgcaatttcttctgaattcagcagaatctatggaggactaaaaaaaacctacaaattcctttttaagtggaacggcatgaaaggaaacaacttggttgcagtaagaggtctagggttttcagaactgacaccagtgaatcttagtg

SEQ ID NO: 163205 - DNA, 379 bp, Homo Sapiens
  misc_feature (330)..(330): n is a, c, g, or t
  misc_feature (363)..(363): n is a, c, g, or t
cacctcatctgcctacggagcacatgaagaagatccccaccatcatcctgtccatcacatacaaaggtgtcaagttcatcgatgcctccaacaagaacgtcattgcagagcacgagatccggaacatttcctgtgcggcccaggacccggaggacctctgtacctttgcctacatcaccaaggacctgcagaccagccaccactattgccatgtgttcagcaccgtggatgtgaacctgacctacgagatcatcctgacgctggggcaggccttcgaagtggcctatcagttggccctgcaggcccagaagtccagggcgacgggcgctnctggcagctgaagatgattgaaacaaaatcttncaaaccggtgcctaaa

SEQ ID NO: 163206 - DNA, 264 bp, Homo Sapiens
tctagaggatcccactaatgcagtcaccacaacaggtcgtcttcaaataccatctcagcaggctgggagccaaatgaagaaaatgaagatgaaagagacagacacctcagtttttctggatcaggcattgatgatgatgaagattttatctccagcaccaatatggactccagtcatagtataacgcttcagcctactgcaaatccaaacacaggtttggtggaagatttggacagggcaggacccactcggggtaccgagctc

SEQ ID NO: 163207 - DNA, 1407 bp, Homo Sapiens
atttccttactgcctcttgcctggaatatggttgtctcagaataacatcatgcactcgggcttttatacttctgcctttaggggactgtggcagcatggcatgggtcaagaagtacttctccttcatcttcctttgatgtcggtaactcatcctttctgcactgcgggagttgttaatgcttttgtgtcctccagttcacatgctgattgctaagaagaaaatgagcatgagtgaacccaaagctgctgaaacattctgcgtttatgcaacttccttgccctctatacaaggaagatggtttcattgtcttgtctagagaataaagtctttttttaaaataaaatcggtgtatccctgaccaagcgtccattaacactttgacaattgctcaaactgcatggtcacagcagcctcagctcataccagccatccaatgcaaggaaggacaacaccaagcccagaggacagttcctggactgatttcttcaacccaatctcacaccccatgggacgaggtcatcaagcaggaagaaggatggatatggactccagtcatagtacaacgcttcagcctactgcaaatccaaacacaggtttggtggaagatttggacaggacaggacctctttcaatgacaacgcagcagagtaattctcagagcttctctacatcacatgaaggcttggaagaagataaagaccatccaacaacttctactctgacatcaagcaataggaatgatgtcacaggtggaagaagagacccaaatcattctgaaggctcaactactttactggaaggttatacctctcattacccacacacgaaggaaagcaggaccttcatcccagtgacctcagctaagactgggtcctttggagttactgcagttactgttggagattccaactctaatgtcaatcgttccttatcaggagaccaagacacattccaccccagtggggggtcccataccactcatggatctgaatcagatggacactcacatgggagtcaagaaggtggagcaaacacaacctctggtcctataaggacaccccaaattccagaatggctgatcatcttggcatccctcttggccttggctttgattcttgcagtttgcattgcagtcaacagtcgaagaaggtgtgggcagaagaaaaagctagtgatcaacagtggcaatggagctgtggaggacagaaagccaagtggactcaacggagaggccagcaagtctcaggaaatggtgcatttggtgaacaaggagtcgtcagaaactccagaccagtttatgacagctgatgagacaaggaacctgcagaatgtgacatgaagattggggttaacacctacaccattatcttggtaaagctatcccctgtaaatactgttgctgtcat

SEQ ID NO: 163208 - DNA, 2361 bp, Homo Sapiens
gcggaccccaggcctctgccaggttcggtccgccatcctcgtcccgtcctccgccggcccctgccccgcgcccaggatcctccagctcctttcgcccgcgccctccgttcgctccggacaccatggacaagttttggtggcacgcagcctggggactctgcctcgtgccgctgagcctggcgcagatcgatttgaatataacctgccgctttgcaggtgtattccacgtggagaaaaatggtcgctacagcatctctcggacggaggccgctgacctctgcaaggctttcaatagcaccttgcccacaatggcccagatggagaaagctctgagcatcggatttgagacctgcaggtatgggttcatagaagggcacgtggtgattccccggatccaccccaactccatctgtgcagcaaacaacacaggggtgtacatcctcacatccaacacctcccagtatgacacatattgcttcaatgcttcagctccacctgaagaagattgtacatcagtcacagacctgcccaatgcctttgatggaccaattaccataactattgttaaccgtgatggcacccgctatgtccagaaaggagaatacagaacgaatcctgaagacatctaccccagcaaccctactgatgatgacgtgagcagcggctcctccagtgaaaggagcagcacttcaggaggttacatcttttacaccttttctactgtacaccccatcccagacgaagacagtccctggatcaccgacagcacagacagaatccctgctaccagagaccaagacacattccaccccagtggggggtcccataccactcatggatctgaatcagatggacactcacatgggagtcaagaaggtggagcaaacacaacctctggtcctataaggacaccccaaattccagaatggctgatcatcttggcatccctcttggccttggctttgattcttgcagtttgcattgcagtcaacagtcgaagaaggtgtgggcagaagaaaaagctagtgatcaacagtggcaatggagctgtggaggacagaaagccaagtggactcaacggagaggccagcaagtctcaggaaatggtgcatttggtgaacaaggagtcgtcagaaactccagaccagtttatgacagctgatgagacaaggaacctgcagaatgtggacatgaagattggggtgtaacacctacaccattatcttggaaagaaacaaccgttggaaacataaccattacagggagctgggacacttaacagatgcaatgtgctactgattgtttcattgcgaatcttttttagcataaaattttctactcttttggttttttgtgttttgttctttaaagtcaggtccaatttgtaaaaacagcattgctttctgaaattagggcccaattaataatcagcaagaatttgatcgttccagttcccacttggaggcctttcatccctcgggtgtgctatggatggcttctaacaaaaactacacatatgtattcctgatcgccaacctttcccccaccagctaaggacatttcccagggttaatagggcctggtccctgggaggaaatttgaatgggtccattttgcccttccatagcctaatccctgggcattgttttccactgaggttgggggttggggtgtactagttacacatcttcaacagaccccctctagaaatttttcagatgcttctgggagacacccaaagggtgaagctatttatctgtagtaaactatttatctgtgtttttgaaatattaaaccctggatcagtcctttgatcagtataattttttaaagttactttgtcagaggcacaaaagggtttaaactgattcataataaatatctgtacttcttcgatcttcaccttttgtgctgtgattcttcagtttctaaaccagcactgtctgggtccctacaatgtatcaggaagagctgagaatggtaaggagactcttctaagtcttcatctcagagaaccctgagttcccactcaagacccactcagccaaatctcatgggaagaccaaggagggcagcactgttaggtttaaggaacagacgtatgaacatatatctaggacaactttcccaaaggtttttccaatcctggatcctggaaattcagaagttggacagactgaaggaagcgtttagcacgtcctgtcgacgtggatcaaaggggccaccgtgtccacactctcgagtaacaggggcatctggacaagactcacaattaagatgtggcagtgaccttgtttatccccctgtgtggcccataatcccaaaacacggctagcacccattcagcgcagattctccgaa

SEQ ID NO: 163209 - DNA, 780 bp, Homo Sapiens
  misc_feature (429)..(439): n is a, c, g, or t
gtactagttacacatcttcaacagaccccctctagaaatttttcagatgcttctgggagacacccaaagggtgaagctatttatctgtagtaaactatttatctgtgtttttgaaatattaaaccctggatcagtcctttgatcagtataattttttaaagttactttgtcagaggcacaaaagggtttaaactgattcataataaatatctgtacttcttcgatcttcaccttttgtgctgtgattcttcagtttctaaaccagcactgtctgggtccctacaatgtatcaggaagagctgagaatggtaaggagactcttctaagtcttcatctcagagaccctgagttcccactcagacccactcagccaaatctcatggaagaccaaggagggcagcactgtttttgtttttagtattgttgtannnnnnnnnnnggacactgtccaaaggttttccatcctgtcctggaatcagagttggaagctgaggagcttcagcctcttttatggtttaatggccacctgttctctcctgtgaaaggctttgcaaagtcacattaagtttgcatgacctggttatccctggggccctatttcatagaggctggccctattagtgatttccaaaaacaatatggaagtgcctttggatgtcttacaataagagaagaagccaaggggaaactgaacagcagatgggcaaaggggaaggatgatgccatgtaggatcctgttagaaatttatatggcatgtattggaaaacttaaacacacca

SEQ ID NO: 163210 - DNA, 612 bp, Homo Sapiens
  misc_feature (185)..(220): n is a, c, g, or t
caggggccggtacaggatacttcctcttcagctggaagaaggcagtggtagtggatatcacagagcattgccattgacatcaaactctatggcgtggccttatcgattgcagtgggaagttgttgaagacttgaagacgtgattcctgctccaatcatcccttcttgctcctctttgtgcacgtnnnnnnnnnnnnnnnnnnnnnnnnnnnnnnnnnnnncccgtgctcaacagagggtttagtttatatgtctctgaactaagtgtagtaacctcccaatattgttttctctaatacgcgtgagattccctatttctcttaagggagaagccacccatgagatgtcttttcctttctccatcatcttagagccaatgttatagtgttcttgtctaatcctatgtagctttgtgttcaagtgacttgatcatcgtgctctcctttgttgaatttttaacgagatagtaatgtaaatgtgggtggtttttcccctctggtctcagtgatggacagggggttaatcttcagccaggattgatggcagctgagggaaattcttgcccaatctaaacccagaactcaaacttaacattagaaatataagggtccag

SEQ ID NO: 163211 - DNA, 828 bp, Homo Sapiens
  misc_feature (179)..(179): n is a, c, g, or t
  misc_feature (182)..(182): n is a, c, g, or t
  misc_feature (193)..(193): n is a, c, g, or t
  misc_feature (199)..(199): n is a, c, g, or t
  misc_feature (218)..(218): n is a, c, g, or t
  misc_feature (250)..(250): n is a, c, g, or t
atctgaacagatgatttgatgaatcctttaatgtaagtgtagaaaacacagagaaggaaaaaaatacatgcatactgaagtcatgagcaaaatacatcaaacacctgttccttgctaggtgcaggtgggggcaatggtgaacttcagacacatgcacactcactcacactcccattttnttntgcttccctcncagccncaacacattcattcccgcnccttcccaaaaaaaagatcaggcactaaatcntagtgaaccccacaactgcctgctgggagaaggttaagtgactgctaaagtaagagtgtatgtaggtcctcacccataacatgaaacaaagcatgtgctgtaagccaattccagctgcttttgcctctttggaagtaaatgaagcatatgcccactacagcttgaaactgcagtggaaatgtcttgaaaacaaaattttgtttctcttgctatgtcttgaagtaaaatcaacagtggaaaattcatcctaaaactgcctcatctgctattaaaatacatttgtcattctatttttggtatctattcaattatagctcattaagaacggttcatgaagcttgtacctgcttatggtaaacatcagtgtaccacacaaaacctgccacacctagacaggcttatgaaacaccaaatcttctatgtgttccttgctaacattccctcaagaccacagcattctagtgttaccagagataaagtacgtatagttaagtgatgaaagaaaggtatttggtttgtgtcgtcaccttatacatcctagtgatgaaactaaccaaactatgcctccatgccttccc

SEQ ID NO: 163212 - DNA, 976 bp, Homo Sapiens
cggtacccccgtagcaaccttgactgtacttggcttgctgatacgcaggtagtcacattataagtcattgtatgtgataatattcagaaggtagatgtgtaacctattgacataataaagtgactgaagtcacctcttggttacagtagcgtagcgtgcccgtgtgcatgtcctttgcgcctgtgaccaccaccccaacaaaccatccagtgacaaaccatccagtggaggtttgtcgggcaccagccagcgtagcagggtcgggaaaggccacctgtcccactcctacgatacgctactataaagagaagacgaaatagtgacataatatattctatttttatactcttcctatttttgtagtgacctgtttatgagatgctggttttctacccaacggccctgcagccagctcacgtccaggttcaacccacagctacttggtttgtgttcttcttcatattctaaaaccattccatttccaagcactttcagtccaataggtgtaggaaatagcgctgtttttgttgtgtgtgcagggagggcagttttctaatggaatggtttgggaatatccatgtacttgtttgcaagcaggactttgaggcaagtgtgggccactgtggtggcagtggaggtggggtgtttgggaggctgcgtgccagtcaagaagaaaaaggtttgcattctcacattgccaggatgataagttcctttccttttctttaaagaagttgaagtttaggaatcctttggtgccaactggtgtttgaaagtagggacctcagaggtttacctagagaacaggtggtttttaagggttatcttagatgtttcacaccggaaggtttttaaacactaaaatatataatttatagttaaggctaaaaagtatatttattgcagaggatgttcataaggccagtatgatttataaatgcaatctccccttgatttaaacacacagatacacaca

SEQ ID NO: 163213 - DNA, 1079 bp, Homo Sapiens
  misc_feature (167)..(167): n is a, c, g, or t
  misc_feature (285)..(285): n is a, c, g, or t
  misc_feature (453)..(476): n is a, c, g, or t
tccggttgtggtgggcaccaggttaaagagaccaccccccttgggttttttagtttgaattaattgaatttaattgagtttgtggccaaaatttccccattaggcttaccacgccaaaaggaaattacccccggcttgtaaaaaacttacctattgatggttacgcnccccccgatccagatgaaagtggcccaggcatcaccagggcgcaggggaagagaagagggaacacagcctggtcctctggggacaccgggcgcggttctcacgcacgcgccctcgggnccggcccccgccagcctgtgtgggatcgcgcccgcgtgtctgcccgccaaagcaggcagaacctgcccttgcggggtccaccatggctaagcgaaccatgaggtattgtgaaacagcaacctttttggaatagagcagtaatcacattaagtcaaaattgatcacatnnnnnnnnnnnnnnnnnnnnnnnnggcatctgtaatacaatgttctaagagaaaactaaaactagtacatggcagtatatgacattgtaaaacaaaaaactgatcctccaatagcagcaaacaatgtgaaagagatacacagaagcgatgtgaatatttccaaaccgtgcctggaagtcaacggtagcagcgcaataagaaaatggagctgcggcctgtccccggtgtgggcaccgccccttcccctcgggagcctcctcctcacacctcctcccgcctgtcctccctcacacgtcagcctccacactcttgccacctcccttcaacacttcctaaataaaaattacaagaattacatagccaagatgtgcaaattgtctattttgtcactaagttttttaaaggaaggggcaggggataagaattcatcggaaccgaacttaggttgagtaccctaattttccttgcacccatgcctgtccaatcagatgactcatgggaaacgccaaacaggctgaatcaatgtctttgtgtggtttttttcttccagattgtttttttctcacctataaaaggatctatctttcatattactttgcgtgagtaatggggatctctagatcacca

SEQ ID NO: 163214 - DNA, 364 bp, Homo Sapiens
  misc_feature (52)..(90): n is a, c, g, or t
  misc_feature (163)..(163): n is a, c, g, or t
  misc_feature (298)..(298): n is a, c, g, or t
  misc_feature (304)..(304): n is a, c, g, or t
  misc_feature (316)..(316): n is a, c, g, or t
  misc_feature (341)..(341): n is a, c, g, or t
tatctttaaaaataaactgtattaaatctgtaacatcaaaggcagaaggttnnnnnnnnnnnnnnnnnnnnnnnnnnnnnnnnnnnnnnnttaaatcaaggggagattgcatttataaatcatactggccttatgaacatcctctgcaataaatatacttttnagccttaactataaattatatatttgagtgtttaaaaaccttccggtgtgaaacatctaagataacccttaaaaaccacctgttctctagggtaaacctctgagggccctactttcaaacaccagttgggcaccnaagggnttccctaaactncaactttcttttaaagggaaagggnaaggggactttatcatcccgggg

SEQ ID NO: 163215 - DNA, 573 bp, Homo Sapiens
aaatgaagtttccatctgtccacgttaagaaaataaacaaaacaacaggaagccattctctgtgtatcctccttggaggcaggaaggatggatctgccgataggcacacaacagcacacagccagggctcatgggagtgagtgcccgtcacctcacgaaggtcatgggcctaaaacatacggaggctccatagaaaatgctccagctggctttgcagtcatgcataaaggtgaggacacttaattcaaggcatctgggggctggtgtcaccgcacatgaagagtagtgcccatgctgtcccacgagcttccttgggaaaagggaaaaacaaatcttttcctcaaatagaattgtcgcaggaaagagccatgacattttattcactgtttaatcatcgggtggcaggatttctttgaagtagaatctggtagtacccctcccaatctttgctggatcacttctaaatggtgaatatactctgtcaaggaatgttctggatcttgagaagcagtcagggatctttctaatcttgaatttggggatggagtggctcttcaaacaaattaccacacc

SEQ ID NO: 163216 - DNA, 1740 bp, Homo Sapiens
  misc_feature (1392)..(1400): n is a, c, g, or t
  misc_feature (1695)..(1695): n is a, c, g, or t
tgagaaatgtcggttcagatattgctgtgctaaggagacagcaacgtatgataaaaaatcgagaatccgcttgtcagtctcgcaagaagaagaaagaatatatgctagggttagaggcgagattaaaggctgccctctcagaaaacgagcaactgaagaaagaaaatggaacactgaagcggcagctggatgaagttgtgtcagagaaccagaggcctaaagtccctagtccaaagcgaagagttgtctgtgtgatgatagtattggcatttataatactgaactatggaactatgagcatgttggaacaggattccaggagaatgaaccctagtgttgagccctgcaaatcaaaggaggcaccttctaggattttctgctaaagaggcacaggacacatcagatggtattatccagaaaaacagctacagatatgatcattctgtttcaaatgacaaagccctgatggtgctaactgaagaaccattgctttacattcctccacctccttgtcagcccctaattaacacaacagagtctctcaggttaaatcatgaacttcgaggatgggttcatagacatgaagtagaaaggaccaagtcaagaagaatgacaaataatcaacagaaaacccgtattcttcagggtgctctggaacagggctcaaattctcagctgatggctgttcaatacacagaaaccactagtagtatcagcaggaactcagggagtgagctacaagtgtattatgcttcacccagaagttatcaagacttttttgaagccatccgcagaaggggagacacattttatgttgtgtcatttcgaagggatcacctgctgttaccagctaccacccataacaagaccacaagaccaaaaatgtcaattgtgttaccagcaataaacataaatgagaatgtgatcaatgggcaggactacgaagtgatgatgcagattgactgtcaggtgatggacaccaggatcctccatatcaaaagttcgtcagttcctccttacctccgagatcagcagaggaatcaaaccaacaccttctttggctcccctcccgcagccacagaggcaacccacgttgtcagcaccatccctgagtcattacaatagcaccctgcagctatgctggaaaactgagcgtgggaccctgccagactgaagagcaggtgagcaaaatgctgctttctgccttggtggcaggcagagaactgtctcgtactagaattcaaggagaaaagaagaagaaataaaagaagctgctccatttttcatcatctacccatctatttggaaagcactggaattcagatgcaagagaacaatgtttcttcagtggcaaatgtagccctgcatcctccagtgttacctggtgtagannnnnnnnnctgtacctttctaaacctctcttccctctgtgatggttttgtgtttaaacaatcatcttcttttaaataatatccacctctcctttttgccatttcacttattgattcataaagtgaattttatttaaagctatgccacacatgcatgttcaaatggtttccactgattcgatttttcattcatttaatgcaaacccattcttggatattgggcttatttgagaaaacacatttcaaaaccggaaagccaaaaacactccaaaaacaagcaaaacaatttggactttagataaanggaaaaacttccaatggtaaagttaatctttacctaggattgggg

SEQ ID NO: 163217 - DNA, 1368 bp, Homo Sapiens
ctttcatgaggatatttgaatagaatacaagatttattagagctttctccacctgagaatggccaccagtccttactgagcagcgatgatcaactttttatttatgagacagctggagtgctgattgttaatagtgaatatccggcagaaaggaaacaagccttaatgaggaatctgttgactccactaatggagaagtttaaaattctgttagaaaagttgatgctggcacaagatgaagaaaggcaagcctctctagcagactgtcttaaccatgctgttggatttgcaagtcgaaccagtaaagctttcagcaacaaacagactgtgaaacaatgtggctgttccgaagtttatctggactgtttacagacattcttgccagccctcagttgtcccttacaaaaggatattctcagaagtggagtccgtactttccttcatcgaatgattatttgcctggaggaagaagttcttccgttcattccatctgcttcagaacatatgctcaaagattgtgaagcaaaagatctccaggagttcattcctcttatcaaccagattacggccaaattcaagatacaggtatccccgtttttacaacagatgttcatgcccctgcttcatgcaatttttgaagtgctgctccggccagcagaagaaaatgaccagtctgctgctttagagaagcagatgttgcggaggagttactttgctttcctgcaaacagtcacaggcagtgggatgagcgaagttatagcaaatcaaggtgcagagaatgtagaaagagtgttggttactgttatccaaggagcagttgaatatccagatccaattgcacagaaaacatgttttatcatcctctcaaagttggtagaactctggggaggtaaagatggaccagtgggatttgctgattttgtttataagcacattgtccccgcatgtttcctagcacctttaaaacaaacctttgacctggcagatgcacaaacagtattggctttatctgagtgtgcagtgacactgaaaacaattcatctcaaacggggcccagaatgtgttcagtatcttcaacaagaatacctgccctccttgcaagtagctccagaaataattcaggagttttgtcaagcgcttcagcagcctgatgctaaagtttttaaaaattacttaaaggtgttcttccagagagcaaagccctgtggactggatttccctgtgcctacttcatgatcatgaattccagttaatttataaagaggcgatttttgtgtgccattcacactggtctttttcacattgttttgagcttattgcagtatatgttttgggatttttctgtaaaatgggtgtgcttcacagtgg

SEQ ID NO: 163218 - DNA, 1208 bp, Homo Sapiens
accacctcatctgcaattggggagccttctgagccacagtaggctcagagactccagtgcagacgtggtagaagatttatggacagaaaaaggaaagtgatgaacaaaaaatggaagtgaggtacagaaacagctggattggttatggctcagctggaacagttggccccctttgagtggccaaaactcagtgattggcacaagagtaggttacagtctatttctaccaccatttaggttatagttcattatgtacagataaatctttaggccaaacttaaaagatgtaaggaggcataaacttgcctaggctaaacttgatttaacacttctaaatggagaagttgggcctagcaggaagcagatccatgaggaagcatagaaagagtgaacactaggagaaggccatatccagaataatacaggttttgtgacttgagtagtgctcagttgagattgtgaagtgagcacagtccttttaatcttaacgcaaatcagcttcagggacttggaattaacagaagatgagtcttcccagtgaagtgagaaatactagaactgttctgactgagcatgaaggtgctgggattacaggcttgagccactgtgccaggccaaggactaaatccttctaagttgtctgtttagacttagttcctttgtatcatgtgctgctttagaccagggttcggcccatactacttctagcagatctaagaagatgaaaggaatctaggaaaaataaagggagaagacaagacaagaagtgatagcatattaccagttagttcctggtgtgcccctctggttggaggactctgctgagcatcttgctcacgttatgcaaagggaattgagccctttgggcaaagggtgttgcttctttggatttcaagaatctctagctaatagagcttaacctctgtttgcatttttgcttctgtgatttagggctaatttccaatgggttgtacaagataatagaaaaatgtatcatttatctcattcttgcagttagtggaggacctttattaggagaggaggctttcttttctgactaggctccaaatttacagctcctgacccacttcagggggttgtgagcaggaaaagctgatgttgctgtcttgacctctttgccgccaggatttggcttctgtgcaattcctagtggttgtcctctcattctctagggtaaatcggggatt

SEQ ID NO: 163219 - DNA, 873 bp, Homo Sapiens
cgtccgtcgaccgcttatagatgttgagaccccagggcatccacccccagccacagctctgagcctttcttgtccttgatgctgaagtagttcacaccatacatctccagatcttgagcaatcttcagatattccaggacagcatcctccctgagcatgccacggtgttcctcatgccacacctggatccgctcctcccactggtcctagttgagtttgtgctgttcccaggactctctgcgggagcaacattgtctccggccaggtagccagacttatgcacttccttattgaagtcgccatacttagactggacagcatacgaggccagcagcacagcggtctcaggcgggcagtaaatatcatcattgagaatgccctctttcacttgcagaaagaacaggcgctgagtgatgtcctgaatcaattcctcggacacatcctcagggtagaacttggcacggaacttaaagagcagggggctttccttccgcacatcctgggcagtcaccttcttattgagtttcagccaggtggagaaacctttagtgtcctggtactgcagaccaaagaaccagacttccctcaagccaatagttttcaccacctggtcaaatagctgcttcccggtggtgttgggctggatggcaaactccagctctgcatccatggtggtcacacgcacactgatcgttttgggcatggtggcggcaaaggcagcggagttggcgaagtttagctaggactgtcgggcagtgctgagcacgcagtacacacggcttggattcggctggccggggactcagattgggtccctcactagcgtcggggcgactgttaggcttcctgctaacgggccacgacttcacaaac

SEQ ID NO: 163220 - DNA, 266 bp, Homo Sapiens
ggtagctatttaacctgtatttaatctgtacttcctatgccgcaaacagaaaagtaaacagtgattaaaaaaaatgccaaagtgaaggtttctctttcttctatcacaacatagttgggtagttcccttaaagtacatcattgctataagttggtatcactgcaaatctcaagtcccaaataatctctttttctggatagaaagttattcaaagggagcacaaagagcagctttggggcatactgacaaacacttcactgtagagc

SEQ ID NO: 163221 - DNA, 983 bp, Homo Sapiens
ttcatgcaaaacaccttaccaagatctatgagacttcctttaataagtgttgcgctggttcaaggttgggcattgggtgaaggagcagaatttactacagcatgtgatttcaggttaatgactccagagagtaagatcagattcgtccacaaagagatgggcataataccaagctggggtggcaccacccggctagttgaaataatcggaagtagacaagctctcaaagtgttgagtggggcccttaaactggattcaaaaaatgctctaaacataggaatggttgaagaggtcttgcagtcttcagatgaaactaaatctctagaagaggcacaagaatggctaaagcaattcatccaagggccaccggaagtaattagagctttgaaaaaatctgtttgttcaggcagagagctatatttggaggaagcattacagaacgaaagagatcttttaggaacagtttggggtgggcctgcaaatttagaggctattgctaagaaaggaaaatttaataaataattggtttttcgtgtggatgtactccaagtaaagctccagtgactaatatgtataaatgttaaatgatattaaatatgaacatcagaattactttgaaggctactattaatatgcagacttacttttaatcatttgaatatctgaactcatttacctcatttcttgccaattactcaccttggggtatttactgcgtaatctggaacatttagctaaaatatacactttttgggcttaaaaattattgctgtcaattccaataataattcttagcttataaccaaagagcagtgtttaaaaggagagcttctatacaaaacctattccctggcggttacttttcatacaaatttttgttcctgtttttacctgggaaataattttaccaaaataaacttgagtggtggctggctaaagaaccaaagcggggggaggttttccggggtacacacccaccccat

SEQ ID NO: 163222 - DNA, 868 bp, Homo Sapiens
gtcttttgaagacagcctctctgtctggaaggacaaaatggctacatcaaacaggattgtcactttatagtacatcccatggattttatgaggaagaagtgaaaaaaacacttcagcagtttcctggtggatccattgaccttcagaaggaagacaatggcatggcattcttactctgaacaatccaagtagaatgaatgccttttcaggtgttatgatgctacaacttctggaaaaagtaattgaattggaaaatggacagaggggaaaggcctcattgtccgtggggcaaaaaatactttctcttcaggatctgatctgaatgctgtgaaatcactaggaactccagagacttcctttaataagtgttgcgctggttcaaggttgggcattgggtggaggagcagaatttactacagcatgtgatttcaggttaatgactccagagagtaagatcagattcgtccacaaagagatgggcataataccaagctggggtggcaccacccggctagttgaaataatcggaagtagacaagctctcaaagtgttgagtggggcccttaaactggattcaaaaaatgctctaaacataggaatgggttgaagaggtcttgcagtcttcaaatgaaactaaatctctagaagaggcacaagaatggctaaagcaattcatccaagggccaccggaagtaattagagctttgacaaaaatctgttggtcaggcagagagctatattggaggaagcattacagaacgaaagagatctttaggacagttggggtgggctgccaaattagaggctatggctaagaagggaaacttactacctaatgggtttcggtgaatgtcttccagtaagctcg

SEQ ID NO: 163223 - DNA, 662 bp, Homo Sapiens
  misc_feature (45)..(54): n is a, c, g, or t
  misc_feature (322)..(333): n is a, c, g, or t
ggtacctgagggtctgtaggttgcacactttggtaccagataacnnnnnnnnnnctttataagaaagcctgagtactccacactgcacaataactcctcccagggttttaactttgttttattttcaaaaccaggtccaatgagctttctgaacagctggtgtagctacagagaaaccagcttccttcagagagcagtgcttttggcggggaggaggaaatcccttcatacttgaacgttttctaattgcttatttattgtattctggggtatggcgtaagtacagagaagccatcacctcagatggcagcttttaaaagannnnnnnnnnnnctctcaacaccatgattcctttaacaacatgtttccagcattcccaggtaggccaaggtgtcctacagaaaaaccttgggttagacctacagggggtctggctggtgttaacagaagggagggcagagctggtgcggctggccatggagaaagctgacttggctggtgtggtacagagaagccagcttgtttacatgcttattccatgactgcttgccctaagcagaaagtgcctttcaggatctatttttggaggtttattacgtatgtctggttctcaattccaacagtttaatgaagatctaaataaaatgctaggttctaccttc

SEQ ID NO: 163224 - DNA, 347 bp, Homo Sapiens
tctggatgcaaagtgtcctctggatgcaaagtgtcctctggatgcaaagtgtctgaggttatgtctttggccagatctctcttcagttcctctctgtagaccctgttaatgtctctgatttctttgttagttcttgatgccaaaatctcaattagagtatcttcatcagttccaaggcccttcatggcagcacgaagttcatcagcatcaaattgcgctggagtttttagcagagccaaactacctcctcaaggtgacctgtaagggctttcttcagtgtttcatccaggggctttcctgtttcctggagatatgctgctttgatctgttgacactctgcatccaga

SEQ ID NO: 163225 - DNA, 324 bp, Homo Sapiens
cgagcctagaggatccccgtcggatgcaaagtgtcctctggatgcaagtgtctctggatgcaaagtgtcctctggatccaaagtgtcctctgatttcttagttagttcttgatgccaaaatctcaattagagtatcttcatcagttccaaggcccttcatggcagcacgaagttcatcagcatcaaattgcgctggagtttttagcagagctaaaacaacctcctcaaggtgacctgtaagggctttcttcagtgtttcatccaggggctttcctgtttcctggagatatgctgctttgatctgttgacactttgcatccagag

SEQ ID NO: 163226 - DNA, 816 bp, Homo Sapiens
tgtcttgtgacgtcattttattttcagctacatagacatctttctcatgtattgttactagaacaacttgtatagggttttatggtttggggaaaacatttttaaaaaatggacttatctctattatacagagttataatataaaaatgatttaaaggctatatttttcagcatgtaggtagctacactgtaatcctgttgaagaaactttcctatttaagcttataggatgaaaatatataattaaagtcttctgatcatagcttgagaccatcaagggaatgtttagtttcctccacaaagagccaccaggattttctcataatctcctttggtttcatccaggatggcttggcaaagggagataccatacatcttctgatagaatgctttgatatcattcatgtcaatttcagaacgggaaaccataatcctgatcaatgccttatggcgagttccaacacctttcatggcttgatgaagcttctctgcaaagaaagctggtttgcttgtggcgcacttcacgatagctgtgaggcatttctcaatgtcacctttcaactccaggtccagaactttgttcatgtcatgcttactgtacttggtgtatttctgaaacactctgcgaagttgtggatagcttctggtggtaaggatggtattgaacacgtttacgtctgtcccctttctcctttctcctgcttcatacaaggccctggcatctgaatcagccaagtcttcattcacaccaaagtcctcagatcggtcacccttagcaagagaaagcaaagcgttccgaaaatctccagatgtgtc

SEQ ID NO: 163227 - DNA, 1454 bp, Homo Sapiens
  misc_feature (1199)..(1199): n is a, c, g, or t
  misc_feature (1220)..(1220): n is a, c, g, or t
  misc_feature (1390)..(1390): n is a, c, g, or t
gggaaaatcagaagcccaagtctccactgccagtgtgaaatcttcagagaagaatttctctttagttctttgcaagaaggtagagataaagacactttttcaaaaatggcaatggtatcagaattcctcaagcaggcctggtttattgaaaatgaagagcaggaatatgttcaaactgtgaagtcatccaaaggtggtcccggatcagcggtgagcccctatcctaccttcaatccatcctcggatgtcgctgccttgcataaggccataatggttaaaggtgtggatgaagcaaccatcattgacattctaactaagcgaaacaatgcacagcgtcaacagatcaaagcagcatatctccaggaaacaggaaagcccctggatgaaacactgaagaaagcccttacaggtcaccttgaggaggttgttttagctctgctaaaaactccagcgcaatttgatgctgatgaacttcgtgctgccatgaagggccttggaactgatgaagatactctaattgagattttggcatcaagaactaacaaagaaatcagagacattaacagggtctacagagaggaactgaagagagatctggccaaagacataacctcagacacatctggagattttcggaacgctttgctttctcttgctaagggtgaccgatctgaggactttggtgtgaatgaagacttggctgattcagatgccagggccttgtatgaagcaggagaaaggagaaaggggacagacgtaaacgtgttcaataccatccttaccaccagaagctatccacaacttcgcagagtgtttcagaaatacaccaagtacagtaagcatgacatgaacaaagttctggacctggagttgaaaggtgacattgagaaatgcctcacagctatcgtgaagtgcgccacaagcaaaccagctttctttgcagagaagcttcatcaagccatgaaaggtgttggaactcgccataaggcattgatcaggattatggtttcccgttctgaaattgacatgaatgatatcaaagcattctatcagaagatgtacggtatctccctttgccaagccatcctgggatgaaaccaaaggagatttatgagaaaatcctggtggctctttgtgggaggaaactaaacattcccttgatgggctcaagctatgatcagaagactttaattatatanttttcatcctataagctatanataggaaagtttctttcaacaggattacagggtagctacctacatgctgaaaaatatagcctttaaatcatttttatattataactctgtataatagagataagtccatttttttaaaaatgttttcccccaaacccataaaacccctattacagtttgttctagtaacnattacattgagaaaagatgtcctatggtaacctgaaaaataaaaatggacgtccccaaggaccc

SEQ ID NO: 163228 - DNA, 798 bp, Homo Sapiens
gacacatctgggagattttcggaacgctttgctttctcttgctaagggtgaccgatctgaggactttggtgtgaatgaagacttggctgattcagatgccagggccttgtatgaagcaggagaaaggagaaaggggacagacgtaaacgtgttcaataccatccttaccaccagaagctatccacaacttcgcagagtgtttcagaaatacaccaagtacagtaagcatgacatgaacaaagttctggacctggagttgaaaggtgacattgagaaatgcctcacagctatcgtgaagtgcgccacaagcaaaccagctttctttgcagagaagcttcatcaagccatgaaaggtgttggaactcgccataaggcattgatcaggattatggtttcccgttctgaaattgacatgaatgatatcaaagcattctatcagaagatgtatggtatctccctttgccaagccatcctggatgaaaccaaaggagattatgagaaaatcctggtggctctttgtggaggaaactaaacattcccttgatggtctcaagctatgatcagaagactttaattatatattttcatcctataagcttaaataggaaagtttcttcaacaggattacagtggtagctacctacatggctgaaaaatatagccctttaaatcattttttatattataaactctggtataatagaggattaagtcccatttttttaaaaaatggtttttccccccaacccattaaaaccccctatacaaaggttggttcctagtaaacaattaccttgg

SEQ ID NO: 163229 - DNA, 566 bp, Homo Sapiens
ttgctgggcgctctagaggatttccgtacaaggcccgcagtcacagagcaggaggtggctcaggtggccagtgccatcctctcactcaggcgaactctccagtgtcctgcatgctggatctgcccctggaggaggagacgttgtcccttccgagagacctggagagtcttgacagaagcttcaatggtctccttactatgtatcagaggaagagggagcagtttgaaaaaataagcagtgctgatccttcaggagccttccggatgctgagcacagcctacgagcagtcagcccaggctgctcagcaggtctccgacagctcgcgccttttggaccagctcagggacagccggagagaggcagagaggctggtgcggcaggcgggaggaggaggaggcaaccggcagccccaaactagtggccctgaggctggagatgtcttcgtagcctgacctgaaagccaacttcaacaagctctgtggcaactccaggcagatggcttgaaccccaatatcatgccctggtgagctatgtccccaagaaaatggcacagcctgtggctccga

SEQ ID NO: 163230 - DNA, 797 bp, Homo Sapiens
gggtgaagcaaggaagatatacatgaaaattttaaaaatacatatccgctgacttcatggaatggacatcctgtataagcactgaaaaacaacaacacaataacactaaaattttaggcactcttaaatgatctgcctctaaaagcgttggatgtagcattatgcaattaggtttttccttatttgcttcattgtactacctgtgtatatagtttttaccttttatgtagcacataaactttggggaagggagggcagggtggggctgaggaactgacgtggagcggggtatgaagagcttgctttgatttacagcaagtagataaatatttgacttgcatgaagagaagcaattttggggaagggtttgaattgttttctttaaagatgtaatgtccctttcagagacagctgatacttcatttaaaaaaatcacaaaaatttgaacactggctaaagataattgctatttatttttacaagaagtttattctcatttgggagatctggtgatctcccaagctatctaaagtttgttagatagctgcatgtggcttttttaaaaaagcaacagaaacctatcctcactgccctccccagtctctcttaaaagttggatttacccggttaattacctcaccaaaatgggtgatccctccaaggaagtttggggggcaaaaaatcccaagggggcctggggagttttttgaatggtaaagaaatggacccatcgggctttttattaaaatttggtggacccaaaaatttgcccaaattttccttttcaccttcggggg

SEQ ID NO: 163231 - DNA, 1049 bp, Homo Sapiens
gacaccatcacctcatctacctcatctgctggtggcatttgcggaaaagaagcccttgcaaatttctaaacaacagtaaactctgttaggaaattctaaaatgtcttcaggccaaaaagggtataaggttagtaaaatgcctcaacagagtttgaataaaatattgaatttgagagttactggaattggatatgtaaaaacagggtggtaggttgggtcatgcttacaatggtctcaagttcaaataagctactgtgacaatacaccacttcacaggtcacacgcatttccaggggcttttcctttccctcagtaggtgctggcagagggtgtgctcagtcgctttccaatatagatgcctagccccaaagccaaaacatgagaaaggaagagagatggaatgaacaccttcagaaattctgcggagaaaataccccctttcttcatggctccacttttcctcatgcttaaagacacagaacgtttagggtgtctgaagtggaactccttgggtggaatgttttcgggtctactggaccagtctgatacccagtccgcacttttcttcaaagcctcgacttccttctctccttctacaacttcttcttctgactgagagctatggtccctgctggtgtgcatttccacatcaaacatgatctgcccatcttcttgtggcgaagggctgtcacagtgagaactgcctctggaactactctgtcctgattcatgttgtgcatccaaaagaatcttctccatgtctccattgtggatggaggatgaggatggtacgtgtaccagccccccatttttcccattgccattatcattgccattgctgctgttcatgggtagctccacccaggaactgttgaggccggccggcgggggcagagactgctcattttcctcgcagttgttgttgttgttgtgcaggggcggcggcggctcgactaggtgggacgacatcgtcggacagctggcaggactgcggcagcagcaggaccgtctccggcactcaggcagcaacacaacaagccgagtccccc

SEQ ID NO: 163232 - DNA, 1074 bp, Homo Sapiens
gaagctgtggcccgcgcatctctgattccagaattctctgatggtttctggactgggtcccagctggcgtgctggacgaattcggaaacaccttggtcttacttccctaaaatctccatctacctgagagatgagaactccagcaggtcattccgtatcacaatcctgcctcagaaattgcaggtgctgcagtgtctgaaatttccgggcctttctcaacagaggatgtagccagcaactgtgtccccgctcagtctttgagcgagcccattttgtggattgtgtcctatgcgctcatgagcgtctgtggagccatcctccttgtcttaatcgtcctgctgctgctgccgttccggtgtcagcgtcgcccccgtgaccctgaggtcgtcaatgatgagtcctctctggtcagacatcgctggaaatgaatagccaggcctgacctcaagcaaccatgaactcagctattaagaaaatcacatttccagggcagcagccgggatcgatggtggcgcttactcctgtgcccacccgtcttcaatctctgttctgctcccagatgccttctagattcactgtcttttgattcttgattttcaagctttcaaatcctccctacttccaagaaaaataattttaagccaagacttcattctaaaccaaaacagagtggattgggctgcaggctctatggggtttgttatgccaaagtgtctacatgtgccaccaacataaaacaaaaccaagccttggctcgttctcttctctcttcaatctctggaaaaataagtacatatagttgataacccctcttagcttacaggaagctttttgtattaattgcctttgaggttattttccgccagacctcaacctgggtcaaagtggtacaggaaggcttgcagtatgatggcaggagaatcagcctggggcctggggatgtaaccaagctgtacccttgagacctggaaccagagccacaggccccttttgtgggtttctctgtgctctgaatgggagccagaattcactaggaggtcatcaaccgatgtcctcactagcctcttgtagaag

SEQ ID NO: 163233 - DNA, 714 bp, Homo Sapiens
atcctctgttgagaaaggccggaaatgtcagacactgcagcacctgcaatttctgcacaggggctccctgcgaagcccaccctcttctgggctctgtcgaagatgacgtagaagccctccatcaccgtggcaccgatcaccagcgcatttgtggatggggaaatgccgaatcggtaacattcataattcaggccggcccccatcatgggctgaatgtaaagctgaggcaggattgtgatacggaatgacctgctggagttctcatctctcaggtagatggagattttagggaagtaagaccaaggtgtttccgaattcgtccagcacgccagctgggacccagtccagaaaccatcagagaattctggaatcagagatgcgcgggccacagcttccaccaccgcatcaaacaccttctggggcaggcgcagcagcgtggtgccactgtccacgatggccttgtctgcgttatactctctgcagtccacgattaagggctttggcctccaatttccactttcagaatttctatctggtagtaccactcttccttaataggggtataccagatgtctcctttatacaacttggttcaattccacccaagacaagactacctccgttggtcccagatccagcaacgggcaagccggtccacacatctgcatggagaaacgttgggatgtttgcgacgcgtggtcgacccacgcgtcc

SEQ ID NO: 163234 - DNA, 919 bp, Homo Sapiens
cagggttcgcttcgagtctgcccctcttctggctcttttcgagagtgacgtagatgccctcccatcaccttggcaccgatcaccagcgcattttgtgcatggggatatgcccgtatccggtcacaattcatagttcaggccggcccccatcatgggctgaatgtaaagctgaggcacggattgtgatacggaatgacctgcttggagttctcattctctcaggtagatggagattttagggaagtaagaccaaggtgtttccgaattcgtccagcacgccagctgtgacccagtccagaaaccatcagagaattctggaatcagagatgcgcgggccacagcttccaccaccgcatcaaacaccttctggggcaggcgcagcagcgtggtgccactgtccacgatggccttgtctgcgttatactctctgcagtccagattaaggctttggcctccaatttccaatttcagaatttctatctggtagtaccactcttccttaataggggtataccagatgtctccctttaataccaaacttggttccaatcccacccaagacaagactacctccgttggtcccagatccagcaacgggcaagccggctccacacatctgcatggagaaaacgttggggatgtttgcttgtgtcaccagggagtcgaagaaggtctccagagaacttgatggcttggcaagtgtggcataagctaggccaagtattccattccatttaatcccaggcaaaagaaattctctgattcaaaatagtggcactgttgacaagaaaagaagtattgaagcctttggggatggtgacgaggtcttcccccacgaagcccgtccagcttccttgtgtgtacttcactgtgaccggacgcgtgggtcgacgatatcccgggattccggccgtaccag

SEQ ID NO: 163235 - DNA, 934 bp, Homo Sapiens
gtactttgacacagagaggtctagcacataccgctccaagggctttgacgtcacagtgaagtacacacaaggaagctggacgggcttcgttggggaagacctcgtcaccatccccaaaggcttcaatacttcttttcttgtcaacattgccactatttttgaatcagagaatttctttttgcctgggattaaatggaatggaatacttggcctagcttatgccacacttgccaagccatcaagttctctggagaccttcttcgactccctggtgacacaagcaaacatccccaacgttttctccatgcagatgtgtggagccggcttgcccgttgctggatctgggaccaacggaggtcttgggtggaattgaaccaagtttgtataaaggagacatctggtatacccctattaaggaagagtggtactaccagatagaaattctgaaattggaaattggaggccaaagccttaatctggactgcagagagtataacgcagcacaaggccatcgtggacagtggcaccacgctgctgcgcctgccccagaaggtgtttgatgcggtaggtggaagctgtggcccgcgcatctctgattccagaattctctgatggtttctggactgggtcccagctggcgtgctggacgaattcggaaacaccttggtcttacttccctaaaatctccatctacctgagagcatgagaactccagcaggtcattccgtatcacaattcctgcctcagcttctacattcaggcccatgatggggggcccggcctgacttatgaactgttaccgatatcgagcattttccccattccacaagatgcgctggtgatcggtcggccccggtgatggagggcatctacgtcaccttccgacagagcccagaacaagggtgcggtttcacacagagccctgtggcgcaaa

SEQ ID NO: 163236 - DNA, 1001 bp, Homo Sapiens
cacagcttcatctgcggcatatgcagagcaagaggggctgataggatgtcttcatttggtgattttgttgcattgtccgatgttggtagatgtaccaactgcaaaaattatttccagagaagtatctgatggtataattgccccaggatatgaagaagaagccttgacaatactttccaaaaagaaaaatggaaactattgtgtccttcagatggaccaatcttacaaaccagatgaaaatgaagttcgaactctctttggtcttcatttaagccagaagagaaataatggtgtcgtcgacaagtcattatttagcaatgttgttaccaaaaataaagatttgccagagtctgccctccgagacctcatcgtagccaccattgctgtcaagtacactcagtctaactctgtgtgctacgccaagaacgggcaggttatcggcattggagcaggacagcagtctcgtatacactgcactcgccttgcaggagataaggcaaactattggtggcttagacaccatccacaagtgctttcgatgaagtttaaaacaggagtgaagagagcagaaatctccaatgccatcgatcaatatgtgactggaaccattggcgaggatgaagatttgataaagtggaaggcactgtttgaggaagtccctgagttactcactgaggcagagaagaaggaatgggttgagaaactgactgaagtttctatcagctctgatgccttcttccctttccgagataacgtagacagagctaaaaggagtggtgtggcgtacattgcggctccctccggttctgctgctgacaaagttgtgattgaggcctgcgacgaactgggaatcatcctcgctcatacgaaccttcggctcttccaccactgattttaccacacactgttttttggcttgcttatgtgtaggtgaacagtcacgcctgaaactttgaggataactttttaaaaaaataaaacagtatctcttaatcactgga

SEQ ID NO: 163237 - DNA, 1580 bp, Homo Sapiens
ggggccacatcccggcagccctcctacctgcgcacgtggtgccgccgctgctgcctcccgctcgccctgaacccagtgcctgcagccatggctcccggccagctcgccttatttagtgtctctgacaaaaccggccttgtggaatttgcaagaaacctgaccgctcttggtttgaatctggtcgcttccggagggactgcaaaagctctcagggatgctggtctggcagtcagagatgtctctgagttgacgggatttcctgaaatgttggggggacgtgtgaaaactttgcatcctgcagtccatgctggaatcctagctcgtaatattccagaagataatgctgacatggccagacttgatttcaatcttataagagttgttgcctgcaatctctatccctttgtaaagacagtggcttctccaggtgtaactgttgaggaggctgtggagcaaattgacattggtggagtaaccttactgagagctgcagccaaaaaccacgctcgagtgacagtggtgtgtgaaccagaggactatgtggtggtgtccacggagatgcagagctccgagagtaaggacacctccttggagactagacgccagttagccttgaaggcattcactcatacggcacaatatgatgaagcaatttcagattatttcaggaaacagtacagcaaaggcgtatctcagatgcccttgagatatggaatgaacccacatcagacccctgcccagctgtacacactgcagcccaagcttcccatcacagttctaaatggagcccctggatttataaacttgtgcgatgctttgaacgcctggcagctggtgaaggaactcaaggaggctttaggtattccagccgctgcctctttcaaacatgtcagcccagcaggtgctgctgttggaattccactcagtgaagatgaggccaaagtctgcatggtttatgatctctataaaaccctcacacccatctcagcggcatatgcaagagcaagaggggctgataggatgtcttcatttggtgattttgttgcattgtccgatgtttgtgatgtaccaactgcaaaaattatttccagagaagtatctgatggtataattgccccaggatatgaagaagaagccttgacaatactttccaaaaagaaaaatggaaactattgtgtccttcagatggaccaatcttacaaaccagatgaaaatgaagttcgaactctctttggtcttcatttaagccagaagagaaataatggtgtcgtcgacaagtcattatttagcaatgttgttaccaaaaataaagatttgccagagtctgccctccgagacctcatcgtagccaccattgctgtcaagtacactcagtctaactctgtgtgctacgccaagaacgggcaggttatcggcattggagcaggacagcagtctcgtatacactgcactcgccttgcaggagataaggcaaactattggtggcttagacaccatcccacaaggtgctttctcgatgaagtttaaaaacagggagtggaagaggagcagaaaatctcccaatgcccatcgaatcaata

SEQ ID NO: 163238 - DNA, 403 bp, Homo Sapiens
agcacgtctgagaatcggtggaacataaagcagatttaaatatctcggttgactgcagcttcaatcatgggatctgtgactggaaacaggatagagaagatgattttgactggaatcctgctgatcgagataatgagctatatcatatctgggagccccagtaggttaattccaggacctccacagctgatataaggttatgttaagtcttaagttgagtctgtctgtccaagggaagttcccttatttacaaacactcaattcacaaataaccccagggttcttcaacttctgccatcaattcaaatcatacccctgctcctcctgcacctccattggatttctagctattggcttctatatagcagtcccggcgctggcagtcacaagaatagacattgtc

SEQ ID NO: 163239 - DNA, 1018 bp, Homo Sapiens
ggagggggtgggggatctgggcaaggtgggtgattcctcccaggaggtgcttgaggccccgatggactcctgaccataatcctagccccgagacaccatcctgagccagggaacagccccagggttggggggtgccggcatctcccctagctcaccaggcctggcctctgggcagtgtggcctcttggctatttctgtgtccagttttggaggctgagttctggttcatgcagacaaagcactgtccttcagtcttctagaaacagagacaagaaaggcagacacaccgcggccaggcacccatgtgggcgcccaccctgggctccacacagcagtgtcccctgccccagaggtcgcagctaccctcagcctccaatgcattggcctctgtaccgcccggcagccccttctggccggtgctgggttcccactcccggcctaggcacctccccgctctccctgtcacgctcatgtcctgtcctggtcctgatgcccgttgtctaggagacagagccaagcactgctcacgtctctgccgcctgcgtttggaggcccctgggctctcacccagtccccacccgcctgcagagagggaactagggcaccccttgtttctgttgttcccgtgaatttttttcgctatgggaggcagccgaggcctggccaatgcggcccactttcctgagctgtcgctgcctccatggcagcagccaggggaccccagaacaagaagaccccgcaggatccctcctgagctcgggggggctctgcccttctcaagccccgggctttcccttctccccagacagaaggtggagccaaggggttccagcgtcactccagtgcttcaactgtgggctgggaggagcttggcctgtggccacagccccttgaatgttccccaggccgggaagcccaaccaaaaccgggacaccgggtttccactgaaccaagggggcttgcttccaggccgccaagattcttcagacaagtggccccagtggaagccctgcccgcc

SEQ ID NO: 163240 - DNA, 1040 bp, Homo Sapiens
ggcctgggtggcgaattcggcacgaggcctgcctggtgcattgctgtgtgaatccaggaggcagtggacatcgtaggcagccacggccccgggtccaggagaagtgctccctggaggcacgcaccactgcttcccactggggccggcggggcccacgcacgacgtcagcctcttaccttcccgcctcggctaggggtcctcgggatgccgttctgttccaacctcctgctctgggacgtggacatgcctcaaggatacagggagccggcggcctctcgacggcacgcacttgcctgttggctgctgcggctgtgggcgagcatgggggctgcagcgtctgttgtggaaagtagctgctagtgaaatggctggggccgctggggtccgtcttcacactgcgcaggtctcttctgggcgtctgagctggggtgggagctcctccgcagaaggttggtggggggtccagtctgtgatccttggtgctgtgtgccccactccagcctggggaccccacttcagaaggtaggggccgtgtcccgcggtgctgactgaggcctgcttccccctccccctcctgctgtgctggaattccacagggaccagggccaccgcaggggactgtctcagaagacttgatttttccgtccctttttctccacactccactgacaaacgtccccagcggtttccacttgtgggcttcaggtgttttcaagcacaacccaccacaacaagcaagtgcattttcagtcgttgtgcttttttgttttgtgctaacgtcctactattttaaagatgctggccgcaccatgtttatttatttccagggggccgggtcaaccctggctgctctgcgcgggcccaggtgccctgccctggccccctggcacgtggaccccacccaccgccgggcccaccagctggagaaagacccggctacctttgcgggtgaaacttcgatgatcctcaacaaaggtgaggttctcagagaggcgacacccctggccgttaacccacagcgggactcgctattaacgcca

SEQ ID NO: 163241 - DNA, 1158 bp, Homo Sapiens
aggatgaagggggattcacggccgcgacgagcactcggcgaatacctgcaccgggccagtggggcaggagtgaatgtgaaggttgtaaggcaaggaccacccggggttcgactggttaggcccatgggtgccaagtggcggtgttccccggggaccgggggttattggggcaagaaaggggcagtccggggagggggcccctaacccggaggccgggaaaggtaaagagggctgaccttcgtgcgtgggcccccgccgccccccagtggaaagcagtggtgcgtgcctccagggagcacttctcctggacccggggccgtggctgcctacgatgtccactgcctcctggattcacacagcaatgcaccaggcaggtggggcaccagctgctgtcccttattgccagccaagaagaacaggcccagagggaagaagttcttgcccaacaccagtcagtccaactggcctggtggtggtcctcggcctcccagccccgtgggcggtccctgggacgagtggaattggtccccaggaaggatgcaggtcctatgagcagacgctgtgaagtctgtccatgtgcagcgggaagcaacggggcagggggtgaataaaggtcttcattcctcaagcaagagagacggacatctggtcctgagtccccaaactgttcatcaggtttctccgggcccactggatggtgagggggtcccggtgcccaggcgggggcggcaggctccactgggcacttgctgagagcttgcggcttgagcagccgctggtcagtgaagccgtgtccggcttcgttggctcccggcttgggacactcagggctgtgccacaggccagctcctccagccacagctgagcactggagtgacgctggaccacttggctccacctctggctggggagaagggaagcccggggcctgagaaggcagagccccccgagctcaggagggatcctgcggggtcttcttgttctgggggtccctggctgctgccatggaggcagcgacagctcaggaaagtgggccgcattggccaggcctcggctgcctcccatagcgaaaaaaattcacgggaacaacagaaacaaggggtgccctagttccctctctgcaggcgggtggggactgggtgagagccccaggggcct

SEQ ID NO: 163242 - DNA, 867 bp, Homo Sapiens
  misc_feature (718)..(745): n is a, c, g, or t
ggggctgccagcgtctgttgtggaaagtagctgctagtgaaatggctggggccgctggggtccgtcttcacactgcgcaggtctcttctgggcgtctgagctggggtgggagctcctccgcagaaggttggtggggggtccagtctgtgatccttggtgctgtgtgccccactccagcctggggaccccacttcagaaggtaggggccgtgtcccgcggtgctgactgaggcctgcttccccctccccctcctgctgtgctggaattccacagggaccagggccaccgcaggggactgtctcagaagacttgatttttccgtccctttttctccacactccactgacaaacgtccccagcggtttccacttgtgggcttcaggtgttttcaagcataacccaccacaacaagcaagtgcattttcagtcgttgtgcttttttgttttgtgctaacgtcttactaatttaaagatgctgtcggcaccatgtttatttatttccagtggtcatgctcagccttgctgctctgcgtggcgcaggtgccatgcctgctccctgtctgtgtcccagccacgcagggccatccactgtgacgtcggccgaccaggctggacaccctctgccgagtaatgacgtgtgtggctgggaccttctttattctgtgttaatggctaacctgttacactggggctgggtttgggatagggtgttctggcnnnnnnnnnnnnnnnnnnnnnnnnnnnnaaaggaaaccactcaatcctccttgaacaaccccgcaaacaacacctccacgcaaaaaatgaaagcgcttttctccagcaatccgaaactgtccaattttccctaaaaaaggtgctaccttt

SEQ ID NO: 163243 - DNA, 759 bp, Homo Sapiens
ggggctgccagcgtctgttgtggaaagtagctgctagtgaaatggctggggccgctggggtccgtcttcacactgcgcaggtctcttctgggcgtctgagctggggtgggagctcctccgcagaaggttggtggggggtccagtctgtgatccttggtgctgtgtgccccactccagcctggggaccccacttcagaaggtaggggccgtgtcccgcggtgctgactgaggcctgcttccccctccccctcctgctgtgctggaattccacagggaccagggccaccgcaggggactgtctcagaagacttgatttttccgtccctttttctccacactccactgacaaacgtccccagcggtttccacttgtgggcttcaggtgttttcaagcacaacccaccacaacaagcaagtgcattttcagtcgttgtgcttttttgttttgtgctaacgtcttactaatttaaagatgctgtcggcaccatgtttatttatttccagtggtcatgctcagccttgctgctctgcgtggcgcaggtgccatgcctgctccctgtctgtgtcccagccacgcagggccatccactgtgacgtcggccgaccaggctggacaccctctgccgagtaatgacgtgtgtggctgggaccttctttattctgtgttaatggctaacctgttacactgggctgggttgggtagggtgttctggcttttttgtggggtttttatttttaaagaaaaactcaattcatctt

SEQ ID NO: 163244 - DNA, 642 bp, Homo Sapiens
cacgtctgagaatcgcaggaaggagtatctgcagaaaacccagttgagaaccatatcaatataacacaatcagataagttcacagccaaagccattggattccaactcaggagaaagaaatgacctcaatcttgatcgctcttgtggggttccagaagaatctgcttcatctgaaaaagccaaggaaccagaaacttcagatcagactagcactgagagtgctaccaatgaaaataacaccaatcctgagcctcagttccaaacagaagccactgggccttcagctcatgaagaaacatccaccagggactctgctcttcaggacacagatgacagtgatgatgacccagtcctgatcccaggtgcaaggtatcgagcaggacctggtgatagacgctctgctgttgcccgtattcaggagttcttcagacggagaaaagaaaggaaagaaatggaagaattggatactttgaacattagaaggccgctagtaaaaatggtttataaaggccaccgcaacttcaggacaatgataaaagaagccaatttctggggtgctaactttgtaatgagtggttctgactgtggccacattttcatctgggatcggcacactgctgagcatttgatgcttctggaagc

SEQ ID NO: 163245 - DNA, 718 bp, Homo Sapiens
tatgtaccaaaccaaagccgtcatcattgcaatgatcatcactgcggtggtatccatttcagtcaccatcttctgctttcagaccaaggtggacttcacctcgtgcacaggcctcttctgtgtcctgggaattgtgctcctggtgactgggattgtcactagcattgtgctctacttccaatacgtttactggctccacatgctctatgctgctctgggggccatttgtttcaccctgttcctggcatactgacacacagctggtcctggggaaccggaagcacaccatcagcccggaggactacatcactggcgccctgcagatttacacagacatcatctacatcttcacctttgtgctgcagctgatgggggatcgcaattaaggagcaagcccccattttcacccgatcctgggctctcccttccaagctagagcctgggccctatgactgtggtctgggttttaggcccctttccttccccttgagtaacatgcccagtttcctttctgtcctggagacaggtggcctctctggctatggatgtgtgggtacttggtggggacggaggagctagggactaactgttgctcttggtgggcttggcagggactaggctgaagatgtgtcttctccccgccacctactgtatgacaccacattcttcctaacagctggggttgtgaggaatatgaaaagagcctattcgattctca

SEQ ID NO: 163246 - DNA, 806 bp, Homo Sapiens
ggggggaatttccaagccctttttcttgtccccgggtttttccttaggaaaacaaactttgggccacgtttcccttatcctaccggggcccgccccgcccaaaagaaatggttttgaaaaatttttgaagggccgagggcggcccccaaagggtttttgttgctttcgttgtgtggctttgcggtggccggttgtgtttgtgttggcggttgctccttcttgtggtctttctttcgtgtttgtcttttcaatgacaagaagtttatttcagctttacttaaaattttagtttcaaatgaaatgaaatgtgacactgaagcataagaacacaactgaagactgcaaacaacctaattcattttccgagtttgctcaagcctccaggcaccagtcaaatatcgaagtcgtataaaaagtaggtctttacccatttgtagccagctccagaatggaactaatttagaaccttcaatttctgtccagttgacagcaatttctgctattggaattttaaagaactgtgctatgtacagtagttctacatcaaatgcccatcgttcaacgtgtagagatgaaaacgtccgtgaagctgcttctcgagtaaataatttgaacccacactgtgtgtccctgattcctttgacacaaaggaaccacaccagaaagtggaacccatacatgagaagagtacggaagtaagaacgctgagcaattgattctttttctaaatgagctcgagatccacatgctatagccatttgattcattctaatcgctccaccttttccacgattctcagacgtgct

SEQ ID NO: 163247 - DNA, 703 bp, Homo Sapiens
agagcacgtctgagaatcgagaaagctctgtatgactacaaagccaagcgaagcgatgagctgagcttctgccgtggtgccctcatccgcaatgtctccaaggtagcccgggggctggttggaaaggagactatggaaccaggatcaagcagtacttcccatccaaatacgtcgagaacatctcaactgcagacttcgaggagctagaaaagcagattattgaagacaatcccttagggtctctttgcagaggaatagtggacctcaacacctataacgtcgtgaaagcccctcagggaaaaaaaccagaagtcctttgtcttcatcctggaccccaagcagcagggcgatcctccggtggagtttgccacagacagggtggaggagctactttgagtggtttcagagcatccgagagatcacctggaaagattgacaccaaggagaacagcatgaagtactgggagcaaaaaccatgaccatcgccatcgagctctctgacctggttgtctactgcaaacctaccagctaaatccaaggtacaacttagaaaatcctgacttccgagaaatccgctcctttgtggagacgaaggctgacagcatcatcagacagaagcccgtcgacctcctgaagtacaatcaaaagggcctgacccgcgtctacccaaagggacaaagagttgactcttcatactacgacc

SEQ ID NO: 163248 - DNA, 1183 bp, Homo Sapiens
  misc_feature (724)..(724): n is a, c, g, or t
  misc_feature (1029)..(1037): n is a, c, g, or t
aggatccccacgcacgtctgagaatcgatgcagactgcaggtgaggccatgggattccccaggccagtgtctgtgctgatccttcaagggtctgcaggtatgcaggtggcctgggctgctcggcagaatactttgctgattcccagctgaggggagcatggtggcgattgctcagccatttgctgacagacacacagacctgccttttctcccccaagtataccgtaccctcctgtgagacagtgtgtgcaggcaacaccaccttaatcctgctgttgcctgacatgctgattctcatttattatgctgcatcaacacattagaggtacaggagcggctcagtcatgaaaaaagaaggtcttctgccccatttctttatttcagagatgtgggctttcagtgggaatttgctgactcctactttataggctgagtcaatgagggaagatgactggcgtttcctctgtctaaatgggaggttgccagagcgctggctgggactaggatgtgtaactaagatttcagtttgaaatcttagatttcagttcacggcgataaagaagtaggtgctgcacacaaatatgtaaagcaattgtaggaaatttgaaaggaaaaaaagaaaccgaagccagtattttaataattgctttttctgtgtattttgtattgggctgggggatagcatcaaaggttgaactttttgagcttgtctatgaaaaacccncaggaccttctttctttggccatttctatggaaatgcgatgtcagatggatggtaatggtgccctccagtggctgtgagacctcattgcgcattgtctactggagctttagtcttctgagacggaggaaaactgctgaatactctggattcatctatgtctacaatgttgcatttatgaaaaactacactgtgctaggcgcattctaggacatgaatatgaccacaccctctttcaccgggtgtttctgtagcaagttttcatattcttttcaaacaatggtttctctgcgttaattattgaggnnnnnnnnngatggggtaagaaaactacccatgcatgatgtagagagctgttgatttgtttctgtttttttaaaggaaaactatttgtaagatgttgcactaaaacattttatatacacttcagagacctgtagtaaattatgttgaaaataaaa

SEQ ID NO: 163249 - DNA, 1516 bp, Homo Sapiens
  misc_feature (437)..(437): n is a, c, g, or t
  misc_feature (1198)..(1198): n is a, c, g, or t
  misc_feature (1281)..(1281): n is a, c, g, or t
  misc_feature (1308)..(1308): n is a, c, g, or t
  misc_feature (1361)..(1361): n is a, c, g, or t
  misc_feature (1363)..(1363): n is a, c, g, or t
gaaactgcccagagctcacacatgctttaatcgccttgacttacctccatatgaaacctttgaagatttacgagagaaacttctcatggccgtggaaaatgctcaaggatttgaaggggtggattaagcaccctgtgcctcgggggtggttgttcttcaagcaagttctgcttgcacttttgcatttgcctaacagacttttgcagaggcgatggcagagagcagctgcaggcatggtccctggagccgagccttcaccacgcactcgtccaagttcggatgcgggaacctggtcccagcttgagttcctgcctttcccaccacaaattatcaactggttgatgtgtacactaattacatttcaggaggacttaatgctatttatgttgtgcctctgcaggcaaagcccttaataaatattttacatcctttcttgnacgaaaggaaggggaacatgattatacttgaagtgatgtgcgaatcgagccctggacctacccccatcacttccccacgccaatagttaccactactcaggtaacacccagtctcacaccctcttggacgccgcgtgcaatagcgaacccacctgaacgcctgcttataccaactcaaggaagaatagactgggtatcgttccttcgcgccgcgcccacaccccacacaaaaaaagcgtccctcacaccactctgatcttttgcggaccgcgcgccctccccacacacgaaacaccaacacccgccgttctagctgttggtaccccgaaggaacaccccgccggaagacatgacagggggcgtgtggttgcctcccaccaaagaaacaagacgtcgcggcgcgcgcggctccccctgttcttcgcctctagaaaccaaacccaattaagagcgcttctgcgcggcactcccttcccttagtcccccaccccatcaagcgagacatcaccacgaccgctgacttacaacactaaagaaccacaccccgccccccgcgcccgctagcccacacacaaataaaagtgatagggaagggacgcatcattacataggaatacaactccccttccggccgcagcgggtggggaggcgtatatatcacaacgaaggcgcgttcctttacgctgaaccctcatcgcttacctagtctagagcgctggtcatcacacgcactctctcatctccgctcccatacacgatantaaataaaatacaaaagcgccagcgcaccacactctcagaacacacagacgtgcaggacacacacagataaagagtcgcgctnctcactgtcggggccgcgccgcggttnattcatccctccatcctagacggggcggcgtgtcacactactcatccgcacananagatcgtgcctcctacgcgtctctccgtcgtacatctacacacgctttctcccgtcgactgtgagtgcaaactcagtcttttagtgacgagagagaaatgagctgaccgccttgcgtttattccactctgcgccatcattaaactccacagag

SEQ ID NO: 163250 - DNA, 312 bp, Homo Sapiens
ccgtcttcctcctcctcgggctctcgtcctccgacgacgagttcgaagacgacctgctcgacctgaaccccagctcaaactttgagaagcatgtccctgggcagcttcagttcgtcgtcggcgctcgaccgggacctggattttaacttcgagcccggctccggctcgcacttcgagttcccggactactgcacgcccgaggtgagcaagatgatctcgggagactggctcgagtccagcatctccaacctggttttcacctactgaagggcgcgcaggcagggagaagggccggagagggtaggagaggag

SEQ ID NO: 163251 - DNA, 836 bp, Homo Sapiens
tgagaatgtagtgtggcagcatcagctggtccgcaacctcgtacatgctcaaaggtggctggttcagctcagcaacagggggatcagtccatagggactagacagtcatcagaatgttctgaatcaccatcttattctcctcagcctcagccatttccacagaactcttcccagtcagctgctattactcagccttcatctcagccaggatcccaacctaagcttggcccacctcagcagggagcccaacctccccatcaggtccagatgccactgtataactttccccagtcaccaccagctcagtattctcccatgcacaatatgggattgttgccaatgcaccctctccagatccctgccccgtcctggcccatccatggcccagtgatccactctgcaccaggcagtgcccccagcaatattggcctaaatgatcccagcatcatctttgcacagcctgctgccagacctgtggcaatccctaacacgtctcacggtggacactggccccgtactgtggctccaaattccctggtaaacagtggtgcagtggggaattcagagccaggctttcgaggactgactcctccaattccttgggaacatgcaccgcgtccccatttcccccttgtcccagcttcgtggccttatggtttgcatcaaaacttcatgcatcagggaaatgcccgattccagcccaacaaacctttctatactcaagacagatgtgccacccgtcggtgtagagagcgttgtccccacccaccaagaggaaacgtgtcggagtaatgcgagtccattttctttcagctggtctaccgatgcacagcaac

SEQ ID NO: 163252 - DNA, 657 bp, Homo Sapiens
gtaagcctgaggggctggagttcgtgctcatccaccagcgctgggtgttcgtgtgctcttcctcctgccgctctcgcttatcttcgatatctactactacgtgcgcgcctgggtggtgttcaagctcagcagcgctccgcgcctgcacgagcagcgcgtgcgggacatccagaagcaggtgcgggaatggaaggagcagggtagcaagaccttcatgtgcacggggcgccctggctggctcactgtctcactacgtgtcgggaagtacaagaagacacacaaaaacatcatgatcaacctgatggacattctggaagtggacaccaagaaacagattgtccgtgtggagcccttggtgaccatgggccaggtgactgccctgctgacctccattggctggactctccccgtgttgcctgagcttgatgacctcacagtggggggcttgatcatgggcacaggcatcgagtcatcatcccacaagtacggcctgttccaacacatctgcactgcttacgagctggtcctggctgatggcagctttgtgcgatgcactccgtccgaaaactcagacctgttctatgccgtaccctggtcctgtgtgacgctgggtttcctggtggccgctgagatccgcatcatccctgaccaagcttg

SEQ ID NO: 163253 - DNA, 442 bp, Homo Sapiens
tgcattgtatcagaaaaaaagggtctccagtggcttgtaaatctgggaaaaactcttcagccatcattggcgtcttctttattaatctgaaaattttccttttcagctccctcttcttggtattacagaatttcatacttatccactaggaaagtggtctctgtggaaaacctgacggggctgtttccatctacctgggtcactttggtaacctgtatgttacagtaatttttcttggagacaaaggaaacttgaacagggaagaagtcattgggctgcccagcaatgctaaactccaggctgccactcttatttttggcatcaatcacaggcaggcaccactccagggtatttcgtcgactgccatgtcgatactccccatcgatctcaccgataacaggcgcgccgacaccagacctgttgtggaagacactgacccact

SEQ ID NO: 163254 - DNA, 617 bp, Homo Sapiens
ccgtgatcgcgggcgagctgttccagagtagtccccgcagtcacgcataaaattggagcaaaggaaaggaagtagataacttgtggacaaattaaaatctgaaggtgaaaccatcatgtactctagtatggagcaagcgtacttctgaagcaaccaaaatgcatgctccaccacattaatatggaaagtgtacatatgaagattgaagaaaagataacattaacctgtggacgagacggaggattacagaatatggagttgcatggcatgatcatgcttaggatctcagatgacaagtatggccgaatttcgtcttcatgtggaaaatgaagataagaaaggggtgcagctacagacccatccaaatgtggataaaaaaacttttcactgcagagtctctaatggggctgaagaatccagagaagtcatttccagtcaacagtgacgtaggggtgctaaagtggagactacaaaccacagaggaatcttttattccactgacaattaatggctgggcctcggagagtggaaatggctgtgatgtcaccatagaatatgagctacaagaagatcatttagacatgactgatgtggtttcaacattccaatcccgtctg

SEQ ID NO: 163255 - DNA, 446 bp, Homo Sapiens
  misc_feature (84)..(108): n is a, c, g, or t
ggtacaactaattgatcacaaccagtttgtagatttctttgttccttctccattcccactgcttcacttgcctagtcttgaagnnnnnnnnnnnnnnnnnnnnnnnnnccttgttcctttataggttcctggtagaatcagtagagatgatttcagctcattgacatttttttaagctatatccccttgtcattcacattgagaaagctgacaactgggatagggaggggattagataatagatggggtcaaattctgtgtgaatgtgaacttgcctagtaagcactttgtctctgttcactactgcgatagaggaaatctatctccctatcttgggtccttgaactacagcctgctgtcttacaccagtggagctaccctttaaatgtacaaattatttgtatgctaatgtaatatggtgaaattaaaataaatcacactgttaa

SEQ ID NO: 163256 - DNA, 176 bp, Homo Sapiens
aatcatggggagaaagatgaaacctgtgttccccttttttttggtagtgcccacatctggtgccccatttttaataaccacaggatatttctttagattgatattctcacaaagaagaaatagaatataggctgggcgtgctgtgtcacacctgtaatcccagcacttacggaggc

SEQ ID NO: 163257 - DNA, 331 bp, Homo Sapiens
cctctctccaagtccctgtgaagctacaaacaagcggtgtttggaaaattctaataatagcatcaaagcggaacgttctgaagcatgttttgtgccccatgtagcagaaggagccatgggccctcctagtttcatcacctagggagaacaggtaaaatacaggtagagaagtaagatcagcctactgcaagctttgaaagctccagcccaacagctcccataaacctctacttaggcaagaatcaaaagatatgaaaggtttaagaatgaagacctgggtagagtacagagtgaggaacaagacagaaaggccaagtgttgatttccccga

SEQ ID NO: 163258 - DNA, 508 bp, Homo Sapiens
aatcgggtcactggctctgtctgattcatagcacctcagatccagagcctacaagcacgactgggcttccaaataggaattcctaataaatagaaatttggcccagtttatcttagcagctcaggtcaaaagtcaaatgttggctttcctaggggtgtgttcctctttggtgaagtgttggctttgatccttctgctgagcctggattttgggacagagatatatatatctcctagtagagatctttcatctctttggttaagtgtatttctaggtattttattttttgtagttactgtaaaatgggttgaggtcttgatttgattctcagcttggtcgttttttgtgtatagcagtgctactgatttgtgtaaactgatttggtaaattgagactttactgaattcatttatcattggcagagagagtttgacatcgtcttttccaacttgggttccctttatttctttcatttgcctgattgccctggctaggacttccagtacta

SEQ ID NO: 163259 - DNA, 343 bp, Homo Sapiens
tctgagaatcgacagatcacagcatctggtcaatgagatgagagacacctcacccttcatgattgcccagctggccacctgctcccattgaccagctcttccttaccctccctaattcccattttctcacacacagatgcatttcttccctgctaaaaacccctaattttaggtggttgaggtcatggggtgactctgagtaacagtcagaggaacctccaaatgggtttccgaggtggctgctctttacatccccatgagcagtacagggggcgcggtttccccacagccttgccgtcgcttacctcccattttcagtgattctatttgagaaacatacatt

SEQ ID NO: 163260 - DNA, 1472 bp, Homo Sapiens
  misc_feature (1124)..(1270): n is a, c, g, or t
  misc_feature (1288)..(1304): n is a, c, g, or t
  misc_feature (1319)..(1391): n is a, c, g, or t
cacagagagtggctgtgcaatcagaaggggctgcttgctctcggtgactacatgaatgtccagtgccatgcctgcattggaggcaccaatgttggcgaggacatcaggaagctggattacggacagcatgttgtcgcgggcactccagggcgtgtttttgatatgattcgtcgcagaagcctaaggacacgtgctatcaaaatgttggttttggatgaagctgatgaaatgttgaataaaggtttcaaagagcagatttacgatgtatacaggtacctgcctccagccacacaggtggttctcatcagtgccacgctgccacacgagattctggagatgaccaacaagttcatgaccgacccaatccgcatcttggtgaaacgtgatgaattgactctggaaggcatcaagcaatttttcgtggcagtggagagggaagagtggaaatttgacactctgtgtgacctctacgacacactgaccatcactcaggcggtcatcttctgcaacaccaaaagaaaggtggactggctgacggagaaaatgagggaagccaacttcactgtatcctcaatgcatggagacatgccccagaaagagcgggagtccatcatgaaggagttccggtcgggcgccagccgagtgcttatttctacagatgtctgggccagggggttggatgtccctcaggtgtccctcatcattaactatgatctccctaataacagagaattgtacatacacagaattgggagatcaggtcgatacggccggaagggtgtggccattaactttgtaaagaatgacgacatccgcatcctcagagatatcgagcagtactattccactcagattgatgagatgccgatgaacgttgctgatcttatctgaagcagcagatcagtgggatgagggagactgttcacctgctgtgtactcctgtttggaagtatttagatccagattctacttaatggggtttatatggactttcttctcataaatggcctgccgtctcccttcctttgaagaggatatggggattctgctctcttttcttatttacatgtaaataatacattgttctaagtctttttcattaaaaatttaaaacttttcccatnnnnnnnnnnnnnnnnnnnnnnnnnnnnnnnnnnnnnnnnnnnnnnnnnnnnnnnnnnnnnnnnnnnnnnnnnnnnnnnnnnnnnnnnnnnnnnnnnnnnnnnnnnnnnnnnnnnnnnnnnnnnnnnnnnnnnnnnnnnnnnnnnnngaaaagaaggcaggagcnnnnnnnnnnnnnnnnnggggccgttgccggnnnnnnnnnnnnnnnnnnnnnnnnnnnnnnnnnnnnnnnnnnnnnnnnnnnnnnnnnnnnnnnnnnnnnnnnnagaaacgggggggaatctttttacacacaaagaaagagcgcgggcccaaaagagaaaatggcgggtgggaaattacgccgc

SEQ ID NO: 163261 - DNA, 1009 bp, Homo Sapiens
  misc_feature (97)..(160): n is a, c, g, or t
cctgggtggcgaattcggcacgagggcacagcgaggtcggcagcggcacagcgaggtcggcagcggcacagcgaggtcggcagcggcacagcgaggnnnnnnnnnnnnnnnnnnnnnnnnnnnnnnnnnnnnnnnnnnnnnnnnnnnnnnnnnnnnnnnnggcgcgcgctgtgctcttccgcggactctgaatcatggcgaccacggccacgatggcgacctcgggctcggcgcgaaagcggctgctcaaagaggaagacatgactaaagtggaattcgagaccagcgaggaggtggatgtgacccccacgttcgacaccatgggcctgcgggaggacctgctgcggggcatctacgcttacggttttgaaaaaccatcagcaatccagcaacgagcaatcaagcagatcatcaaagggagagatgtcatcgcacagtctcagtccggcacaggaaaaacagccaccttcagtatctcagtcctccagtgtttggatattcaggttcgtgaaactcaagctttgatcttggctcccacaagagagttggctgtgcagatccagaaggggctgcttgctctcggtgactacatgaatgtccagtgccatgcctgcattggaggcaccaatgttggcgaggacatcaggaagctggattacggacagcatgttgtctgcgggcactccagggcgtgtttttgatatgattcgtcgcagaagcctaaggccacgtgctatcaaaatgttggttttggatgaagctgatgaaatgttgaataaaggtttcaaaaagcagatttacgatgtatacaggtacctgccctccagccacacaggtgggttctcctcagtgccacgctggccccacgaagaatctgggagatgacccacaagtttcatggaccgaacccaatccccgattcttgggggaaaacggggatggaatttgactcccgggaaagggattcaaggaaaatttttttcccggggggaaacggggaaaaaagcgg

SEQ ID NO: 163262 - DNA, 1635 bp, Homo Sapiens
  misc_feature (1554)..(1567): n is a, c, g, or t
  misc_feature (1588)..(1588): n is a, c, g, or t
gggagcgcgcggggcgagccagcgagagggcgcgagcggcggcgctgcctgcagcctgcagcctgcagcctccggccggccggcgagccagtgcgcgtgcgcggcggcggcctccgcagcgaccggggagcggactgaccggcgggagggctagcgagccagcggtgtgaggcgcgaggcgaggccgagccgcgagcgacatgggggaccgggagcagctgctgcagcgggcgcggctggccgagcaggcggagcgctacgacgacatggcctccgctatgaaggcggtgacagagctgaatgaacctctctccaatgaagatcgaaatctcctctctgtggcctacaagaatgtggttggtgccaggcgatcttcctggagggtcattagcagcattgagcagaaaaccatggctgatggaaacgaaaagaaattggagaaagttaaagcttaccgggagaagattgagaaggagctggagacagtttgcaatgatgtcctgtctctgcttgacaagttcctgatcaagaactgcaatgatttccagtatgagagcaaggtgttttacctgaaaatgaagggtgattactaccgctacttagcagaggtcgcttctggggagaagaaaaacagtgtggtcgaagcttctgaagctgcctacaaggaagcctttgaaatcagcaaagagcagatgcaacccacgcatcccatccggctgggcctggccctcaacttctccgtgttctactatgagatccagaatgcacctgagcaagcctgcctcttagccaaacaagccttcgatgatgccatagctgagctggacacactaaacgaggattcctataaggactccacgctgatcatgcagttgctgcgagacaacctcaccctctggacgagcgaccagcaggatgaagaagcaggagaaggcaactgaagatccttcaggtcccctggcccttccttcacccaccacccccatcatcaccgattcttccttgccacaatcactaaatatctagtgctaaacctatctgtattggcagcacagctactcagatctgcactcctgtctcttgggaagcagtttcagataaatcatgggcattgctggactgatggttgctttgagcccacaggagctccctttttgaattgtgtggagaagtgtgttctgatgaggcattttactatgcctgttgatctatgggaaatctaggcgaaagtaatggggaagattagaaagaattagccaaccaggctacagttgatatttaaaagatccatttaaaacaagctgatagtgtttcgttaagcagtacatcttgtgcatgcaaaaatgaattcacccctcccacctctttcttcaattaatggaaaactgttaagggaagctgatacagagagacaacttgctcctttccatcagctttataataaactgtttaacgtgaggtttcagtagctccttggttttgcctctttaaattatgacgtgcacaaaccttcttttcaatgcaatgcatctgaaagttttgatacttgtaacnnnnnnnnnnnnnngggttgcaattgtttaaggantcatgggatttattttttgtaactctttgggctattgtccttgtgta

SEQ ID NO: 163263 - DNA, 1108 bp, Homo Sapiens
  misc_feature (176)..(176): n is a, c, g, or t
agtttctccattttaaaaagggcccgaggtgttataaacccttggggcgtttattttgggaatagttaaattttgcggactctccccctaataaggggaggacctcgggcaagaatctttaccccctttgtgtaacaaggaaaaggcggggtgtccagggaaaccagtctatgggncccaaggggcccattttcatttaccctcttttctcccgcaccccgaacataggagcctttagaaaaaaaatgtagtgtgttccatttaaaatttgggcatatggcattttctaacttagggagccacaatgttcttggcccatcatgacattgggtagcattaactgtaagttttgtgcttccaaatcactttttggtttttaagaatttcttgatactcttatagcctgccttcaattttgatcctttattctttctatttgtcaggtgcacaagattaccttcctgttttagccttctgtcttgtcaccaaccattcttacttggtggccatgtacttggaaaaaggccgcatgatctttctggctccactcagtgtctaaggcaccctgcttcctttgcttgcatcccacagactatttccctcatcctatttactgcagcaaatctctccttagttgatgagactgtgtttatctccctttaaaaccctacctatcctgaatggtctgtcattgtctgcctttaaaatccttcctctttcttcctcctctattctctaaataatgatggggctaagttatacccaaagctcactttacaaaatatttcctcagtactttgcagaaaacaccaaacaaaaatgccattttaaaaaaggtgtattttttcttttagaatgtaagctcctcaagagcagggacaatgttttctgtatgttctattgtgcctagtacactgtaaatgctcaataaatattgatgatgggaggcagtgagtcttgatgataagggtgagaaactgaaatcccaaacactgttttgttgcttgttttattatgacctcagattaaattgggaaatattggcccttttgaataattgtcccaaatattacattcaaataaaagtgcaatagaacaactacaaccg

SEQ ID NO: 163264 - DNA, 1031 bp, Homo Sapiens
  misc_feature (50)..(94): n is a, c, g, or t
ggaagcagtggtatcaacgcagagtggcattacggccggggtatttaacnnnnnnnnnnnnnnnnnnnnnnnnnnnnnnnnnnnnnnnnnnnnngatacttgcctaacatgcatgtgctgtaaaaatagttaacagggaaataacttgagatgatggctagctttgtttaatgtcttatgaaattttcatgaacaatccaagcataattgttaagaacacgtgtattaaattcatgtaagtggaataaaagttttatgaatggacttttcaactactttctctacagcttttcatgtaaattagtcttggttctgaaacttctctaaaggaaattgtacattttttgaaatttattccttattccctcttggcagctaatgggctcttaccaagtttaaacacaaaatttatcataacaaaaatactactaatataactactgtatccatgtcccatgatcccctctcttcctccccaccctgaaaaaaatgagttcctattttttctgggagagggggggattgattagaaaaaaatgtagtgtgttccatttaaaattttggcatatggcattttctaacttaggaagccacaatgttcttggcccatcatgacattgggtagcattaactgtaagttttgtgcttccaaatcacttttttggtttttaagaatttcttgatactcttatagcctgccttcaattttgatcctttattctttctatttgtcaggtgcacaagattaccttcctgttttagccttctgtcttgtcaccaaccattcttacttggtggccatgtacttggaaaaaggccgcatgatctttctggctccactcagtgtctaaggcaccctgactacctttgcttgaatcccacagactatttccctcatcctatttactgcagcaaatctctccttagttgatgacactgtgtatatctccctttaaaaccctacctatcctgaatggtctgtcattgtctgcctttaaaatccttcctctttcttcctcctcgttaagctt

SEQ ID NO: 163265 - DNA, 1031 bp, Homo Sapiens
  misc_feature (737)..(737): n is a, c, g, or t
attcggcacgagggcgcagtcaccgagcgcagatcccgcgctctcgattggaacgcctccccatcactcagccacactcaggggctggacgcctcactcccgtttacgagccataaaaggtctaggaccgcttcccccgagccagcagaacatccagtcatggataaaaatgagctggttcagaaggccaaactggccgagcaggctgagcgatatgatgacatggcagcccgcatgaagtctgtaactgagcaaggagctgaattatccaatgaggagaggaatcttctctcagttgcttataaaaatgttgtaggagcccgtaggtcatcttggagggtcgtctcaagtattgaacaaaagacggaaggtgctgagaaaaaacagcagatggctcgagaatacagagagaaaattgagacggagctaagagatatctgcaatgatgtactgtctcttttggaaaagttcttgatccccaatgcttcacaagcagagagcaaagtcttctatttgaaaatgaaaggagattactaccgttacttggctgaggttgccgctggtgatgacaagaaagggattgtcgatcagtcacaacaagcataccaagaagctttttgaaatcagcaaaaaggaaatgcaaccaacacatcctatcagactgggtctggcccttaacttctctgtgttctattatgagattctgaactccccagagaaagcctgctctcttgcanagacagctttttgatgaagccattgcttgaacttgatacattaagtggaagagtcatacaaagaacagcacgcctaataaatgccaatttactggagaagacaactttgacatttgtgggacattccggataccccaaaggagaaccgaagcctggaaagccaggaagaaagggagggggaaaaaattaaccccgggccctttccaaacttttttggtccggccctccaattcctaaaaaatttttaccccagttaagaacccctttgtggtccaatccccatggcccgggggc

SEQ ID NO: 163266 - DNA, 941 bp, Homo Sapiens
tccgccgccaccacccactccggacacagaacatccagtcatggataaaaatgagctggttcagaaggccaaactggccgagcaggctgagcgatatgatgacatggcagcctgcatgaagtctgtaactgagcaaggagctgaattatccaatgaggagaggaatcttctctcagttgcttataaaaatgttgtaggagcccgtaggtcatcttggagggtcgtctcaagtattgaacaaaagacggaaggtgctgagaaaaaacagcagatggctcgagaatacagagagaaaattgagacggagctaagagatatctgcaatgatgtactgtctcttttggaaaagttcttgatccccaatgcttcacaagcagagagcaaagtcttctatttgaaaatgaaaggagattactaccgttacttggctgaggttgccgctggtgatgacaagaaagggattgtcgatcagtcacaacaagcataccaagaagcttttgaaatcagcaaaaaggaaatgcaaccaacacatcctatcagactgggtctggcccttaacttctctgtgttctattatgagattctgaactccccagagaaagcctgctctcttgcaaagacagcttttgatgaagccattgctgaacttgatacattaagtgaagagtcatacaaagacagcacgctaataatgcaattactgagagacaacttgacattgtggacatcggatacccaaggagacgaagctgaagcaggagaaggaggggaaaattaaccggccttccaacttttgtctgcctcattctaaaattacacagtagaccatttgtccatcatgctgtcccacaaatagttttttgtttacgatttatgaacaggttatggtaccttcaattcgaatttctatattttcccaggggggtttttatggttaaaaa

SEQ ID NO: 163267 - DNA, 1238 bp, Homo Sapiens
ggacggaaggtgctgagaaaaaacagcagatggctcgagaatacagagagaaaattgagacggagctaagagatatctgcaatgatgtactgtctctttggaaaagttcttgatccccaatgcttcacaagcagagagcaaagtcttctatttgaaaatgaaaggagattactaccgttacttggctgaggttgccgctggtgatgacaagaaagggattgtcgatcagtcacaacaagcataccaagaagcttttgaaatcagcaaaaaggaaatgcaaccaacacatcctatcagactgggtctggcccttaacttctctgtgttctattatgagattctgaactccccagagaaagcctgctctcttgcaaagacagcttttgatgaagccattgctgaacttgatacattaagtgaagagtcatacaaagacagcacgctaataatgcaattactgagagacaacttgacattgtggacatcggatacccaaggagacgaagctgaagcaggagaaggaggggaaaattaaccggccttccaacttttgtctgcctcattctaaaatttacacagtagaccatttgtcatccatgctgtcccacaaatagttttttgtttacgatttatgacaggtttatgttacttctatttgaatttctatatttcccatgtggtttttatgtttaatattaggggagtagagccagttaacatttagggagttatctgttttcatcttgaggtggccaatatggggatgtggaatttttatacaagttataagtgtttggcatagtacttttggtacattgtggcttcaaaagggccagtgtaaaactgcttccatgtctaagcaaagaaaactgcctacatactggtttgtcctggcggggaataaaaagggatcattggttccagtcacaggtgtagtaattgtgggtactttaaggtttggagcacttacaagggctgtggtagaatcataccccatggataccacattatttaaaaccatgtataatctgtgggaatactcaatggtggtacacctttgactacagctgcagaagtgttccttttagaccaaagttgtgacccaattttactcctggataaggggagaaaacggttccatttcccttattcgtaaagttacctggtgtagctttcataattttggtaccactcaatttatttggtattcaattgttttaggcggccttaggaactat

SEQ ID NO: 163268 - DNA, 800 bp, Homo Sapiens
gggtaggattgttacccccagcccttgtaaggggttcccaacctttaaagtaccccccaattttttcccccgtggactgggacccaaggatcccttttatttccccgcccggaccaacccagtatgtagcccgttttctttgtttagacatggaagcagttttacactgcccctttgaagcccacaatgtcccaaaagtactatgccaaacacttataacttgtataaaaattccacatccccatattggccacctcaagatgaaaacagataactccctaaatgttaactggctctactcccctaatattaaacataaaaaccacatgggaaatatagaaattcaaatagaagtaacataaacctgtcataaatcgtaaacaaaaaactatttgtgggacagcatggatgacaaatggtctactgtgtaaattttagaatgaggcagacaaaagttggaaggccggttaattttcccctccttctcctgcttcagcttcgtctccttgggtatccgatgtccacaatgtcaagttgtctctcagtaattgcattattagcgtgctgtctttgtatgactcttcacttaatgtatcaagttcagcaatggcttcatcaaaagctgtctttgcaagagagcaggctttctctggggagttcagaatctcataatagaacacagagaagttaagggccagacccagtctgataggatgtgtcggttgcatttcctttttgctgatttcaaaagcttcttggtatgcttgttgtgactgatcgacaatccctttcttgtcacc

SEQ ID NO: 163269 - DNA, 1061 bp, Homo Sapiens
  misc_feature (641)..(641): n is a, c, g, or t
  misc_feature (665)..(665): n is a, c, g, or t
  misc_feature (1030)..(1030): n is a, c, g, or t
ccaacataccacgagagccggaacctcataggttgcaacccctgcgcaagtgcactcgggaggcccgccaccccccggcccactccgtgcgggacaggacggtcacccacacccttccccaaaaggggccctcagcccgccccccgccacgggaccaatcaacctagtcacacccccttcccaggatcagaccaaaaggccaagccagaggggccatagcagcccacttctggccaccccctcagaggcaatcaacacggcagcatcccccctccagagaagccctggaatcccggcccatgtcactaccaacttatgtttgaatcctttattagaaaccatgcaaactttaatacaaaaaatacaagtgcaataagaatctttgtgtcaatacagttcccgggatttctcctcactgcagccatcccaaggcctagctgggatgccctctgtgggccttgcctctcctccctcccctctccagtcagggcataagggaagcagatagccttagtctcatgccttttatttttaaatttccagacctgatttcctactatctgcatgaggctcccttggacatgagggcttacatgtcctagggtgtgggtgccggcctgaaggaattccatctcctggcncctttcttgttctccagcccggcntttttatcctagggctgaccaccagatcccagggaatgggacagagatgccaaaaccagcctcttggttagaaaagaaaagcagcatacacacaacaaatggcaaaaccaaccagtccacgctccaagggccccttgtgtgcctgaccggctcaccagccacagcctctgcacccctcttccctgccgcaccgcctccagggccctaagctgcccacatcctccagcgggggtggcataaggatatctccgccctgttccctctaacacttactgaggactttcatgtagacatggcttcaacctgccggacgcgtgggtcgacgatatcccgaacaattccggaccggtaccagcctgcttctntatcaaaaatacccaaaggcgtttttccata

SEQ ID NO: 163270 - DNA, 957 bp, Homo Sapiens
gtggtacggccggaattcccgggatatcgtcgacccacgcgtcgcccacgcgtccgcataattggttaagaacacgtgtattaaattcatgtaagtggaataaaagttttatgaatggacttttcaactactttctctacagcttttcatgtaaattagtcttggttctgaaacttctctaaaggaaattgtacattttttgaaatttattccttattccctcttggcagctaatcgggctctataccaagtttaaacacaaaatatatcataacaaaaatactactaatataactactgtttccatgtcccatgatcccctctcttcctccccaccctgaaaaaaatgagttcctattttttctgggagagggggggattgattagaaaaaaatgtagtgtgttccatttaaaattttggcatatggcattttctaacttaggaagccacaatgttcttggcccatcatgacattgggtagcattaactgtaagttttgtgcttccaaatcactttttggtttttaagaatttcttgatactcttatagcctgccttcaattttgatcctttattctttctatttgtcaggtgcacaagattaccttcctgttttagccttctgtcttgtcaccaaccattcttacttggtggccatgtacttggaaaaagcgcatggatctttctggctcactcagtgtttaggcacctgcttcctttgcttgcatgccacagaatatttccctcatctaattactggaggaaatctctcctagtggagagatgcgtttatctcctttaaagacctacaatcctgagggcggcaacagtcgcctaaaaactccctgtttcccctattctaaaaaagggcgtatcaagacgctttaaatctgttgtggaaacccaaaggtaaaggttgcttggtacccaggacattttttattaacccttggggac

SEQ ID NO: 163271 - DNA, 853 bp, Homo Sapiens
gcaatttatggagaacacaaccctaataaccgcggtttaaaaagcaggctggtacaggtcggaatcccgggatatcgtcgaccacgcgtccggatttatgacaggtttatgttacttctatttgaatttctatatttcccatgtggtttttatgtttaatattaggggagtagagccagttaacatttagggagttatctgttttcatcttgaggtggccaatatggggatgtggaatttttatacaagttataagtgtttggcatagtacttttggtacattgtggcttcaaaagggccagtgtaaaactgcttccatgtctaagcaaagaaaactgcctacatactggtttgtcctggcggggaataaaagggatcattggttccagtcacaggtgtagtaattgtgggtactttaaggtttggagcacttacaaggctgtggtagaatcataccccatggataccacatattaaaccatgtatatctgtggaatactcaatgtgtacacctttgactacagctgcagaagtgttcctttagacaaagttgtgacccattttactctggataagggcagaaacggttcacattccattatttgtaaagttacctgctgttagctttcattatttttgctacactcattttatttgtatttaaactgttttaggcaacctaagaacaaatgtaaaagtaaagatgcaggaaacaatgaactgcttggtattcattacttcatgtatatcaagcacagcagttaaaacaaaaacccatgtatttaacttctttttcaggatctggccttggtgatttcatttattgtggaatacttggcttaaatggcattgg

SEQ ID NO: 163272 - DNA, 1053 bp, Homo Sapiens
  misc_feature (120)..(120): n is a, c, g, or t
  misc_feature (137)..(137): n is a, c, g, or t
gggcccgggatttcccggggggggtcgggttccggttttgggggcccatggatttaaccttgggccaattggccatttctggatccaaattcccattccatggtgatttcaggcaggttnccaggcagggattcctnctgaaccttccccttgtcgggccccctgtctgaagcatcggaattttcttggtggcggatgggcatcaaatctccgtctatgaaagatgatggcagggtgcattctcccttggccaggccggaacacatcccggaccatgcgggggccctcacccagatacttctgtacaaactccgagcccacgacccggatgaatgcagctgttgtgtgatgtgccaccgcctttgccaacatggtcttcccacagccaggtgggccatacatgaggacgcctcgggggggatcgatgccgatctgcttgtagagctcgaaatgcgtgagcgggagctccacggcctcccgcacctcctgcttctggatgtccatgcctccgatgtccgcgtacatcacatctggcttctggtctgaggtgagcatcatgatgctgctgtcggcttcggggggcagcacgtccaccagtgcattgctgtgcttgtggagggccactgaggcgttgggcttgagcagctcccgatcgatggtgctcaggatgcgcacataatagttggagcctgtggtagagcccacgatggctgtattctgatccacagcctccagaaattgtccgatgaccagcgggatgctttggattcgcttcacctcctcctgggcatggagaaattcctttttcaggttcttttgctcatctttgatgtattcctcctgcacctccaggaactccagctcttgctgcagcttcttgtagcggctgtacaggtcctccaggtcctcaggctcagggcccaggaaggacaggccggtctggggccgggacacggacagtgctgggatctcatcctgagccttctccaccaagatgcctatctcctccatagtgaccaagccggcctctgtgtggcctgggatgatctcccc

SEQ ID NO: 163273 - DNA, 1439 bp, Homo Sapiens
ggctggtaccggtccggaattcctcgggatatcgtcgacccacgcgtcgggaggagataggcatcttggtggagaaggctcaggatgagatcccagcactgtccgtgtccggccccagaccggcctgtccttcctgggccctgagcctgaggacctggaggacctgtacagccgctacaagaagctgcagcaagagctggagttcctggaggtgcaggaggaatacatcaaagatgagcaaaagaacctgaaaaaggaatttctccatgcccaggaggaggtgaagcgaatccaaagcatcccgctggtcatcggacaatttctggaggctgtggatcagaatacagccatcgtgggctctaccacaggctccaactattatgtgcgcatcctgagcaccatcgatcgggagctgctcaagcccaacgcctcagtggccctccacaagcacagcaatgcactggtggacgtgctgccccccgaagccgacagcagcatcatgatgctcacctcagaccagaagccagatgtgatgtacgcggacatcggaggcatggacatccagaagcaggaggtgcgggaggccgtggagctcccgctcacgcatttcgagctctacaagcagatcggcatcgatcccccccgaggcgtcctcatgtatggcccacctggctgtgggaagaccatgttggcaaaggcggtggcacatcacacaacagctgcattcatccgggtcgtgggctcggagtttgtacagaagtatctgggtgagggcccccgcatggtccgggatgtgttccgcctggccaaggagaatgcacctgccatcatcttcatagacgagattgatgccatcgccaccaagagattcgatgctcagacaggggccgacagggaggttcagaggatcctgctggagctgctgaatcagatggatggatttgatcagaatgtcaatgtcaaggtaatcatggccacaaacagagcagacaccctggatccggccctgctacggccaggacggctggaccgtaaaattgaatttccacttcctgaccgccgccagaagagattgattttctccactatcactagcaagatgaacctctctgaggaggttgacttggaagactatgtggcccggccagataagatttcaggagctgatattaactccatctgtcaggagagtggaatgttggctgtccgtgaaaaccgctacattgtcctggccaaggacttcgagaaagcatacaagactgtcatcaagaaggacgagcaggagcatgagttttacaagtgacccttcccttccctccaccacaccactcaggggctggggcttctctcgcacccccagcacctctgtcccaaaacctcattcccttttttctttacccaggattggtttcttcaataaatagataagatcgaatccg

SEQ ID NO: 163274 - DNA, 672 bp, Homo Sapiens
aggtggcctcctccgtgaaagctgtgccggcaagcatggcatccgggtcatcatgatcactggggacaacaagggcactgcggtggccatccgtcgccgcatcagcatcttcgggcaggaagaggacgtgacgtcaaaagctttcacaggccgggagtgtgatgaactcaacccctccgcccagcggaggacgcctgcctgaacgcccgctgttttgctcgagttgaaccctcccacaagtctaaaatcgtagaatttcttcagtcttttgatgagattacagcttatgactggcgatggcgtgaacgatgctcctgctctgaagaaagccgagattggcattgctatgggctctggcactgcggtggctaaaaccgcctctgagatggtccctggcggatgacaacttctccaccattgtggctgccgttgaggaggggcgggcaatctacaacaacatgaaacagttcatccgctacctcatctcgtccaacgtcggggaagttgtctgtattttcctgacagcagcccttggatctcccgaggctttgattcctgttcagctgctctgggtcaatctggtgacatgatggcctgccatgccactgcactggggttcaaccctcctgatctggacatcatgaataaacctccccgaacccaatagaacct

SEQ ID NO: 163275 - DNA, 641 bp, Homo Sapiens
cacaccatacacacaactatcaaaaactccctttttttaaaattttggtacaaagattccaaaaagcttaataaaatgtaataagcacttagcacttaggacactgtagaactttctttggaagtttaattgcaatgaactttaaaacttgaaacttcaattcacttttctaaatgtgaatgcatacatttcatttgagctttatgctttccctagctacctaaagtaattgccatcttaaaaaacacaactgacctcatctccactgtcttttccaaacagcttccaagactatcttctgatgtctgactttccaaaaagcaggcattaatgttaactttcaaaaaatcatctagaagagaaacttggtcagttgtaatgggagttctgtccccaactcttgtcacctcgtaaaaagaacatccaggtaattcatggcattttccattattcattgggcagacacagcttagatttctctgccttccacaggagaatgttcagatttccactaacttcaactggaactcaataatcagaatggctttaaaatttagttaaaatttaagcatgccatgaatttggaattttaatataccagtttgtgccacctccactctgacttcatctacgcgcggtac

SEQ ID NO: 163276 - DNA, 831 bp, Homo Sapiens
caccatttcctgggcttgttgactttatatgggtctcctgtcatcctaagaggttagtacagcaccagtgttctgcggcccgtcttggaatcataaccattttaactccagcccgttcctgaagctgtataatagtttctcccccttttccaatgactaatcctgccttgctagctggaatcatgatttcttgaactgcatttcccggtccatcgccatgatggaagccaggagctggtcttcctttttcaacaatctggtccagtaaccgttttgctgactggacagattcaggtgttccagttaacatacaggacctttctggaaggccaccactgtcaggagctatctgtattttgcatccagattcctgttgtatgcgtgagatctgttcacctcctctgccaattatgaatccaaccattccatctggaactttgtattcttctgtcattacagatctgctttgctgctgatgcatcggtggtaactgtgttccaaaagagtcattttgaggagcaactttcttagcatctggttgatctccatcttctaaaggtcttttttgtcccccataaccatagtcatttgaattcagtgatgtcgctgcatcacctccaattttgctgcatctgccgggctctctgcagtgcatctttgaaagcgtcgttaactcctccaccaccaccgccgccaccaccgccaccagctgagccagaagaggggggaggcactgttgaatagtctgccatggttgcactataagagccgctgccgcctgttcagagacttcctctcagctaacagctaagaaagaaagaaaatggcggc

SEQ ID NO: 163277 - DNA, 572 bp, Homo Sapiens
acatctccgccttaccgcacccccaaattaccacaaaaccaccagatatcaagagatcttaacatagagcatttaacatattatccagtgcattcatgaggaaagacaaatataatacaaaacaaaatgtcatcctatctgagaggaaaatgtctgcagaaataaaagtgatttacacataatagaaaagtggaagacaaaaaaataatcaacacacactcaaatctgggatggggtatacatccaacacaagggctgtatactattatggcatcccatctctggcttttccagttttcaaacttgcaaatccaattctttaattaagggtcaggaaattccaaaaaagaagtagaccatatcaaacaacttcacttgggatacccgcctccttatgctgctcttacggtagaacctgcacatattccattgctttgcctataaatttatatatacaaagctaaataagcgaacagtgatacactgacatatactattaaccccagcatgaggatccctcttctgcaaagatgtggcaaatcatatataaacgcaaggtaaacttaagcctc

SEQ ID NO: 163278 - DNA, 613 bp, Homo Sapiens
ggtcccgtgtttcatctccgcttactcttcccgactttcaaaactcatagtatacaaaatataacaatatcttaaatatttataaaaatcacaagaaaaaaatagaacgtatgaaaatatttttatctgagttctccctcattgttgagaggcagcttagtttgccttgagttcataactgttgagtgggtaggagtatgccctgcctaatactattctgtcccggagaagtttaaataaaacatagtagttgcagaagaggatgagggccatggaaagtgtgtggttccacttctccgaccgcagcaaggaatagagctgatagaagacgacactgccctcaataaggatgagcagatttaacagccttaatggtcgatgaaataagaaataaaagcgggcatgagatacatctgaaggcactgccacgttgtaaggccccatggctctatataaacatctgctgtgccgcaccagcaccccttgaggccatattgtattttctgaccaaatgtgctgtggagcattgctgtaggacccatgttccaacttctgccacttgcccaggtgagcagctgatttatgtagcaaatcacagtatttggatggcacc

SEQ ID NO: 163279 - DNA, 949 bp, Homo Sapiens
gggccggagtcggcggaaagcacccgggcgcagccggagccggtgccgcagctgcgatggccgtggccgtggggagaccgtctaatgaagagcttcgaaacttgtctttgtctggccatgtgggatttgacagcctccctgaccagctggtcaacaagtctacttctcaaggattctgtttcaacatcctttgtgttggtgagacaggcattggcaaatccacgttaatggacactttgttcaacaccaaatttgaaagtgacccagctactcacaatgaaccaggtgttcggttaaaagccagaagttatgagcttcaggaaagcaatgtacggctgaagttaaccattgttgacaccgtgggatttggagaccagataaataaagatgacagctataagccgatagtagaatatattgatgcccagttcgaggcctacctgcaagaggaattgaagattaaacgttctctcttcaactaccatgacacgaggatccatgcctgcctctactttattgcccctactggacattcactaaagtccctggatctggtcaccatgaaaaagctggacagtaaggtgaacatcattccaataattgcaaaagctgacaccattgccaagaatgaactgcacaaattcaagagtaagatcatgagtgaactggtcagcaatgggggccagatatatcagtttcccactggatgaaaaaacggtggcagaaattaacgcaacaatgagtggccattctcccatttgcagtggtttggcagcacccgaagaggtgaagatggccaacaaaaatgggaaaaggcaggccagtaccccctgggggtgtggtgcagggttaaaaaatggaaaatcattggcgatttttgtggaaaactttcaaagaaatgctgaacccccggggaaaaatggaagggacctggggaaaaaaaaaaatt

SEQ ID NO: 163280 - DNA, 447 bp, Homo Sapiens
gagaggcccgggagagtccttggctgtcctctcatcgaatgatgggtgccgagcgatcattcgtcacagtcgggcggagtttcacagtggcaaaggggttttctccgctgagaaaaggcggcctttgcagtcccgttggcatcgttaggagccgcggtctcgggcatggacgctggggccttaaaggtggatgtcgtcctggccgaatctgctctcctgtcggcagctgcccccatggacaagcattccaagtagtcgggtggggggatgacaacactgcgattctcagacaagttcccggtgctgatgcttctcactggtatggaccttccgcgtgtgcatgcacacgcccgagtgtccaaaccgccgcgagtccgagaagtccggatggacgcagtgtgctgctgcacacctcgagggtccacacctcatggaccgactgaacca

SEQ ID NO: 163281 - DNA, 1921 bp, Homo Sapiens
ctccacgccgagtaaccacacgcacacatacattcctacagtttgtccacaacttccagagctgaagagtagctcaaggacatcaaagggcagaggcccctaggaagggctgagccacaatgaagcagtgctccttcactcccgatttccatggctaccaccgtttttctctggcaaatcagagacgaattttaaagactgagtaaatctataaaagcgattaatcacagaagttcaatgtctgataaattattccaaaagtgttcctgggcactgagactcaccaagcatacattctgaaatcaaattctatttctatccaaaaagtgcagcccatcagtgttcttaaaggaggcaaatggttgttgtgaggtagcaaacattttccaatgcaggtaaggatgtagataccaggtaaatgttacagttgtgttcatactaacaataaactatggatgacgtggcacagagtcagtcaatgaggaaagatccagagacattctgaggtcacaaaaagaatttaaatgttagctaacaaggagtgctcatcaaaaacaggactttcccactcagactgcaaaccaggcagaactaccatctcgctttatcagttgtcattgcatgttgacatcaacactgaggagagtgatgcagacgatagatataaacacatctacatacatatgcatacataaagcatatacttatatgcatacacagtttacatttcccagccagggttcagaaaaaactagaaaagagaagtgatgttccatgttgtcgtggaaaagtatatatgttacatatacaatgcacgcatatgtctacatacatattgcatgtaatgcctacctgcatattaccaaactgatacacacgtgtatatatggaggtgtgtgtgtatatacatgtacattcactgttatcacatactccatcagcttgacttctgagatggtaattcaagtttcatctttgttctgggcttcgtttctgtctctactgtattttttgtctcaaccgtcaagtcacattttatcaacacgttagactgggacaaaccaacatgggatggaaactccaatctcaggaggctaaaatcacagcgcaggttgggattgaagagttgctgatttcctttccctttcccccagccagtgtggaccatgagagggggctgggggcggaagactggaggcccttccctctcactcataggagggcaaacccaaacagctcgggctggaagtccctgcagggaattcagcaccagggtggccctttgttgtcagatctcggctcaagtttccgttcaggaaccatgaccacctgcatcccagctgccagggccgcctccaccccattgggagcatcttcaaagacaaggcacttctccatagcaggagggggagagaacctcttggcacaagctaggaagatgtctgggtctggcttgccatgctgcacttcggggtcatctcccagcacaatgtgggaaaacaagctgaagaactccttgtggcggcttgtcttcatatcgaacgatgcggaccccgagctggtggctagtgcaaaggggatgccatgtttccgcaggtggatgatgagtttctccgcccctggcatgagcgcagccatggggaacacttcctttaacttcgtttggctttcttccaccagctcctctttggacatcgggagctgcaagacgtctattataatctgtgccgcctctaatgccttcttacccataaccagggactttacatcccagctgtatttcttgtcatagcgattacatatttcttgaaacaccactgaatacagccgttcagtatccagaagaagtccgtccatgtcaaagatgaggtgggtgacgggctgcgggggcgccgccatggtggcgccttctgggtctccc

SEQ ID NO: 163282 - DNA, 1377 bp, Homo Sapiens
ctcgccccgtgacatctccgcttacagtcacctcatgttgcagaccatgtttatggtaatacacactttccaaaatgagccttaaaaattgtaaaggggatactataaatgtgctaagttatttgagacttcctcagtttaaaaagtgggttttaaatcttctgtctccctgtttttctaatcaaggggtgaggactttgctatctctgagatgtctgctacctgctgcaaattctgcagctgtctgctgctctaaagagtacagtgcactagagggaagtgttccctttaaaaataagaacaactgtcctggctggagaatctcacaagcggaccagagatctttttaaatccctgctactgtcccttctcacaggcattcacagaacccttctgattcgtaagggttacgaaactcatgttcttctccagtcccctgtggtttctgttggagcataaggtttccagtaagcgggagggcagatccaactcagaaccatgcagataaggagcctctggcaaatgggtgctcatcagaacgcgtggattctctttcatggcagaatgctcttggactcggttctccaggcctgattccccgactccatcctttttcaggggttatttaaaaatctgccttagattctatagtgaagacaagcatttcaagaaagagttacctggatcagccatgctcagctgtgacgccctgaataactgtctactttatcttcactgaaccactcactctgtgtaaaggccaacagatttttaatgtggttttcatatcaaaagatcatgttgggattaacttgcctttttccccaaaaaataaactctcaggcaagcatttctttaaagctattaagggagtatatacttgagtacttattgaaatggacagtaataagcaaatgttcttataatgctacctgatttctatgaaatgtgtttgacaagccaaaattctaggatgtagaaatctggaaagttcatttcctgggattcacttctccaggggattttttaaagttaattatgggaaattaacagcagttcactttattgtgagtattggccacatttgactgaattgagctgtccatttgaacatttaaagcagctgttttggggtctgtgagagtacatgtattatatacaagcacaacagggcttgcactaaagaattgtcattgtaataacactacttggtagcctaacttcatatatgtattcttaattgcacaaaaagtcaataatttgtcaccgtggggttttgaatgtttgctttaagtgttggctatttctatgttttataaaccaaaacaaaatttccaaaaacaatgaaggaaaccaaaataaatatttctgcatttc

SEQ ID NO: 163283 - DNA, 1215 bp, Homo Sapiens
agacgccgtccgggagattgatgacagcattgggaagatactggagctcctccaagacctgcacgtcgcggacaacaccttcgtcttcttcacgtcggacaacggcgctgccctcatttccgcccccgaacaaggtggcagcaacggcccctttctgtgtgggaagcagaccacgtttgaaggagggatgagggagcctgccctcgcatggtggccagggcacgtcactgcaggccaggtgagccaccagctgggcagcatcatggacctcttcaccaccagcctggcccttgcgggcctgacgccgcccagcgacagggccattgatggcctcaacctcctccccaccctcctgcagggccggctgatggacaggcctatcttctattaccgtggcgacacgctgatggcggccaccctcgggcagcacaaggctcacttctggacctggaccaactcctgggagaacttcagacagggcattgatttctgccctgggcagaacgtttcaggggtcacaactcacaatctggaagaccacacgaagctgcccctgatcttccacctgggacgggacccagggggagaggttccccctcagctttgccagcgccgagtaccaggaggccctcagcaggatcacctcggtcgtccagcagcaccaggaggccttggtccccgcgcagccccagctcaacgtgtgcaactgggcggtcatgaactgggcacctccgggctgtgaaaagttagggaagtgtctgacacctccagaatccattcccaagaagtgcctcgggtcccactagcacctgcgcagactcaggccaggcctaaaatctcccggttggccctgcaagtgcctggaggaaggatggctctggcctcggtcctcccccaaccctgcccaagccagacagacagcacctgcagacgcagggggacagcacaattccacctgcccaggacctgaccctggcgtgtgcttggccctcctcctcgcccacggcgcctcagatttcaggaccctcctcctcgcccacggcgcctcagacctcaggaccctgccgtctcacgcctttgtgaaccccaaatatctgagaccagtctcagtttattttgccaaggttaaggatgcacctgtgacagcctcaggaggtcctgacaacaggtgcctgaggtggctggggatacagtttgcctttatacatcttaggg

SEQ ID NO: 163284 - DNA, 1097 bp, Homo Sapiens
tctccgccttacccaaaatcgaaaagagaaaattagaactggaaagaaatcggaagcgactagagactctgcagagtgtcaggccatgctttatggatgagtatgagaagactgaggaaggattacaaaagcagtatgacacttatctggagaaatttcaaaatctgacttatctggaacaacagcttgaagaccatcataggatggagcaagaaaggtttgaggaagctaaaaacactctctgcctgatacagaacaagctcaaggaggaagagaagcgcctgctcaagagtggaagtaacgatgactcggacatagacatccaggaggacgatgaatccgacagtgagttggaagaaaggcggctgcccaagccacagacagccatggagatgctcatgcaaggaagacctggcaaacgcattgtgggcacgatgcaaggtggagactccgatgacaatgaggactcggaggagagtgaaattgacatggaagatgatgatgacgaggatgacgatttggaagacgagagcatttctctctcaccaaccaagcccaatcgaagggtccggaaatctgaacccctggatgagagtgacaatgacttctgacccttttgccaagggaccctggcagattaaaaccctcagacttgtaggtaaatgggaacttagaaggttaggaaggtaacccctgttttgtttactaagctggctggactcatgatcactgaagcaatacttatttctgctttagcctcctatgtttgcattccatgaagcttaaataagaattgaagcaaatccctaagatttatttttttccaccttatttatcttctaaaacttgaggaatgcatgtgttcttagtgattcacatccacgggacaaaaactcaagaagaaataagagctgacgccacacaagtcttggctgcttttgttactatacattttctctgagactccagcagagttggggctggaacttggcactggggactcatgtttggaatcgtaggggaacatctggctgttaatcacttgcacagttgagaacatttcctatacatcggcttttaattctagctcttatttc

SEQ ID NO: 163285 - DNA, 613 bp, Homo Sapiens
ctgacatctccgacttacccaaaaagcaatattgaagtagagggaacaaattagaaagacctcaatgccatatagattagtgtatttcaaccctaagagttggagatgggtcatacatgcctgcgtattcccccatttttatgcatggagaaactagagctcagtgaggccaagtgatttgccagaggttctctagtgctgaggcttggtctgtcctccaaaaccttggactgtctaccacttccctgccctgcttgtggtcccttgggacccttgagagctctccttcagggctagcgtagtctctggcacattgtacttaagacctcccgcctgctgattcccaggtactttccactatacttcaggaatttaccaagagggtgtatcaatcaggtaaacagaaatcatgccagatattttagcagagaggattgaatagcaggaattggttagacaggtgctggttgacccaaaaagcgaatggggagtactgaagtgatacagaaatagtaacaaaaggttagcagcaagccatcaccctcaaggctggaggagcaaaagaagtaatttggaggaagtaggaccaagaccctgttagtattgttacctc

SEQ ID NO: 163286 - DNA, 660 bp, Homo Sapiens
cggaccccatctccgccttacatagaatgaattaaatatccagttacttgaatgggtataatagcatgaatatttagtagtgtctgtgtgtagtgtctagagttgtgtgattatattaggggcatctgccaattctctcactgtggttccttctctgactttgcctgttcatcatctaaggaggctagatccttcgctgacttcaccattcctcaaacctgtaagtttctcacttcttccaaattggctttggctctttctgcaacctttccattcaagagcaatctttgctaaggagtaagtgaatgtgaagagtaccaactacaacaattctacagataaattagtggattgtagttgtaagtaagagagtgaaggtttcttggcatctggtgcctgattaaggcttgagtaattaagttctcagcatatctctctattgtcttgacctgagtttgctgcattttctatgtgctgttcgtgacttggagaacttaaagtaatcgagctatgccaacttggggtggtaacagagtacttcccaccacagtgttgaaagggagaccaaagtcttatggataaaccctcctttcttttggggacacatggctctcacttgagaagctcacctgtgctgaatgtccacatgtcactacatgt

SEQ ID NO: 163287 - DNA, 1582 bp, Homo Sapiens
gcaccattcaaccaatctgaggccttaacttgcttgtaagatgattctcagagatcggctgagttaaaaatgatgacactttgattaccaaagaaagtagggccaactttgacaaatctggctctgctgaccctgtcactcccagatgtagcatagactcctaaacagaacctcaagtctgattgaggataaggccttctcctgagctgaaagttctttggcagatgagcaagaaactgaaagctgatgtacctgactggctctgtaagatcagaaaactgtatccagaataagccctatggattaacccctgagtacccagagtaataactaatttacagaacttccttattgatctgctggttcttccagatcatattctggctattggtatggctggcctttctcaaggtaccctgcttgtctattttcctgacacagctcttgcctgcctttttcacatgtcgctgcaattagactcaccgtgaggactacagtcaatttcagtctatcttgtgcccaatacaacaaggatttttaatagtaacaacccacacctcacccactaggactcaatgttcacaacaggaaggaccattgctgcatactccttgaccagcaacttttttgaagatatttttaagtgcagagtaggcctctattcctgtatgtaattgttcattttcagcacctggaacctcatctatcgggtctggaaggaatacagcagttcgaaagccgcgtccatttctctccttcagtagtgcagaaatgagtccgattcaccagtacacacagaactgtaccagttcaacctagcaaaagaagaaaagtttccactgtacttaaaatttacagctgactcaaattgcctcacagaattatttgatgtagaaggctagttgtcttacttcagatcagcaggacagttgggctctcagactcatgaccactgagtttgcttgtgttgaaactgtggtttcatccaacatatgcaattggacatgattattattccattcaaatggattacagacttcttgaggacaggacaaacttatctctcatggtgtttatttagaatacttttataaccaaggaagaaaccatgccagctgttaccattcaacttcttaagcagagattaagctttttcatatctgttcttatcctggacatcagtagtttttaatggcccagcatccgttccatcttgtaacaactccctgatgtttcttaaaaccacctcttcctatttccagtctgtggtttggacagtctgacccaaccttgagctttgtgggtgaacatgtattcagacctcatcaatcagcaaatccatctgaactgtggaggagaagctctctttactgagggtgctttagctttgtaggatgaaaacctcaaactaacagggcctaccatgtagagaatgaagccagtgcaggggaaagcagagccaaaatatggagagacttgaatcctgatgacagcgtttgtgcccctggatccaaccgtgcctgaagctagaatatcccctggacttttcagttatgtgaaccaataaatacccttttttgct

SEQ ID NO: 163288 - DNA, 875 bp, Homo Sapiens
  misc_feature (715)..(715): n is a, c, g, or t
  misc_feature (845)..(845): n is a, c, g, or t
cggtaccccgtgaacaattctccgccgtacacacaactgaaaatagaatcttacttgataatacaaaagctaccatcagaagaaatcccttcaggatcattaagccacttcctttgctctgcagtttctatagtagttttaaattattattaaatcacctgaaaaaaattccaaaagagaaccacacactaccatatccaaacaacttttgcatttcccataattgtagttaatgtcagcccagtaggccagaccaacccccagttcaatactttccttccccaaaagctctatactttgaaggaaaacagatacagtatcaaattatgacactttccttgcccaaattaatgcactggtacacccagtggctcatatttaacttcccccagcttcccaattcaaactggggggaaaaaaactaaatcattgggagttacttgccaacttggaagttgatatttctttactttttccattctaagactttaagttctctggcatgagtttatctgcaatcataaactaaacaattacctaaacccaccccaccaatcccaaccgtaacaggccactgccaactaattgccaatatttgcccctcccctttaataaaacttttaagaagtcacattattggaaaacttaacttcaacatttggcctactcaagctcttctgaagttctcctgagatgactgaatatgaaccaaagntgcaatgtgctgtactttttcagctttcaactgggggatactcttcccaagggtaaaaggcaggctccagttccctggaaggggtgttcggtggcccaacaggaacaggggggtaacaattcctttcttntaaccccaggtttggtcaaaagggacttta

SEQ ID NO: 163289 - DNA, 501 bp, Homo Sapiens
  misc_feature (309)..(318): n is a, c, g, or t
ggcgatctagaggacccgtcaatttctacacaaagtaagagcttttggggaaggaaagtattgaactgggggttggtctggcctactgggctgacattaactacaattatgggaaatgcaaaagttgtttggatatggtagtgtgtggttctcttttggaatttttttcaggtgatttaataataatttaaaactactatagaaactgcagagcaaaggaagtggcttaatgatcctgaagggatttcttctgatggtagcttttgtattatcaagtaagattctattttcagttgtgtgtaagcaagnnnnnnnnnnagtgtaggagaaatacttttccattgtttaactgcaaaacaagatgttaaggtatgcttcaaaaattttgtaaattgtttattttaaacttatctgtttgtaaattgtaactgattaagaattgtaatagtttatgctgtaatagtttatgctgtaatagtttatgctgtgggtaccgagctc

SEQ ID NO: 163290 - DNA, 471 bp, Homo Sapiens
tttggatccatttggcttttccaggccactgccaactaattgccaatatttgcccctcccctttaataaaacttttaagaagtcacattattggaaaacttaacttcaacatttggcctactcaagctcttctgaagttctcctgagatgactgaatatgaaccaaagctgcactgtgctgtacttttcagcttcaactgggaatactcttccaaggataaaagcagctccagtccctgaaggtgttcgtgccaacagcacagcggtacactccttctctaacccagtttgtcaatagtactatagcatctgtggaaaatcttagaaaaaaacattttctcccccaccctctctcttccctgttaagaccatcccaaaatgcttcaagtaaaaaataacaagtttaaggggttaagcacttttaaagtctgattaagggggtggggggacaaacgagtaactaccagccat

SEQ ID NO: 163291 - DNA, 362 bp, Homo Sapiens
cgtcgacgtcttaacagggaagagagagggtgggggagaaaatgtttttttctaagattttccacagatgctatagtactattgacaaactgggttagagaaggagtgtaccgctgtgctgttggcacgaacaccttcagggactggagctgcttttatccttggaagagtattcccagttgaagctgaaaagtacagcacagtgcagctttggttcatattcagtcatctcaggagaacttcagaagagcttgagtaggccaaatgttgaagttaagttttccaataatgtgacttcttaaaagttttattaaaggggcagggactgcttcagtttctgtcgacgcggccgcgaatttagt

SEQ ID NO: 163292 - DNA, 395 bp, Homo Sapiens
ggtcgactactactactaaattcgcggccgggtcgactccctgcccctttaataaaacttttaagaagtcacattattggaaaacttaacttcaacatttggcctactcaagctcttctgaagttctcatgagatgactgaatatgaaccaaagatgcactgtgctgtacttctcagcttcaactgggaatactcttccaaggataaaagcagctccagtccctgaaggtgttcgtgccaacagcacagcggtacactccttctctaacccagtttgtcaatagtactatagcatctgtggaaaatcttagaaaaaaacattttctcccccaccctctctcttccctgttaagaccatcccaaaatgcttcaagtaaaaaataacgtcgacgcgg

SEQ ID NO: 163293 - DNA, 559 bp, Homo Sapiens
gggatttgctgactacaacagctggaaagctacgtgtggggtctacagatgctggcattgcctttgccccagtatattcaatgggagccccaagtagcaaaagtggacggactatgcctaacattcttgatgacataattgcttcagttgttgaaaacaaaattccaccaagtaaaacctccaagataaatgtaaaaccagagcttaaagaagagcctgaagaaagcataatatctgcagtggatgaaaataataaattatacagtgatataccacattcttggatctgtgagaagcatattttatggcttaaggattataagaatagcagttattggaagcttttcaaagaatgttggaaacaaggacagcctgcagtggtttctgggtgtgcataagaaaatgaacattagcctatggaaggcggaatcaattagtcttgattttggagaccaccaagctgatctcctgaactgcaaagatagcatcatttcaaatgccaatgttaaggaattctgggatggttttgaagaagtttcaaaacggcagaaaaacaaga

SEQ ID NO: 163294 - DNA, 937 bp, Homo Sapiens
ggggagacagggcgtgttcgctgttcagtgccggtgttgcagggagtgagggcagctggagtgcgttctgccgaagcttgtggttgcacgcccatcgtcttaggggctaccttccgtgttaccttatcccatatcacacaactggtcctcagccataacaagctaacaatggtgccaccgaacatcgcagaactgaagaatttggaggtgctcaacttttttaataaccaaatcgaggagctgcccacacagatcagtagccttcagaaactcaaacacctgaaccttggcatgaacaggctgaacactttgccacgaggcttcggctccctgccagctcttgaggttctggacttgacgtacaacaacttgagcgaaaattctcttcctggaaacttcttctacctgaccaccctgcgtgcactctatctaagtgacaacgattttgaaatcctgccgccagatattgggaagctcacaaagttgcagatactcagccttagggataacgacctgatctcgctgcctaaggaaatcggggagcttacccagcttaaagagctccacattcaggggaaccgcctcaccgttctgcccccagaactaggaaacttggatttaactggccagaagcaggtattcaaagcagagaacaatccctgggtgacccccattgcagaccagttccagcttggcgtgccccatgtttttgagtatatccgttctgagacatacaaatacctctacggcagacacatgcaggccaacccagaaccaccgaagaagaataatgacaaatcgaaaaagatcagccggaaacccctggcagccaagaacagataaggaagggattggcatcggctggccttccagcaccttctctctccaacacttcattctctcttgccctgtctctcaaataaacccaatgctgcgt

SEQ ID NO: 163295 - DNA, 357 bp, Homo Sapiens
gatgcagctcagctgataacagctcttagtatacgacggagaacagaggacatgaatgaaagggttgggaggcaatgacagaaagagctgagatagatgaagtggaacgtttccagccgctgcatggcatggacttaaaaagtggaaccactattgcactgaaggcttggatgcctacagctgcatcaaggctctcatcacaccagcggaggaacttgacttccgagttcacatcagaagtgaactgatgcgttgggggctacatcaggtgttgcaggaccttcgagagatagaaaatgaagatatgagagtgcaactaaatgtgtttgatgaacaaggggaagaggattcctatga

SEQ ID NO: 163296 - DNA, 1926 bp, Homo Sapiens
  misc_feature (1464)..(1490): n is a, c, g, or t
agaaccccagccctcaaatacctttaatcagctgcttccaggacatagtcgagaagcactggatatcctggaacaaatttcgacatttagccccatggatcggttaacagcagaagaagcactctcccatccttacatgagcatatattcttttccaatggatgagccaatttcaagccatccttttcatatagaagatgaagttgatgatattttgcttatggatgaaactcacagtcacatttataactgggaaaggtatcatgattgtcagttttcagagcatgattggcctgtacataacaactttgatattgatgaagttcagcttgatccaagagctctgtccgatgtcactgatgaagaagaagtacaagttgatccccgaaaatatttggatggagatcgggaaaagtatctggaggatcctgcttttgataccaattactctactgagccttgttggcaatactcagatcatcatgaaaacaaatattgtgatctggagtgtagccatacttgtaactacaaaacgaggtcatcatcatatttagataacttagtttggagagagagtgaagttaaccattactatgaacccaagcttattatagatctttccaattggaaagaacaaagcaaagaaaaatctgataagaaaggcaaatcaaaatgtgaaaggaatggattggttaaagcccagatagcgctagaggaagcatcacagcaactggctggaaaagaaagggaaaagaatcagggatttgattttgattcctttattgcaggaactattcagcttagttcccagcatgagcctactgatgttgttgataaattaaatgacttgaatagctcagtgtcccaactagaattgaaaagtttgatatcaaagtcagtaagccaagaaaaacaggaaaaaggaatggcaaatctggctcaattagaagccttgtaccagtcttcttgggacagccagtttgtgagtggtggggaggactgttttttcataaatcagttttgtgaggtaaggaaggatgaacaagttgagaaggaaaacacttacactagttacttggacaagttctttagcaggaaagaagatactgaaatgctagaaactgagccagtagaggatgggaagcttggggagagaggacatgaggaaggatttctgaacaacagtggggagttcctctttaacaagcagctcgagtccataggcatcccacagtttcacagtccagttgggtcaccacttaagtcaatacaggccacattaacaccttctgctatgaaatcttcccctcaaattcctcatcaaacatacagcagcattctgaaacatctaaactaaaacactcagcagacatttatctttgtattcttcatgaaatgtgttttgtctttttttattactagtgtttaagtcattttttacttgaatcagatggtgtcatttannnnnnnnnnnnnnnnnnnnnnnnnnntaaaatccagactttctttttctacatgtgagatagttttcattttaactggcatgtcatttgcacacaaaaataaagactagagcaaaataatgcaacgcaggaggagaaaagaaatgcactaagacaagaacattctctcatagaacattgatctgttttacagggaaacaaaccttgccttgaaaatttacacagtggagactgtacataatttgcatgaaaaataggctattttttttccctaagacattttttcttccatgaaatattttccaagttttttcatacctgtacacattttccttaaaccccatggataccagcaagcaacctgaaaaatgaattgcccgaatttgggaacccatggtgtttatctaccctccaagggaaaccaggagtattgggggcaaaaccattttcccacccttaagtg

SEQ ID NO: 163297 - DNA, 593 bp, Homo Sapiens
cgtgacatctccgcttacatgacaatcaccatgaagatttacatacacatgttatatcatagtctcctcacaacatgtctaagaggtaggcacgtcattgttcccattttgcagatgaggaaactgaggttcagagagggcacttggcttgcccaaagtcacacagcagggagtggcagaggaagtcaggttgggtgaccccagtaactgctctcagaggctgggtgatgaccggcttcctggcttctctggaataaacctttgccaccacttcctgcatttcagcttcagtacaggcagagaatggggataggtgggggaatgaggtgagaggggagatgtttagaggtgtggagggcggcagaggtttgaacagtgcagacaaggggagagttcagccgactggggaggaagaggatggacgatggagcctctgggcatctggatcagcaggagcataacatctggatcagctggagcgtagcatctggatcagttggagcgtatgactttattgatccaggacatgtatttgcagatctgggtgtagacagctggatgctgggcagagccacacgtggggagtgacacac

SEQ ID NO: 163298 - DNA, 486 bp, Homo Sapiens
cgtgacatctccgcttaccaaacacatcagaaatctcactggagagaaaccgtatgaatgtagagaatctgggaatacctttctgaatcccacaaaccttaatgtgtgtatgtgaactcacatgggagagaaaccctgcaatttaaatggtatggtctggatgatgccccactccatatttgtaagccctaagtcctagttccttacactataactgtatttggacatagggttttcaaacaggtgagtaacttcaaatgaggttgttgggttcgatccctaatctgacatcactggtgtccctataagggaaactgaaggaaggatacacatggagaagactgtgtggatccaccagaagatggccatctacaagccaaggacagagacctggaacagatgctttcattatggcctccagaggaaaccaatcctgtctccaccttgatatgcattccagctccagaacttaaggcggagatgtat

SEQ ID NO: 163299 - DNA, 408 bp, Homo Sapiens
ctagaggatcctctcgcttacaaacctcacagctgcagtgttccaatgctcctctagttcagcctggaatggtgctaattttacttttcgagaaatcctatcagcctgttgattgggtttagtcaaaggcaatctctaggtcttcccgggaggacaggatttttgtttgttctgttttttggagacacgggtcttactattttgctcaggctgggcttgaactcataatcgtcctgcctcagccttcggcatagctgagactaggcgcatgccaacacaccccgccccagcatggctttgaaggcccttctctgctattttgcagtcatcagctgatccaagtccctaattttaaacttcacatttagcctgcaggaggctccttcaatgctaggcctgtgggctcag

SEQ ID NO: 163300 - DNA, 723 bp, Homo Sapiens
tttttttcaatatgcttatgttttatttatgtaggtggcatttaaaatacatgatgtgtttagggttacattgtccacagaaagcatcaaataccactcctctccccggcaacaccaaataaacaaagccaactctttggcaacagttgtgttaaataaaatcccaggtcacacttgtttctggctcccaagcctgggtcactgctacatggattgcgccaaaaaattcccagcttcaacactgctagattaaaattgctggcatttttaaatcacagcaaagcttttcacaatgccctcaagtccaagaggacaaaggagaaagcaacatgaacggcagatcctcatgtgaaagggaaggaaagtcactgggagggagcatgcagggaagaagtcaaggcagccctggaattctactccgtgctcaataaaaacaaaacgtgaagaagcaatacatcatgcaaacgaaataatgaccggaagtgggcgcatctagttagaatgaagtgactttcgtaaggagtcaatgttcgcgaactgaaacatgagttcaacctccttgtgccgtctctgggtgttttgcgcgtgtgtaaataccggcccgttttccccagcatggccctaacccatggacactagggagggtgccactgagcaaaaattttctgctaaaaataattagcaaaatccagaaaaaaatatggatctacaacctacaggacc

SEQ ID NO: 163301 - DNA, 300 bp, Homo Sapiens
ctcggtaccggaccccggcaacacgaatagaaggctgtcgtgaatcacatcagatgtaaaatcattccttctgtttactcttttaattttcatcctttgcaggtagtgcaaattcaacttcaaatatggtgtaggttttgctagattccatatttttttcttggatttttgctaattatttttagcaaaaaatttttgctcagtggcaccctccctagtgtccatgggttagggccatgctcgggaaaacgggccggtatttacacacgtgcaaaacacccagagacggcacaaggaggt

SEQ ID NO: 163302 - DNA, 648 bp, Homo Sapiens
  misc_feature (473)..(473): n is a, c, g, or t
ctggaggggagtgaatagatctgaaacgtgtgcatcaaacagtaggagcggacttgttccgtgactgcgtaccttttgtataatgggtcagcgagttacattcagtggcaagcttaaccgcatagggaagccgcagagaaatcgagtccgaatagggcgaaatcagtcgctgggtgtagacccgaaaccaagtgatctacccatggccaggatgaaggtgcggtaacacgcactggaggaccgaacccactaatgttgaaaaattaggggatgagctgtgggtaggggtgaaaggctaaacaaacttggaaatagctggttctctccgaaaactatttaggtagtgcctcaagtatcaccatcgggggtagagcactgttaaggctagggggtcatggcgacttaccaaacctatgcaaactccgaataccgacgagtacagcttgggagacagagcaccgggtgctaacgtncggactcaagagggaaacaacccagaccgccaggctaaggtccctaaatattgctaagtgggaaacgaagtgggaaggctaaaacagtcaggaggttggcttagaagcagccaccatttaaagaaagcgtaatagctcactgatcgaagtccgtccttgcccggaagaatgtaat

SEQ ID NO: 163303 - DNA, 1389 bp, Homo Sapiens
  misc_feature (256)..(325): n is a, c, g, or t
  misc_feature (769)..(793): n is a, c, g, or t
  misc_feature (864)..(966): n is a, c, g, or t
  misc_feature (973)..(987): n is a, c, g, or t
  misc_feature (1056)..(1207): n is a, c, g, or t
  misc_feature (1221)..(1234): n is a, c, g, or t
  misc_feature (1257)..(1266): n is a, c, g, or t
  misc_feature (1317)..(1317): n is a, c, g, or t
  misc_feature (1321)..(1329): n is a, c, g, or t
aaatttaatgatcattctggaatcctgttctttactttgttcacacgctattaattctcatgccagggatgagaattaatagcgtgtgaacaaagtaaagaacaggataccagaatgatcattaaatttgtttctatttattcttttttgcccccctagagattaagtccagaaatgtactttcgggcacataaagaaatcttgaggactttgtttaaaccttccataaaaaaacaattttcggtttctcgggtannnnnnnnnnnnnnnnnnnnnnnnnnnnnnnnnnnnnnnnnnnnnnnnnnnnnnnnnnnnnnnnnnnnnnttctttctttgtgtattttattcaagatgagttggacccattgccagtgagtctgaatgtcactgacagccctgtgttgtgctcaggactcactctgctgctggtggaaactcatggcttctctctctctttgatcccataaagctacgagggggacgggagagggcagtgcaatgggaagtaaagagatattttccagtaggaaaagcaatgctttcttgtctttagactcaaatgcttagggaacgtttcatttctcattcatggggaaaggcagcctccttaaatgttttctgaagagcggtaaaatctagaagcttaagaatttacagttccttcaataaccatgatgacctgaagttcacctatcccattttagcatctacttgtttttcccatctcttcctttccaattttgcttatactgcgtgtaatatttttgtnnnnnnnnnnnnnnnnnnnnnnnnngaccagctaaaattttcgacttgactttttaacttaactcatgaattaattaaagcaaatgaaaaaattannnnnnnnnnnnnnnnnnnnnnnnnnnnnnnnnnnnnnnnnnnnnnnnnnnnnnnnnnnnnnnnnnnnnnnnnnnnnnnnnnnnnnnnnnnnnnnnnnnnnnntttgggnnnnnnnnnnnnnnnaaaaaattttttaaaaactttttttggggcgcgggcccccaaaggaaaagaaacggggccaaagttttnnnnnnnnnnnnnnnnnnnnnnnnnnnnnnnnnnnnnnnnnnnnnnnnnnnnnnnnnnnnnnnnnnnnnnnnnnnnnnnnnnnnnnnnnnnnnnnnnnnnnnnnnnnnnnnnnnnnnnnnnnnnnnnnnnnnnnnnnnnnnnnnnnnnnnnnaaataaaaaaatannnnnnnnnnnnnnggggaatttttattagaaagaannnnnnnnnnaaaattcctaaaaaccccttttccccccccaatggggaaaaccccctccanaaannnnnnnnntaaaaacacccgaaataccccccccggggggaacaaaaccccttttggcccccttggtgg

SEQ ID NO: 163304 - DNA, 965 bp, Homo Sapiens
  misc_feature (149)..(149): n is a, c, g, or t
tgggaggccaagtccggggaaaaagcccaggggttggttcccagccaattcccctgcctggtgagggtaggttcatacttctcccatgacgtaaaggcctttctgagcccatccagtgcaaaatttctccctgaatcaatccaaattcnactgagcctcttgttaaactgtttccttgtgcaggcgtactcagcagtcatttcaatcaatctcttgagcagcccagccacgacgctgcccatgctgaaccggccgccgttgaggatgttcatggccaccttaaacccatctccgacctctccaaggatgttttccacaggtatcttggtgttttcaaaatggacttcacaagtgttggagccccgaatgcctaatttatcttcgggtttcccattagtgactccaccaaagtctctttctactatgaatgctgtgattttgtctttcactgatccatcagaatcaacgacctcagtctttgcaaacacagtaaaaatattggccagtcctccattagtaatccagaccttggagccattgaggatgtagtgcttcttgtcttcacttagtgtggctctgctccggattgaggctgcatcgctcccactggctggctccgtgaggcagaaggctgcaatgtgctccccggacgccagtttaggcaagtatttggctttctgctcctcagtgccagccaagatgatccccttgaggccaatagcctggtgcgctgccagggtcacagtgatggacccatccatgctgatgatctcccctagtcttgagtacatggtgttggagaagcccaggccaccatattcttctgggacttgcagcccaaaaagccctaggctcttcaatttctccaaagtttcatctgggattttcccttcctggtcaatttttcgggagtccacctcttcagtgaagaatttttccctcgtgccgaattcgccacccaggcc

SEQ ID NO: 163305 - DNA, 961 bp, Homo Sapiens
tagaagaactaatgttagtataagtaacatgaaaacattctcctccgcataagcctgcgtcagattaaaacactgaactgacaattaacagcccaatatctacaatcaaccaacaagtcattattaccctcactgtcaacccaacacaggcatgctcataaggaaaggttaaaaaaagtaaaaggaactcggcaaatcttaccccgcctgtttaccaaaaacatcacctctagcatcaccagtattagaggcaccgcctgcccagtgacacatgtttaacggccgcggtaccctaaccgtgcaaaggtagcataatcacttgttccttaattagggacctgtatgaatggctccacgagggttcagctgtctcttacttttaaccagtgaaattgacctgcccgtgaagaggcgggcatgacacagcaagacgagaagaccctatggagctttaatttattaatgcaaacagtacctaacaaacccacaggtcctaaactaccaaacctgcattaaaaatttcggttggggcgacctcggagcagaacccaacctccgagcagtacatgctaagacttcaccagtcaaagcgaactactatactcaattgatccaataacttgaccaacggaacaagttaccctagggataacagcgcaatcctattctagagtccatatcaacaatagggtttacgacctcgatgttggatcaggacatcccgatggtgcagccgctattaaaggttcgtttgttcaacgattaaagtcctacgtgatctgagttcagaccggagtaatccaggtcggtttctatctacttcaaattcctccctgtacgaaaggacaagagaaataaggcctacttcacaaagcgccttcccccgtaaatgatatcatctcaacttagtattatacccacacccacccaagaacagggtttgtaagaggcagagcccgat

SEQ ID NO: 163306 - DNA, 806 bp, Homo Sapiens
gagcttgaacgctttcttaattggtggctgcttttaggcctactatgggtgttaaattttttactctctctacaaggttttttcctagtgtccaaagagctgttcctctttggactaacagttaaatttacaaggggatttagagggttctgtgggcaaattgaaagttgaactaagattctatcgaggacaaccagctatcaccaggctcggtaggttcgtcgcctctacctataaatcttcccactattctgctacatagacgggtgtgctcttttagctgttctaaggtagctcgtctggtttcgggggtcttagctttggctctccttgcaaagttatttctagttaattcattatgcagaaggtataggggttagtccttgctatattatgcttggttataatttttcatctttcccttgcggtactatatctattgcgccaggtttcaatttctatcgcctatactttatttgggtaaatggtttggctaaggttgtctggtagtaaggtggagagggtttgatgagtcatcaaacccttgcggtactatatctattgcgccaggtttcaatttctatcgcctatactttatttgggtagggtttgatgacgtcatcaaaccctcaagaggggaagcaactccgtgtgcctggggttcccgagggagctgctggctgacctgggcccacagagcctggctttggtccccagcattgcagtatggtgtggtgtttgtaggctgtgggtctggctgtgtgccaaggtgaatagcacaggttagggtttaggtttcatgtata

SEQ ID NO: 163307 - DNA, 478 bp, Homo Sapiens
aggccctaacaatcaggccccccttgccaattcagcctatataccgccatcttcagcaaaccctaaaaaggaacaatagtaagcacaatcatagcacataaaaacgttaggtcaaggtgtagcttatgggttggaaagaaatgggctacattttctacataagaatatccaccacacgaaagtttttatgaaactaaaaaccaaaggaggatttagcagtaaatcaagaatagagtgcttgattgaataaggccatgaagcacgcacacaccgcccgtcaccctcctcaagcatgtagtaataaaaataacctatattcaattacacaaccatgcaagaagagacaagtcgtaacaaggtaagcatactggaaagtgtgcttggattaccaaagcatagcttaaactaaagcacctagtttacacctagaagatcccacaatgtatgggtactttgaaccaaagctagctcaacatac

SEQ ID NO: 163308 - DNA, 1423 bp, Homo Sapiens
acccatcagcgtgacccatcggctgtgaacgccgatgggtaacaaagagaactttagctagataccccgaaaccagacgagctacccatgagcagtttaaaagaaccaactcatctatgtggcaaaatagtgagaagacttgtaggtagaggtgaaaagcctaacgagcctggtgatagctggttgtccgagaaagaattttagttcaaccttaaaaataccccaaaaaccctaaattccaatgtatttttaagagatagtctaaaaaggtacagctttttagaaacggatacaaccttgactagagagtaaaatcttaatactaccatagtaggcctaaaagcagccatcaattgagaaagcgttaaagctcaacaaattcaccaacataatcccaaaaactaataacaaactcctagcccaataccggactaatctattgaaacatagaagcaataatgttaatatgagtaacaagaagcctttctcctcgcacacgcttacatcagtaactaataatatactgataattaacaaccaataaaccaaaacaacactaaaacgtttattaattacattgttaacccaacacaggagtgcaccaaggaaagattaaaagaagtaaaaggaactcggcaaacacaaaccccgcctgtttaccaaaaacatcacctctagcattactagtattagaggcaatgcctgcccagtgacaccagtttaacggccgcggtattctgaccgtgcaaaggtagcataatcacttgttctccaaataaggacttgtatgaatggccacacgagggttttactgtctcttacttccaatcagtgaaattgaccttcccgtgaagaggcgggaataaaaaaataagacgagaagaccctatggagctttaattaactattccaaaagttaaacaattcaaccacaaagggataaaacataacttaacatggactagcaatttcggttggggtgacctcggagtacaaaaaaccctccgagtgattttaatctagacaaaccagtcaaaataaccataacatcacttattgatccaaaattttgatcaacggaacaagttaccctagggataacagcgcaatcctattctagagttcctatcgacaatagggtttacgacctcgatgttggatcaggacacccaaatggtgcaaccgctattaaaggttcgtttgttcaacgattaaagtcctacgtgatctgagttcagaccggagcaatccaggtcggtttctatctattataaatttctcccagtacgaaaggacaagagaaatgggaccaacctcacaaacgcgtctcagagataattaatgatataatcttaacctaattaactcataataaatccagccctagaacagggcacattagggtggcagagaccggcaattg

SEQ ID NO: 163309 - DNA, 684 bp, Homo Sapiens
gcggccgcctactactactaaattcgcggccgcgtcgacccccagcattgcagtatggtgtggtgtttgtaggctgtggggtctggctgtgtggccaaggtgaatagcacaggttagggtgtgtgccacaccccatgcacctcagggccaagcgggggcgtggctggcctttcaggtccaggccagtgggcctggtagcacatgtctgtcctcagagcaggggccagatgattttcctccctggtttgcagctgttttcaaagcccccgataatcgctcttttccactccaagatgccctcataaaccaatgtggcaagactactggacttctatcaatggtactctaatcagtccttattatcccagcttgctgaggggcagggagagcgcctcttcctctgggcagcgctatctagataggtaagtgggggcggggaagggtgcatagctgttttagctgagggacgtggtgccgacgtccccaaacctagctaggctaagtcaagatcaacattccagggttggtaatgttggatgatgaaacattcatttttaccttgtggatgctagtgctgtagagttcactgttgtacacagtctgttttctatttgttaagaaaaactacagcatcattgcataattcttgatggtaataaatttgaataatcagatttcttacaa

SEQ ID NO: 163310 - DNA, 456 bp, Homo Sapiens
  misc_feature (404)..(404): n is a, c, g, or t
  misc_feature (414)..(414): n is a, c, g, or t
  misc_feature (441)..(441): n is a, c, g, or t
tattcaaatttattaccatcaagaattatgcaatgatgctgtagtttttcttaacaaatagaaaacagactgtgtacaacagtgaactctacagcactagcatccacaaggtaaaaatgaatgtttcatcatccaacattaccaaccctggaatgttgatcttgacttagcctagctaggtttggggacgtcggcaccacgtccctcagctaaaacagctatgcacccttccccgcccccacttacctatctaggataggcgctgcccagagggaaggagggcgctctccctgcccctcaggcaagctggggataataagggactgattaggggtaccattggataggaggtccagtaggtcttgcccacattgggtttatgaggggcattttgggagtggggnaaagaagcgntttttcggggggtttttgaaaacaggntggcaaaccgggggg

SEQ ID NO: 163311 - DNA, 213 bp, Homo Sapiens
cactattgcctcgggcgcaatagatattgtaccgcaagggatacagataaaaattataccagcatagtatagcaaggactaacccctataccttctgcataatgaattaactagaaataactttgcaaggagagccaaagctaagacccccgaaaccagacgagctacatagacgggtgtgctctacagccatttaggtaacagccatttagg

SEQ ID NO: 163312 - DNA, 503 bp, Homo Sapiens
  misc_feature (67)..(101): n is a, c, g, or t
  misc_feature (173)..(211): n is a, c, g, or t
cctagtttacacctagaagatcccacaatgtatgggtactttgaacccaagctagctcaacatactnnnnnnnnnnnnnnnnnnnnnnnnnnnnnnnnnnncattcacctaacattaaagtataggagatagaaatttttatcctgacgctatagagatagtaccgtaagggnnnnnnnnnnnnnnnnnnnnnnnnnnnnnnnnnnnnnnnattaccccttctaccttttgcataatggtttaaccagaaaaaatctaacaaagagaactttagctagataccccgaaaccagacgagctacccatgagcagtttaaaagaaccaactcatctatgtggcaaaatagtgagaagacttgtaggtagaggtgaaaagcctaacgagcctggtgatagctggttgtccgagaaagaattttagttcaaccttaaaaataccccaaaaaccctaaattccaatgtattttaatagatagtcgaaaaggtaccgacatacatgaata

SEQ ID NO: 163313 - DNA, 484 bp, Homo Sapiens
taaaggacaagagaaataaggcctacttcacaaagcgccttcccccgtaaatgatatcatctcaacttagtattatacctaacaaacccacaggtcctaaactaccaaacctgcattaaaaatttcggttggggcgacctcggagcagaacccaacctccgagcagtacatgctaagacttcaccagtcaaagcgaactactatactcaattgatccaataacttgaccaacggaacaagttaccctagggataacagcgcaatcctattctagagtccgcaagggtctatacgagtcacgacctcgatgttggatcaggacatcccgatggtgcagccgctattaaaagttcgtttgttcaacgatataaagtcggaccgtgatgctagagttcagaacacggagtaataccaggtcggtcgtaccatgtacatctaaattcctgcactgtacgaaagacacgaatgattcgggatcctacag

SEQ ID NO: 163314 - DNA, 534 bp, Homo Sapiens
tagatccccatacacagtacattatttcgagatcaggaccaacctggaaaatgccagagttggctatgcctattcagacattgatttggacagctcaccaacccctgaaggggccgttcagcctggttagttttctacctactccgagtgtcctcccctgccccaccagattgctgcaggggcgcggtgtgcctggcagccaaattgttgacacttcttttttcctatgcactggttttacacagctgtcatttttctttcaaaattgcagcagtcccacagatgtgtgcatttggacaaatagtacttaaaaacaaaacaaacaagcactcagcccagctcctcaatactctgtatgggggatctcgcgagatcccccatacagagtagctacctaagaacagctaaaagagcacacccgtctatgtagcaaaatagtgggaagattatataggtagaggcgacacacctaccgccacaaaagccagtccaacttactagcagacaaccttagacaagacatttagccaaata

SEQ ID NO: 163315 - DNA, 1060 bp, Homo Sapiens
aacggctgctcagtggcgggagggctgggctaccgcgcccgggccctacccgccctggcgcactgctcttcccggtcatggaggcgccagccgccggcttgtttctgctcctgttgcttgggacttgggccccggcgccgggcagcgcctcctccgaggcaccgccgctgatcaatgaggacgtgaagcgcacagtggacctaagcagccacctggctaaggtgacggccgaggtggtcctggcgcacctgggcggcggctccacgtcccgagctacctctttcctgctggctttggagcctgagctcgaggcccggctggcgcacctgggcgtgcaggtaaagggagaagatgaggaagagaacaatttggaagtacgtgaaaccaaaattaagggtaaaagtgggagattcttcacagtcaagctcccagttgctcttgatcctggggccaagatttcagtcattgtggaaacagtctacacccatgtgcttcatccatatccaacccagatcacccagtcagagaaacagtttgtggtgtttgaggggaaccattatttctactctccctatccaacgaagacacaaaccatgcgtgtgaagcttgcctctcgaaatgtggagagctacaccaagctggggaaccccacgcgctctgaggacctactggattatgggcctttcagagatgtgcctgcctatagtcaggatacttttaaagtacattatgagaacaacagccctttcctgaccatcaccagcatgacccgagtcattgaagtctctcactggggtaatattgctgtggaagaaaatgtggacttaaagcacacaggaactgtgcttaaagggcctttctcacgctatgattaccagagacagccagatagtggaatatcctccatccgtttctttttaaaccattccttccctgctggctgccccaggatgttttaattaccggggatgaaaatgggccaatgtttttctaacaggccaacttcccttaattttgggaaggacttcctgtaaaagaatggaaaaattccgggccctcc

SEQ ID NO: 163316 - DNA, 936 bp, Homo Sapiens
  misc_feature (789)..(789): n is a, c, g, or t
  misc_feature (813)..(813): n is a, c, g, or t
  misc_feature (865)..(865): n is a, c, g, or t
  misc_feature (869)..(869): n is a, c, g, or t
tggagagctacaccaagctggggaaccccacgcgctctgaggacctactggattatgggcctttcagagatgtgcctgcctatagtcaggatacttttaaagtacattatgagaacaacagccctttcctgaccatcaccagcatgacccgagtcattgaagtctctcactggggtaatattgctgtggaagaaaatgtggacttaaagcacacaggagctgtgcttaaggggcctttctcacgctatgattaccagagacagccagatagtggaatatcctccatccgttcttttaagaccatccttcctgctgctgcccaggatgtttattaccgggatgagattggcaatgtttctaccagccacctccttattttggatgactctgtagagatggaaatccggcctcgcttccctctcttgggcgggtggaagacccattacatcgttggctacaacctcccaagctatgagtacctctataatttgggtgaccagtatgcactgaagatgaggtttgtggaccatgtgtttgatgaacaagtgatagattctctgactgtgaagatcatcctgcctgaaggagccaagaacattgaaattgatagtccctatgaaatcagccgtgccccagatgagctgcactacacctatctggacacatttggccgccctgtgattgttgcctacaagaaaatctggtagaacagcacattcaggacattgtggtccactacacgttcaacaaggtgctcatgctgcaggagcccctgctggtggtggcggncttctacatcctggtcttcaccgntatcatctatgttcggctggacttctccatcaccaagggatcccagccgcanaaancccaggatgaaaggttaccctgccattcacgaaggcagggtcctggaaccctggttcaaacaagaaa

SEQ ID NO: 163317 - DNA, 936 bp, Homo Sapiens
  misc_feature (830)..(830): n is a, c, g, or t
  misc_feature (904)..(904): n is a, c, g, or t
agatttcagtcattgtggaaacagtctacacccatgtgcttcatccatatccaacccagatcacccagtcagagaaacagtttgtggtgtttgaggggaaccattatttctactctccctatccaacgaagacacaaaccatgcgtgtgaagcttgcctctcgaaatgtggagagctacaccaagctggggaaccccacgcgctctgaggacctactggattatgggcctttcagagatgtgcctgcctatagtcaggatacttttaaagtacattatgagaacaacagccctttcctgaccatcaccagcatgacccgagtcattgaagtctctcactggggtaatattgctgtggaagaaaatgtggacttaaagcacacaggagctgtgcttaaggggcctttctcacgctatgattaccagagacagccagatagtggaatatcctccatccgttcttttaagaccatccttcctgctgctgcccaggatgtttattaccgggatgagattggcaatgtttctaccagccacctccttattttggatgactctgtagagatggaaatccggcctcgcttccctctctttggcggggtggaagacccattacatcgttggctacaacctcccaagctatgagtacctctataatttgggtgaccagtatgcactgaagatgaggtttgtggaccatgtgtttgatgaaacagtgatagattctctgactgtgaagatcatccctgcctgaagagccaagaacattgaaaatgatagtccctatgaaatcagccgtgccccagatgagctgcactacacctatctggnacacatttggccgcccctgttgatgggtgcctacaagaaaaatctgggaaaaacagcacatttcagggacattntgggtccactacacggttcaacaaaggtgcct

SEQ ID NO: 163318 - DNA, 1132 bp, Homo Sapiens
  misc_feature (902)..(940): n is a, c, g, or t
ggtgaaggagccaagaacattgaaattgatagtccctatgaaatcagccgtgccccagatgagctgcactacacctatctggacacatttggccgccctgtgattgttgcctacaagaaaaatctggtagaacagcacattcaggacattgtggtccactacacgttcaacaaggtgctcatgctgcaggagcccctgctggtggtggcggccttctacatcctgttcttcaccgttatcatctatgttcggctggacttctccatcaccaaggatccagccgcagaagccaggatgaaggtagcctgcatcacagagcaggtcttgaccctggtcaacaagagaataggcctttaccgtcactttgacgagaccgtcaataggtacaagcaatcccgggacatctccaccctcaacagtggcaagaagagcctggagactgaacacaaggccttgaccagtgagattgcactgctgcagtccaggctgaagacagagggctctgatctgtgcgacagagtgagcgaaatgcagaagctggatgcacaggtcaaggagctggtgctgaagtcggcggtggaggctgagcgcctggtggctggcaagctcaagaaagacacgtacattgagaatgagaagctcatctcaggaaagcgccaggagctggtcaccaagatcgaccacatcctggatgccctgtagcccctgcccgcatcctccagggggcccagggtgcctgcactttgctgtggcaggcagattgggtggtagtgggaggttgtgcatggaggccagtgaaagctgacatctgtaaaaggccttcaaggaagagaaaccaggccctgcgtcaaggcagggtggagttgccgttggtccttaaccttctgttgtttcttcttctnnnnnnnnnnnnnnnnnnnnnnnnnnnnnnnnnnnnnnncacaacatcttggggtttcgaccacagggagtttccaacacttgcaggcgatcccggcccggaagccaaggaatattttacggcctatataagcccccggttttgtccccctaaataccgaagtggggcaatcggcgaagagccactggtgtatatcatcacacttcaacgctgttgcacaacggcaataag

SEQ ID NO: 163319 - DNA, 1380 bp, Homo Sapiens
cggacgcgtgggtgcagagctcccactgcacgcttgacgaggccttcgaggacctggactgggacactgagaagggcctggaggctgtggcctgcgacaccgaaggcttcgtgccaccaaaggtcatgctcatttcctccaaggtgcccaaggctgagtacatccccactatcatccgccgggatgacccctccatcatccccatcctctacgaccatgagcacgcaaccttcgaggacatccttgaggagatagagaggaagctgaacgtctaccacaagggagccaagatctggaaaatgctgattttctgccagggaggtcctggacacctctatctcctcaagaacaaggtggccacctttgccaaagtggagaaggaagaggacatgattcacttctggaagcggctgagccgcctgatgagcaaagtgaacccagagccgaacgtcatccacatcatgggctgctacattctggggaaccccaatggagagaagctgttccagaacctcaggaccctcatgactccttatagggtcaccttcgagtcacccctggagctctcagcccaagggaagcagatgatcgagacgtactttgacttccggttgtatcgcctgtggaagagccgccagcactcgaaagctgctggactttgacgacgtcctgtgaggggcagaggcctccgcccagtcaccatcaggccactccctctgcaccgggacctggggctgggccgcctcgtgctccccggggactgtgtggctccggtctcgcctggagccacttcagggcacctcagacgtagctcaggttccccctgtgggtaccggtcctcgctgcacccgtggccgcagaggctgcagtccctgcgggccgggaggatcccgccctgtggcccgtggatgctcagcggccaggcactgacctgccatgcctcgcctggaggctcagctgtgggcatccctccatggggttcatagaaataagtgcaatttctacacccccgaaacaattcaaagggaagcagcatttcttgttaactagttaagcactatgctgctagttacagtgtaggcaccccggcccagcagcccagcagcccacatgtgttcaggaccctccctgcccaccccctccctgccgtatcgatcaccagcaccagggtggcccgtgtgcgtggggccagcgtcgccgggctgcccagcctggctctgtctacactggccgagtctctgggtctgtctacactggccgagtctccgactgtctgtgctttcacttacactcctcttgccaccccccatccctgcttacttagacctcagccggcgccggaccccggtaggggcagtctgggcaagcagaaagaagggc

SEQ ID NO: 163320 - DNA, 319 bp, Homo Sapiens
aacttccgcgacctcagatcagacgtggcgacccgctgaatttaagcatattagtcagcggaggaaaagaaactaaccaggattccctcagtaacggcgagtgaacagggaagagcccagcgccgaatccccgccccgcggcggggcgcgggacatgtggcgtacggaagacccgctccccggcgccgctcgtggggggcccaagtccttctgtgctgtccacctcctctgtgctgtccacccctctgtgctgtccagctgtccaacctcctctgtgctgtccatccctcggtgctgtccacctcctctgtgctgtcca

SEQ ID NO: 163321 - DNA, 418 bp, Homo Sapiens
acacgcacttgggggacatgtggttacggaagacccgctccccggcgccgctcgtggggggccaagtccttctgatcgaggccagcccgtggacggtgtgaggccggtagcggccccggcgcgccgggcccgggtcttcccggagtcgggttgcttgggaatgcagcccaaagcgggtggtaaactccatctaaggctaaataccggcacgagaccgatagtcaacaagtaccgtaagggaaagttgaaaagaactttgaagagagagttcaagagggcgtgaaaccgttaagaggtaaacgggtggggtccgcgcagtccgcccggaggattcaacccggcggcgggtccggccgtgtcggcggcccggcggatctttcccgccccccgttcctcccgacccctccctaagacccta

SEQ ID NO: 163322 - DNA, 159 bp, Homo Sapiens
acagacgccacgtgccacgtgtcccgcgccccgccgcggggcggggattcggcgctgggctcttacctgttcactcgccgttactgagggaatcctggttagtttcttcttctcagagacgcgacctcagatcaacgtggcgttatccggagccggctc

SEQ ID NO: 163323 - DNA, 970 bp, Homo Sapiens
  misc_feature (845)..(854): n is a, c, g, or t
ggctggtactggcccggaagtttccgggatatcgtcgacccacgcgtccgcgacccacgcgtccggccattaaaagccactggttattttatttttcatcaggcaattttcgaggtttttatttgttcggtattgtttttttacactgtggtacatataagcaactttaataggtgataaatgtacagtagttagatttcacctgcatatacatttttccattttatgctctatgatctgaacaaaagctttttgaattgtataagatttatgtctactgtaaacattgcttaatttttttgctcttgatttaaaaaaaagttttgttgaaagcgctattgaatattgcaatctatatagtgtattggatggcttcttttgtcaccctgatctcctatgttaccaatgtgtatcgtctccttctccctaaagtgtacttaatctttgctttctttgcacaatgtctttggttgcaagtcataagcctgaggcaaataaaattccagtaatttcgaagaatgtggtgttggtgctttcctaataaagaaataatttagcttgacccccgagcggcgaggcggcgcggacgagcccggcgaacacgctccgcgcgcccctaaaatgagaccctgcgaggcccgataacacccccccttcttccaagtcccggctgaacgcacgaaagagcggcgtgggggcccgccctccccccctagaaaaacttttcaaaaacccttttttttgggcgcggggcgccccgtgagggagcggaccggggggtaaaacgttctttccccacagaaaaacccggggctaagaaaaaaggcgttgggaactcccccacnnnnnnnnnnccccccgggggccacccaccgcgccttttcaaccacaactccgaggggggggcgtcccagggtcccaccagggcgatattatacaccgggcgggcccccacgcgagcccctcaaag

SEQ ID NO: 163324 - DNA, 690 bp, Homo Sapiens
  misc_feature (178)..(237): n is a, c, g, or t
aaatcaggggccaaaaaaattaggccaatgtttaacagtagacataaatccttatacgaattccaaaaagcttttgttcagatcatagagccataaaatggaaaaatgtatatgcaggtgaaatctaactactgtacatttatcacctattaaagttgcttatatgtaccacagtgtnnnnnnnnnnnnnnnnnnnnnnnnnnnnnnnnnnnnnnnnnnnnnnnnnnnnnnnnnnnncagtggcttttaatggcttctcctggttatcagtgctacaaaagacaaaaatcttctcatctgaacaggtgataaaaccaggcacaatcaaaccgttaccaaattagacccacccatagaaatatactatccacccacatattttccatcaaaagctttttgtttgtttcaatctgaatctttgaggcccatttggtcacaatatgttacaaatatttgtgtatgtgtgtgttttttacaccatgatatcatatgtttgtctggcactatcctaaagctagtttatagacgatgatgatatagaaacaacccagtgcctatatgacaaatgaactcactgggtagaaatgagacaggggaggaaggaattcagttctaccaaggaaaaaggtccatactgatcactcatcatccgtcccacttccttctgactgttcacgttcatcctgctcc

SEQ ID NO: 163325 - DNA, 814 bp, Homo Sapiens
  misc_feature (642)..(670): n is a, c, g, or t
caagtccgtacaaatacgcacccacacccacagccgcactcgcagccgcacgggcaccggcttctccgcagcacctccaactctgcctgaaaggggcagctcccgggcaagacaaggttttgaggacttgaggaagtgggacgagcacatttctattgtcttcacttggatcaaaagcaaaacagtctctccgccccgcaccagatcaagtagtttggacatcaccctactgaaaacttgcgattcttcttagttttctgcatacttttcatcacgatgcaggaaacgatttcgagtcaagaagacttttatttatgaacctttgaaaggatcgtcttgtatggtgaattttctaggagcgatgatgtactgtaattttattttaatgtatttagatttatgattatttattagttttttttaaatgcttgttctaagacatttctgaatgtagaccattttccaaaaaggaaactttattttcaaaaacctaatccgtagtaattcctaatcttggagaataaaaaagggcggtggaggggaaaacattaagaatttattcattatttctcgagtactttcagaaagtctgacactttcatggttgtgccagctggttgaaattaaaactctgatattacnnnnnnnnnnnnnnnnnnnnnnnnnnnnngcttaaacatatagtttgtctagaagtttaaaaagctacaaagttaagaatggtgtcacttatgaaaatctaacactcaagatagtttctcaagaggaaatccgtagttcaaggatacctgatttccaatatttaacgcatacc

SEQ ID NO: 163326 - DNA, 731 bp, Homo Sapiens
gcttaaacatatagtttgtctagaagtttaaaaagctaaaagttaaaaatggtgtaattatgaaaatctaacactcaagatagtttctaaaaggaaatcagtagttaaggatacctgatttcaaaatatttaaagcataacctaactgatggtaggatgatgtatcttgaatatgtggtagggccacatctatgtaggaaaaccttgcttttatcatctgtgtgtaaagggcttaataaggagaagaggccttttgactgatttgtgagtataaatgcatttgctgtttcatttcaaaaatgttgtggaggaaaagagtacatttaacttgtataagagaatatttgtactcctgtccaggctgcaggacctttcttcgagagctttgcacacttgacttgaaccacattttctgatccctttactttgttttagaagcacactgaaaaatctcgttgtttaaagtacaatttgtaaatatttcaaaggtctaggagtcataacttttgttttcatactgaaaatgatgttgatcagagaaaccaactgttttgcttttcattgctctgtgagaaatttgaggattctgttttgctgttaggtaagctaaactcagaaacttgaacaaggaaaagactggataaacacaggattttcagtaagaaaacaaccccagtcttgtcttagaagccacttgttgaggagtctgtgggggaaaacaaagaggatag

SEQ ID NO: 163327 - DNA, 521 bp, Homo Sapiens
actcccaagtgtgttcttatcccatggataggaaaccagtgaattccgtggctggcacaccacgagctgtcacgcggcacgggtcataacacatctgggtgtcatcggacacctcacctcgccaaccctgtaggagcgtaacggagcctccatcctcagccacgtgcagctgacgtgcctttcctgatcggagggctttctcttttatgggtggcccagcttcttcaagaccttcactgctctgcctcagtggacagtcgttacaattttgaggtgtgaccttttgtattacatgccttccccttgaagtcatcctgtgttttgtaatcagctgtcaggccaaatgtctgacccgaaagagaatgtatttacactcatgctgcgttgttcagcagcccctctgtgtactgtgtagattagtattattagtccttttaattacatatatatgcagggaagtaatggtactggtagtgtatgtatactatgtggttcaaatatgaatttcgaacacaccaagc

SEQ ID NO: 163328 - DNA, 542 bp, Homo Sapiens
ataggggttaaagaaaacaaaactctgccttttgtgctatgaaatatttttagtccagaggttttaagctgtgtgtccattcctactctgaaaatgcatagctttgttctggatgtcatctcttgaaagtagaaaactcctatgtgtttatcacattgcagggctttcttatgtatttctggcagacttgcccaaatctttagatgggctgggttatacagcatgccctcccccaaataagggatctgaaataaatactacactattgatagtggagatatattaatttttaaaactgtaaagtaaatgtggtctctaggtttgtggtgtgtacctttgtgttaatgtgtagggaagagacagtgacttgatggttatggggagtgtatcttgatgtgtgtataggggtaagtattgctaaattatttacagcttttattcagggtgagtcatgtgatgatatggcctaatcagatataagtgaaggagcgaagatgcaagctagccaaatgatgaaatgaacaagatttagtatctatata

SEQ ID NO: 163329 - DNA, 632 bp, Homo Sapiens
  misc_feature (144)..(263): n is a, c, g, or t
tcccactgtcgatagaagacaggggtgttggcaggcatactcctatctcctcctcttggctctcaatgctgaggcttgcagaggcatcccagcggcaccagcctcccaagtagctgggattacaggcacctgccaccatgcccnnnnnnnnnnnnnnnnnnnnnnnnnnnnnnnnnnnnnnnnnnnnnnnnnnnnnnnnnnnnnnnnnnnnnnnnnnnnnnnnnnnnnnnnnnnnnnnnnnnnnnnnnnnnnnnnnnnnnnnntgagcccccgcgcccagccatcaaaatgctttttatttctgcatatgttgaatactttttacaatttaaaaaaatgatctgtttggaaggcaaaattgcaaatcttgaaattaagaaggcaaaaatgtaaaggagtcaaaactataaatcaagtatttgggaagtgaagacgaagctaatttgcattaaattcacaaacttttatactctttctgtatatacattttttttctttaaaaaacaagtatggatcagaatagccacattgggaacactttttgttatcagtcaatatatttagatagtaagaagctggtcctaagcataaaagtgggcttgattctgcagtatatctttagaagtgctcga

SEQ ID NO: 163330 - DNA, 697 bp, Homo Sapiens
  misc_feature (16)..(16): n is a, c, g, or t
  misc_feature (21)..(21): n is a, c, g, or t
  misc_feature (41)..(41): n is a, c, g, or t
  misc_feature (48)..(48): n is a, c, g, or t
  misc_feature (63)..(63): n is a, c, g, or t
  misc_feature (77)..(77): n is a, c, g, or t
  misc_feature (96)..(96): n is a, c, g, or t
  misc_feature (98)..(98): n is a, c, g, or t
  misc_feature (125)..(125): n is a, c, g, or t
  misc_feature (141)..(141): n is a, c, g, or t
  misc_feature (181)..(181): n is a, c, g, or t
  misc_feature (205)..(205): n is a, c, g, or t
  misc_feature (251)..(251): n is a, c, g, or t
  misc_feature (306)..(306): n is a, c, g, or t
  misc_feature (361)..(361): n is a, c, g, or t
aaaccttaccaaattnccaanttgcccccttttaaggttcnaaaaccntttggttcaaatttnggccgaattttaangaagggcccatttggtttncncccccctccaagttcaagtcccttttntgggccaattattgantgccaccagtaaactccttcctccctgaaaaaaggaaatncagagattaagagcatatagcccnccctagtgaagaaaaatggagtaaggagattaagttaagtgccccntgtccaagcgatgggatgaaagaagcttgtctcagagatcccagatcatggtccntataatggatattattcagaccttagtacagcaagacactctggccaccataaanaacgcagaaaagaaaaaaaggttaagcattgaaacaaaagacgatcgtcttttgtttcaatggtcacacactgatgcttagatgttccagtaatctaatatggccacagtagtcttgatgaccaaagtcctttttttccatctttagaaaactacatgggaacaaacagatcgaacagttttgaagctactgtgtgtgtgaatgaacactcttgctttattccagaatgctgtacatctattttggattgtatattgtgtttgtgtatttacgctttgattcatagtaacttcttatggaattgatttgcattgaaacaaaagacgagggtaccga

SEQ ID NO: 163331 - DNA, 983 bp, Homo Sapiens
  misc_feature (716)..(833): n is a, c, g, or t
  misc_feature (840)..(841): n is a, c, g, or t
  misc_feature (854)..(867): n is a, c, g, or t
  misc_feature (891)..(917): n is a, c, g, or t
cctggtgatccgcgaatcagccatcaaatgcttttatttctgcatatgtgaatactttttacaatttaaaaaaatgatctgtttgaaggcaaaattgcaaatcttgaaattaagaaggcaaaaatgtaaaggagtcaaaactataaatcaagtatttgggaagtgaagactggaagctaatttgcattaaattcacaaacttttatactctttctgtatatacatttttttctttaaaaaacaactatggatcagaatagccacatttagaacactttttgttatcagtcaatatttttagatagttagaacctggtcctaagcctaaaagtgggcttgattctgcagtaaatcttttacaactgcctcgacacacataaacctttttaaaaatagacactccccgaagtcttttgttcgcatggtcacacactgatgcttagatgttccagtaatctaatatggccacagtagtcttgatgaccaaagtcctttttttccatctttagaaaactacatgggaacaaacagatcgaacagttttgaagctactgtgtgtgtgaatgaacactcttgctttattccagaatgctgtacatctattttggattgtatattgtgtttgtgtatttacgctttgattcatagtaacttcttatggaattgatttgcattgaacacaaactgtaaataaaaagaaatggctgaaagagcannnnnnnnnnnnnnnnnnnnnnnnnnnnnnnnnnnnnnnnnnnnnnnnnnnnnnnnnnnnnnnnnnnnnnnnnnnnnnnnnnnnnnnnnnnnnnnnnnnnnnnnnnnnnnnnnnnnnncataaannattcctgggggcnnnnnnnnnnnnnnaaaaactttttaaaacattttttnnnnnnnnnnnnnnnnnnnnnnnnnnnacctgggtcttactgtgttccaaggaaaacccgggccctcgactaagggttgggatctcccacaac

SEQ ID NO: 163332 - DNA, 1173 bp, Homo Sapiens
  misc_feature (55)..(55): n is a, c, g, or t
  misc_feature (80)..(80): n is a, c, g, or t
  misc_feature (125)..(125): n is a, c, g, or t
  misc_feature (153)..(153): n is a, c, g, or t
  misc_feature (159)..(159): n is a, c, g, or t
  misc_feature (170)..(170): n is a, c, g, or t
  misc_feature (172)..(172): n is a, c, g, or t
  misc_feature (201)..(201): n is a, c, g, or t
  misc_feature (508)..(560): n is a, c, g, or t
ccaaccagggccctttgggaggaacccctgtggttccccaccccctgtgccggtngaagccccccagggcccacttttcnccaaagaaatttacacttcttcaagggccttctgttctcctctcnccactgggcccaaatagccctggccctncccctnccttggcattnantgggggagcccaggaacccccccacactnatggggttagagctcctcctttcttctcactccttccctttcctccctccatgcccactccccctgcctccagcaggccaggaagaaggcacagtccaggcaagtctgggagcttccaagccctgagggtccagctgtggggcccaaatgacagccttacaagggttctaccagagaggaaaattccacatcccaccagaagacaggggtgttggcaggcatactcctatctcctcctcttggctctcaatgctgaggcttgcagaggcatcccagcggcaccagcctcccactgcacagcttcctnnnnnnnnnnnnnnnnnnnnnnnnnnnnnnnnnnnnnnnnnnnnnnnnnnnnnagactgcattagattcattcatctcattttccaggacatgttggccagaggtctgggcccatcccaggcctcaaggccctccagacctgtgggagagcactgagagggttactgactctctggccatgggaactcagagattctcatccccaaagtcccaaaagagggtgctgattggtgcttttcctcaggctcttcattggtttccaagggagcaaatcctcagtggggatacaagacatataaagtatatattattttttcataacttatgtggcttttaacttattgcttcccttcctgtttctgcatgatcagtctgtatgtactatctggaaagataacacatactccagccacctcacctgattggctatcttggggccatgtccccttcttgctgccacaggatgaataaagtgttgagatttgtctatggagaaagctgtgtgtctgtttttatctcccctctcaggaccagtcagccactggtcaatcaggctgatcatggaacattaggaattctccaattaagggagaaaaagtccagggacttagttatatcttcagaccagtgcagctgggacacacaaagttctcctgtctcaccatc

SEQ ID NO: 163333 - DNA, 277 bp, Homo Sapiens
taatatagatatatatctatataagtgctgtgactgtaaaagtgtactttccattaattattagccgagttaagagaatggtcacattgaagtactgtgtggactagaaatgtaccctgtcatcatgcaaggaaatattgttatcgtgttaacatagctcatttatgtagaatgaattctggtggtttaccccaatgtcacagttaggacggtagatggtgagatcgcagatgcgctattatctagattcagtgttacattttcgatgtttatcact

SEQ ID NO: 163334 - DNA, 931 bp, Homo Sapiens
  misc_feature (391)..(447): n is a, c, g, or t
  misc_feature (490)..(505): n is a, c, g, or t
  misc_feature (616)..(626): n is a, c, g, or t
tggagcattagagaaaagcctagactgttagttgatagccagttgaaatatcattgatagaattttagttttaggaaaaattggtttgatttctagctttattactattaggtatgtgagcttgggcaaatcgcttaatctttgagtctagttttctctcaaaatgagaacattaggctaaatgatttccgagtttccagctagtcctagagttctatatttctacatagttgaattattttatcatgctgttgctggggaatatgactaacccttttgaagctactaattttatgtcgagctttaaagtccataattgttatcttcagaaaatattatttgacctacagtatgtccaaatcaatttaataaaatcgctttataacagggnnnnnnnnnnnnnnnnnnnnnnnnnnnnnnnnnnnnnnnnnnnnnnnnnnnnnnnnncgaaccgacacgaccccataaggttaagaaaaaacttttgcgnnnnnnnnnnnnnnnnaaaaattttttaaaacctttctttgggcgcggggccccaaaaggaaaagagaaggggacaaaccttttcccaagaaaacccgggcaaaaaatagggttggaattcccaccnnnnnnnnnnncccccggcggggaaaccaaggggttttagaaaaaatccaaaaggggttcctggggggctattatggggattctttaaacggggaacccaacgagacccttatatttaaatttaaccccccgccccgtgaaattttatggaaaaaatgggtgggaaatcacataaaccttttccgcccccacagggaaacccccttccccaaaccggtcttgggataaccctaatttcctcgccggggtttccaccacccttggcccctctgggggataaaatatattccccccacggggggaaaacgcggggggg

SEQ ID NO: 163335 - DNA, 854 bp, Homo Sapiens
ccacatctatgcacccacgaaaaggttgcttcagttattaacatctacccccatactactcactccacaggcagctgccgttctcacactgctctacttagactcaatatgcagcaccattaagtatctagactttgtctttgctgtgaaaaatgaaaaccgattttatctgaaggaagtgaacatcagcatgtatttggttaatggctccgttttcagcattgcaaataacaatctcagctactgggatgcccccctgggaagttcttatatgtgcaacaaagagcagactgtttcagtgtctggagcatttcagataaatacctttgatctaagggttcagcctttcaatgtgacacaaggaaagtattctacagcccaagagtgttcgctggatgatgacaccattctaagtcccaagtgatagttggtgctggtctttcaggcttgatcatcgttatagtgattgcttacgtaattggcagaagaaaaagttatgctggatatcagactctgtaacagctaatcaatacgtgatctctgttacaaagagaagagaaagcaagtacaagttccaacatgcaatacgtggtcaacttaaggtatagtttagttgcagtccagctctttagaatgggtggtatgggggatttcaaacttaaacaaaaaaactatcaagtacaaattagttgcctgactttggtttttccaagcaaggaatgtaaaactgttatttttacagcaaaagatgtgcaaaatcactggattataagttctattttactgtcttgaattagtattgcagtgttctcattttagacattcagactaaaaatacaccgtttagaaaaaac

SEQ ID NO: 163336 - DNA, 510 bp, Homo Sapiens
tttattttgtatcaggattggaatggaccccaaatcccagcttcagcagtgttgcttgacacttaggacagaaggaaaagagccagacattcctctgtacaagactctgcagacagtgggcccatcccatgcccgaacctacactgtggctgtttatttcaagggagaaagaataggctgtgggaaaggaccaagtattcagcaagcggaaatgggagcagcaatggatgcgcttgaaaaatataattttccccagatggcccatcagaagcggttcatcgaacggaagtacagacaagagttaaaagaaatgaggtgggaaagagagcatcaagagagagagccagatgagactgaagacatcaagaaataaaggagggcatgcaagtgtggagtatttacttgctcagtaactgagactgttgtctattgagacctagcctagttttcctgcagacaatgaacgaagtgtgctcattgaaataatatacagagtcaaatcgctatgaa

SEQ ID NO: 163337 - DNA, 322 bp, Homo Sapiens
tgagcacaatactggcttggcagaatcttcctcctctatctgtgtccctgacgagaagatgatatacagcttgctcttcacgatcaaggggggtggacgttttcagttcacctgtgtctggatttagtttgaatttttctgcaccgtgaacccatattacgtgtaagtaatttcagcgttagagcggatgtctgcgtctgtagcagagatctgctatgatcaattttccaggaaggacgtcttcaggaatagtgtctgaatataaagtcttttcacaaactggactgttgtcatttgcatccagaactttcacttcaactat

SEQ ID NO: 163338 - DNA, 922 bp, Homo Sapiens
gacccattgctcatcatagcggtcagtccagctgcgcccctcgcccatagccccagcgggcgccgggcgggcgagcagctcttcggcccttcccggacagcgacgcagtcgcagcgcgcgccctaacacagatgtgggaagataaatgaaggggtctagatgtaaatgtcagtggaaaggagagctaccatcactaagggctgaaaacacagttaaatcactttcaaagttaaaagactattaagaacacaagatggggactcctgcttctggaaggaaaagaacacctgtgaaagaccgattttctgcagaagatgaagctttgagtaacattgccagagaggcagaggcaaggctggcagcaaaacgggctgcccgggcagaagcaagagatatacgcatgagagaactggaacgacaacaaaaagagttggatgaaaaatctgacaaacagtatgctgaaaattatacaagaccttcatctcgaaattctgcctcagcaaacaacccctctaagtggaaactcatccagacgaggaagtggggacaccagcagcttaatagatccagacacttcattaagtgaattgcgggaatctttgtctgaagtggaagaaaaatacaagaaagccatggtttccaatgcacagttaggacaatgagaagaacaatttgatctaccaagtagacacactcaaggatgttattgaagagcaggaggaacagatggcagaattttatagagaaaatgaagaaaaatcaaaggagttagaaaggcagaaacatatgtgtagtgtgctgcagcataagatggaagaacttaacagaaggcctgcggccaaagagatgagctttattgagaaacatggccttagttataatccccgatggcactcccaatgggtgatgtcagtcatgaagc

SEQ ID NO: 163339 - DNA, 1322 bp, Homo Sapiens
gagctcggccccattgtcatcatagcgcaggaaggatgtaaatagacactggcagttttaagcctccagaagtagcatctaaaccttcaggtgctcccatcattggtcccaaacccacttctcagaatcaattcagtgaacatgacaaaactctgtacaggatcccagaacctcaaaaacctcaactgaagccacctgaagatattgttcggtccaatcattatgaccctgaagaagatgaagaatattatcgaaaacacctgtcatacattgaccgaagaagttttgagaataagcctcctgcacacattgccgaccagccatgctctccgagcctgcaaagccagctcattctcagaatcaatcaaactttatctagttattcttcaaagggaaagcactcgctgaacactgatggtgtggatagatcattaggcgagaaacgccatgaacccatccagaccactccccgctcctcctccatagccctcgcagtatgcccagccatctcagcctgtcaccagcgcgtctctccacatacattctaagggagcacatggtgaaggtaattcagtgtcataggattttcaggattccttagtgtccaaaccagacccacctccatcccagaataagccagcaactttcagaccaccaaaccgagaagatactgctcaggcagctttctatccccagaaaagttttccagataaagccccagttaatggaactgaacagactcagaaaacagtcactccagcatacaatcgattcacaccaaaaccatatacaagttctgcccgaccatttgaacgcaagtttgaaagtcctaaattcaatcacaatcttctgccaagtgaaactgcacataaacctgacttgtcttcaaaaactcccacttctccaaaaactcttgtgaaatcgcacagtttggcacagcctcctgagtttgacagtggagttgaaactttctctatccatgcagagaagcctaaatatcaaataaataatatcagcacagtgcctaaagctattcctgtgagtccttcagctgtggaagaggatgaagatgaagatggtcatactgtggtggccacagcccgaggcatatttaacagcaatgggggcgtgctgagttccatagaaactggtgttagtataattatccctcaaggagccattcccgaaggagttgagcaggaaatctatttcaaggtctgccgggacaacagcatccttccacctttagataaagagaaaggtgaaacactgctgagtcctttggtgatgtgtggtccccatggcctcaagttcctgaagcc

SEQ ID NO: 163340 - DNA, 649 bp, Homo Sapiens
gagacaagatgtccgccagagctgcggccgccaagagcacagcaatggaggaaacagctatatgggaacaacatacagtgacgcttcacagggctcctggatttggatttggaatagcaatatctggtggacgagataatcctcattttcagagtggggaaacgtcaatagtgatttcagatgtgctgaaaggaggaccagctgaaggacagctacaggaaaatgaccgagttgcaatggttaacggagtttcaatggataatgttgaacatgcttttgctgttcagcaactaaggaaaagtgggaaaaatgcaaaaattacaattagaaggaagaagaaagttcaaataccagtaagtcgtcctgatcctgaaccagtatctgataatgaagaagatagttatgatgaggaaatacatgatccaagaagtggccggagtggtgtggttaacagaaggagtgagaagatttggccgagggatagaagtgcaagtagagagaggagcttgtccccgcggtcagacaggcggtcagtggcttccagccagcctgctaaacctactaaagtcacactggtgaaatcccggaaaaatgaagaatatggtcttcgattggcgagccatatatttgttaaggaaatttcacaaga

SEQ ID NO: 163341 - DNA, 612 bp, Homo Sapiens
  misc_feature (70)..(95): n is a, c, g, or t
tagataaatctgctttgaatataagtgcaatatatttttgaaggtctgtaaatgtgtacatacatgtctnnnnnnnnnnnnnnnnnnnnnnnnnnggtgtctgtgtacatatagtgaagatatgcagtaagagctaccttaaagactttccctagacaaaggttaagttattttttgatcgtgtataccaagcagatagatatactgtgcttagtggaacccgctaaaaacctttttctctgtttttccaaacacaggcattctgtagcatagcaaaaccttctcaaatgacagagattctgtttgctgttgagaatgttgtaatttggatttctgcactgtttaacaaatgaagtaaaagaaaaacactactgcaatcacgtcttttgttatgctagtatcagtcagatgcacttagagtgaagaaacactgtaattacagcacacagattgcaagtattgcgtaccaagtgatacaactcgaaatgcagttctcatcttcctgttttgagaaatgattattttatcacgcatcagagccttcgtgctttgattatcttgtatgttaacaattctagaaaacattcatgaattcaccaaaaaatgttacta

SEQ ID NO: 163342 - DNA, 460 bp, Homo Sapiens
cacccgtttcatcaatagcgcaagtagctgatattgatggacagtatgcaatgactcgagctcagagggtacgagctgctatgttccctgagaaattagatgagggcatgcagatcccatctacacagtttgatgctgctcatcccactaatgtccagcgtttggctgaaccatcacagatgctgaaacatgcagttgtaaacttgattaactatcaagatgatgcagaacttgccacacgtgcaatccctgaactgacaaaactgctaatttctctcggaccatgcattggtccgagagaaattagcaccgtagcggtgatcactatctgtatttttatcctcatccaactgtatcactttgtgcagcagcggagggaggattacgcccaacagcttgaaaatatagcgcattcagtgagaaagccgctttctcaggcggtgcttgatgtcaacctgaa

SEQ ID NO: 163343 - DNA, 959 bp, Homo Sapiens
ttcaatttctacacattcaagctcagggatggccagttgctctaagtggattggatatggttggagtggcacagactggatctgggaaaacattgtcttatttgcttcctgccattgtccacatcaatcatcagccattcctagagagaggcgatgggcctatttgtttggtgctggcaccaactcgggaactggcccaacaggtgcagcaagtagctgctgaatattgtagagcatgtcgcttgaagtctacttgtatctacggtggtgctcctaagggaccacaaatacgtgatttggagagaggtgtggaaatctgtattgcaacacctggaagactgattgactttttagagtgtggaaaaaccaatctgagaagaacaacctaccttgtccttgatgaagcagatagaatgcttgatatgggctttgaaccccaaataaggaagattgtggatcaaataagacctgataggcaaactctaatgtggagtgcgacttggccaaaagaaataagacagcttgctgaagatttcctgaaagactatattcatataaacattggtggacttgaactgagtgcaaaccacaacattcttcagattggggatgtgtgtcatgacgtaaaagaagaggacaaacttattcgtctaatgggaaaaaacatgaagggaaaaggaaaatacaacccattggtttgtgggggaacccccaagaaaaatggggatggagcctacccaacaagaaatggaagaaagaatggcggggacctgcccatggggaaagccgttggtgaaccggcgagcccaaccagggaacacgggcactgagggtccagagatcgaactgccccgaatcggaaaggggcccccccgaagcgggaccgggccaccaaagagagggcaccgcgcgcgcggcccgcgacgtgggtgcaccaagaagggcaaaaagggtagtac

SEQ ID NO: 163344 - DNA, 1776 bp, Homo Sapiens
  misc_feature (294)..(294): n is a, c, g, or t
  misc_feature (626)..(641): n is a, c, g, or t
  misc_feature (1615)..(1629): n is a, c, g, or t
gggggatttacaggggtttccacttacatgccgcgcttttggggagtgtggtttcccaaagatcggggcacggatattgttttaaatgggcacattccccaccaccgtttctgcctgaacaaaagaggcacagggtgccgggtgacgctaaattttcaattattcggaaggttccgtctttggggcctgcccggttttggattaagaattcgccgggtaatagttacctttcaagggaccttcccatttctgggattttggtttccaagaaaccccttcgggtttttccccgcncgggggcgtttttctttattttggtgggagggaattccccaaggccactagggtccatatgccagggaatcttctctagggaaaacaggttatggccccatgtttcactttaccctacttgaggcccggctatgcccaaaacgaatgggtctaagaaaggcttttttgaggggtccgagggcggcaggacaagcttttatatttgttttagtacgcttggttggagtcttcaaatattttttattggaaggccatgcattgccttcatttattgtatttcaaatcactgtacatttacttttgtgaaaacactgcctgcattttctagtacnnnnnnnnnnnnnnnnttgtttcaggaatgtagagaaatatccaacttaaatagcgaaaaagtgcaccataattactgctgcactgcagtcatttctgcaattcccatgtttcttaaataactatcttgtcagataacacacaatataaagagcaattatgaaaaacagacatttacatatacttctaaagtcttattgggaatatcctgttggcattggataaccaatcataggtgcagctgcagtagcaggatatgcatatgcctgttggttcataccattgtgcatatttggaacattacttccgtattgctgagtgctatcataaccattctggtaagtccctgttggattaccagtcctaaaactggtctgtataccagcagacacaaaattacttccaaagctcccattggtgtaatttgcagcactgtaaacaccattctgagtttttgccccaaaatctcttttaagcaggctagagtaacctctgtcataattttccctgtctctaaaggtattaaatccaccccttttgcccgcagagtatctgtcccgacggtcatccttcatgcctcctctacccctggaacgacctgaacctctgtcttcgaccaactgaagcaacttgggattaattgcttgattagcttcacgaagcacagagataaggtcgctcacttgctttatgttattaggtgtaaagaaagtgtatgctgtgcctgttttggtactgcgagcagttcttccaattcgatgaatataatcctctgaggagctagggtagtcataattgatgacaaatttcacatcttccacatctgtaaggtgttgcagtgtggcaaaatagcaatgtacggagttttgcacaccacaacagccagaccaaaaataaaaagttagacaattgtattcccaagaaggtacgggctgcaaaaaatacagttaaaatggttatccatttcctgtaggaataccattgaggttgnnnnnnnnnnnnnnngcacatgtcatctgtataattcatcacccacccagtgacagaccctgtcaaaaggaatgtgtgttccctaagcacattcccaaatcagcaagttcccttacagatcatcaagtgacatctaatctgggcccagcctgctggtccagc

SEQ ID NO: 163345 - DNA, 739 bp, Homo Sapiens
  misc_feature (14)..(14): n is a, c, g, or t
  misc_feature (655)..(655): n is a, c, g, or t
  misc_feature (709)..(709): n is a, c, g, or t
  misc_feature (715)..(715): n is a, c, g, or t
  misc_feature (729)..(729): n is a, c, g, or t
cttgggaatctccnaggatcccccgcaaatttccttccactcgacctcattcatttctaccggtctctagtagtgcagcttcggctggtgtcatcggtgtccttcctccgctgccgcccccgcaaggcttcgccgtcatcgaggccatttccagcgacttgtcgcacgcttttctatatacttcgttccccgccaaccgcaaccattgacgccatgtcgggttattcgagtgaccgagaccgcggccgggaccgagggtttggtgcacctcgatttggaggaagtagggcagggcccttatctggaaagaagtttggaaaccctggggagaaattagttaaaaagaagtggaatcttgatgagctgcctaaatttgagaagaatttttatcaagagcaccctgatttggctaggcgcacagcacaagaggtggaaacatacagaagaagcaaggaaattacagttagaggtcacaactgcccgaagccagttctaaatttttatgaagccaatttccctgcaaatgtcatgggatgttattgcaagacagaattttcactgaaccccactgctatttcaaggctcagggggtggcccagtttgctcttagtggggtttgggtatggggttgggagttggccacagacttggatcnttgggggaaacattgtccttatttttgctttccccgcccatttttccccccatncattcnttcaggcctttccncgggggagag

SEQ ID NO: 163346 - DNA, 677 bp, Homo Sapiens
  misc_feature (12)..(12): n is a, c, g, or t
  misc_feature (606)..(606): n is a, c, g, or t
tgactctagagnatcccccttccacatctcatttctgaagaatgttgtggtttgcactcagttcaagtgcaccaatgtttatatgaatatagtctttcaggaaatcttcagcaagctgtcttacttcttttggccaagtcgcactccacattagagttcgcctatcaggtcttatgtgagccacaatcttccttatttggggttcaaagcccatatcaagcattctatctgattcatcaaggacaaggtaggttgttcttctcagattggttttgcgcacactctaaaaagtcaatcagtcttccaggtgttgcaatacagagtttccacacctctctccaaatcacgtatttgtggtcccttaggagcaccaccgtagatacaagtagacttcaagcgacatgctctacaatattcagcagctactttgatgcacctgttgggccagttcccgagttggtgccagcaccaaacaaataggcccatcgcctctctctaggaatggctgatgattgatgtggcaatggcaggaagcaaataagacaatgttttccagatccagtctgtgccactccaaccatatccaatccacttagagcaactggncatcctgagcttgaatagcagtgggttcaagtgaaattctgtcttgcaataacatcatgacatttgcaggg

SEQ ID NO: 163347 - DNA, 615 bp, Homo Sapiens
  misc_feature (24)..(24): n is a, c, g, or t
  misc_feature (194)..(194): n is a, c, g, or t
  misc_feature (548)..(563): n is a, c, g, or t
tcaggtagagcatagatgacgtcngacagatactctgcggcaaagggtgattatacttagagacagggaaatatgacagagtactctagcctgctaaagagattggggcaaaactcagaatggtgttacagtgctgcaaatacaccaatgggagcttggaagtaatttgtgtctgctggtatacagaccagttntaggactggtaatccaacagggacttaccagaagggttatgatagcactcagcacatacggaacgtaatgttccaaatatgcacaaatggtatgaaccaacaggcatatgcatatcctgctactgcagctgcacctatgattggttatccaatgccaacaggatattcccaataagactttagaagtatatgtaaatgtctgttgttcataaattgctctttatattgtgtgttatctgacaagatagttatttaagaaacatgggaattgcagaaatgactgcagtgcagcagtaattatggtgcacttgttcgctatctaagttggatatttctctacattcctgaaacaannnnnnnnnnnnnnnngtactagaaaatgcaggcagtgttttcacaaaagtaaatgtacagtgatttg

SEQ ID NO: 163348 - DNA, 1228 bp, Homo Sapiens
  misc_feature (63)..(63): n is a, c, g, or t
  misc_feature (426)..(441): n is a, c, g, or t
  misc_feature (555)..(564): n is a, c, g, or t
  misc_feature (568)..(607): n is a, c, g, or t
  misc_feature (612)..(612): n is a, c, g, or t
  misc_feature (622)..(623): n is a, c, g, or t
  misc_feature (628)..(628): n is a, c, g, or t
tcagaaggtgtttacaggctgcaattacaccattggggctttgaagtaatttgtgtctgctgnatacagaccagtttaggactggtaatccaacagggacttaccagaatggttatgatagcactcagcaatacggaagtaatgttccaaatatgcacaatggtatgaaccaacaggcatatgcatatcctgctactgcagctgcacctatgattggttatccaatgccaacaggatattcccaataagactttagaagtatatgtaaatgtctgtttttcataattgctctttatattgtgtgttatctgacaagatagttatttaagaaacatgggaattgcagaaatgactgcagtgcagcagtaattatggtgcactttttcgctatttaagttggatatttctctacattcctgaaacaannnnnnnnnnnnnnnngtactagaaaatgcaggcagtgttttcacaaaagtaaatgtacagtgatttgaaatacaataaatgaaggcaatgcatggccttccaataaaaaatatttgaagactgaaaaannnnnnnnnnaagnnnnnnnnnnnnnnnnnnnnnnnnnnnnnnnnnnnnnnnnccaanacccaaaaannaaaanccctttttcccccgccctctcccccccagaaaattttttcaaaactctttcctcttgggggcgccgggcccaaaaaggtaacggaccccctgccctaccagcttgttctcccaagaaaacccctgggcaaagaaccacgccccttgaatttccccccccacaaaaaaaacgccccgcggggcgcaaacctgcagggtcttgtaaaccaattcccaggaggggagtttctcgaggctttcatatcgggaattttacccaaggggggagcgccaacgggaggtctccaatatacaaaattagcgcccccgtccctgtccaccctctatcgagagaacacgggcttaaacattcccctataaccagtttctatgcccaacacttggacaacgccccttccctaatacgccctctcgtcgtgaaccctgtaactatgcgcccgcccgcgcgacctctacgcccccgttgtcgtccgcctttgggagatatacatcacctattcgcgcgcccgagccgataaacaccaacgggggtgtgtacaaataaaaagcctcggcgtcatcatgatgtgtgcgcaccccgctgtattacaaacacacgacc

SEQ ID NO: 163349 - DNA, 1442 bp, Homo Sapiens
  misc_feature (139)..(139): n is a, c, g, or t
  misc_feature (192)..(192): n is a, c, g, or t
gagtagcaagggatatggcatatggcctggtggttttcatacccattgtgccatattggagaccattactttccggtatggctggagtggctatcatacaccattcctggtaaagtcccctgtgggattacccagtccntaaaaactgggtctgtataccagccagacacaaaaattacttcccaaagctcnccattggtgtaatttgcagcactgtaaacaccattctgagtttttgccccaaaatctcttttaagcaggctagagtaacctctgtcataattttccctgtctctaaaggtattaaatccaccccttttgcccgcagagtatctgtcccgacggtcatccttcatgcctcctctacccctggaacgacctgaacctctgtcttcgaccaactgaagcaacttgggattaattgcttgattagcttcacgaagcacagagataaggtcgctcacttgctttatgttattaggtgtaaagaaagtgtatgctgtgcctgttttggtactgcgagcagttcttccaattcgatgaatataatcctctgaggagttagggtagtcataattgatgacaaatttcacatcttccacatctagccctctggaggccacatctgtagcaatcagaataggagcttttccatgtttgaattcatttagaacccagtcacgctcttgttgactcttgtcaccatggatacccatggcaggccacccatctctcctcatttttctggtaagctcatcacatcttcttttggtttccacaaaaacaatggttttattctccttctcactcatgatctcttccattagacgaataagtttttcatccttttctacgtcatgacacacatccacaatctgaagaatgttgtggtttgcactcagttcaagtgcaccaatgtttatatgaatatagtctttcaggaaatcttcagcaagctgtcttacttcttttggccaagtcgcactccacattagagtttgcctatcaggtcttatttgatccacaatcttccttatttggggttcaaagcccatatcaagcattctatctgcttcatcaaggacaaggtaggttgttcttctcagattggtttttccacactctaaaaagtcaatcagtcttccaggtgttgcaatacagatttccacacctctctccaaatcacgtatttgtggtcccttaggagcaccaccgtagatacaagtagacttcaagcgacatgctctacaatattcagcagctacttgctgcacctgttgggccagttcccgagttggtgccagcaccaaacaaataggcccatcgcctctctctaggaatggctgatgattgatgtggacaatggcaggaagcaaataagacaatgttttcccagatccagtctgtgccactccaaccatatccaatccacttagagcacc

SEQ ID NO: 163350 - DNA, 2846 bp, Homo Sapiens
  misc_feature (2225)..(2288): n is a, c, g, or t
  misc_feature (2449)..(2449): n is a, c, g, or t
  misc_feature (2552)..(2552): n is a, c, g, or t
  misc_feature (2633)..(2633): n is a, c, g, or t
  misc_feature (2648)..(2648): n is a, c, g, or t
aaacaaaccttggggagtctttcatgtccatcatggagcagccgctcgacctgacccacattgtgggcacagaggtgaagcccaacactcctgtcttaatgtgctctgtgcctggttatgatgccagtggacatgtcgaggaccttgcagccgagcagaacacgcagatcacttcaattgcaatcggctctgcagaaggctttaaccaagcagataaggcaataaacaccgctgtaaagtcgggcaggtgggtgatgctgaagaatgtgcatctggccccagggtggctgatgcagctggagaagaagttgcattccctgcagccgcatgcctgcttccgactcttcctcaccatggagatcaaccccaaggtgcctgtgaatctgctccgtgcgggccgcatctttgtgttcgagccaccgccaggggtgaaggccaacatgctgaggacgttcagcagcattcccgtctcacggatatgcaagtctcccaacgagcgtgcccgcttgtacttcctgctggcctggtttcatgcgatcatccaagaacgcttacgatacgcaccactggggtggtcaaagaagtatgaatttggagagtctgacctgcggtcagcttgcgatacggtggacacgtggctggatgacacggccaagggcaggcagaacatctcaccggataagatcccgtggtctgcactaaagaccttaatggcccagtccatttatggcgggcgcgtggacaacgagtttgaccagcgtctgctcaacaccttcctggagcgcctgttcacaaccaggagtttcgacagtgagtttaagctggcatgcaaggtcgacggacataaagacattcaaatgccagatggcatcaggcgagaggagtttgtgcagtgggtggagttgctccccgacacccagacgccctcctggctgggcctgcccaacaacgccgagagagtcctccttaccacacagggtgtggacatgatcagtaaaatgctgaagatgcagatgttggaggatgaggacgacctggcctacgcagagactgagaagaagacgaggacagactccacgtccgacgggcgccctgcctggatgcggacactgcacaccaccgcgtccaactggctgcacctcatcccccagacgctgagccacctcaagcgcaccgtggagaatatcaaggatcctttgttcaggttctttgagagagaagtgaagatgggcgcaaagctgcttcaggacgttcgccaggaccttgcagatgtcgtccaggtgtgcgaaggaaagaagaagcagaccaactacttgcgcacgctgatcaacgagctagtgaaagggatcttgcctcggagctggtcccactacacggtgcctgccggcatgaccgtcatccagtgggtgtccgacttcagcgagaggatcaaacagctgcagaacatctcactggcagctgcatctggtggcgccaaggagctaaagaacatccacgtgtgcctgggtggcctgttcgtgcctgaggcgtacatcactgccaccaggcagtatgtggcccaggccaacagctggtccctggaggagctctgcctggaagtcaacgtcaccacctcacagggcgccacccttgacgcttgcagcttcggagtcacgggtttgaaacttcaaggggccacgtgcaacaacaacaagctgtcactgtccaatgccatctcaaccgcccttcccctgacgcagctgcgctgggtcaagcagacaaacaccgagaagaaggccagtgtggtaaccttacctgtctacctgaacttcacccgtgcagacctcatcttcaccgtggacttcgaaattgctacaaaggaggatcctcgcagcttctacgagcggggtgtcgcagtcttgtgcacagagtaaacttttctagctgcccctttctgtaatagtgaaagttggtatttaacatttattcatttttaaaatatttggaaggtctgagcttgtgaaaagaaagtggttggtctgaggttggaggaagctgaatggaatctgacggttgggagtggtggaaattggaaggataccaggaggtatttgggaaggccaatggcgtggctcctttgaggaaataaaacactaagcatgaaaaccccccgcctatcgcggcgtcgccaatatatcacccccccgtgcgtagctgacccgggcgcggcacaattaagcattgcnnnnnnnnnnnnnnnnnnnnnnnnnnnnnnnnnnnnnnnnnnnnnnnnnnnnnnnnnnnnnnnnccgttgcggttgatactcggcgtcgcacgcgagtaccccgcaccagccaggaaagtatgcgcgattgtgggttggtcgccgcgcagattactcccgcccgccccagagaacatgtttttgaattatactccccctcttatgcgcggcacgcgcccggtgcntcgacagaagaatataacagccgccagtcgcggacaccacgtttcgccatcccgccgctttctgttatgctgacggattgcgggcgcgccgccgacaaaaagnagagtgttgtttgttaacgcccccctcgtctactatatgaagatgtgctcgtgagtgccgccgcgccagccgcggagcagntagaactataagaanttacaaaccgcggaaacgtgatccatcgcagcaaagcttatattttttgagcagctttaccattatatcagatcttccgccccgccgccgctctgagacgcgacgaatatgtatgatccacatcagatcggcccgccgccctctcgttcccgccagcggcggcgcgaaaagatacgcccattgttaccactcacccct

SEQ ID NO: 163351 - DNA, 1009 bp, Homo Sapiens
gctgggattacaggcatgagccaccgcgcgcggcccgttgtttccttctaagaaacgcagtggtctctgaagcctgcaggggcaggccagccctgcactgaacgcctgttcttgccaggtggcagaaggttactgctcatttgagcagtacctgtcacccctcctcccactgctgcggctgttaactcatcttcaggtctcacaccttctgcacagtaaataagctatttttaaaagttattatttttttactctttcttgtctttggagagggtaccaaaggatagctgttctgtttaagtagggacctctcatggcctacaggctttgacatctgagaatcaaactggagaacattccgaagccgttcttataagtgtctccatctctacctgggctgaaatggaatgtgcaaatgtagcccagcctggtccttgggtgttgccagttgattgatgactgggagccaaagtggcatctcctttgacctaaacgggcgatgatgaaataaaactcaacagcctttctctcatcttgcattgtgagatgcgaaatagagcgtgtctctctgcctctcattttaggctgaggccgtccaaagcggccatgccccatgtttccactagatggcgctgacacttcaggcatcaaccctcatggcctctcagccttgcaaaggcagccacttaaagtcggtgtcctgtgtggggcaccaagctgagctgcagacacccagtaggcgcgaggcaaatgcgtcccattttaagaggcttgtatttatgagctctttgcttcctccctcccactaactttaaagaattgctctccatctcctttggcaaagttcctttgccctttgtcttatttttgtgaaaccctccaaggtatttccagtccatttgcatccaatctggcatctttacggagagcggtctcatatgctattgttgttaacgtggactagtatttatgtgttgagaacactggctgtttccaagtaaagtgcagt

SEQ ID NO: 163352 - DNA, 1039 bp, Homo Sapiens
aggacagtttccagatgctctgtgcgcatctgcatcgaatcctgattgtgtcacaggatctccaatgcggtctgagtcagagtccagctgatccggattgtgttccaaggggcaattgtcacactgatctccaaccccatccattatcagtgtctctctggtccacattgtagacgtactggcagttgtcccgttcattgaggataccgtctccatcaatgtctgcagcacaggcgtctccttccccattgttgtctgtgtctgcctgatctgggttgtggttgtaaggacagttgtcacagcggtctcccacatcatctctgtcatagtcatactgagctgggttgtaatggaatggacagttgtccctgtcatctggaattttatcattgtcatcgtcatcatcacaggcatcaccaattccatccttgtcatagtcttcctgccctgagttgggaaggttggggcaattatcctttttgcagtggtaagtcgcattggccacgcacaccaggttctcattgggccagccatccaggtctgtgtcctccccgcagatgatgccattgccagcgtagccaggcttgcactcgcagcggtacatggggtcgctatagtggcccaggtagttgcacttggcgttcttgttgcagtcgtgggtcccatccgtgcaggggttacggggcttgcacacctgagggtacaccatgctgctgttacacagagcttttgagaatcctcagatatcatggaaacaagaatccagatccctgtcatctctgagtagacagaggctccatttggaagagtgtgggttacctctgtccctccccattctccctgaggctataagcaaactttgctttatgtttatttttcttgaatttgctcagcacctaggcgtttacaagtccatctgctcacaacttattccagagcagcatttttaaatatggaagactgtttttcccctgcaggatttaccatggattttctaatcacgtttctaaaactagaccgtacattcatctcctcgccc

SEQ ID NO: 163353 - DNA, 2235 bp, Homo Sapiens
gaattggtgatgcctgtgatgatgacgatgacaatgattaaattccagatgacagggaccactatccattccattacaacccagctcagtatgactatgacagagatgatgtgggagaccgctgtgacaactgtccctacaaccacaacccagatcaggcagaaacagacaacaatggggaagaagacgcctgtgctgcagacattgatggagacggtatcctcaatgaacgggacaactgccagtacgtctacaatgtggaccagagagacactgatatggatggggttggagatcagtgtgacaattgccccttggaacacaatccggatcagctggactctgactcagaccgcattggagatacctgtgacaacaatcaggatattgatgaagatggccaccagaacaatctggacaactgtccctatgtgcccaatgccaaccaggctgaccatgacaaagatggcaagggagatgcctgtgaccacgatgatgacaacgatggcattcctgatgacaaggacaactgcagactcgtgcccaatcccgaccagaaggactctgacggcgatggtcgaggtgatgcctgcaaagatgattttgaccatgacagtgtgccagacatcgatgacatctgtcctgagaatgttgacatcagtgagaccgatttccgccgattccagatgattcctctggaccccaaagggacatcccaaaatgaccctaactgggttgtacgccatcagggtaaagaactcgtccagactgtcaactgtgatcctggactcgctgtaggttatgatgagtttaatgctgtggacttcagtggcaccttcttcatcaacaccgaaagggacgatgactatgctggatttgtctttggctaccagtccagcagccgcttttatgttgtgatgtggaagcaagtcacccagtcctactgggacaccaaccccacgagggctcagggatactcgggcctttctgtgaaagttgtaaactccaccacagggcctggcgagcacctgcggaacgccctgtggcacacaggaaacacccctggccaggtgcgcaccctgtggcatgaccctcgtcacataggctggaaagatttcaccgcctacagatggcgtctcagccacaggccaaagacgggtttcattagagtggtgatgtatgaagggaagaaaatcatggctgactcaggacccatctatgataaaacctatgctggtggtagactagggttgtttgtcttctctcaagaaatggtgttcttctctgacctgaaatacgaatgtagagatccctaatcatcaaattgttgattgaaagactgatcataaaccaatgctggtattgcaccttctggaactatgggcttgagaaaacccccaggatcacttctccttggcttccttcttttctgtgcttgcatcagtgtggactcctagaacgtgcgacctgcctcaagaaaatgcagttttcaaaaacagactcagcattcagcctccaatgaataagacatcttccaagcatataaacaattgctttggtttccttttgaaaaagcatctacttgcttcagttgggaaggtgcccattccactctgcctttgtcacagagcagggtgctattgtgaggccatctctgagcagtggactcaaaagcattttcaggcatgtcagagaagggaggactcactagaattagcaaacaaaaccaccctgacatcctccttcaggaacacggggagcagaggccaaagcactaaggggagggcgcatacccgagacgattgtatgaagaaactttcttgctatgtgagtcagtgttacataatgccatgcccacttacccccaaaatttaggaaacactgtcttgcctccttgcatcctcttaaaaaagataaaaatcccaattcctcgtttcaaagagaccaggcttagaaatagaaagtgacttgctcaaagccacaagaagagcagagacacagagctgggattcagacccaggcagggtgacttcaaattctttccattgcaccaggtgcctgtcatgctgttccttttataaggattgaatcgagtacaatcagtagcaaacttaaactctccagtaagatcacgatcgtttaaacaaacaaaagtaacatctgttccagctaaagagctgtctctggcataagcaatttttcaccgatggaggctagatctgattgggctcttgc

SEQ ID NO: 163354 - DNA, 542 bp, Homo Sapiens
ctcgcacccagcgcagacatggcagggccttcccaatggaggagtgctcttgaaatccgatgggagtggcttctcggggggcccaggcctgagccccactagttcttcctccgaggcaccacctgcttgcctctccgtcctccctctctgtgtcacgaccgttctggacacggatccactgatctccaaccccatccacatcagtgtctctctggtccacatagtagacgtactggcagttgtcccgttcattgaggatacctgaagagaacaagggacaaataagagctgggctctccagccttggatgtttccaccaaagtgcatactaatagccaggactagacagaagtacgtttggaaagctgtgcatgtccctgtctcccgcgggccctctgatcaggcagcaccttaccgtctccatcaatgtctgcagcacaggcgtctccctccccattgttgtctgtgtcagcctgatctaggttgtggttgtagcgacaattgtctcatcagtctcacacatcatcgtctgctcactgggt

SEQ ID NO: 163355 - DNA, 2616 bp, Homo Sapiens
  misc_feature (1920)..(2023): n is a, c, g, or t
  misc_feature (2030)..(2085): n is a, c, g, or t
  misc_feature (2267)..(2282): n is a, c, g, or t
gggcagtccgctggtcccgagcacgagctgtgaggggattcacttgtgtgcggaactcctcggaaccatggcgtccctttcccttgcacctgttaacatctttaaggcaggagctgatgaagagagagcagagacagctcgtctgacttcttttattggtgccatcgccattggagacttggtaaagagcaccttgggacccaaaggcatggacaaaattcttctaagcagtggacgagatgcctctcttatggtaaccaatgatggtgccactattctaaaaaacattggtgttgacaatccagcagctaaagttttagttgatatgtcaagggttcaagatgatgaagttggtgatggcactacctctgttaccgttttagcagcagaattattaagggaagcagaatctttaattgcaaaaaagattcatccacagaccatcatagcgggttggagagaagccacgaaggctgcaagagaggcgctgttgagttctgcagttgatcatggttccgatgaagttaaattccgtcaagatttaatgaatattgcgggcacaacattatcctcaaaacttcttactcatcacaaagaccactttacaaagttagctgtagaagcagttctcagactgaaaggctctggcaacctggaggcaattcatattatcaagaagctaggaggaagtttggcagattcctatttagatgaaggcttcctgttggataaaaaaattggagtaaatcaaccaaaacgaattgaaaatgctaaaattcttattgcaaatactggtatggatacagacaaaataaagatatttggttcccgggtaagagttgactctacagcaaaggttgcagaaatagaacatgcggaaaaggaaaaaatgaaggagaaagttgaacgtattcttaagcatggaataaattgctttattaacaggcaattaatttataattatcctgaacagctctttggtgctgctggtgtcatggctattgagcatgcagattttgcaggtgtggaacgcctagctcttgtcacaggtggtgaaattgcctctacctttgatcacccagaactggtgaagcttggaagttgcaaacttatcgaggaagtcatgattggagaagacaaactcattcacttttctggggttgcccttggtgaggcttgtaccattgttttgcgtggtgccactcaacaaattttagatgaagcagaaagatcattgcatgatgctctttgtgttcttgcgcaaactgtaaaggactctagaacagtttatggaggaggctgttctgagatgttgatggctcatgctgtgacacagcttgccaatagaacaccaggcaaagaagctgttgcaatggagtcttatgctaaagcactgagaatgttgccaaccatcatagctgacaatgcaggctatgacagtgcagacctggtggcacagctcagggctgctcacagtgaaggcaataccactgctggattggatatgagggaaggcaccattggagatatggctatcctgggtataacagaaagttttcaagtgaagcgacaggttcttctgagtgcagctgaagcagcagaggtgattctgcgtgtggacaacatcatcaaagcggcacccaggaaacgtgtccctgatcaccacccctgttaagcattcccacgtgctgtcgatctttggaccagtttctagcaaagttgtgtttgaaagatactctattaaagaagactgtggaatctgtttatcggtgcccattatatccttaagtttggatatttagctgaccttcgctttaacataggtctaatttatttgccgtgtcattttccatacaaatcagttgatttaaaaaagttcatttctcatactgtgcattaaaataaaaatttgaacaattnnnnnnnnnnnnnnnnnnnnnnnnnnnnnnnnnnnnnnnnnnnnnnnnnnnnnnnnnnnnnnnnnnnnnnnnnnnnnnnnnnnnnnnnnnnnnnnnnnnnnnnnccaggannnnnnnnnnnnnnnnnnnnnnnnnnnnnnnnnnnnnnnnnnnnnnnnnnnnnnnngcaaaaaagggcaataggcggttcccaaggaaaacctcggaaaaaaaataaggcttggaattctccccagaaaaaaccccccgggagaaacccaagcgttctaacaaaccccaaaggaatttcggggggaataccgggacctttcaaagggaaccccaagaaaggggaaaacaaaaattcgnnnnnnnnnnnnnnnnaaacaagagcccggggggaaaattccttgagcgcattcccgccaacgtgggaagccctccaaaaagaggccttaggaaaccctgaaagcgcccaccggaaattccccaccctggtaccactaaccccgaacaaattttgccccaggggggaaaaaacgcgggggcggaaaaaaattggggccccattttggcgccgcgcgttataaaacccacacagggggggaaataaactcccccgaggggaatgcggccccgaagaaacaaataaacctatttttccgccacaaaaaaccccttttagggagaaacccccgccggagggaatatacggcgg

SEQ ID NO: 163356 - DNA, 981 bp, Homo Sapiens
ggggactgggctgtacggtgcgcgtgacggctgcgtgcggcgggaatcatggctgctcgcagagctctgcacttcgtattcaaagtgggaaaccgcttccagacggcgcgtttctatcgggacgtcctggggatgaaggttctgcggcatgaggaatttgaagaaggctgcaaagctgcctgtaatgggccttatgatgggaaatggagtaaaacaatggtgggatttgggcctgaggatgatcattttgtcgcagaactgacttacaattatggcgtcggagactacaagcttggcaatgactttatgggaatcacgctcgcttctagccaggctgtcagcaacgccaggaagctggagtggccactgacggaagttgcagaaggtgtttttgaaaccgaggccccgggaggatataagttctatttgcagaatcgcagtctgcctcagtcagatcctgtattaaaagtaactctagcagtgtctgatcttcaaaagtccttgaactactggtgtaatctactgggaatgaaaatttatgaaaaagatgaagaaaagcaaagggctttgctgggctatgctgataaccagtgtaagctggagctacagggcgtcaagggtggggtggaccatgcagcagcttttggaagaattgccttctcttgcccccagaaagagttgccagacttagaagacttgatgaaaagggagaaccagaagattctgactcccctggtgagcctggacaccccagggaaagcaacagtacaggtggtcattctggccgaccctgacggacatgaaatttgctttgtcggggatgaagcatttcgagaacttgctaagatggatccagaagggaagcaaattgtttggatgatgcaatggcagcagataaaagtgacgagtggtttgccaaacacaataaacccaaagcttcaggttaacggaagacatgatgcagagcaagcctctgtgatt

SEQ ID NO: 163357 - DNA, 819 bp, Homo Sapiens
tggtaccggtccggaattctcgggatatcgtcgacccacgcgtcgctttctaagatggatccagagggaagcaaatgtggatgatgcaatggcagcagataaaagtgacgagtggttgccaaacacaataaacccaaagcttcaggttaacggaagacatgatgcagagcaagcctctgtgattcctgcccagcacctgtgaggcctgacgtgtcagttcccaataaatagctcttctgatttgtaatcccgtacaggcaaggaggcttgggtacgtgcagattatgtgtatttcaatactttgaaagctctagatgtaatataagaaatgaaatccaatcatgagtccaggtagagaacgcctgctgtaatctacactgttgctgggactgcgcattctgtatataactgtgtaggatgagtgacagatgattgtccagactaggacagcggcatgaacatgactttggttgggattgcgaatagttagggttacctctaaatcgtgtagctataatgagagcagctgtgcaagtgaatccacattaatgccttgtcgtggtgccattcccagcgcctgacgatacgctcttctattgtcttattctgggcaggttttgacgtttcaaattttttaaagaaattttattccttggaccaaaaggtttggttaaccacccccctcttacttgctttcacattttggggtgtcagagggaacgaaacgcatgggtgtgtgacgtgctgacgctgatctgtggagatctttcggggatatattgggaaaaatcggggtataatttaacccgaggaaatttg

SEQ ID NO: 163358 - DNA, 403 bp, Homo Sapiens
gaagagaccttggtaaaccctgattcggggtggggtgggggactaggctcagccggaaccagcacctccaaggagtccgggaggtgcctgtggtttgcacccaccactgaaaaagccgcggagatgcgcagcgcgtacactgactttggggcctgggtgtaggggttctgatcagaatttggcgggatgatatgcttgcaattttctcactggatgccctgggtagctcctgcagggtctgcctgttcccaggactgcccgaatgcttaggacacgctgagagactagttgtgatttgctattttgcctagagctttgggcttctcatttgtttttgaagttgtcagtttcttcaaatctcttttcaagtgacacattgcattacaaatgatggcacttaacc

SEQ ID NO: 163359 - DNA, 1617 bp, Homo Sapiens
  misc_feature (989)..(1006): n is a, c, g, or t
tcccctggtatccggaagtccgaaaagaaaagggtcccatccttgtggagcttctgagaatggataacgatagagttgtttcttccgtggcaacagccttgaggaatatggcactagatgttcgcaacaaggagctcataggcaaatacgccatgcgagacctggtcaaccggctccccggcggcaatggccccagtgtcttgtctgatgagaccatggcagccatctgctgtgctctgcacgaggtcacccagcaaaaaacatggagaacgcaaaagccctggccgactcaggaggcatagagaagctggtgaacataaccaaaggcaggggcgacagatcatctctgaaagtggtgaaggcagcagcccaggtcttgaatacattatggcaatatcgggacctccggagcatttataaaaaggatgggtggaatcagaaccattttattacacctgtgtcgacattggagcgagaccgattcaaatcacatccttccttgtctaccaccaaccaacagatgtcacccatcattcagtcaggctccagcaaaccttcaccaatttacatcagttcctattcctcaccagcaagagaacaaaatagacggctacagcatcaacagctgtattatagtcaagatgactccaacagaaagaactttgatgcatacagattgtatttgcagtctcctcatagctatgaagatccttattttgatgaccgagttcactttccagcttctactgattactcaacacagtatggactgaaatcgaccacaaattatgtagacttttattccactaaacgaccttcttatagagcagaacagtacccagggtccccagactcatgggtgtagcatcaagatgcccaacagaggaactctttctttctaaccttgttcagattgaggtgaaaagtccatcttgctgatttgatgattgaaatgtgaaagtgaagtggaaggaatgaatgaagtgtgnnnnnnnnnnnnnnnnnnggaggaattatcagggaactgaggaaatgttcggcagaggactttctaagctctattaaggtgtaagatctaattacttatagatcctgtagtctggtgaaggtgtgggtgacgtgatgagaggtctgagaaatgggtgaaatgaaaggggggatatgtaggtcaaatcaaattaaagatgatttttttaatgtgaataaagttatgttctgatagtttgtacagcaaaaataaaatggatgcccatgttttattgctattactaaatgtcaagattgtatgctattatgtcttgtaaatttcttttgttggtgtaaatatggaaatgccacattggttaagtgccatcatttgtaatgcaatgtgtcacttgaaaagagatttgaagaaactgacaacttcaaaaacaaatgagaagcccaaggaactgtgagcaattaaaagcaaaccgcgacaccctttgtctccaccacacatagtgtactttggaagcacaacgtccaggctggtaccgcagcgccatgcccattcctcgcctcattcataggacacttcactgccattttctattcacataaaagaaaaataaatgtggaaatttcatccttgga

SEQ ID NO: 163360 - DNA, 412 bp, Homo Sapiens
tgctctagaggatcctcacacacctgagtcgacattggagcgagaccgattcaaatcacatacttccttgtctaccaccaaccaacagatgtcacccatcattcagtcagtcggcagcacctcttcctcaccagcactgttaggaatcagagaccctcgctctgaatacgataggacccagccacctatgcagtattacaatagccaaggggatgccacacataaaggcctgtaccctggctccagcaaaccttcaccaatttacatcagttcctattcctcaccagcaagagaacaaaatctggggaggacaaaggtgattttcctgtgtccacatctaacaaagtcaagattcccggctggacttttgcagcttccttccaagtcttcctgaccagactcaggtggtgtg

SEQ ID NO: 163361 - DNA, 351 bp, Homo Sapiens
tcggtccgctgatgtgcagatcttgaagaaggagaagacggagtgcctgcagaaagagctccggagaacctgaaaagtgtgaatgctgaactgaaggctcagattgaggagctcaagaacgagaagcagcatttgatatacatgctcaaccttcatcggcccacgtgtattgtccgggctcagaatgggaggactccagaagatgagagaaacctctttatccaacagataaaagaaggaacattgcagagctaagcagtcgtggtatgggggcgactggggagtcctcattgaatcctcattttatacccaaaaccctgaagccattggagagctgtcttcctgtgtacc

SEQ ID NO: 163362 - DNA, 428 bp, Homo Sapiens
  misc_feature (392)..(392): n is a, c, g, or t
  misc_feature (410)..(410): n is a, c, g, or t
gtcgacgttggtcctctgccctgggattctagaggtacacaggaagacagctctccaatggcttcagggttttgggtataaaatgaggattcaatgaggactccccagtcgcccccataccacgactgcttagctctgcaatgttccttcttttatctgttggataaagaggtttctctcatcttctggagtcctcccattctgagcccggacaatacacgtgggccgatgaaggttgagcatgtatatcaaatgctgcttctcgttcttgagctcctcaatatgagccttcagctcagcattcacactttccagcttctccgactcctgggggacaagcaacagaggcatcaagaaaggagccaagggccagtgaggagggggtggcctgngctgctgcctggatgcangggtgtacctgggacaca

SEQ ID NO: 163363 - DNA, 844 bp, Homo Sapiens
  misc_feature (808)..(808): n is a, c, g, or t
  misc_feature (832)..(832): n is a, c, g, or t
gcgagagttgcttttgcgcgcgaactgtaagtgccagggtctcagggtcaggtcgcggctggtcactgtgcaggcgcttgggtgacgcgacgatctcagcggatctggtcaccttcgtctccccgccatggagacctcagcactcaagcagcaggagcagcccgcggcgaccaagatcaggaacctgccctgagacagggtctcgctctgtcgcccatgctggagcgcagtggtgtgatcacagctcagtgtaacctcaaacattggggttcaagccattctcctgcctcagcctccgaagaactgggacttttagagggttgaaaaataccggccacagaccctgaatgatctcatttctcatcaggacattctgagtaccattcagaagtttatcaatgaagaccgactgccacacttgcttctctacggtcccccagggacaggcaagacatctaccatcctagcctgtgcgaaacagctatataaagacaaagaatttggctccatggtcttggagctgaatgcttcagatgaccgaggaatagacatcattcgaggaccgatcctgagctttgctagcacaaggacaatatttaagaaaggctttaagctagtgatcttggatgaagcagacgccatgactcaggacgcccagaatgccttgagaaaagtaattgagaaattcacagaaaataccagattctgcctcatctgtaactatctgtcaaagatcatcccctgccttgcagtcccgctgcacgaaggttcggttcggtccccttgattctgaacttatggttcccgncttggaacatgtctggaaaaaganaaagttgtttta

SEQ ID NO: 163364 - DNA, 625 bp, Homo Sapiens
tgacgcacacacacgcacagccgacaagacttgatactaactcaagtagtcatatgatcgattaagatttgggcgtgcttagggaagaaagagctaattaaaaagaaatcaaggttattacagtccatgtatcttcctgtgtatgcttttaaagtccttgtaaccattgagttacagggctttaactcctgtgtctgaaaaatcacaaacactgatgacaatcaaagcctcatcttaaggccccgtagaagatgccaatcaaaataaactgcattcctgaggcactaggcaagaaattaaagctattcaactcctcaaggcccagggactattgcggaagaggtgggcgcgtaagattgtaagggccgattttgaaagatccagtaagttcagtttctctatgaactaatcattcaagtcaaaggcacactgatgcaaaatcagtatatggaccccggtgtctgattagcaaggttttctacagcatcactggccaaggagctgacacaccccctgttggtgtctttattattgaaagagaaacaggatggctgaaggtgacagagcctctggatagagaacgcattgccacatacactctcttcactcacgctgtgtcatccaa

SEQ ID NO: 163365 - DNA, 754 bp, Homo Sapiens
tctcaggcacctgaccctgtacgtggggattgaagatcggaggaatcgtgtgtcgtgactgaccgctgttgctggtgcttaccctccttaaggtcagcagcttgaaccaccagggtatcgtagggaaactctctcggtccagcccagtggtgaccacactgatgactcctgtgttcctgttaatggtgaacatatttttgtcagggagctcaggatcttggctgaggatggtgtaagcgatggcggcattgtaggtgttcacatcatcgtccgcgtctgtggctgtgacctccatcacagaggttcctggaagagcaccttccatgacagaccccttaaagacctcctgggtgaattcgggcttgttgtcattctgatcggttaccgtgatcaaaatctccattggatcctcaactgcattcccgttggatgacacagcgtgagagaagagagtgtatgtggcaatgcgttctctatccagaggctctgtcaccttcagccatcctgtttctctttcaataataaagacaccaacagggggtgtgtcagctccttggccagtgatgctgtagaaaaccttgccttctttgtctttgttggatttgatctgaaccaggtttttaggaaatgggcctttttcattttctgggcagctcgatgggaggaataacccagtctctcttctgtcttctgagtccaggagaggagttgggaaatctgagcaacttctgcttggagttagcgatacaatttc

SEQ ID NO: 163366 - DNA, 960 bp, Homo Sapiens
gggcccgcacccccacttgacacagataggtttgtgctactggtgtccggcctgggcctgggtggcggtggaggcgagagcctgctgggcacccagctgctggtggatgtggtgacggggcagcttggggacgaaggggagcagtgcagcgccgcccacgtctcccgggttatcctcgctggcaacctcctcagccacagcacccagagcagggattctatcaataaggccaaatacctcaccaagaaaacccaggcagccagcgtggaggctgttaagatgctggatgagatcctcctgcagctgagcgcctcagtgcccgtggacgtgatgccaggcgagtttgatcccaccaattacacgctcccccagcagcccctccacccctgcatgttcccgctggccactgcctactccacgctccagctggtcaccaacccctaccaggccaccattgatggagtcagatttttggggacatcaggacagaacgtgagtgacattttccgatacagcagcatggaggatcacttggagatcctggagtggaccctgcgggtccgtcacatcagccccacagcccctgacactctaggttgttaccccttctacaaaactgacccgttcatcttcccagagtgcccgcatgtctacttttgtggcaacacccccagctttggctccaaaatcatccgaggtcctgaggaccagacagtgctgttggtgactgtccctgacttcagtgccacgcagaccgcctgccttgtgaacctgcgcagcctggcctgccagcccatcagcttctcgggcttcggggcagaggacgatgacctgggaggcctggggctgggcccctgactcaaaaaagtggttttgaccagagaggcccagatggaggctgttcattccctgcagtgtcggcattgtaaataaagcctgagcacttgctgatgcgaaaaa

SEQ ID NO: 163367 - DNA, 1213 bp, Homo Sapiens
  misc_feature (1017)..(1017): n is a, c, g, or t
  misc_feature (1138)..(1138): n is a, c, g, or t
ggggcaggcgcgcggggattggcgggatgcggcgcgccgcgcgtgaacctccttggcctgggcgaagctgtgtggaccaagcaagtcaggagtgtggccatgttttctgagcaggctgcccagagggcccacactctactgtccccaccatcagccaacaatgccacctttgcccgggtgccagtggcaacctacaccaactcctcacaacccttccggctaggagagcgcagctttagccggcagtatgcccacatttatgccacccgcctcatccaaatgagacccttcctggagaaccgggcccagcagcactggggcagtggagtgggagtgaagaagctgtgtgaactgcagcctgaggagaagtgctgtgtggtgggcactctgttcaaggccatgccgctgcagccctccatcctgcgggaggtcagcgaggagcacaacctgctcccccagcctcctcggagtaaatacatacacccagatgacgagctggtcttggaagatgaactgcagcgtatcaaactaaaaggcaccattgacgtgtcaaagctggttacggggactgtcctggctgtgtttggctccgtgagagacgacgggaagtttctggtggaggactattgctttgctgaccttgctccccagaagcccgcacccccactttgacacagataggtttgtgctactggtgtccggcctgggccttgggtggcggtggaggcgagagcctgctgggcacccagctgctggtggatgtggtgacggggcagcttggggacgaaggggagcagtgcagcgccgcccacgtctcccgggttatcctcgctggcaacctcctcagccacagcacccagagcagggattctatcaataaggccaaatacctcaccaagaaaacccaggcagccagcgtggaggctgttaagatgctggatgagatcctcctgcagctgagcgcctcagtgcccgtggacgtgatgccaggcgagtttgatcccaccaattacacgnctcccccagcagccccctccacccctgcattgttcccgctggcccactggcctacttcaacgctcaagctgggtcaccaaccccctacccaggccacccatttgatggaagtccgaatttnttggggggacatccagggaacggaaaccgtggaatggaaaattttttcccgaatacacggcaggcatggggaggg

SEQ ID NO: 163368 - DNA, 1143 bp, Homo Sapiens
tgaatggcacatagctaagatcctgtgggagatcacccgcttcttcctgctggccatcgagctgagtgtgatcatcctgggcctggcctttggccacctggagagtaagtccagcatcaagcgggtgctggccatcaccacagtgctgtccctggcctactctgtcacccaggggaccctggagatcctgtaccctgatgcccatctctcagctgaggactttaatatctatggccatgggggccgccagttctggctggtcagctcctgcttcttcttcctggtctactctctggtggtcatccttcccaagaccccgctgaaggagcgcatctccctgccttctcggaggagcttctacgtgtatgcgggcatcctggcactgctcaacctactgcaggggctggggagtgtgctgctgtgcttcgacatcatcgaggggctctgctgtgtagatgccacaaccttcctgtacttcagcttcttcgctccgctcatctacgtggctttcctccggggcttcttcggctcggagcccaagatcctcttctcctacaaatgccaagtggacgagacagaggagccagatgtacacctaccccagccctacgctgtggcccggcgggagggcctggaggctgcaggggctgctggggcctcagctgccagctactcgagcacgcagttcgactctgccggcggggtggcctacctggatgacatcgcttccatgccctgccacactggcagcatcaacagcacagacagcgagcgctggaaggccatcaatgcctgagggcagctgccagggcctgtggaggacaggccagagaggaggccagcaggcccagagtccccaggggaggaggaccaggtcaagggacgttctgtgggcagtagccctgtgtggccctgttcccaccatgagtctggaggccccacctccctggggctcccaatcccctttgccatctctgctctcactgggggaccctcctccccttcccacctggctctcatactgctcagtgacatgggcccaggctttccttccagggccatgctttggcaaggtgggctgaaggcacccttccttctctggaccctttggcaccaagggcaaggcctgggctctccccatgc

SEQ ID NO: 163369 - DNA, 296 bp, Homo Sapiens
tcattctcacacccagtgctatctgcctcattgcccagcatcaggaagcaaggagtatggtgcaattaagacaaccacctgggccatggaatcaggaatggggtcaggtcagttgacccgagcatacccattaaacatgttcaaatgtccccatcccacccactcacatgacatggctcccgagccctgagatctgtatcccaagaacctcagttgagaaatctttatggcagcttcactgttgctcaagagcctgggtattgtagcagcctgggggcaggttgtccctaatgttc

SEQ ID NO: 163370 - DNA, 1542 bp, Homo Sapiens
  misc_feature (82)..(91): n is a, c, g, or t
atataccaacctaaagagtaagggtctaaacttgagttgcctgagactcccactttaaagaagtatcccaaggatgagaccnnnnnnnnnntactacagcgcctctaaggactggagtcttactagcccacatcagccccagcatggaagaattgtggttgaggctgggagggaggcaaactgttcccgtagtgtcttgtacagttttctcagaagactcaagatttcgcccacatccctttgagctcccgctagatctgccgcccggctgcatttgtcccactcttcaggacagagttagctgccctctttctttacttcatagtctttgtaagggctcggccaagcgtgggcccgtgggatggagaattccttttggggaggctggttctgcagctgaaaatgtgtggaatagggggcatagagcgtgtcccctgtctcttcaaaaccttgagtgatttcctcttgagagtaggctctgttctccacaccatagctcttcttcacgagttgaggtttacagaaagcatcctcaacaggataatccatggggtttcgttgctttgtgagcagccaaaactcgggactaacataagccaacaggaacacccagccattggcagccaaggcggagctgaggatggtgtcatcccacctgcggtcaaagtcaggaagcatgagcagggtgatccaggccacccagatggcaatggagaggagcatcgtgaggtagatgtgggccccatgtctcttccagcccgtgaaggaaccacagaaggtgaaggaggacatgaggaaggtcagcgccatcaagaagaggacgtaggtgagcaggaggacaaagtcttcattgcgacgaggagcggaaagctcagaaaagacattgacgttggtcccttattcatggtcaggacaatatattcaatagcgataacatactggactaggctgaagcccacggacagacccagaatcaccaacagggaaaggggcttcctcccccggacgagcttggtcagactgacagcatgagccagcaggcaggagaagcagatggaaaagaggatcccaaagaggaagaagcgtgtgggccctgtgctcccgtccagtccgatgatgaaggcgaaggtgaggccaaagatgccgcaacacacccaggaggaagagaaactgagtaggctgcatttttcgcctgttggagtcctgcaccttgcagacgaggatcgggagagtgagcatgaaggccagcgaggtcacaaccccggctgtggccaccgtttctaggacgatgccccaagcttcagccttatcacaaagtctgtagtacttggatttcaggccatttgcggcaaccatcagggactgttgtaagccattctggaccctaatgccaaggcgttggccgtgaacttggtgctgcttcccgcgcgcaagagggcagcaggcgagctcctctctgccaaacgcagagaggacacagggaagcttacagcagaatttttgctgtttatagctctcttggggaaggaaacacatgcacaa

SEQ ID NO: 163371 - DNA, 894 bp, Homo Sapiens
  misc_feature (847)..(847): n is a, c, g, or t
agacttcggaccaccatcagccgcgccaagcccgtctggtatgccggccgggacccagcggctgctccagccaccggcaacaagaagtacccacctgacggagctgcagcgcctcctggacacggccttcgacctggacgtcttcaagaacttctcgtagatgctgcctagggttgcttgggccactgccctctccacacccatgactgccccttgcttctcaactaaagaatagtgcctcagcgctgcccacaccaccgccctcctcgctgtgccaccacccctccctctgctctcataggagttaggctgtcgtccccctccagtgcttggctgccccacaggccacacgctgcccaggctctgctgacttctgagcagttttccaggaggccggggggagcaggaggaggaaaggtagcccccgagggatgtccttggggaggggtcagctctggccacaatcctccccaccagtctcacccactaggataggaactgggccttgtgtgctggcttccgctgtcacccagcaaggcacaggctcctgtatttgagactaggatagcttcatcttgagcctgagccttagaatctgtagaggagcctggagtcggatctagccatggctggcagaggtttctagggtgggccccagccgtggcgtgaactgaggatgacccggggcagctgggcagggagagagccttggcctgacctggcacagaaagggcagcttcagtctctgcagtgtccattatctgctgttccttcgagggttcagggcttgtgttgtggggccccagcatgccccaaccacccctcctgggcccaggcagcacctggnaggccacccgattctgtgtggtaaccagggaaaccccggctcagggc

SEQ ID NO: 163372 - DNA, 2399 bp, Homo Sapiens
  misc_feature (740)..(753): n is a, c, g, or t
ctgtaccaatccctgaagctcactaatggcatttggattttggccgaactacgtatccagccaggaaaccccaattacacgctgtcactgaagtgtagagctcctgaagtctctcaatacatctatcaggtctacgacagcattttgaaaaactaacaagactggtccagtacccttcaaccatgctgtgatcggtgcaagtcaagaactcttaactggaagaaattgtattgctgcgtagaatctgaacacactgaggccacctagcaaggtagtaactagtctaacctgtgctaacattagggcacaacctgttggatagttttagcttcctgtgaacatttgtaaccactgcttcagtcacctcccacctcttgccacctgctgctgctatctgtccttacttgtgggcttctccatgctgtgccaatggctggctttttctacaccctcttttgagtgtagtttggtattttgtaattgagagctcatttcaaaagcagaaaaagacaacaaatattaaagcaaggaaaagtgtaactgaaacactgcactttactgttttatacttttgtacatatgagaaatcaagggattagtgcaaccagtagaaagcattgaaatgactgtcattaaccacacagtcctggaggcagagatgcagttacctaccctagcttttgatgggttctcttacctgtagtagccttatccctggtcatttggattttcagtttgcnnnnnnnnnnnnnncccctccaaactccttttccttggccaagccttcatgcttccccctttccatattataatctcatttgattgctctgcagttgggaacggtgatcttcttgaatgatgtttcagtgtgcaaaaactatagagcctgtcagcaccaaagctgacagaagttataccttactcctttcctttcccctgaacaaacctgctaatcccactaattcaggaatttgagtagagatggggaacaagaacccagatgctgtcccctcaccccctctcctgtatttctcaggtccagttcaaatctaaaattctacttttagagttgaaacagagtaataacttatctaaccctcttttcctacaaaggagaaagataaaaggcacaaaggttaccgccaaggcccgtcagctgtgtagtggcaaagccgagaccgagtctcctaagtccccgtcagtgtggttttcaccacaggactgtctcttgtcgttttcccctaatgccttctcctgccttttctgtgcctagtttttggctcttcacatattccatattgattttgacgctctgtatattggcatcaggtggcagctgaatatcttttgaattactcgaaggtaaagccagatgccagaatgaaggtgtagccagtgtttcccatatgcccctggagccccacttattgaggccagcagaataggtgcagagatgaagtgagcttagagatgttgcaaatgctctttatcccttcagctctctgatctgctctctcttcatgatacttagtctgcagggcatattaagatcatcccagaggttcaggcagttcctgtcatctctgaaaagactgggggatatgaaatcttccccctaccccacttaatgcgttgggatatgatttttcaaagaatgccttcatgcccaaaataccagcctgtttagcagtgttacactgtttgatctgcgggcacttgttgcattgcctggcacccaatattcagggtccatgactaagactggtcttctcagatgccctgcttaaatcaggggcacttcaggctccacaggcgtcatgttggactgagacctaactcactggactcagaggaggaatcgtggaaaacaagagcaaaactaccccacacccctatttcatgtctgaaataaccctgtttcataccagttgcaaagcttgtggggagcggtcccacaaagcactttcttaaaccttgagaatctccaagagaaaaatatttggggaaggagggaggaaatatgtcccttgcacaccacccctgaagcacatggcagtaggaaacagcataggattgtatgtgggaggtggataggtcggtgatgtgtggagcggaaaagcaggttggtaaagttcccttcttgggacttattcctggagtcagtggatacaagtagtgcagaaggttcacactgcaaatagtgttctcatctcaaagcaaactatcattccagaaggaaaagtgcctcagggcaagcagacaacacaatttcctatcagaatatgtccctcaacccccgaaacaaggcttctctcagcctccccaccagtgatggatgacagctcctacttctcagctgacctgactgagccaaccatagtgcttcatgttggttaagc

SEQ ID NO: 163373 - DNA, 300 bp, Homo Sapiens
ggaatacctaccaggaggccatggacatcagcaagaaggagatgccgcccaccaaccccatccgcctgggcctggccctgaacttttccgtcttccactacgagatcgccaacagccccgaggaggccatctctctggccaagaccactttcgacgaggccatggctgatctgcacaccctcagcgaggactcctacaaagacagcaccctcatcatgcagctgctgcgagacaacctgacactgtggacggccgacaacgccggggaagaggggggcgaggctccccaggagccccaga

SEQ ID NO: 163374 - DNA, 409 bp, Homo Sapiens
ggctcggtacccagcaggcttgggccccagattaagatgtcaatcctgatgaggctgtggccattggagctgccattcagggaggtgtgttggccggcgatgtcacggatgtgctgctccttgatgtcactcccctgtctctgggtattgaaactctaggaggtgtctttaccaaacttattaataggaataccactattccaaccaagaagagccaggtattctctactgccgctgatggtcaaacgcaagtggaaattaaagtgtgtcagggtgaaagagagatggctggagacaacaaactccttggacagtttactttgattggaattccaccagcccctcgtggagttcctcagattgaagttacatttgacatcttaatctggggcccaagcatgcggcgtgg

SEQ ID NO: 163375 - DNA, 1122 bp, Homo Sapiens
cgagttagtacccatgcaagctgggtccagaagaatcattgtaagatagggcaaattgatgtcagtctgcacagatgaggagagttcacatttagccttttcagcagcttcccgtaccctctgaagtgccatgttgtctttagtcaaatcaacccctgtctctctcttgaactccttcacaatgtgccgtagcaaggcctggtcaaagtcttccccacctaagaaggtatccccatttgtggatttcacctcaaatactcctttctgaatttccaggatagaaatatcaaaagttccaccacctaaatcatatacagcaatgactttgtcttctgatttgtctagaccataggcaagagcagcagctgtgggctcattaatcacccgaagcacattcagtccagatatctggccagcatctttagtggcctgtctctgcgagtcattgaaataagctgggactgtgatcacagcattttttgctgtgtgccccaagtaattttctgcagtctctttcatcttcatcaacacaaatgctccaatctgactcggagaatacaatttcccatgagcctcaacccaggcatcaccattggaggcacggacaattttaaagggaacatttttaatgtctttctgtacttcaggatcatcatatcgccggccaatgagacgcttggtagcataaaatgtattgtttgggttggtgacagcctgtcgcttggccggcattccaacaagtcgctcaccatctgctgtaaaggccacaactgaaggggtggttctggcaccttcggcattctccagcacctttgcttgtttaccttccataactgccacgcaggagttggtagtacccaaatcaataccaacaactgctcccttgattgcttctgatgcataatcccgccttgaaacaagtctaaaagcctcatgactaaggccattccagctatcctggtggcgggcggccgtagggccccgggaggctgcggcgcccacgagacgggctgctgcagctcggctggcacttatcatggcggataaatggaggagtacgaggcagcaaaccgacgcgtgggtcgacgatatcccggaaacctccggacctgtaccagcctt

SEQ ID NO: 163376 - DNA, 1602 bp, Homo Sapiens
cagaaaggagcatttgaggcgaaatccacattttgggataccttcttaggtggagaagacgttggaccaggccttgctacggcacattgtgaaggagttcaagagagagacaggggttgatttgactaaagacaacatggcacttcagagggtacgggaagctgctgaaaaggctaaatgtgaactctcctcatctgtgcagactgacatcaatttgccctatcttacaatggattcttctggacccaagcatttgaatatgaagttgacccgtgctcaatttgaagggattgtcactgatctaatcagaaggactatcgctccatgccaaaaagctatgcaagatgcagaagtcagcaagagtgacataggagaagtgattcttgtgggtggcatgactaggatgcccaaggttcagcagactgtacaggatctttttggcagagccccaagtaaagctgtcaatcctgatgaggctgtggccattggagctgccattcagggaggtgtgttggccggcgatgtcacggatgtgctgctccttgatgtcactcccctgtctctgggtattgaaactctaggaggtgtctttaccaaacttattaataggaataccactattccaaccaagaagagccaggtattctctactgccgctgatggtcaaacgcaagtggaaattaaagtgtgtcagggtgaaagagagatggctggagacaacaaactccttggacagtttactttgattggaattccaccagcccctcgtggagttcctcagattgaagttacatttgacattgatgccaatgggatagtacatgtttctgctaaagataaaggcacaggacgtgagcagcagattgtaatccagtcttctggtggattaagcaaagatgatattgaaaatatggttaaaaatgcagagaaatatgctgaagaagaccggcgaaagaaggaacgagttgaagcagttaatatggctgaaggaatcattcacgacacagaaaccaagatggaagaattcaaggaccaattacctgctgatgagtgcaacaagctgaaagaagagatttccaaaatgaggggagctcctcggctagaaaagacagcgaaacacggagaaaatattagacaggcagcatcctctcttcagcaggcatcactgaaagctgtttcgaaatggcatacaaaaagatggcatctgagcgagaaggctctggaagttctggcactggggaacaaaaggaagatcaaaaggaggaaaaacagtaataatagcagaaattttgaagccagaaggacaacatatgaagcttaagagtgaagagacttcctgagcagaaatgggcgaacttcagtctttttactgtgtttttgcagtattctatatataatttcccttaatttgtaaatttaatgaccattaacctagtgaatcttttatgggaacatggattctaacaggattaaagttcaccattattctggcgatggaaagcacccaactccaggcattttatgctcgggtgccacaaaaaacaggttactcaaatgggctacccggcccatacacgttgtctccggacacccatttattga

SEQ ID NO: 163377 - DNA, 1408 bp, Homo Sapiens
  misc_feature (1114)..(1126): n is a, c, g, or t
  misc_feature (1172)..(1172): n is a, c, g, or t
  misc_feature (1237)..(1237): n is a, c, g, or t
  misc_feature (1285)..(1285): n is a, c, g, or t
  misc_feature (1292)..(1292): n is a, c, g, or t
  misc_feature (1311)..(1311): n is a, c, g, or t
  misc_feature (1353)..(1353): n is a, c, g, or t
  misc_feature (1359)..(1359): n is a, c, g, or t
  misc_feature (1366)..(1366): n is a, c, g, or t
  misc_feature (1371)..(1371): n is a, c, g, or t
  misc_feature (1392)..(1392): n is a, c, g, or t
gggtttctgctaaagataaaggcacaggacgtgagcagcagattgtaatccagtcttctggtggattaagcaaagatgatatgaaaatatggttaaaaatgcagagaaatatgctgaagaagaccggcgaaagaaggaacgagttgaagcagttaatatggctgaaggaatcattcacgacacagaaaccaagatggaagaattcaaggaccaattacctgctgatgagtgcaacaagctgaaagaagagatttccaaaatgagggagctcctggctagaaaagacagcgaaacaggagaaaatattagacaggcagcatcctctcttcagcaggcatcattgaagctgttcgaaatggcatacaaaaagatggcatctgagcgagaaggctctggaagttctggcactggggaacaaaaggaagatcaaaaggaggaaaaacagtaataatagcagaaattttgaagccagaaggacaacatatgaagcttaggagtgaagagacttcctgagcagaaatgggcgaacttcagtctttttactgtgtttttgcagtattctatatataatttccttaatttgtaaatttagtgaccattagctagtgatcatttaatggacagtgattctaacagtataaagttcacaatattctatgtccctagcctgtcatttttcagctgcatgtaaaaggaggtaggatgaattgatcattataaagatttaactattttatgctgaagtgaccatattttcaaggggtgaaaccatctcgcacacagcaatgaaggtagtcatccatagacttgaaatgagaccacatatggggatgagatccttctagttagcctagtactgctgtactggcctgtatgtacatggggtccttcaactgaggccttgcaagtcaagctggctgtgccatgtttgtagatggggcagaggaatctagaacaatgggaaacttagctatttatattaggtacagctattaaaacaaggtaggaatgaggctagacctttaacttccctaaggcatacttttctagctaccttctgccctgtgtctggcacctacatccttgatgattgttctcttacccattctggaannnnnnnnnnnnnaaataaatacagaaagcatcttgatctcttgtttgtgaggggtgangccctgaggtttagcttcaaggaatatgccatggctcatgcttcccatatttcccaaagaggggnaatacagggtttgctaacactggggtaaaaatggcaaatttcaagggntttgggnaggggctgtttttaatggnaattatgggggccggtttccggccaggtggccaaaaccttgntttggnagggggnttttnatttttctcccccccttgggngccccttggggggccc

SEQ ID NO: 163378 - DNA, 907 bp, Homo Sapiens
  misc_feature (626)..(626): n is a, c, g, or t
cgacgaggatgatgtgcgtcttcacggtggtcatgacctacagtatcacctgccccatcatcgtgcccttcgggctcatgtacatgctgctgaagcacctggtagacaggtacaatctctactacgcctacctgccggccaagctggacaagaagatccactcgggggctgtgaaccaggtggtggccgcgcccatcctctgcctcttctggctgctcttcttttccaccatgcgcacggggttcctagctcccacgtctatgttcacatttgtggtcctggtcatcaccatcgtcatctgtctctgccacgtctgctttggacacttcaaatacctcagtgcccacaactacaagattgagcacacggagacagatactgtggaccccagaagcaatggacggccccccactgctgctgctgtccccaaatctgcgaaatacatcgctcaggtgctgcaggactcagaggtggacggggatggggatggggctcctgggagctcaggggatgagcccccatcatcctcatcccaagatgaggagttgctgatgccacccgacgccctcacggacacagacttccagtcttgcgaggacagcctcatagagaatgagattcaccantaaggggagggaggggccctggaggccacatcctgccccaccccacccccactcccacgggacactaaaacgctaataatttattagatctaaagccccttcctccccagcccctgctttcatttaaggtattttaaacttggggggtttccactgcttctccccccatgatgggaaggaaggggaccccccccaaccttcggggaggaagagcccccgaacccggccccgggggcaaaaaagggggtgcaaaagggaaatttccccccaaatcaggaccc

SEQ ID NO: 163379 - DNA, 1032 bp, Homo Sapiens
atcaagaatcgacatcagcttcctcctggcgctgctttaacctaaaggactgaggaaatcagaactcccagaagctttttcaaaaagtcataaaacagaaaacaaaaatctctttctgtctgcaaaattccaatggtgtgttgaatcgcctcttcctagggacaagccgcccgctgagctagcaaggaatgcatttcagttcatccacttccggcagttcacagctccacagtgacacggaatcttgtgctggtcatcttcaaagtcaaacttatagtcatagcagagctcttctcctattctggatatctccgactggagctgatgataatcatcgtgtcctctctcaaaagtcaccacttcagaccacacaataaggtgcacacgaatggttgatatacctatgcgggccctccagtgagcgtcgcgtcaatcacatggtcgtcatccatgcggaacatgtacacaccacggttctgagactcataaagcttctctttcctgttggctacttcgtttcgaatgatagtcccgatgtactcaatgaccatggtgtgtttctcaatgtctcgagcagcatacaggcccagcccctgaatccgagaccgtgccagatacacattggatttccattcagttttcatcttccggtactgcgatgacttggagtgaacaaactgtttactataaggtgcgttcagttctccagtgactgtgctctgaaatgactttgaggtgctggtgctgtttaaggtgtgaggcctcttgacatgggcactcattttaggttcagaacgggcacaacctgtggggttaacggcaagaggaagttccatgagaggatttcggccgtatcggaaggtataattttcacatgcctcaaccccaggaagtgattccgctatgcgtgccactgcagagacggtcaggccaaacagatcctctccttttaaatacgctgggaaaagctggagcatttcagacttttttctcacacatgccacaggctccaaatcttaacccacacaccgg

SEQ ID NO: 163380 - DNA, 1108 bp, Homo Sapiens; identical to SEQ ID NO: 2156
  misc_feature (174)..(200): n is a, c, g, or t
  misc_feature (385)..(395): n is a, c, g, or t
  misc_feature (990)..(1068): n is a, c, g, or t

SEQ ID NO: 163381 - DNA, 577 bp, Homo Sapiens
tctagaggatcccacgaaagggacatggggggtatggaatcttccttagacttacttttgtaaaaatgtccccacggtacttactccccactgatggaccagtggtttccagtcatgagcgttagactgacttgtttgtcttccattccattgttttgaaactcagtatgctgcccctgtcttgctgtcatgaaatcagcaagagaggatgacacatcaaataataactcggattccagcccacattggattcatcagcatttggaccaatagcccacagctgagaatgtggaatacctaaggatagcaccgcttttgttctcgcaaaaacgtatctcctaatttgaggctcagatgaaatgcatcaggtcctttggggcatagatcagaagactacaaaaatgaagctgctctgaaatctcctttagccatcaccccaaccccccaaaattagtttgtgttacttatggaagatagttttctccttttacttcacttcaaaagctttttactcaaagagtatatgttccctccaggtcagctgccccatttccctttctcccccatttccctttcg

SEQ ID NO: 163382 - DNA, 880 bp, Homo Sapiens
tccaggacaggttgctgaggttcagcaggtactgcggccagcagaaaagctggtgacaagcatgaccaagcagctgggtgacttctggacacggatggaggagctccgccaccaagcccggcagcagggggcagaggcagtccaggcccagcagcttgcggaaggtgccagcgagcaggcattgagtgcccaagagggatttgagagaataaaacaaaagtatgctgagttgaaggaccggttgggtcagagttccatgctgggtgagcagggtgcccggatccagagtgtgaagacagaggcagaggagctgtttggggagaccatggagatgatggacaggatgaaagacatggagttggagctgctgcggggcagccaggccatcatgctgcgctcagcggacctgacaggactggagaagcgtgtggagcagatccgtgaccacatcaatgggcgcgtgctctactatgccacctgcaagtgatgctacagcttccagcccgttgccccactcatctgccgcctttgcttttggttgggggcagattgggttggaatgctttccatctccaggagactttcatgcagcctaaagtacagcctggaccacccctggtgtgtagctagtaagattaccctgagctgcagctgagcctgagccaatgggacagttacacttgacagacaaagatggtggagattggcatgccattgaaaactaagagctctcaagtcaaggaagctgggctgggcagtatcccccgcctttagttctccactggggaaggaatcctgggacaagcacaaaaacttaaccaaaagtgatggtaaaaatgaaaaggccaaataaaaaatctttgggtaagggaaacagcca

SEQ ID NO: 163383 - DNA, 222 bp, Homo Sapiens
agacatgatacaatcagctcggtaccctcggcaatctcaattgagatacctcaatgattcaacgagtaccgggggttagaggtatatgaaaagatgagaagctcacactgggcttcttcagttacaaaaccccgttgggatcacacccactcttcttcgtgccctctttatggtgacattggtttggggtgcagatctttaggtgctagggcaacatagatt

SEQ ID NO: 163384 - DNA, 308 bp, Homo Sapiens
cctaggttttcgcagtttcaatagcagtttcaattgaaggtgctgtttgtagacttaacacccagtgaaagcccagccatcatgacaaatccttgaatgttctcttaagaaaatgatgctggtcatcgcagcttcagcatctcctgttttttgatgcttggctccctctgctgatctcagtttcctggcttttcctccctcagccccttctcacccctttgctgtccagtgtagtgatttggtgagaaatcgttagctgcacccttcccccaggcagcaatgtgctattgaaacttctaaaatctagg

SEQ ID NO: 163385 - DNA, 791 bp, Homo Sapiens
  misc_feature (470)..(480): n is a, c, g, or t
  misc_feature (488)..(538): n is a, c, g, or t
  misc_feature (648)..(648): n is a, c, g, or t
  misc_feature (652)..(652): n is a, c, g, or t
  misc_feature (654)..(654): n is a, c, g, or t
  misc_feature (656)..(656): n is a, c, g, or t
  misc_feature (664)..(664): n is a, c, g, or t
  misc_feature (677)..(677): n is a, c, g, or t
  misc_feature (686)..(686): n is a, c, g, or t
gggattatgcctatggtgccactgggcacccaggcatcatcccaccacatgccactctcgtcttcgatgtggagcttctaaaactggaatgacaggaatggcctcctcccttagctccctgttcttggatctgccatggagggatctggtgcctccagacatgtgcacatgaatccatatggagcttttcctgatgttccactccactttgtatagacatctgccctgactgaatgtgttctgtcactcagctttgcttccgacacctctgtttcctcttcccctttctcctcgtatgtgtgtttacctaaactatatgccataaacctcaagttattcattttattttgttttcattttggggtgaagattcagtttcagtcttttggatataggtttccaattaagtacatggtcaagtattaacagcacaagtggtaggttaacacttagaataggaattggtgttnnnnnnnnnnntttgcaannnnnnnnnnnnnnnnnnnnnnnnnnnnnnnnnnnnnnnnnnnnnnnnnnnacattcttgctgctgcgctgcaaagccatagcagatttgaggcgctgttgaggactgaattactctccaagttgagagatgtctttgggttaaattagaagccctaccanacgnangngggggggnaatgggaaaaaanccttttccnttcaccatttcccaacccaacccttcccccttaaaacccctctggccttttgaaaagtaagaattcatggtttcacctggcaaatggcttggaacaccttacagg

SEQ ID NO: 163386 - DNA, 1202 bp, Homo Sapiens
  misc_feature (54)..(65): n is a, c, g, or t
  misc_feature (471)..(480): n is a, c, g, or t
  misc_feature (759)..(783): n is a, c, g, or t
tacaggtatctgtccctgggccagcagggacctctgaagccttctttgtggccnnnnnnnnnnnncatcctggtggtttttctaatggactttcaggaattttgtaatctcataactttccaagctccaccacttcctaaatcttaagaactttaattgacagtttcaattgaaggtgctgtttgtagacttaacacccagtgaaagcccagccatcatgacaaatccttgaatgttctcttaagaaaatgatgctggtcatcgcagcttcagcatctcctgttttttgatgcttggctccctctgctgatctcagtttcctggcttttcctccctcagccccttctcacccctttgctgtcctgtgtagtgatttggtgagaaatcgttgctgcacccttcccccagcaccatttatgagtctcaagttttattattgcaataaaagtgctttatgccggcttttctccnnnnnnnnnncgcccggggccaccctaacctttctgaccacgtccagatgaagttccagcgcccctcattacatcaataaacagccagtcccgcccgagctcaaataatgaaataagagccaataacttgcctccccgcgcgcaccatcggcccgaaaaacacttttcccgcaactcttcgttcggggcaccgcggtcccccaaacgagggagggtgaccccgggactcccccccgttggttccaaaggaaaaaatctggtccccagagacctaaaggagtttgtcggnnnnnnnnnnnnnnnnnnnnnnnnngcgcccgtctatgggagacgacaccccccccgcgactttttctcccccaacggttttttacctagaaggacgcaccgtccccgacgaaagtctcctctactccctggggacttttccgcgcccgcgagaggatgcccccacgagcgggcgtgccctctaataaataaaatgttccaccgcccccccttttctgtttttcccctcttcgttttcccgaacaacgcgggtgttaaaccccttgtacaccccacccctatcttctggttataaggaaaaggccgtataacatagaggggggggagtgaatcacacccgcgacaccgcgccccccaccttgttgacgcggggcccggccgtgggcaaagccgtgagaccccgccgccgccgcaacaaaattggggctagagataccaacgccc

SEQ ID NO: 163387 - DNA, 840 bp, Homo Sapiens
ggggacgcgccgaggtactaggcagagccgtggaaccgccgccaggtcgctgttggtccacgccgcccgtcgcgccgcccgcccgctcagcgtccgccgccgccatgggagtgcaggtggaaaccatctccccaggagacgggcgcaccttccccaagcgcggccagacctgcgtggtgcactacaccgggatgcttgaagatggaaagaaatttgattcctcccgggacagaaacaagccctttaagtttatgctaagcaagcaggaggtgatccgaggctgggaagaaggggttgcccacaatgagtgtgggtcagagagccaaactgactatatctccagattatgcctatggcgccactgggcacccaggcatcatcccaccacatgccacctctcgtcttcgatgcggagcttccaaaactggaatgaccaggaatgggcctcctccccttaactcccctgttcttggatctgccatggagggatctggtgcctccagacatgggcacatgagtccatattggagcttttcctgatgttcccctccacttttggtatagacatcctgccctgactgaatgggttctgtcactcagcttttgcttccgacacctctggtttcctcttcccctttctcctcgaatgggggtttacctaaacttatttgccataaacccccagttattctttttaattttgggtttcatttttgggggggaagatttcagtttccatccttttggaaatataggtttcccatttaaagaaattggtccaggtatttaaccccccaaggggggaagggtaaacctttgaaaataggaatttgcgggttt

SEQ ID NO: 163388 - DNA, 814 bp, Homo Sapiens
  misc_feature (78)..(122): n is a, c, g, or t
tgtaccggtccggaatttcgggatatcgtcgacccacgcgtgcggccgtggaaccgccgccaggtcgctgttggtccnnnnnnnnnnnnnnnnnnnnnnnnnnnnnnnnnnnnnnnnnnnnnatgggagtgcaggtggaaaccatctccccaggagacgggcgcaccttccccaagcgcggccagacctgcgtggtgcactacaccgggatgcttgaagatggaaagaaatttgattcctcccgggacagaaacaagccctttaagtttatgctaggcaagcaggaggtgatccgaggctgggaagaaggggttgcccagatgagtgtgggtcagagagccaaactgactatatctccagattatgcctatggtgccactgggcacccaggcatcatcccaccacatgccactctcgtcttcgatgtggagcttctaaaactggaatgacaggaatggcctcctcccttagctccctgttcttggatctgccatggagggatctggtgcctccagacatgtgcacatgaatccatatggagcttttcctgatgttccactccactttgtatagacatctgccctgactgaatgtgttctgtcactcagctttgcttccgacacctctgtttcctcttcccctttctcctcgtatgtgtgtttacctaaactatatgccataaaacctcaagttattcattttattttgttttcacttttggggtgaagattccgtttcagtcttttggatataggttccattagtcctgtccagtatttaccgcgcagtggtggttcccttgaatgatgggtgg

SEQ ID NO: 163389 - DNA, 1074 bp, Homo Sapiens
gccctgtcgctgccgccgcccgctcagcgtccgccgccgccatgggagtgcaggtggaaaccatctccccaggagacggtgagtagtggcgcgcggcggtcggagtacctctgccgccgggcgcatcggctcatgcatgcccgtctctgtctccgtcagggcgcaccttccccaagcgcggccagacctgcgtgtgtgcactacaccgggtatgcttgaagatggaaagaaatttgattcctcccgggacagaaacaagccctttaagtttatgctaggcaagcaggaggtgatccgaggctgggaagaaggggttgcccagatgagtgtgggtcagagagccaaactgactatatctccagattatgcctatggtgccactgggcacccaggcatcatcccaccacatgccactctcgtcttcgatgtggagcttctaaaactggaatgacaggaatggcctcctcccttagctccctgttcttggatctgccatggagggatctggtgcctccagacatgtgcacatgaatccatatggagcttttccctgatgttccactccactttgtatagacatctgccctgactgaatgtgttctgtcaactcaggctttgctttccgacacctctgtatcctcttccccattactccatcgtatgtgtgtatacctaaactatatgccataaacctcaagttattcattttatttcgttttcattctggggtgaagattcagtttcagtctttcggatataggtttccaattaagtacatggtcaagtattaacagcacaagtggtagtttaacacttagaataggaactcggtgctgggggggcggcttttgcaagcaactactcccacttctcaacttcccggcatgaaccttccatctactcatatattaaaccattcttgctgctgcgctgcacacgccatagcagacttcgcaggcgctgctgaggacctgaacttactctccaacgccgacacactgtcaccgggctcaccctcaccaagccctacctaaaaccgaggcggcggatggggacacgccttagcctcccccg

SEQ ID NO: 163390 - DNA, 1010 bp, Homo Sapiens
  misc_feature (489)..(497): n is a, c, g, or t
agccaaactgactatatctccagattatgcctatggtgccactgggcacccaggcatcatcccaccacatgccactctcgtcttcgatgtggagcttctaaaactggaatgacaggaatggcctcctcccttagctccctgttcttggatctgccatggagggatctggtgcctccagacatgtgcacatgaatccatatggagcttttcctgatgttccactccactttgtatagacatctgccctgactgaatgtgttctgtcactcagctttgcttccgacacctctgtttcctcttcccctttctcctcgtatgtgtgtttacctaaactatatgccataaacctcaagttattcattttattttgttttcattttggggtgaagattcagtttcagtcttttggatataggtttccaattaagtacatggtcaagtattaacagcacaagtggtaggttaacattagaataggaatcggtgttnnnnnnnnntttgcaagaatattttattttaattttttggatgaaatttttatctattatatattaaacattcttgctgctgcgctgcaaagccatagcagatttgaggcgctgttgaggactgaattactctccaagttgagagatgtctttgggttaaattaaaagccctacctaaaactgaggtggggatggggagagcctttgcctccaaccattcccaccaacctccccttagaccctctgcctttgacagtagatccatgttcactgcaatgctggacactacaggtatctgtaccctgggccagacagggacctctgaagcccttctatgtggccttagagaatggaagaagcacagtgggtatcaaccaaaagaggaacttacgcggaaagtgtgagcaaaccctacagtaactatcccaaaggcaccccgacagatcccgtaacacctcaaggcaacattaagcgggcacagatcccattggaaaggggccaggaaggaaaacctgaaacgca

SEQ ID NO: 163391 - DNA, 900 bp, Homo Sapiens
  misc_feature (778)..(785): n is a, c, g, or t
ggaaccgccgccaggtcgctgttggtccacgccgcccgtcgcgccgcccgcccgctcagcgtccgccgccgccatgggagtgcaggtggaaaccatctccccaggagacgggcgcaccttccccaagcgcggccagacctgcgtggtgcactacaccgggatgcttgaagatggaaagaaatttgattcctcccgggacagaaacaagccctttaagtttatgctaggcaagcaggaggtgatccgaggctgggaagaaggggttgcccagatgagtgtgggtcagagagccaaactgactatatctccagattatgcctatggtgccactgggcacccaggcatcatcccaccacatgccactctcgtcttcgatgtggagcttctaaaactggaatgacaggaatggcctcctcccttagctccctgttcttggatctgccatggagggatctggtgcctccagacatgtgcacatgagtccatatggagcttttcctgatgttccactccactttgtatagacatctgccctgactgaatgtgttctgtcactcagctttgcttccgacacctctgtttcctcttcccctttctcctcgtatgtgtgtttacctaaactatatgccataaacctcaagttattcattttattttgttttcattttggggtgaagattcagttccagcccttttggatataggtttccaattaagtacatggtcaagtattaacagcacaaggggtaggttaacattacaataggaaatggagttnnnnnnnnttgcaggaatatttatttaatttttggatgaatttttatctatatatattaacatctgtgcgctgggtggcaggccatagcgaattgaagcgctgtgtaggactgaattatctca

SEQ ID NO: 163392 - DNA, 1189 bp, Homo Sapiens
tagccaggccggcaggaatgcagaaagtggtcgcgtacagatacaggggagggtgagtcaacggaaacgcggaagggggaagagcgaaaacggggggtaagagggggaaagcgagaatatgaaggttgcgcacaggaggggaggcacataaaaaatgacggacagcaagaggacccaaaaaaagggtggggcgtcacgacggagttggtcccccacttagtgtttcccggcatgtccgggcacccggagcgttgtccccgggacttcggtttgtctcttaatgggagggggtgggggtctccagttcctccatccggcaactcgtcagcgaacatgtccagggagggtgggggtgtgggattatggggtcctagggtctgacaccccaaacccttcagacgcatagccaaccgttcccttgtttcctggtacacaccaaggttgccccgggccaccatctggtcggccaacccggagagccgggtccaggccgctgagggggaactgggttgccccaggcccctttctcccctttgcctcctcctcggggcccccagacgcctcagtgccccagccactgtctctctaggcaataggagctccaaaagtccctccaagagggcttgggcactcattgaggtctggcccaagctgtcctcctcctccgagtctgaggcctggcgctggccaggtggccgctcccggatcttcacccagtcaatgttgtccagccagctgtctcggatctgagcatcccggttcaggaagtagttgccatcggcatcaaagtggccttcctccatctcctcctgcaggttaaagggtgtgatccgaacacccccctcgctggggagtgtggctgcctcctgaccttctacatcctctgaggccaagatgtcatatttgctggaccccccatcatcatcatcctcctcctcatcgctatccaaagagtgtttgcctttaaagcggctcccaggaccccctgacccagccacagggtccaccagcttcttcttggggacaatgatttcatcctcatcctcctcatctcccacgccttggaaggtcactttcctctttggcatgacggggcaaagaggtgtttctcaagctgggaatccgcggaaggcgaggtggaaaaaagaagagatgcttgcgccagggctacatccggggcacccgccgc

SEQ ID NO: 163393 - DNA, 1064 bp, Homo Sapiens
  misc_feature (987)..(1006): n is a, c, g, or t
ctagctcgtaccgtctggtgttgctgctcagtttgtctctgctcccatgtaggcctaaagtcaccccactccttagtgcctgcacctcaccacgatattagaggaagcacaggacatccaagggtactctccagttttggctgtggagacttgagcaagccctaaagtcccctgctccctggacttctcctgggttgtgcttttttgggggcaacataccttggacaaagctgagctgacagctaatgtttattagcctcctacctaagtcagtcactttgctaaattcttcacctgtggtaactcattttgattgttataacatcgcagcaccattattcccattttaatgatgaggaaactgagtcatagaggatacagacttgcccaaaggagagccaggattttcacaccccctcctcaagctgggcctgccctccaagtgcttgttatatacctccacgggtgtcagcccagatgactcctcacccatccaccacctgcagcttgagatgttaactattagagctccattcttttggttcaaaacgttgatacttacttagatgttccctgagaggagtgtttatttctgagtaaggggctttgttgaaagagggggttagagagagcaagacagcacttgagtgcactggcaggaagcagagataagacttgaatttcagtttggtagaccaccttctttagcagcccaacctgtagcaaatctagtttagcctgcatggcagggagagggattctcttcccaccctcaccatttgcaagtggcaggagctgagaatgccagtacgagagtgtagccaaagtgagaggctgagagcaaaggagacatttttttcagttttgagtcgagtatccagacagaggcaaatcattttgtttaactttttattaaagtgtaactatagaaaacccttccatggattttttcccaagggggaagcactggcattacaatccggccannnnnnnnnnnnnnnnnnnngtcaagaattcccctttcccagtttaacctaccccttcttccaagggggaaaaacccc

SEQ ID NO: 163394 - DNA, 937 bp, Homo Sapiens
ccagtgccagagggcctagggttggggtcctcgctcaggcacagagacccgacaacgtagcggcggcttccccgggtatcgagggacgcgcacgccagaggagacgaaaggaacccgggtcggaccagatcggaaccactgaccattgcccatggcggccctaggccatagcagccagaatgtcactgaatacgtcgttcgagttcctaagaatacaaccaaaaaatataacatcatggcttttaatgcagccgacaaagtcaactttgctacgtggaatcaggctcggctggagcgggacttgagcaacaagaaaatctaccaagaggaggagatgcccgaatcgggcgcgggcagtgagttcaaccgcaagcttcgggaggaggctcggaggaagaagtacggcatcgtcctcaaggagttccggcccgaggaccagccctggctgctccgggtcaacggcaaatcaggcaggaagttcaagggcatcaagaagggaggcgtaacagagaacacgtcctactacatcttcacccagtgccccgacggggccttcgaggccttccccgtgcacaactggtacaattttcacaccgcttggcccggcatcgcacgctcaacttgccgaagaggccgaggaaggagttgggagaaggaggaaccaaggggcttgaacccactttcaagacattcatgcagcaagccggggggctccaagggtccccggagccgagacgaggatgaggaggaagaaggggaaaacgtgggccgcaggaaggggagcgagcttgtgcattccacgagctggtaggggcgacctgggagaatgtcgtccgatgccccgttgatgccccagtggtggaacgagcgggggggagaagtcccccaagggcccagaagaaaggcggccgcttggccaaggggcggcggagcgaac

SEQ ID NO: 163395 - DNA, 1001 bp, Homo Sapiens
ggacgcgtgggtccgccgcggggcctgctcctgccgcgcgcacccccggggcttcggctccggcacgggtcgcgcccagctttcctgcacctgaggccgccggccagccgccgccatgggtgcctacctctcccagcccaacacggtgaagtgctccggggacggggtcggcgccccggcctgccgctgccctacggcttctccgccatgcaaggctggcgcgtctccatggaggatgctcacaactgtattcctgagctggacagtgagacagccatgttttctgtctacgatggacatggaggggaggaagttgccttgtactgtgccaaatatcttcctgatatcatcaaagatcagaaggcctacaaggaaggcaagctacagaaggctttagaagatgccttcttggctattgacgccaaattgaccactgaagaagtcattaaagagctggcacagattgcagggcgacccactgaggatgaagatgaaaaagaaaaagtagctgatgaagatgatgtggacaatgaggaggctgcactgctgcatgaagaggctaccatgactattgaagagctgctgacacgctacgggcagaactgtcacaagggccctccccacagcaaatctggaggtgggacaggcgaggaaccagggtcccagggcctcaatggggaggcaggacctgaggactcaactagggaaactccttcacaagaaaatggccccacagccaaggcctacacaggcttttcctccaactcggaacgtgggactgaggcaggccaagttggtgagcctggcattcccactggtgaggctgggccttcctgctcttcagcctctgacaagctgcctcgagttgctaagtccaagttctttgaggacagtgaggatgagtcagatgaggcggaggaagaagaggaagacagtgaggaatgcagcgaggaagaggatggctacagcagtgaggaggcagagaatcgtacctgctgctg

SEQ ID NO: 163396 - DNA, 994 bp, Homo Sapiens
  misc_feature (56)..(56): n is a, c, g, or t
ggaatgggccggagtgaagccaccccagtttcccccctggcacacttcataccccnttgttaggctaaaggaaaaagacaaaactcagtctcaggtccggagggctcagaaaacagtctaggtgggcaggggtctggatgactgctagtctcgcttggccttcttcttcttgtcgctgttgccattttcttcagccccctcagtagagagcacctcctctagttttcgcttgccactctctggctggagctctgctgtgtttcggggcttgaagcaaatgatgatgcaggtcatgttgtcacaccctgtaccatccccagaagtgtctggtgccaggcactgatccagcagctcttccacaatggatgacaataaccgaagctccccattttcatcacgctggctgatctttgattgaatgaaatctacaacttcctggctgctcatcacattccagatgccatcacaggcaatgaccatgaattcatggtcgtcagtgagagtcagcaccttgatgtcaggaagggctgaaatcatctgttcctcaggtggcaggttcttgtttctcttatagaagtggtccccaatggctctggagaggttgaggcccccgttgactcgcccatccatggtgaccttgccaccagcattcttgatgcgtgctagttctacttcatcctctggtttgtgatcataggacatgtctaaagctttgccagcctcagataccacacagcgagagtctcctgcgttggctacaatcaactgcttccctcgtatcagggccaccaccgctgttgtaccactgtcagagccaggctcctctttgccttccatccctggcaccatcatctcttcttcttcttcttcatcgtcctcttcagcctcctcggtgtcatcctcatcttcctcattctctgccgtacgcgtgggtcgacgatatcccgggaattccggactccgggtaaacccacgccctgccttttcttttaaa

SEQ ID NO: 163397 - DNA, 1910 bp, Homo Sapiens
  misc_feature (837)..(872): n is a, c, g, or t
  misc_feature (1153)..(1193): n is a, c, g, or t
  misc_feature (1426)..(1426): n is a, c, g, or t
  misc_feature (1492)..(1492): n is a, c, g, or t
  misc_feature (1620)..(1710): n is a, c, g, or t
tataagagaaacaagaacctgccaccgtgaggaacagatgatttcagcccgttcctgacgatcaaggtggtgactctcactgacgaccatgagattcatgggtcattgcctgtgatagacatctggaatgtgatgagcagccaggaagttgtagatttcattcaatcgaaagatcagccagcgtgatgaaaatggggagcttcggttattgtcatccattgtggaagagctgctggatcagtgcctggcaccagacacttctggggatggtacagggtgtgacaacatgacctgcatcatcatttgcttcaagccccgaaacacagcagagctccagccagagagtggcaagcgaaaactagaggaggtgctctctactgagggggctgaagaaaatggcaacagcgacaagaagaagaaggccaagcgagactagcagtcatccagacccctgcccacctagactgttttctgagccctccggacctgagactgagttttgtctttttcctttagccttagcagtgggtatgaggtgtgcagggggagctgggtggcttcactccgcccattccaaagagggctctccctccacactgcagccgggagcctctgctgtcctccccagccgcctctgctcctcgggctcatcaccggttctgtgcctgtgctctgttgtgttggagggaaggactggcggttctggtttttactctgtgaactttatttaaggacattcttttttattggcggctccatggccctcggccgcttgcacccgctctctgttgtacactttcaatcaacactttttcagactaaaggccaaaacctatnnnnnnnnnnnnnnnnnnnnnnnnnnnnnnnnnnnnaaaaatgaacaccattacagagcaaaacacccccaagtaaaaacgacccaacccaaacaaactttgcccgcgcccttcggcccccgcaaaaaccttttcaaaacactttccgttggccgccgcggcgccccggaaggaacctaaaccttggccaaacccttgttccctaagggaaacctcggcgtattaacgtagggcctgtgaattcccccccaaataaaacaccccccggtgggttcacccgcgatttgctcctggaacccaatattccaaaggggcgnnnnnnnnnnnnnnnnnnnnnnnnnnnnnnnnnnnnnnnnnggggattccccggcgcgggccctttcaattttcccgttccgcccgtccttcggactcggggctacccttacctccgcccggaatatgtcggcgggaacatcctgtaataaagaggcctcctttcttgcggccctaaagtgggggggagccgccctcttctcccccatcacactttcggcgacgcgtcggaatcgaaccacccccgctaatataaccccgcgcccgcgcgcgcngcgcgccaatttattacaggcgccccgcttgtgcgcccgccgcggaattgttgcggggatataatntcgacgcaccatattatttttggcggaccagccgctggggcgcgacacaaccacatcgcgcggagtgtgttacacaataaacacgacgaccggcgcgcgtgtcccccatatatatatagtgatgggtnnnnnnnnnnnnnnnnnnnnnnnnnnnnnnnnnnnnnnnnnnnnnnnnnnnnnnnnnnnnnnnnnnnnnnnnnnnnnnnnnnnnnnnnnnngctccgcgccgttcttctaacaaaacccagcacacagcgattcccgcttttttatctctttttcagcaacagataaacacgcctctttttggcgcgcgcggggaaaaatacaccgccggcggcgtcgcggatgtgatttttctctctcatctgccgcgggtataacacccgacagcaccggccactcctatcatctcgct

SEQ ID NO: 163398 - DNA, 1061 bp, Homo Sapiens
  misc_feature (189)..(230): n is a, c, g, or t
  misc_feature (241)..(416): n is a, c, g, or t
  misc_feature (700)..(700): n is a, c, g, or t
  misc_feature (838)..(871): n is a, c, g, or t
  misc_feature (897)..(953): n is a, c, g, or t
taccctttcaacatctcatttctgtgtgcagagctgctggattcaggccctgggtttgcccaggctgtatgaccttgagcaaagttattctgagcttcactttcttcctctatgatggagaaaataatgatagcacttacctctatagagttatgaaaatttagtaagataatccatgtatgcatttannnnnnnnnnnnnnnnnnnnnnnnnnnnnnnnnnnnnnnnnngttcacaccgnnnnnnnnnnnnnnnnnnnnnnnnnnnnnnnnnnnnnnnnnnnnnnnnnnnnnnnnnnnnnnnnnnnnnnnnnnnnnnnnnnnnnnnnnnnnnnnnnnnnnnnnnnnnnnnnnnnnnnnnnnnnnnnnnnnnnnnnnnnnnnnnnnnnnnnnnnnnnnnnnnnnnnnnnnnnnnnnatgagccaccatgcccagcctattactcttaagcctagttatttaaatcaaacatttagtgagctcttacatgatgttataggagactctgaagattctcaactgttgattcctgttcataaggcagttatagtcttgttgagaactaagttttatgcagataaataaactagaaagtgtatggtgaattgccgaaagagagaacaaaagtactgtcagtgcgcagtaactgggaagaaaacagtagtccaaagtagaggggccaaactttgaggaggaggctntggagtctggaagtgaggaaagagtgggaagggcattttatgctctgacagctacaagagcagagtcagagatatttgtaactcccagttaggagatttgaataacagaagtactcttgagtatatggtgacaaaccnnnnnnnnnnnnnnnnnnnnnnnnnnnnnnnnnnggaaacgggagtcctcgctcttgtgnnnnnnnnnnnnnnnnnnnnnnnnnnnnnnnnnnnnnnnnnnnnnnnnnnnnnnnnngttcaagcaattcctctgggcccaacctccaatctggcgacttggattggcttcctaacagctctgttccctccggcgttgggtttcaataaatatctggatgacgtt

SEQ ID NO: 163399 - DNA, 504 bp, Homo Sapiens
tcccaggaccagtcttaatacttctctctgttctcacacttccctgctagttttctacccttataattttgcaaaaagtcaaaagaagaaaaagtactaaaacttacaccatttgatttttctctttgctactgctagtttgaaagggccctctgcatagcctgttttcacatttcctttgcattgctttattttctttcactgttggcgtgatgatctgatttgaggaggtgccgccgtgggctttcctgatagtagttcatcttttacagtttctgtctctcagggtgtgagtctctctttgacactgaacacagcagccattccactgaactgacttgcttccaagagaccatcctcacttcactaagacagtagctcattcctggagagatttcctgccttgatggtttttaagcaaatctttagtcctagggagttttattaagaccctgacagaagtattaagacacaaaaacacattcacttaagactggtcctgga

SEQ ID NO: 163400 - DNA, 764 bp, Homo Sapiens
  misc_feature (13)..(13): n is a, c, g, or t
tacggaatctaancgatctcacgggttggcctcgtacgggggtagagggggtgctatagggtaaatacgggccctatttcaaagatttttaggggaattaattctaggacgatgggcatgaaactgtggtttgctccacagatttcagagcattgaccgtagtatacccccggtcgtgtagcggtgaaagtggtttggtttagacgtccgggaattgcatctgtttttaagcctaatgtggggacagctcatgagtgcaagacgtcttgtgatgtaattattatacgaatgggggcttcaatcgggagtactactcgattgtcaacgtcaaggagtcgcaggtcgcctggttctaggaataatgggggaagtatgtaggagttgaagattagtccgccgtagtcggtgtactcgtaggttcagtaccattggtggccaattgatttgatggtaagggagggatcgttgacctcgtctgttatgtaaaggatgcgtagggatgggagggcgatgaggactaggatgatggcgggcaggatagttcagacggtttctatttcctgagcgtctgagatgttagtattagttagttttgttgtgagtgttaggaaaagggcatacaggactaggaagcagataaggaaaatgattatgagggcgtgatcatgaaaggtgataagctcttctatgataggggaagtagcgtcttgtagacctacttgcgctgcatgtgccatgcgttcgtaacggccggggcatcctct

SEQ ID NO: 163401 - DNA, 139 bp, Homo Sapiens
gggattattgctaggatgaggatggatagtaatagggcaaggatagttcagacaggtttctatttcctgagcgtctgagatgttagtattagttagttttgttgtgagtgttagtaaaagggcatacaggactagaagg

SEQ ID NO: 163402 - DNA, 135 bp, Homo Sapiens
ctcatgagtgcaagacgtcttgtgatgtaattattatacgaatgggggcttcaatcgggagtactactcgattgtcaacgtcaaggagtcgcaggacgcctggtatcatcataacagggtcagtgccagtcgcga

SEQ ID NO: 163403 - DNA, 512 bp, Homo Sapiens
cccaccatcagcttagtcctcggcgccctgccataaataagcatcctttacttccagggcgaggtcaacgatccctcccttcccatcgggtcccttgaccagcaatggtactgcacctacgagtacaccttctaagacggaataatcttcacctcctacatgcttcccccactattcctagaaccaggcgacctgcgactccttgacgttgacaatcgagtagtactgccgattcaagcccccattcgtataataattacatcacaagtcgtcttgcactcatgagctgtcaccccattaggcttaaaaccagatgcaattcccggtcgtctaaaccaaaccactttcaccgctacacgaccgggggtatactacggtcaatgctctgaaatctgtggagcaaaccacagtttcatgcccatcgtcctagaattaattcccctaaaaatctttgaaatagggcccgtatttaccctatagcaccccctctaccccctctagagccaaaaaaa

SEQ ID NO: 163404 - DNA, 397 bp, Homo Sapiens
tgatttggattctgaagatgtagtggattttggcctgtttgatggctccgcggcggttcatcgtcgggaacttggcctcgtcctcactgcgcatagactgtttgcaaatccacgtcctccaggaaatactgaacagacatcaacaccttggcctgaggctgcaggtccagccagaactcagccttgccattgttcttcttgcagcgctcggccagcaccgacacacccacggtcacctcagacactggctcctctgctgcccgcattagcacaatctggatgacgcgcccctcatagatgtgggcatcgaacgtcgacttccactcaggatacatggtcggcttcttctgcaccagtgtttgtcccgcaatgagagatttgggatactctagagtcg

SEQ ID NO: 163405 - DNA, 205 bp, Homo Sapiens
atgctatgctcggggcgggagaaggagacgtaagcatcactgtttcccatatataagcgcaggagtgagaggtctctcttcactgatttagatatgcaaaagctggtatgttcagtaggaactgtacatgtgttgggaggcataaagactaattagcaaccataatatggtcactacccctaatagactaaatgaaatcttgcaa

SEQ ID NO: 163406 - DNA, 2092 bp, Homo Sapiens
  misc_feature (76)..(76): n is a, c, g, or t
  misc_feature (87)..(87): n is a, c, g, or t
  misc_feature (283)..(283): n is a, c, g, or t
  misc_feature (305)..(306): n is a, c, g, or t
  misc_feature (329)..(329): n is a, c, g, or t
  misc_feature (341)..(341): n is a, c, g, or t
  misc_feature (372)..(373): n is a, c, g, or t
  misc_feature (384)..(384): n is a, c, g, or t
  misc_feature (387)..(388): n is a, c, g, or t
  misc_feature (403)..(403): n is a, c, g, or t
  misc_feature (405)..(406): n is a, c, g, or t
  misc_feature (412)..(415): n is a, c, g, or t
  misc_feature (419)..(419): n is a, c, g, or t
  misc_feature (422)..(423): n is a, c, g, or t
  misc_feature (1031)..(1047): n is a, c, g, or t
  misc_feature (1072)..(1099): n is a, c, g, or t
gcaggcgcgcgcccatcctgttaatttatgtcccgactaatcaacgccgggggtcggggtgctcatctgaggcaanatgcgtagcangatcccttatattttgtatatccagcttggatctaaggtggcgcgaggactagctagaggccagcgcgtcggagtgagatctcgctcggctcagcgcacggcggggaggagtggggacggatcactacagacgtgtcgctgtggcgggccccccacgaatcacaagccgcggcgcgtgggaaacaaagtacgtcgnccccggcgcccgccccctctcnngagactctttttttgagatgacnctcgagggggangaaaaaagaagggtctcgtcctcgtccccgnnccgggcgtganaanngacgggtcgatattngnncccgtnnnnaggnganngtcgtatgtttatctctgccgcgaagctgcgccgagtaacacgcataacgagtggagtggcagccaagatgatatcaatcggcatccgcgcagtcgctatgcgtttcgagcaggcggagatcgtttgtcggacgctgaggctgtgagcgaccgaccacgggtcacgcgcgtgtccctacacgagatatgatcttctgcacgctccggcgcggcgagtttgcgggggagcgtgcggtataggagcatacaaaggggcggcgggcgcgagcctcacgtgtgtatagattatcccccagacctgccgatccgttgcgcgcacccccccctctttcggatagataagcgcgccgtgccaaaccggcccaccccggtagggccgccgccgttctggggcgtgtcggttttccggcgaaaccccgctgggggtaccccccacccccaatcttcttttttttggcatggtcaagcacaacgcgcaaacgcccatggtggggaggcccccgagggtgtttgtttaggtcagctcactcgctgttcccccaactcaccccctgccacattgggtggggcggcgccgcccccacaaagtggtgtaaacaaggtttttnnnnnnnnnnnnnnnnnccgacaaaaaaatccttcatcgccnnnnnnnnnnnnnnnnnnnnnnnnnnnncaggtacattggcggcggtgccggccgcgggcaaaataaatctactacggtgtgtcgcataaaataagatttctgttccaggccacttttatttaaacagaagcagcggccccacagccacggggacatgtcttccagacagtagacacagtgcctgtggctgtaagagcctgacagggaagattcatgcctttctccttggcccccatgaccaaagaagaaaataaaaatcacacaccatacactgccacacccatctccacccctccctttcagtaatatccaagtattcatccttctggccaaagaaactggctacaattctgattctaaagaaaaccttcatgcagccaagaaactcagggctctggaggggagagccttactctgatactttccacatgcactgcccactggcatcaagtttaactccatccaaaaccatcacatggatggccagggacaggactggctacaaaaaaacaccatgaactcagctcaccatgctaagaagactgcctctttccaggcaagattttactggagcaacataaccggagggtgtgattccaaaataccttcctttccaagccccgggttgtggataaggtctggattttggttatatgactaagggcgacagaggctgctggcatctctggccaccgtcccagtggcttagggttggaggcttcactggcaaaacaatggcactgtttaactagctcgtgttaaccattcatctacagcaagtagaatcatcagttttgcactgagcaaggaagcacatgggtctcctatgagagctaatgccagaattcacatgctttgtaaaatataggatgaggtttctttctttcttctgccccctccagaggccaaatgggtagggtggttcctttgccttctgagtgcctggatgcccccagcctcaaagacctgctagaactgcaggtgcaagcttggtggatggtgacccttcatgatctaaga

SEQ ID NO: 163407 - DNA, 1225 bp, Homo Sapiens
  misc_feature (1205)..(1205): n is a, c, g, or t
  misc_feature (1207)..(1207): n is a, c, g, or t
acatgatcccgtatcgttctttcagaatcaaaccccactgtagtaaattcagtgccgtccaatcctaagctcagagaaagtccatttccgttccagagggaagggacctccctaggtccttccctggcttgttataacgcaaagcttggttgtttatgcaactctatcttaagaactgcccagcctcagctgaaaacccgaatctgagaaggaattgcgtcatgtaagggaagctggaattaagggagctgagccagtcatggttgtggcgtgtgagtcaggagacctaggtttcagcccctctctactgtcagcgagctgtgcaacgtgggcaagtcattgtcctctgagctgcagtttcctcatctgtcacatcgctacagacaagacctccctggaacccttctgattgtcttagacactgtggttgcaaaacccacggaaagcctcatttgtgtggaaagtcagaggaaaaatgatccagtggacacttggggattatctgtcattcaagatccttccttcaaccccaaggccagctcccatctcatttccagaaaggctcatacctggcttgcagggtaagcatctgtcctgttcattccaggtgccagaatcctctcagagtcattgaagggtgttcacccatcccacccaaggcttggcacactgccagtgtcttagcagggtcttgtgagggctgggggcatccaggcactcagaaggcaaaggaaccaccctacccatttggcctctggagggggcagaagaaagaaagaaacctcatcctatattttacaaagcatgtgaattctggcattagctctcataggagacccatgtgcttccttgctcagtgcaaaactgatgattctacttgctgtagatgaatggttaacacgagctagttaaacagtgccattgttttgccagtgaagcctccaaccctaagccactgggacggtggccagagatgccagcagcctctgtcgcccttagtcatataaccaaaatccagaccttatccacaacccggggcttggaaaggaaggtattttggaatcacaccctccggttatgttgctccagtaaaatcttgcctggaaagaggcagtcttcttatgcatggtgagctgagtgcgatggcctttttttgtagccaatcctgtccctggccatcatgtgatggttttggatggagctananttgatgccagtgagtgag

SEQ ID NO: 163408 - DNA, 1217 bp, Homo Sapiens
aacggaagaaccaattgtaaaggtggttgaaagggaactcatttccaagcgcatgaagactatagtagaaatggagaattctgggctagtacatatgttgaaaaatggaaagacagaagaccttggttgcatgtacaagttatttagtcgtgtgccaaatggtttgaaaacaatgtgtgagtgtatgagttcctatttgagggagcaagttaaagctcttgtttctgaagaaggagaaggaaagaatcctgttgactatatccagggcttattggatctgaagagtaggttcgatcgcttcctcctggaatcattcaacaatgaccgtctctttaaacaaactattgcgggtgactttgagtattttctcaacctcaactccaggtctcctgaatacctctcattatttattgatgataagctgaaaaagggagtcaaagggctaacagaacaagaagtagaaacaatattggataaagcaatggtcctttttaggtttatgcaagaaaaagatgtatttgaacgttattataaacaacacttggcaaggagacttctcacaaataaaagtgtttctgatgactctgaaaaaaacatgatatctaagttaaagactgaatgtggatgtcagttcacgtcaaaactggaaggaatgtttagggatatgagcatctcaaacacaacgatggatgaattcaggcaacatctacaggcaactggtgtatctttaggtggtgttgatcttacagtccgggtgctcacgacaggatattggcccactcagtcagccacaccaaagtgcaacatcccaccagcaccaagacatgcttttgagatattcagaaggttctacttagccaaacacagtggtcgacagctcacactccagcatcatatgggttctgcagatctcaatgccacattttatggaccagtttaaaaggaagatggatctgaagttggtgttggaggtgcacaagtaactggctctaatacacggaagcacatattgcaagtttccactttccagatgaccatattaatgctctttaataatagagaaaaatacacatttgaggaaattcagcaagagacagatacccctgaaagagagcttgtaagagccctacagtccctcgcctgtggtaaaccaacacagcgggttcttacaaaagaaaccaaatcaaggaatagaaaatggcctatatttaccggta

SEQ ID NO: 163409 - DNA, 157 bp, Homo Sapiens
aacagtggtagaaaatttgaaaagttgacagaggcctagagatgaaatacatttgttatcttcttgaagctctggaccagatgttcatatcgcgttggcaggatggaaccattccatggatattctacgtatcttccttctttcactttataataag

SEQ ID NO: 163410 - DNA, 164 bp, Homo Sapiens
gaaagctaccacagggaaataagactacagaaagtgtggaagattctaaagcaaaaaaataaaagtactgtacccaccaggaaactaaataaaatacaggaaaaagttgctttgggccaacacaggaaagagcaaattaaagcagatgtggctgagtgataaaa

SEQ ID NO: 163411 - DNA, 154 bp, Homo Sapiens
tgacgactgagtatggattcatggatgatagtgtcgccgcgcgtgaaaatgttgtccgagagctaagttaataacagcaacaactgctctgtaatagtggaatcttcatcaatgagatttcgaccttctgctcctctcaaaatcacattaagca

SEQ ID NO: 163412 - DNA, 798 bp, Homo Sapiens
gaaagccattttcaatacagagtgtaaaattagatagcctctattaattaattagattttggaaagaaatgcagctttttagttagcattgaggcaaaacagggaacctgcttctttccaattgcacttgggtctttgcaaaagtccactcggcgctgagaaactttcctgttcaccagtgtgaggagttctgtgaactctaaggaggagccatattttcccaacatctcacacaaatcttgaatgtaccatgagccgttcacagtttcccggggagaataatatccttctgcaacagagtaacacatgaggaagtcagctccagcaggcagcgtgtaaacggaggctgcatccacctcagttatgttggtgtccaacttctctgtctgattatctactacatccaaaggaatgactggccacatcgtgctggtttccccgacatgcctgaatgataaatatcttgggttttccaaccaggctgtgacacttgtctcctttgaacaagccagttaatgtctgaatctcgattttagcatcatatgcataaatgtgattgccttcgccatggctcaggaagacacacacaaagcaatcggcatctgcgtggctaacagttgacacctcatgaattttgagcagtagttcttctgctttaagatcattaaagcatttcacttcaaatcctagatctgaaaacctgcgggtaagattgtctctatctgcgcaggtgccccgccattatggcagtggtaagtgccaaaaaacctctcatgattgaagattaaactactcccc

SEQ ID NO: 163413 - DNA, 1338 bp, Homo Sapiens
ttctggtaacacctttttaataggtcaaagtaactgtacagttcattatattcttcctgagaataatttatatcccccaacaaactaaagggagggtatattttttcaaaattaacagaatggatggtgtaactggacatcaaaagaaaaccaaattcctgttttgcttcattctctcctgggaagacagatacaaggaagggttagttaactccagtggctgtaaaatagtcaacatggctttaatctttctttataaattatataaaaatggaaaaaggggatggttctggaacttctcctcaatgcagtttggaggtgctctggtacaaagcatttctgcttccaagagaaataacattgctacaaaaaactggcacattattctgtgaaaaaagacatgagtttttagttgtgttctacagctagttcccgacccaatgcttcacatatccacacgaaagtaaaaggcaggtaagacaaaaagggctgtagttttttctgaaataactcaagtcttcaaaatatagcttttatattctttgtaaagtgggattagcatattgcaactgaagggtgttctaacaaataaaaattccagtctggataataattctatggtagacaaaagaattctcagcctcttgggtttcctggaattctttgcttcatgctctcctcttccactatgcagctaaggtagtttaggaattaagatgtcaccccttggccatccccctttagaacgtatcttaatgtgaacataaattgttcttcatgatgcttaaaagcttacatataattttcattcttagaaaaacgccacattttggatcctggatttttctgaatatcatgattgaaaaaaacaaaacagaaaatgaacccaaatcaaagtgtggttaaacttatatgagaaagatttttcaaccagatggtcattcaaaaaagttggagctgtaagtgctggcgactgaggacacagggttaattcctcgctgctggtggaaggctagagaacatcttcaaaagagggtagcaagacgtgctcctaggggaggctcagtgtggtctcgtctgcccaagcattttcagtcttgcttggtcaatgacatcgagtaagtttttggcatccacagccagggcgtgagcagcagtcagcatttgctttttgtactcttgctggaggctggtcatgacatactgctgggccagtttcatcttgttgatgagctcacccaggtcagagttcaatagcttctgtgccatctcaatctctcggtgggtgctggctggtaggaggggaatggtctcatccacagtggccaataatgtccc

SEQ ID NO: 163414 - DNA, 1051 bp, Homo Sapiens
  misc_feature (890)..(890): n is a, c, g, or t
  misc_feature (1018)..(1018): n is a, c, g, or t
  misc_feature (1034)..(1034): n is a, c, g, or t
taatttagaggtctgctgtgaatgggaacatagaattggagctcctggagttgaggaaataaaaagtaactctttgtttgaaggcgttgactgggaacatatcagagagagacctgctgcaatatctattgaaatcaaaagcattgatgatacctcaaacttcgatgagtttccagaatctgatattcttaagccaacagtggccacaagtaatcatcctgagactgactacaagaacaaagactgggtcttcatcaattacacgtacaagcgctttgagggcctgactgcaaggggggcaataccttcctacatgaaagcagcaaaatagtactcttgccacggaatcctatgtggagcagagttctttgtataacatcatgcttttcctctcacactcttgaagagcttccaagaagttgatggaacccaccaatatgtcatagtaaagtctcctgaaatgtggtagtaagaggattttcttccataatgcatctgaaaaactgtaaacaaagacaaccatttctactacgtcggccataaacagctatcctgctttggaagagaagcatcatgagccaatttgataggtgtttttaaaataacttgagttttcctaagttcatcagaatgaaggggaaaaacagccatcatccaacattattgagattgtcgtgtatagtcatcgaatatcagccagttcctgtaattttgtgacacgctctctgccaagcccaccaagtatttcctttatagctaaaagttccatagtactaaggaaataaagcaataaagacagtctcagcagccaggattctggctgaaggaaatgatccgccaccctgagggtggtgatggtagtttctacccatacctcagcctcaggcgangtggcttatagccttccatttcatggtgcactttatttatggtactaagataaagactgttcaatccattgatttatctcctcctgtcccccatcttaaaatacccatgctggcttttctgagtgttnatggggggttaccagnttggattccactgttgg

SEQ ID NO: 163415 - DNA, 1275 bp, Homo Sapiens
cgagttccaacaagcacttccgtcttacctcagatggggtcatgcccccggacacagagcttagcccctgtatcccaagtatgtcagcagcaaagcactgcaaagacagaacagcgaaggatctgccagtaaggttccttgcattctgcccattattgaaaatgggaagaaggttagttcaacacattattacctactacctgaacgaccaccatacctggacaaatatgaaaaatttttttgggaagcagaagaaacaaatggaggcgcccaaatccagccattacctgctgactgcggtatatcttcagccacaggaaagccagactcaaaaacaaaaatggatctgggtggccacgtgaagcgtaaaaatttatcctatgtgggttctccttagaccttggggtcatggttcagcagaggttacataggagcaaatggttctcaattttccagtttgattgaagtgcagagaaaaatcccttagatggcaaaataaaatagttgaactctctgtcttcatgtggaaggtttagagcagttgtgagatgctgttatgctgagaaaccctgactttgttagtgttggaaaaaagtcttacaagtctataatttaaagatgtgatggtggggaggggaggatggggaagctttttatatatgcatacattacatacctatatataaacttgtggtataaccatagaccatagctgcaggttaaccaattagttactattcgtagagtaatatatattcagaataataaactcaagctggagaaatgagtcctgatagactgaaaattgagcaaatggaagaagatacagtattgtttagatcagaatcattaaaaaatatttttgtttagtaagtttgaagatttctggcttttaggccttttctattttgttccatttatttttgcaggcaatcttttccatggagggcagggtatccattctttaccatgggtgtacctgcttaggttaaaaatcataccaaggcctcatacttccaggtttcatgttgcgtcttgttgagggagggagagcaggttacttggcaaccatattgtcacctgtacctgtcacacatcttgaaaaataaaacgataatagaactagtgactaattttcccttacagttcctgcttggtcccacccactgaagtagctcatcgtagtgcgggccgtattagaggcagtggggtacgttagactctagatggaaaagaattctaggtgccagtgttaggtctacctgaaagatcctg

SEQ ID NO: 163416 - DNA, 1269 bp, Homo Sapiens
  misc_feature (48)..(93): n is a, c, g, or t
  misc_feature (303)..(312): n is a, c, g, or t
  misc_feature (447)..(544): n is a, c, g, or t
  misc_feature (549)..(549): n is a, c, g, or t
ccgccccggttttttcccccagggggcgagataaaatatatgccaaannnnnnnnnnnnnnnnnnnnnnnnnnnnnnnnnnnnnnnnnnnnnnttacacatccgcgcttttgggaggggtttcgccatttggggcgagaagggttttaattattttcacccccatttgttggaagagaagggcaagggcggggggtaaaattaataaaagagatccggctgggaatcccggtggttaaaccccggtaaagccccccggaattcccttttgggttttttcaaaagcttcgttgccccccggggnnnnnnnnnnggggagaatccagcccctttttctgaccccgggtttcttgggaaccagttatgcccagtttcctttccctatggggccgccgccccaaagaaaaggtttgaaaaattttttaagggccgggggggccgcaaaggnnnnnnnnnnnnnnnnnnnnnnnnnnnnnnnnnnnnnnnnnnnnnnnnnnnnnnnnnnnnnnnnnnnnnnnnnnnnnnnnnnnnnnnnnnnnnnnnnnggtgnggactttcctacatcagttttatttaaaacacaaacaagtatttctctttctgtaagggcaaatggttcaaataatgcggaacacgaaacattgactaatacaagtgctttaaatatgaaacaaaattattttttaaaaaagcaaaagaataaagaatatatacaaaagggacctggaatctgtaaggtgattccaaaaacgaaataagtagaaaatccatggtgaaacctgaacattctacctctgctttggagaagggctatcatacaacattcagtcagctgaagatggattggtagaggtgtgtctatacataaacttcagtcatttttgcttgtgcagaatcatcccaatcttcccaagactgaatgggcagtcctgtggctttcttccttttccatattcccaacaaggctacgtgaagttcaactcttgatgagccgcttacaacagcagttccttaggagccaacatgacaggtgggtcagatttccctatgagaaacaaaactggccacctacagcaaaatatcaaaatgggtaagtccttccttcctcttcctcctgattatatacaacatatctcctttcaagactattatttccatcatgcttattccttcacaaatctaaaccttgaggtgatatgaaggaaaccaacatcaagaaaagaaactcaattcagaaatgaagaaactggcaggtatcaatacaccccag

SEQ ID NO: 163417 - DNA, 699 bp, Homo Sapiens
aaaaagccaaagaataaagaatataaacaaaagggacctggaatctgtaacctgattcccaaaacgaaataagtagaaaatccatggtgaaacctgaacattctacctctgctttggagaagggctatcatacaacattcagtcagctgaagatggattggtagaggtgtgtctatacataaacttcagtcatttttgcttgtgcagaatcatcccaatcttcccaagactgaatgggcagtcctgtggctttcttccttttccatattcccaacaaggctacgtgaagttcaactcttgatgagccgcttacaacagcagttccttaggagccaacatgacaggtgggtcagatttccctatgagaaacaaaactggccacctacagcaaaatatcaaaatgggtaagtccttccttcctcttcctcctgattatatacaacatatctcctttcaagactattatttccatcatgcttattccttcacaaatctaaaccttgaggtgatatgaaggaaaccaacatcaagaaaagaaaactcaattcagaaatgaagaaaactggcaggtatacaatacacccccagagcatctcaatatccatggcacagtacaattcagtgtactgctacagcccatagataaatattggcagcttgataagctcattttttccctcttgtacgaagtccagggtc

SEQ ID NO: 163418 - DNA, 994 bp, Homo Sapiens
ttcgactagagggggaacatcctgatccccggcattacgaggccgtggccgcgtcacggaagaggagcacaagctgtacgacgacatcgactttgacatagaggagtttgccaaggatgtgggggcgcagatcctcctgcacagccacaagaaagacatcctcatgcaccgatggcggtacccgtctctgtccctccatggcatcgaaggcgccttctctgggtctggggccaagaccgtgattcccaggaaggtggttggcaagttctccatcaggctcgtgccgaacatgactcctgaagtcgtcggcgagcaggtcacaagctacctaactaagaagtttgctgaactacgcagccccaatgagttcaaggtgtacatgggccacggtgggaagccctgggtctccgacttcagtcacccacattacctggctgggagaagagccatgaagacagtttttggtgttgagccagacttgaccagggaaggcggcagtattcccgtgaccttgacctttcaggaggccacgggcaagaacgtcatgctgctgcctgtggggtcagcggatgacggagcccactcccagaatgaaaagctcaacaggtataactacatagagggaaccaagatgctggccgcgtacctgtatgaggtctcccagctgaaggactaggccaagccctctgtgtgccatctccaatgagaaggaatcctgccctcacctcacccttttccaacttgcccagggaagtggaggttccctctttcctttccctcttgtcaggtcatccatgactttagagaacagacacaagtgtatccagctgtccacgggtggagctacccgttgggcttatgagtgacctggagtgacagctgagtcaccctgggtaagttctcagagtggtcaggatggcttgacctgcagaagatacccaaggtccaaaagcacaaggtctgcggaaagttctggttgtcggctgggcaccac

SEQ ID NO: 163419 - DNA, 757 bp, Homo Sapiens
  misc_feature (373)..(373): n is a, c, g, or t
cattggataagcggatgagggagcccactcccagaatgaaaagctcaacaggtataactacatagagggaaccaagatgctggccgcgtacctgtatgaggtctcccagctgaaggactaggccaagccctctgtgtgccatctccaatgagaaggaatcctgccctcacctcacccttttccataccccaaatgctagacttggaaaggacacccagtccctctagctaggaaacaatttctaaaactgacccaacgtggcaagtctaactgttccaaataatcacacgcatatgctcaaaaggagcaaccagcaaagaagtgtgcccttgataagagaggtcaggaccactgcactagcccctcagcagcncaaggaactgtggacatggcaggctagtgggcgtgggtggaggacgcctggggggcttaacaatagctttgggatggcaggggctggcactgtttaagcccctgcccaggcaacctgaacaactctgccgcaggaggaagaaagggtgtttgcatgagcttgcagggcgtggatggcaggtgagaagtggagaacagcagagcctgtgaggctccaggagaccctcaaccaagtgcgtacatcagtgagggaaaggggtgagcagaagactgaactttgtttagaacactgcgaagatttacactgaaagcaaaataatttcttaaccaaaacattttgttgcttttaaataaacccagcctgatacagccccacttaaaagcc

SEQ ID NO: 163420 - DNA, 648 bp, Homo Sapiens
tccctccctctattgctcgcagctggctcgaccacagaagagaccttgcattacggcacctgatgtcaacctcagccctgagagaccggctgggacaccgagcccttcaccctggtggagcgagaccgcaaactgtatgggagaggttcgactgatgataagggcacggtggccggctggataaacgccctggaagcgtatcagaaaacaggccaggagattcctgtcaacgtccgattctgcctcgaaggcatggaggagtcaggctctgagggcctagacgagctgatttttgccccgaaagacacattctttaaggatgtggactatgtctgcatttctgacaattactggctgggaaagaagaagccctgcatcacctacggcctcaggggcatttgctactttttcatcgaggtggagtgcagcaacaaagacctccattctggggtgtacgggggctcggtgcatgaggccatgactgatctcattttgctgatgggctctttggtgtacaagagggggaacatcctgatccccggcagtaacgagccgtgcccccgtcacggaagaggagcacaagctgtacgacgacatcgactgtgacatagagagtttccaagtattgaggtctgggggatcctcaag

SEQ ID NO: 163421 - DNA, 1509 bp, Homo Sapiens
  misc_feature (79)..(79): n is a, c, g, or t
  misc_feature (82)..(138): n is a, c, g, or t
  misc_feature (1244)..(1318): n is a, c, g, or t
gcgaccgccagcgtacaacggacctgcgtgagaagatcaagtccatgacgtcccgggacaactataaggcgggcagcgngannnnnnnnnnnnnnnnnnnnnnnnnnnnnnnnnnnnnnnnnnnnnnnnnnnnnnnnnaaccttaccctgtgtccggggccaagcgcaagtatcaggaggactcggaccccgagcgcagacatatgaggagcagcagctgcagaaggaggaggaggcgcgcaaggtgaagagcggcatccccagatgcgcctcttcagccaggacgagtgcgccaagatcgaggcccgcattgacgaggtggtgtcccgcgctgagaagggcctgtacaacgagcacacggtggaccgggccccactgcgcaacaagtacttcttcggcgaaggctacacttacggcgcccagctgcagaagcgcgggcccggacaggagcgcctctacccgccgggcgacgtggacgagatccccgagtgggtgcaccagctggtgatccaaaagctggtggagcatcgcgtcatccccgagggcttcgtcaacagcgccgtcatcaacgactaccagcccggcggctgcatcgtgtctcacgtggaccccatccacatcttcgagcgccccatcgtgtccgtgtccttctttagcgactctgcgctgtgcttcggctgcaagttccagttcaagcctattcgggtgtcggaaccagtgctttccctgccggtgcgcaggggaagcgtgactgtgctcagtggatatgctgctgatgaaatcactcactgcatacggcctcaggacatcaaggagcgccgagcagtcatcatcctcaggaagacaagattagatgcaccccggttggaaacaaagtccctgagcagctccgtgttaccacccagctatgcttcagatcgcctgtcaggaaacaacagggaccctgctctgaaacccaagcggtcccaccgcaaggcagaccctgatgctgcccacaggccacggatcctggagatggacaaggaagagaaccggcgctcggtgctgctgcccacacaccggcggaggggtagcttcagctctgagaactactggcgcaagtcatacgagtcctcagaggactgctctgaggcagcaggcagccctgcccgaaaggtgaagatggcggcgggcactgaagtcttacccgccgcccctcctggggaactcctggctccatccttaaggaagttgccccctccctnnnnnnnnnnnnnnnnnnnnnnnnnnnnnnnnnnnnnnnnnnnnnnnnnnnnnnnnnnnnnnnnnnnnnnnnnnngaatccaaaaataatttttcccctggggtttttggttgcccggttaaggcgctgaaaaaattaaaatttggggcccagaacactaggtgttccccaaattttctgggggaatccccccctggaaatggaaaagggctttttgggaattcacttagggggcacaaaagctctcacgcttgtaaatcgggcca

SEQ ID NO: 163422 - DNA, 893 bp, Homo Sapiens
  misc_feature (115)..(173): n is a, c, g, or t
gaggactgctctgaggcagcaggcagccctgcccgaaaggtgaagatgcggcggcactgagtctacccgccgccctcctgggaactctggctcatccttacgtagttgcccctcnnnnnnnnnnnnnnnnnnnnnnnnnnnnnnnnnnnnnnnnnnnnnnnnnnnnnnnnnnngattctatatatttttccttggttttgttgcctgttaaggctgaagaatagaattggccaggacctaggttctcatattcttggtattcctcctggatggaaaggctgttggcatcaataggggacagaggctgatgctggagtggccagtagaggtggtggagcagagcagccatcttttaagtggggctgtatcaggctgggtttatttaaaagcaacaaaatgttttggttaagaaaattattttgctttcagtgtaaatcttcgcagtgttctaaacaaagttcagtcttctgctcgcccctttccctcactgatgtctgcacttggttgaggtctcctggagcctcacaggctctgctgttctccacttctcacctgccatccacgccctgcaagctcatgcaaacaccctttcttcctcctgcggcagagttgttcaggttggcctgggcagggggcttaaacagtggccgcccctgccatcccaaagctattggtaaccccccccaggggttctccacccacgcccactagcctgccatgtccccagctccttgggcctgctgaagggtctattgccgggggcctgacctctctttaccaaaaggaccacttttttgccggtggcctccctgttaacatatgtgggggatatatttggggaccggtccacttgcccccggttgcgacagtattataccatttccccttgcttt

SEQ ID NO: 163423 - DNA, 1036 bp, Homo Sapiens
ggcggccccaccgggcctcggtttaaatgccggggggattcagggatgttccccccctttcttgttccacccaaaggaagccccatccagcaaaaaatgaggttcagtccatggccttcatgcaccggagccccccggtacacccccggaatggagttctttgttgctgcactccacctggatgaaaaagtagcaaatgcccctgaggccgtaggtgatgcagggcttcttctttcccagccagtaattgtcagaaatgcagacatagtccacatccttaaagaatgtgtctttccgggcaaaaatcagctcgtctaggccctcagagcctgactcctccatgccttcgaggcagaatcggacgttgacaggaatctcctgggcctgttttatgatacgcttccaggggcgtttatccagcccggccaccgggcccttatcatcagtcgaacctctcccatacagcttgccgtctcgctccaccagggtgaagggctcgctgtcccagccgtcctccagggctgcaggctgcacatccaggtgcccgtaaatgcacacggtcttcttctgtgggtcggagcccagcctgccgagcagaataggagggagcgggatctccgagccatcagggagcttttgttttccgatatccaccagttccacagagccccccaactgcttaacatctgcagcagcaacttccatcatcctcctgatttcgcctctcttctccggccacgcagacacactctggatagccacccattttgcgagtttcttaatgtagcgatcctgattttcatctatgtacttaaacagggtagtgagggccgccatctttcaaccagaccccagaccgcagatctcgaaggttcttggaaggaagagcaactggtcagtcctgtctctagtggagactgacgggcgacctgggaaggaaggcccactaggcaaggccctgttaccagcagcaagcgcggcgccggttccgtaccacgtgtcccggccacgacccccggcgctggcccgccccccc

SEQ ID NO: 163424 - DNA, 687 bp, Homo Sapiens
  misc_feature (601)..(642): n is a, c, g, or t
cataaaaaaggccaggcctctggtaaaaaagaagttctctggtcacaagaaaatcaactttacatgttatataatacagtacatctccctatgagtatacagactacgtatatgaaggtcatcagtatttctgaatgcaacgtaaatatattagtggagtgcttgagtgaaggtgttaaactttgtcttccttattataaacttgtcactccttactgtgaagtttgtgtaataacttgatgataaattctattttgtaaagaaccagtgaatttctttttaaatctcttaaaaccattacagaaattgtcttcatatatattctacagatgtccaaaccaatagggcaatgttctaacaccaactatggaagatggcttttactgattatctagacccataagatttgcagtaaaacatcaatactgcagtgttacctacaggttagcctatgttgctttaaatgatatgtgtttctcctgaattgattagaggtgttacagttcaaagccacagcacacacaggcagaatggaccttaatacgcatgtaggcagtgcagttagaaagggatgtctgttccttttattccagtaccttcnnnnnnnnnnnnnnnnnnnnnnnnnnnnnnnnnnnnnnnnnnagccagctggcactgccaaccaattctctatagtagtcttatgaa

SEQ ID NO: 163425 - DNA, 926 bp, Homo Sapiens
aagccagttctaataggatatccacctttctgctctgaaacacctcaagaaacatacagaaaagtgatgaactggaaagaaactctggtatttcctccagaggtacctatatctgagaatagccaaggacttaattctcagatgttgtattgattctgaaaacagaattggaaatagtggagtagaagaaataaaaggtcatcccttctttgaaggtgtcgactgggagcacataagggaaaggccagcagcaatccctatagaaatcaaaagcatggatgatacttcaaatttcgatgacttccctgaatctgatattttacaaccagtgccaaataccacagaaccggactacaaatccaaagactgggtttttctcaattatacctataaaaggtttgaagggttgactcaacgtggctctatccccacctacatgaaagctgggaagttatgaatgaagataacattcacccataaccaagagaactcaggtagctgcatcaccaggcttgcttggcgtagataacaatacactgaaatactcctgaagatggtggtgcttattgactacaagaggaaattctacaggattaggatttctaagactactataggaattggttggcagtgccagctggctcttggggttaatatttgattatttagtgaactttattatatgaaggtactggaataaaaggaacagacatgcctttctaactgcacagactacatggcgtattaaggtccattctgcctgtgtgtgctgtggcttggaacctgtagacaccactaatcaattcaggagaaacacatatcagccaagcaacacaggctaaccggaggtaacaactgaagcatagaagacgacagaacaaccacagggccaagatcgagaggaaagcccgccgacacaggaggag

SEQ ID NO: 163426 - DNA, 710 bp, Homo Sapiens
ctgactcgactagagctgcagaagtatctttactggcttgacttgtccccagatacgtaaatatatttatgtaacgaatctccctgacagtagaaaatgtgtaatttccaatctgaataaaactgagctatatctgaataactgagaagagtatgatattactttgattattttaaaagtgaaagggaaaatatctaaaaattggatatcgatgatacttctagacacttgattatgtagttcttgattaatttctcgttcgcaggatccagaagataaaagtgaccccctggaagctggtaaattttagcatttccactggttacatctttccaggcttccatgtcctttgctatgtcttcagatccaacaaaacatgtcaagtcacaggaaagaacagccttagatggtacgttagaggtgcaacttctaacaatgttcagatctgcccttatgatgggactacattgtttcacaaattccttggcttcagcaaaatgcttgggggtgcctccaaattccataaggtaatgacttatttgttcttctgacaattcatcatctttgggaatgcgatgccaggcctttgaatgtacaggagttgcacttgacaaaaataagtgcaatggttctggttgattgttttctttagaactagtgcagtcctaaagcatgttagatccatactgtggccaaaaatgcaatggtta

SEQ ID NO: 163427 - DNA, 3352 bp, Homo Sapiens
  misc_feature (2571)..(2634): n is a, c, g, or t
  misc_feature (3182)..(3182): n is a, c, g, or t
gcttcctacagaggaaaatcaagtttcaaaagtgaacagcattccctactagtctttctccattgaaatggaaaaggttggagatcaagagcttcctgatcaagatgagatggacctatcagattggctagtgactccccaggtatcccataagctgcggaagcctgagaatggcagtcgtgaaaccagtgagaagtttaagctcttattccagtcctataatgtgaatgattggcttgtcaagactgactcctgtaccaactgtcagggaaaccagcccaaaggtgtggagattgaaaacctgggcaatctgaagtgcctgaatgaccacttggaggccaagaaaccattgtccacccccagcatggttacagaggattggcttgtccagaaccatcaggacccatgtaaggtagaggaggtgtgcagagccaatgagccctgcacaagctttgcagagtgtgtgtgtgatgagaattgtgagaaggaggctctgtataagtggcttctgaagaaagaaggaaaggataaaaatgggatgcctgtggaacccaaacctgagcctgagaagcataaagattccctgaatatgtggctctgtcctagaaaagaagtaatagaacaaactaaagcaccaaaggcaatgactccttctagaattgctgattccttccaagtcataaagaacagccccttgtcggagtggcttatcaggcccccatacaaagaaggaagtcccaaggaagtgcctggtactgaagacagagctggcaaacagaagtttaaaagccccatgaatacttcctggtgttcctttaacacagctgactgggtcctgccaggaaagaagatgggcaacctcagccagttatcttctggagaagacaagtggctgcttcgaaagaaggcccaggaagtattacttaattcacctctacaggaggaacataacttccccccagaccattatggcctccctgcagtttgtgatctctttgcctgtatgcagcttaaagttgataaagagaagtggttatatcgaactcctctacagatgtgaaggaatggacaagagttgagcagcctttctgctgattatcacacatcatgagctgagtgactgcagcttgccaaatctttgtgtttctgggtctgaccaattagcttagttcttctcctgcctaattttgaactagtaaagcaaagtgagtcatcagattatgagttactgtttaaaagaaaaatgctgttataatcatgctgaggtgattcagttccctccttcttacagaagtattttaattcaccccacactagaaatgcagcatcttttgtggacgtctttttcacaagccctccaaggctccttagatggggtcggttactaaaaatacattaaaacactcttgtttatcgaagtatatcgatgtattctaaagctagtaaacttccctaacgtttaatcgccctacagatgcttctcttgctgtgggttttctttcgttagtggtctgaaataattattttcctgttctattaatacatagtgtattttgcacaaaaaaattaacctggtcaatagtgattaccaaaatatatattaataatcttggcaatttttgacattaattatgaaacattttagcccacgttagttctacattattcttcacttaaactcagctactgcaaattttgtctttctgtaaatgttattaaaatatccagtgagctctttagaaggactcagtattatttcaagactatttttgaggtaattctagccttttaaaatattctacagacctacggggcttaaaagaaccccagtaccgactaagcaaataggcaaaagacatgttggaaatgtagtatagtacttgaaacagtcactatcatagggataattggtgcatcctgtgtaaatggaagctgagcttgacacctggtgcttttaagtagggataaagtcatcctctcactgcaagcacagcatacctgtacctccaaaagtgacgttttagtgaacaggccgttttcaacacttgtgccttggggtgttcattgaagctttgtgaaaactactgatgttttctcagtctccttaaagttacgtccatgctttaaaatgtctgtgtaggagagaagtggggtttataatgttttctctaagatatctttgctgctttccagactttgaaactattaagcttcttaactgcctcttaccggaaatacttctggggaaacttcatggtcccaaaatgtcattgccatacagcttcactagagttctttgaaccacagctgaaaagagctttgtattattttttaattccctccccagatatcatttaggagtattatataaaggtggtgggcaaaaacaatgtaaggagcctttccagttatcttgagttgcagctctgtagtttcttgaggccaaacacactgtattttacaagtcaaaatataatttacattaatcactatgttaatgagtatgtaaaacattcttttgcattgatgaattttgtatctgcttccattaaaagcataacagccatacgnnnnnnnnnnnnnnnnnnnnnnnnnnnnnnnnnnnnnnnnnnnnnnnnnnnnnnnnnnnnnnnntttattttgtcgggcgccctcgcaccctcgaaaatgcctttcctaaaacccttcgatttggccggcgccggaccccagtaggctaagtggaaacttggtccataaactggtttcccctagggataaccctgggcccctggacctaaggggctttggaatctctcctccaaataaaagaacgcccccgggcgggcaaacccgaagggtttttgaaaccaaaccccagaatggaacctctcgaaagggcattttacttggaattttattgaaacggagtgggcctgaggccgatgcctttaaatatcctatattaagggccccgcgccccgttgaacatattttttcaaggaaatacctgggtggatattttcatatataagcacttccgcgggcacgaatatgggaaaaagccctctcacccaaaaccggcagagtggattggaaacccttggtgaattcccacacgcggagtagattcaggacgacactggggagagtgagtttgcggcatatagaatattttttccacacccctctggtggcaacanaccgctagatgtgcgtgtaacaacaagcttgtctcgccactctatttgtgcgtgatcacaagaattgcaaacacacgccgaaaagcgttgatgagggcataaaccctccacgaacccctgagacatgactcgcatcctgtgtctaaagacgacatcatacgtgtgtctgt

SEQ ID NO: 163428 - DNA, 1141 bp, Homo Sapiens
actaagttaaatctcattgatggctccatcagagaatgagaatgccccagccagtgctgtatttaaatgcactgggagggaaaaaacgaaattaacaatctactattccctaatatatatggcttggcacccagagaaagcctctgcccccgaaagagactttctacatagggttaagcttcattaaatgaggtgcaacctttcattttcagggcatctcttttcttgcaaggtctttagaggcagaagttccacttggattctaatacacatctctgtgagctcagtttcctgaaaatatacacctactgggttctaggttctcccttaccagtgactgtattcattatttcacagccaccagaatcggacatacactattaacatgatgaaaaatacagctactgctgcaagtttggcataagtggaacgcatgttcaagtacttcgcatcctggcggtatttcttggacagactggacaaattgttagcctttgaatccaatgctgagagtgcttctcctcgttgtaacacttcttcaatattggccaccatgatcctctgcacatcttgcaattcagtgttgatggagcctagatttcttcgagcacgactgtcaatgtagagcttcttggttttctgaatgaaagtatcaaattcaataaaggaatagggtcgggacacagtgggcaccttctttccatgctgttcatcaaattctgagtgcaaatcttctaggtaggcaaaagccaacttcttagggaaggcagcttcacataaaaccaaataacacaccccctgctcaataatgtagtgaaaagtcatggctcctgcttccaaggtacatctggtaggggactgttcattcaactttcgaaagagttgcttagcctgactctgatactgttgaaggtcccggccagactgttcgtcctcctgcatcgaggcggccagcgggagcccgtccgccactcgggcgatcattgttagcaacaccatcttcacaaactacagggatccaacactggcccggaaggcccttggcgccgtcctcacttcctccgccgcgacaacagttataccctatgtctcagttaccggagatccagctgcttgcgtctccgcttcccgctgaggtccc

SEQ ID NO: 163429 - DNA, 814 bp, Homo Sapiens
cgtcatacagagtgtatattacactctaataaggataatgctgaattttgaaaggacacaaaacatctaatgccaatatatacatgattagccaacatctttgctatcaagaccacttgtttttaaataaagatgcaagtgtcagttgtagattattgggatgaagctaaatccccagaatgcagcagcagctgagcatgttaaaatggggaaggatgatagctacatgtatgccggtcctactcacgcgacacccgtgtgctcaaaaaagttatttgtttttgttacgtgtgatttttctatttctctagcccaaagtgcattacagaagatacacctatagaaccattaccttctgctatgtgtgccaggcctcatctactcctgtacattaatgaattactttagatgcaaacgcagattacaatggagtggggaagtactttcattacccaagcctcagaaaaacacacaagaacaataacacagcaaacagattgagggattgttgtggtttttgactaaggtgtatgttagtttcatcagaaacttaaaacatagactgatcactcagaaattaaagtccgttttactgtgaatatagcaatatagtactggacacagtactggtgaaactgaggagagcattgcttgtaaaatcctgaggttccataaggaaaatgaaaactccttttaaaaataaaatctgaggagtgtacaataagcatatgctttgactttcctttgctgtggaggtttttggttcttcattgatgataaacgactacagacttagtagtggagaaatgtgtcc

SEQ ID NO: 163430 - DNA, 849 bp, Homo Sapiens
gagagagtttccctacgtataccctgttgcttcaagctgccgacattcaaggtgaggggttaagcacaacagcaacagctgtgatcacagtcactgacaccaacgataatcctccgatcttcaatcccaccacgtacaagggtcaggtgcctgagaacgaggctaacgtcgtaatcaccacactgaaagtgactgatgctgatgcccccaataccccagcgtgggaggctgtatacaccatattgaatgatgatggtggacaatttgtcgtcaccacaaatccagtgaacaacgatggcattttgaaaacagcaaagggcttggattttgaggccaagcagcagtacattctacacgtagcagtgacgaatgtggtaccttttgaggtctctctcaccacctccacagccaccgtcaccgtggatgtgctggatgtgaatgaagcccccatctttgtgcctcctgaaaagagagtggaagtgtccgaggactttggcgtgggccaggaaatcacatcctacactgcccaggagccagacacatttatggaacagaaaataacatatcggatttggagagacactgccaactggctggagattaatccggacactggtgccatttccactcgggctgagctggacagggaggattttgagcacgtgaagaacagcacgtacacagccctaatcatagctacagacaatggttctccagttgctactggaacagggacacttctgctgatcctgtctgatgtgaatgacaacgccccataacagaactcgaatatattctctgtgagaggatccaaacctcagtctaaactcttgtgcgacttctcccata

SEQ ID NO: 163431 - DNA, 279 bp, Homo Sapiens
ctgactctttggtcgcattcaggattgcctcctgctggttctcatccctgttcccctttcttcaagccaggtatgaactcacctatttttgtaaagctggaatctcactgtttcacccaggctgcagtgctgtggtaccagtcatagctcactgtagcctcaaactcctggactcaagtgattctcctgcctcagccttgtgaggggttaagcacaacagcaacagctgtgatcacagtcactgacaccaacgataatcctccgatcttcaatcccacc

SEQ ID NO: 163432 - DNA, 1091 bp, Homo Sapiens
gcgtagggtaaagatggggaagataccgggggacactcatgagggttggtgcaacgctcgttacgagtcacttcaggccgagcgtccaggcccctgtgcagctggctcaagtcaaagtcctggtcctcttctccgcctccttcttcatcatagtaataaacgttgtcccgggtgtcatcctctgggggcagtaagggctctttgaccaccgctctcctccgaagaaacagcaagagcagcagaatcagaattagcaaagcaagaattcctccaagaatccccagaatggcaggaatttgcaatcctgcttcgacaggctgtgccttcctacagacgccggcggccccttcacagtcacacacgctgacctctaaggtggtcacttggtctttattctggttatccatgagcttgagattgattttgtagtcacccacctctaaggccatctttggcttcaaaatgatagattcttgggttgggtcgttgtactgaatggtccagttggcactcgccccgtgtgttagttctgctgtgaagggagatgtattgggaggaaggtctgcatcaatgatgtttatgacctgaggctttggattcctctcacagaagaatatagttcgaggttctggtatgggggcgttgtcattcacatcagacaggatcagcagaagtgtccctgttccagtagcaactggagaaccattgtctgtagctatgattagggctgtgtacgtgctgttcttcacgtgctcaaaatcctccctgtccagctcagcccgagtggaaatggcaccagtgtccggattaatctccagccagttggcagtgtctctccaaatccgatatgttattttctgttccataaatgtgtctggctcctgggcagtgtaggatgtgatttcctggcccacgccaaagtcctcggacacttccactctcttttcaggaggcacaaagatgggggcttcattcacatccagcacatccacggtgacggtggctgtggaggtggtgagagagacctcaaaaggtaccacattcgtcactgctacgtgtagaatgtactgctgcttggctcaaaatccagc

SEQ ID NO: 163433 - DNA, 1182 bp, Homo Sapiens
ggggcaacaagaggggtcaagtgacacaaccagctgactcccgtagaggaagacactgtggaggccagttctggagctattgcagcctcggttgcccggccggggacccgagccgaaaagttatcgtcagaatgtcgggcaaagaccgaattgaaatctttccctcgcgaatggcacagaccatcatgaaggctcgtttaaagggagcacagacaggtcgaaacctcctgaagaaaaaatctgatgccttaactcttcgatttcgacagatcctaaagaagataatagagactaaaatgttgatgggcgaagtgatgagagaagctgccttttcactagctgaagccaagttcacagcaggtgacttcagcactacagttatccaaaatgtcaataaagcgcaagtgaagattcgagcgaagaaagataatgtagcaggtgttactttgccagtatttgaacattaccatgaaggaactgacagttatgaactgactggtttagccagaggtggggaacagttggctaaattaaagaggaattatgccaaagcagtggaactactggtggaactagcttctctgcagacttcttttgttactttggatgaagctattaagataaccaacaggcgtgtaaatgccattgaacatgtcatcattccccggattgaacgtactcttgcttatatcatcacagagctggatgagagagagcgagaagaagtctataggttaaagaaaatacaagagaagaaaaagattctaaaggaaaaatctgagaaggacttggagcaaaggagagcagctggagaggtgttggagcctgctaatcttctggctgaagagaaggacgaggatcttctatttgaataatctttcctgttctggttctttgagaaaccctaacactggcttcattttaattcacagtgtgtaggtttgatttgtgtggctatttattttttggcctaagaatttcactggttgtaaaatttacctagatgtctatttatgggattacttttgcagaatcataatttagcaaccatttatcatggatgaaagagatctgtaaaacctgcccaggaacttacagaatttactttgcagaagcgttatcatactccatttacatctgtgttacacgtgatctgcttaccagcatattaggtatacctct

SEQ ID NO: 163434 - DNA, 809 bp, Homo Sapiens
  misc_feature (389)..(448): n is a, c, g, or t
gcacacgctgtacagaagaccttagaaaaaggaggaaaggaggagaggcagataatttggatgaattcctcaaagaatttgaaaatccagaggttcctagagaggaccagcaacagcagcatcagcagcgtgatgttatcgatgagcccattattgaagagccaagccgcctccaggagtcagtgatggaggccagcagaacaaacatagatgagtcagctatgcctccaccaccacctcagggagttaagcgaaaagctggacaaattgacccagagcctgtgatgcctcctcagcaggtagagcagatggaaataccacctgtagagcttcccccagaagaacctccaaatatctgtcagctaataccagagttagaacttctgccnnnnnnnnnnnnnnnnnnnnnnnnnnnnnnnnnnnnnnnnnnnnnnnnnnnnnnnnnnnntgcatcagggggcgatcaagatcaggaagaaagaagatggaacaaaaggactcagcagatgcttcatggtcttcagcgtgctcttgctaaaactggagctgaatctatcagtttgcttgagttatgtcgaaatacgaacagaaaacaagctgccgcaaagttctacagcttcttggttcttaaaaagcagcaagctattgagctgacacaggaagaaccgtacagtgacatcatcgcaacacctgggaccaaggttccatattatataaggagctagaagcattataggctagtgctttgattcactagtgcttacaaattgcccccatgtgtaggggacacagaaccctgtgataagcga

SEQ ID NO: 163435 - DNA, 2055 bp, Homo Sapiens
  misc_feature (1434)..(1474): n is a, c, g, or t
  misc_feature (1652)..(1687): n is a, c, g, or t
gggtcccctccccgggccacccagcccgcccaactcccagcggagagcaaggttttcttctgttttcatagccagccagaacaatgttctacgcacattttgttctcagtaaaagagggcctctggccaaaatttggctagcggcccattgggataagaagctaaccaaagcccatgtgttcgagtgtaatttagagagcagcgtggagagtatcatctcaccaaaggtgaaaatggcattacggacatcaggacatctcttactgggagtagttcgaatctatcacaggaaagccaaataccttcttgcagactgtaatgaagcattcattaagataaagatggcttttcggccaggtgtggttgacctgcctgaggaaaatcgggaagcagcttataatgccattactttacctgaagaatttcatgactttgatcagccactgcctgacttagatgacatcgatgtggcccagcagttcagcttgaatcagagtagagtggaagagataaccatgagagaagaagttgggaacatcagtattttacaagaaaatgattttggtgattttggaatggatgatcgtgagataatgagagaaggcagtgcttttgaggatgacgacatgttagtaagcactactacttctaacctcctattagagtctgaacagagcaccagcaatctgaatgagaaaattaaccatttagaatatgaagatcaatataaggatgataattttggagaaggaaatgatggtggaatattagatgacaaacttattagtaataatgatggcggtatctttgatgatccccctgccctctctgaggcaggggtgatgttgccagagcagcctgcacatgacgatatggatgaggatgataatgtatcaatgggtgggcctgatagtcctgattcagtggatcccgttgaaccaatgccaaccatgactgatcaaacaacacttgttccaaatgaggaagaagcatttgcattggagcctattgatataactgttaaagaaacaaaagccaagaggaagaggaagctaattgttgacagtgtcaaagagttggatagcaagacaattagagcccaacttagtgattattcagatattgttactactttggatctggcaccgcccaccaagaaattgatgatgtggaaagagacaggaggagtagaaaaactgttttctttacctgctcagcctttgtggaataacagactactgaagctctttacacgctgtcttacaccgcttgtaccagaagaccttagaaaaaggaggaaaggaggagaggcagataatttggatgaattcctcaaagaatttgaaaatccagaggttcctagagaggaccagctacagcagcatcagcagcgtgatgttatcgatgagcccattattgaagagccaagccgcnnnnnnnnnnnnnnnnnnnnnnnnnnnnnnnnnnnnnnnnntgagtcagctatgcctccaccaccacctcagggagttaagcgaaaagctggacaaattgacccagagcctgtgatgcctcctcagcaggtagagcagatggaaataccacctatagagcttcccccagaagaacctccaaatatctgtcagctaataccagagttagaacttctgccnnnnnnnnnnnnnnnnnnnnnnnnnnnnnnnnnnnntgatgaagaggaagaggatgaagatgcatcagggggcgatcaagatcaggaagaaagaagatggaacaaaaggactcagcagatgcttcatggtcttcagcgtgctcttgctaaaactggagctgaatctatcagtttgcttgagttatgtcgaaatacgaacagaaaacaagctgccgcaaagttctacagcttcttggttcttaaaaagcagcaagctattgagctgacacaggaagaaccgtacagtgacatcatcgcaacacctggaccaaggttccatattatataaggagctagaagcattatagctagtgtttgatacactaagtgcttacaaattggccccatgtgtaggggacacagag

SEQ ID NO: 163436 - DNA, 679 bp, Homo Sapiens
actcgctacaagagggtataggtgaacggtttggaatcagacacgtcccctcctcgcttgcgtttcagttgcagaaacactgttacaggccgctcaatcttcatcttgtgataggggggtgtccggaacacaatggcatactgtttatgcacatctgtgggagagaagtccccaaaggcctgccatccattctcatcatcctcatagaaccgaacctcaatgtcatctttctgcaccgtgtcacaaagcagataaacttcatctccaccccgcacagagcctgctgtcttgtccattcgagaaatcttcaggtttgatgcccccggagatttgctgtcatggatgggctgggagatgactggcttcaggggcagggagaaggagccatcactggctctaaggaaggcagagaagcgcagccgcactatactcagatccatcaccttcttcagttctttggcctcttgctccagttcccgtgtgctcggcctccgtaaggccctggggcctagagcggagccgttgcctctgaagctttggtatcatagtccccatcatgttcttcttagtcacatgcaggacacccaggtggtacaatggggccagcaggtccctggggcccccacagaaagggcgagatccaagctcgagcatggttgcccaccaggggtgcgatgag

SEQ ID NO: 163437 - DNA, 713 bp, Homo Sapiens
tgaggatcccccagcccgtcacatacctggtgatcgtggaacagcctaagcagagaggcttccgatttcgatatggctgtgaaggcccctcccatggaggactgcccggtgctccagtgagaagggccgaaagacctatcccactgtcaagatctgtaactacgagggaccagccaagatcgaggtggacctggtaacacacagtgacccacctcgtgctcatgcccacagtctggtgggcaagcaatgctcggagctggggatctgcgccgtttctgtggggcccaaggacatgactgcccaatttaacaacctgggtgtcctgcatgtgactaagaagaacatgatggggactatgatacaaaaacttcagaggcagcggctccgctctaggccccagggccttacggaggccgagcagcgggaactggagcaagaggccaaagaactgaagaaggtgatggatctgagtatagtgcggctgcgcttctctgccttccttagagccagtgatggctccttctccctgcccctgaagccagtcatctcccagcccatccatgacagcaaatctccgggggcatcaaacctgaagatttctcgaatggacaagacagcaggctctgtgcggggtggagatgatagctttatctgctttgtgacaggtgcagaaagatgacattgagttcggttctatgaggtatgtgaggggc

SEQ ID NO: 163438 - DNA, 298 bp, Homo Sapiens
aggactaagagagactccttatctgatctgagaatggggaccagctctgagtggggttgctgcctgtattccctgtttctcaggaacttacatgggtctggggaggctaggtaggtgattgtacgtggttgctcttctccttggctggggaggtaatgagcagatctctgtgggtgtggagcttgttggggggatgtctaggaagcttcagcttagccacattcccaagttaggtgcactgagccatatagcccagtgtatgcatgtgtgggtgtgttcatgcacacacacactctct

SEQ ID NO: 163439 - DNA, 649 bp, Homo Sapiens
ccacaaatattgggttacaagcatgagccactgtgcccgcccaaacggaatacatgtggacactaatggagtttttataatgaataaatgttgaatcagcaatttttaaaaaaatctaatgaacatatagcttctcttctttattctgttaatgggaacattggattctctgatgctcaacactcctgacattccttggggataactttcgtcattccttaaaattgacagccgttcattctttaaagacatttcagggatgtcacaaagcagcagaatatatgtatgacctgggctaggaaacctgagagggacatggtctaacttgtgctgggaatgtgactgacaatgtacgatgtactgttcagagccagaggaaatgatattgagatccagcacctctaggagctgttctctatgtacgttgttgttattagacggtgatgctattaattacgaggttaataatatcattagcctacaaagtattacattcgaaataacattgtcctagttgtaatctagaggctatacatatgagcgtgctggagaaaagctatgaatgtttcagttttgggggttgatatgtgtattgcatctatagtatttggaggatagcttaataactcggatgaagttctatacgatt

SEQ ID NO: 163440 - DNA, 528 bp, Homo Sapiens
ggatccccttgagttctaatttagttatcaataaatgcagtttaaaatgatttctaaataagcatggcattagcacatttactatttacaatgcaaaccaggctattgataatttgaaaatactttctggaattaaacttaaaccagtacctctgcttcaattctatatatttatggtttcctcacaaccctcctgaaatggaattagagcgagccaataattttattaaagctgtaaaggcttctgttaaagctgcttttctttggagaggaaatgtatctggatgtgatttttactaaaatgctatttcaaattactgcatcaaatattgcagcagtatgtccgttgacagtttaatgattactacattagattgtaaggaaaatggtcagatgaacttacctccttgcttggtgaatttaaaacattatttaagttccgtaggaaaatagaaaatttattacatctctcatttggcccagttagtcactgaaatttcttggttatgtttagcagctgttgtagta

SEQ ID NO: 163441 - DNA, 710 bp, Homo Sapiens
  misc_feature (632)..(641): n is a, c, g, or t
atcatacaagcagggctcaggctgaaaaatattcaagaagagttcacgggagaattcctggggagtcatagctatatccggctcatgataaaagtcacagatattaggggactacccttattagagtcaatatctggagttggagtggggagcaactaagctttcccatcactcttaagtcatttgatgctcaaaacagttctatgttagggaaaccgaggcaggagtatgctagctacatacagtgcaaactaccccacatctgaaggacttaaggcactccagttacatttgcatatattgggtgggaaggtggggtcttggctccacacagtcattcagagacccaggcttctatctttagcacttcttctccaagagtttagtgagctaataacagggcccacagctagaaagtgagggagtcgggatttgaacccagccagtctcattctgaactatgatgctatggtgagaaacaatagtactggcatctaactagatctacctggcatgtaacttcagaactgggaagtgggagataacttgggattctgaggaacatttgttccttgttgccaaggaatcaagctcttctttttaaggagtgagatgggtaaatctgagagacnnnnnnnnnnactttgtcttcggtgagaatttcagattcaacacataaaatgaagccttttcctccaaagttgcccgaa

SEQ ID NO: 163442 - DNA, 688 bp, Homo Sapiens
  misc_feature (256)..(305): n is a, c, g, or t
  misc_feature (488)..(498): n is a, c, g, or t
gatgggggcaactaagctttcccatcactcttaagtcatttgatgctcaaaacagttctatgttagggaaaccgaggcaggagtatgctagctacatacagtgcaaactaccccacatctgaaggacttaaggcactccagttacattttcatatattgggtgggaaggtggggtcttggctccacacagtcattcagagacccaggcttctatctttagcacttcttctccaagagtttagtgagctaataaccnnnnnnnnnnnnnnnnnnnnnnnnnnnnnnnnnnnnnnnnnnnnnnnnnncattctgaactatgatgctatggtgagaaacaatagtactggcatctaactagatctacctggcatgtaacttcagaactgggaagtgggagataacttgggattctgaggaacatttgttccttgttgccaaggaatcaagctcttctttttaaggagtgagatgggtaaatctgagagacnnnnnnnnnnnactttgtcttcaggtgagaattttcagattcaacacataaaaatgagagccttttccctccaaaagtttgcccctgaaataaatgtgcgtgagactatgcttgcctggtgcttggctcttttcattagcaaatatcaacccccaaatgctgatcgaccttccaccatgttcagctcttgtacgtatcaca

SEQ ID NO: 163443 - DNA, 944 bp, Homo Sapiens
  misc_feature (189)..(497): n is a, c, g, or t
atgactcgacaagagctgcgagagacatgctaatagttaggtctgactaatatatgtgagtgttcactgtcctctgagactagacattagaattctcaagaaagggcataagataaaaccagtcctagaagcaagacatttttgctaaaatctaaaatctataccttaaaaattacccaagttctaagnnnnnnnnnnnnnnnnnnnnnnnnnnnnnnnnnnnnnnnnnnnnnnnnnnnnnnnnnnnnnnnnnnnnnnnnnnnnnnnnnnnnnnnnnnnnnnnnnnnnnnnnnnnnnnnnnnnnnnnnnnnnnnnnnnnnnnnnnnnnnnnnnnnnnnnnnnnnnnnnnnnnnnnnnnnnnnnnnnnnnnnnnnnnnnnnnnnnnnnnnnnnnnnnnnnnnnnnnnnnnnnnnnnnnnnnnnnnnnnnnnnnnnnnnnnnnnnnnnnnnnnnnnnnnnnnnnnnnnnnnnnnnnnnnnnnnnnnnnnnnnnnnnnnnatgagccaccgcgcccagctgcttcttgtattttctgagtttatttatttctctgatgctcatattagtatttttgtatgcctttttcagcatgccaaggaaaacaaagggaaggtgattggtaatctgttttggttattagcacaccaagcaggaggctacccactccaccttacacctcagaggtgaacatgggaattgtgctgaaataaaagtgagacattccaagggagagttgaacacacatgtcagagtcctattcgtgagtttctcacccaacctgcaggccgggctcctgccagagaaacattgacacttctggattctcctggatgaaagaaaagggtgagctctaacaactacctgtgatttattaagataaatatgttcacaaaccaggtgtaactccttcctcttatcagagaatgacagtcatctcttgtagac

SEQ ID NO: 163444 - DNA, 438 bp, Homo Sapiens
  misc_feature (245)..(328): n is a, c, g, or t
tcaagaaaagcacttctctagtggaagctgattaaacttgtgaggaggtgagatcgagagaggcaaatcaggtgaaggagaagtacaacggagtgtgagtttagattcagaaaggctgaaccatctgataatggcagagtttagtgtatacagaaaggattgaaaaactaaagtggaccgtataggaaaagtaaataatgtgagtctttgtatttcattgcaatgtcattacaggcatacaccannnnnnnnnnnnnnnnnnnnnnnnnnnnnnnnnnnnnnnnnnnnnnnnnnnnnnnnnnnnnnnnnnnnnnnnnnnnnnnnnnnnttatccaacggcacggtgcttacttcaagtcatctggtgctcaccattttggcaatttcatcacagatatagtcaggacgctttcatatatcgttgatcatcgtgtgaaa

SEQ ID NO: 163445 - DNA, 678 bp, Homo Sapiens
  misc_feature (203)..(217): n is a, c, g, or t
  misc_feature (289)..(397): n is a, c, g, or t
aggtcctaagaacactcttctctgacatgcttcgcttctttaacacctacttatctttcaggtctcttcctgtttctctcatttttaaatttttattttaagaatttataaatatatacaaaagtagagagtatgatgaatccatcaccatttctatgtatccattacccaccatcaatagctgtggggatttgatctctttnnnnnnnnnnnnnnngttttcttgaaatcccagtaaataccttttatttttttcttcctagcacattaacacaatttgcaatcatgnnnnnnnnnnnnnnnnnnnnnnnnnnnnnnnnnnnnnnnnnnnnnnnnnnnnnnnnnnnnnnnnnnnnnnnnnnnnnnnnnnnnnnnnnnnnnnnnnnnnnnnnnnnnnatgtgaaaggaatgaattatttaataactgaaaacgtcgctaaggggtttgaaaagacgagcatttgatgaaaactttttgaaaaagattggtaagaatgacttaggcagctttatattaaaacaataggtaccgttaggctcagattcatatacttattaagcaaccttgtgctcttaatttttttccaagtaagcttctgtgtaaagcaaactcagtgaccttgtgaagagaatattatgtgagtttataagatattgtccatagtaaataactaaata

SEQ ID NO: 163446 - DNA, 686 bp, Homo Sapiens
  misc_feature (503)..(595): n is a, c, g, or t
taagagataacatatgtaagcccatagttcagagcctgacgctttacagacactcaacaagggatgttcttattctttttttcttgagaaacgagctaatcatttgaaatgtaaaattttgttcatggaattgcataagataccattctatttctacaactatttctgtagtcttaaatgccctgcattaaaagattgttgtttaatatattgtacctcttttgccatctatttgttaaatattggctgcctggtttctgattttgctgaatttgacttttttaaaaaaaacctaattgttttcttcaagaatacaagccaacattgtaaaggatgatttactctaagataatgctgaaatagatgtggtatgaaatgttgttaaatttataagataaatttgggatattcttttactggacaaactttttattaagaatatattgtttcttgaaacactaagttttgggataagttattaaaacaaatttgggagtggcttnnnnnnnnnnnnnnnnnnnnnnnnnnnnnnnnnnnnnnnnnnnnnnnnnnnnnnnnnnnnnnnnnnnnnnnnnnnnnnnnnnnnnnnnnnnnncttccattgctcattcatgtttcacgccgtttgcccttcaattctcttccacgatcagactctgtccctggtgatatctactccgagtata

SEQ ID NO: 163447 - DNA, 732 bp, Homo Sapiens
tgaccgcggcaacaggatgagctcgggaaatggttgtcacacggagtagatataatgtgccactcgctcattagagtgctatagcgtcagataatacttaccatattaagtctgtgctttaagagggacccacaggcatgtggcaccacgcagtctaaagttggtaaaggagactgcacttttagtttagtcacccacacgttctctagcgagatacagaattgcatttatactcttttcttctacatgaatgatccctcttatctcgcaagaggtgggggagaaagagagctgcatcggtacaagggcacaatttttttggtcaaaagttgacaccttttaaattccctctcccacccctccctggaaaaaagttacttccttaattaggttttctatttagtaaccaacattgactggacagaaaatatgaggcttgggttccaaatagatgagcttgttctttattgggtttgtaccgtgcagttcttgctacagttgttaaggagttagggctatgtcccatcaggaggcatctgtaggattttgatctccaaggaatagtgggtgagtcgcaaatagtttgctcagaagtaggcagagtcaaaaaagcaacttcaactaattgattcctttgtccaaaagagttaaaacattaaagtatatgcgggacttaattttgtaatagttttagggttttgaaaaaatatggaaatcattttttttattact

SEQ ID NO: 163448 - DNA, 613 bp, Homo Sapiens
ggtaaaaggcttcaagtcagattgatgatcaagagaagtctctaccccagctccaaggattgggaaagcaggtggtggttccaagcttctaaataaattattgaagctctccatcctgttctgtgagtgtgtcttctctgtctccttcacgtcatagccgtgacccaccgttcatctctgctcttgcgtaaagatgaccgatggagtccaaagccaagtggcttcaccagctgacaagccaccctcctgcagcctgagtttcacagtccactgggttcgttgtcatgcggtgtttgaatggttaagccctggcagcatttcagatcgggcaaaaaaatatcggatgcacatagcagaaccataggtggtattgatagctttgctttgtactcctcactgtttctgcctacgcaaaatatccatgtttcctctgagaaatctgttgtggactgaaagcgctgctggctgtgaaatttaataaagtgtgtatgctttgctagaaaattatttcttggacaataggaacagtcattgatctgtaaatcctggctctaaacagtgagtggtccaaggactggatctagcccatgtcttggtcccctctagtgccttg

SEQ ID NO: 163449 - DNA, 655 bp, Homo Sapiens
agaggatcactacttagccccagacttttaccatgtcttcaaaaagatgtggaaactgaagcagcaagagtgccctgtaatgtgatgttctctccctggggacctatagtgccagtcgcagtttctatggcatggctgacaaggtagatgtgaaaacttggaaatccacagagcacaatatgggtctagccttgacccggaatgcctatcagaagctgatcgagtgcacagacactttctgtacttatgatgattataactgggactggactcttcaatacttgactgtatcttgtcttccaaaattctggaaagtgctggttcctcaaattcctaggatctttcatgctggagactgtggtatgcatcacaagaaaacctgtagaccatccactcagagtgcccaaattgagtcactcttaaataataacaaacaatacatgtttccagaaactctaactatcagtgaaaagtatactgtggtagccatttccccacctagaaaaaatggagggtggggagatattagggaccatgaactctgtaaaagttatagaagactgcagtgaaaatcacagttacaaaagcgacagtcttctatttttgatatttgtcctaacaggacatacattgaatagcgagttaggagcggttc

SEQ ID NO: 163450 - DNA, 845 bp, Homo Sapiens
gggacagtgcagccagccttcagctctgtggccaaaggcccaagagcccctggcaaccaacccactggtgcaagtcctagattccaaaggctgaagaacctggagtctgatgtccaagagcaggaagagtggaagaaagccagaagactcagcaaacaaggtagacagtgtctaccaccacagtggccataccaaagaggctaccgattccttcctgctacctggatccctgaagttgccctggtctctgcaccttctaaacctagttcttaagagctttccattacatgagctgtctcaaagccctccaataaattctcagtgtaagcttctgttgcttgtggacagaaaattctgacagacctaccctataagtgttactgtcaggataacatgagaacgcacaacagtaagtggtcactaagtgttagctacggttattttgcccaaggtagcatggctagttgatgccggttgatggggcttaaacccagctccctcatcctccaggcctctgtactccctattccactaaactacctctcaggtttatttttttaaattcttactctgcaagtacataggaccacatttacctgggaaaacaagaataaaggctgctctgcattttttagaaactttttagaaagggagatgggaatgcctgcacccccaagtccagaccaacacaatggttaattgagatgactaataaaggaaagactgttctgggcttcccagaatagcttggtccttaaattgtggcacaaacaacctcctgtcagagcagacctcctgccaggaagaggggtaagagactagaggccgtgtgtgcagacttgccc

SEQ ID NO: 163451 - DNA, 937 bp, Homo Sapiens
  misc_feature (861)..(873): n is a, c, g, or t
gctcggtacccgagagataagcaggagcaaactgaggtgcttgctgaaggatccccacgttccctgtcttcagtgcctgatgtgacacatcacctggtgaccatgcagtcagggaggcaatcatatgaagtttctgtcttaactgcagtaaatccacaagagttactaaaccaaggagatttaactgaaagacggacatgagcgtgggtgctgactcctggaagagcaactctatctgatctcaaaatgcgtatactgggaacaggatgccttagcccacaacagaaccagaatgaatctttgaaggcacaagactctgcttttgccactcttcctctttcctggtatagaagatggatgtaggagagcttcttttctaactaccatctgatcagacaaggaatgaagcaatgactgtgggctgggaaactgtacctacctctcttcccactgcaaatttctgggatagaccaaaagtgaatttgattatgtgttggctgaagttcttcattctgactgttgaggggaggttttcctttgaagagttttcatcccagactcagctgtcttttcacatggatgaaataattcctgctaccaacaacagagcttcaccaggaagttgagttttcaagatgccttgttgctttgaagaagggagtgatgtcaattctcttgttacattctccctttagcaacctgagtaagagactctctgccactgggctgcaaaaaaataaattacttgaatctccccttggcccaggctgaggtactatcttgtcctatacacttctacttggtcactttgctttcttcgttaatggaacatacagtagcatgttaagagggatttcatgnnnnnnnnnnnnnaaagttaaaaactacatgatgcagagattcaggttttcctttaaataaacaaaacagcccagtc

SEQ ID NO: 163452 - DNA, 744 bp, Homo Sapiens
  misc_feature (29)..(29): n is a, c, g, or t
cagcaatcaaactgtcatgggccaactcntgaacccgaaggaaccagggaatgctactgtctgtgctctcactggagaggaaatcattccctgaatcttctgcctcatcctgtacaaacactaagtgctcagctgaagagcccagacctgctcttgttaggttaagaagaataaaagaagtgctatcacttggctgtagatcttgcaacaagctagaagactctgaagtggacaaaaactccggggatttctgtacagtctgagctctcgtctcctctccgtctggacccacattcacccgaaggcttctcaaaacagctgaggaagggacctccttggaggagttagaatgatttgtagtatcatctggtaacattagccgactgcattctgaggcttcagtcacgggaaggagggacaagcaagtaatatctttagcttctgattctacaagcccctgtcccaatgggatggacgtattctgaacaaactgtaccaggagctctggtttggattctaactcatctgataacattgattcagcttccaaaacctgtagctattcaggggacaagttcaaatttaattcagagccaatgataccttcctgttatgttcatattcctctaggaaatactatgctcttcccgtaagatgttgtactaggtgggtaatcaatgtaaccttccagttccgggaagccggccggccgtcagtcggtcccgaattccgtccacacacccc

SEQ ID NO: 163453 - DNA, 1600 bp, Homo Sapiens
  misc_feature (1429)..(1429): n is a, c, g, or t
ggcggaaaattcccccggggatatcgtcgacccacgcgtccgcaacatcttacgggaagagcatagtatttcctagaggaatatgaacataacaggaaggtatcattggctctgaattaaatttgaacttgtcccctgaatagctacaggttttggaagctgaatcaatgttatcagatgagttagaatccaaaccagagctcctggtacagtttgttcagaatacgtccatcccattgggacaggggcttgtagaatcagaagctaaagatattacttgcttgtccctccttcccgtgactgaagcctcagaatgcagtcggctaatgttaccagatgatactacaaatcattctaactcctccaaggaggtcccttcctcagctgttttgagaagccttcgggtgaatgtgggtccagacggagaggagacgagagctcagactgtacagaaatccccggagtttttgtccacttcagagtcttctagcttgttgcaagatctacagccaagtgatagcacttcttttattcttcttaacctaacaagagcaggtctgggctcttcagctgagcacttagtgtttgtacaggatgaggcagaagattcagggaatgatttcctctccagtgagagcacagacagtagcattccatggttcctccgggttcaggagttggcccatgacagtttgattgctgctactcgtgcacaactggcaacagaatgcaaaaaccagcagcaatggagaaaatgtccaccttggttctggtgatggggcagtcaaaagattctgggccccttcctcaagtggaaacagaagctcaagtgtacagttgaaggttgtgaccggacatttgtatggccagctcactttaaataccacctcaagactcatcgaaatgaccgctccttcatctgtcctgcagaaggttgtgggaaaagcttctatgtgctgcagaggctgaaggtgcacatgaggacccacaatggagagaagccctttatgtgccatgagtctggctgtggtaagcagtttactacagctggaaacctgaagaaccaccggcgcatccacacaggagagaaacctttcctttgtgaagcccaaggatgtggccgttcctttgctgagtattctagcctccgaaaacatctggtggttcactcaggagagaagcctcatcagtgccaagtctgtgggaagaccttctctcagagtggaagcaggaatgtgcatatgagaaagcatcacctgcagctgggagcagctgggagtcaagagcaggagcaaactgctgagccactaatgggcagtagtttgcttgaagaggcttcagtacccagtaaaaacctggtgtctatgaattcccagcccagccttggtggagagtccttgaaacctaccaaataccaattctatcctgnggagttgatgacgaggtgctttgctgaaaggatcccccacgtttcccctgtctttcaggtgcctgaatgttgacaccatcaaccttggtgtacccatggcaggtccagggaagggcaattccatattgaaaggttttctggtcctttaacctggggcagtaaaattccaca

SEQ ID NO: 163454 - DNA, 1106 bp, Homo Sapiens
  misc_feature (710)..(711): n is a, c, g, or t
gaagaaaaacatttaatttttattttcaaaatgttgccataaacatacatacaacactgaatttgatcccctccattggctgtctgtgtgccaggaagcacttgtgacagaaaacatatataagcttagggtaaaagtttataaggaatcaaaatatcttccaaaaagagggggtaggggcaagaggaatcaataagtttaaaaatcataactttcattttataaaaaatagtttgaataattgtcttataaatctttaatgcttacaaaagcaggaaatacatttaaaatagtctttttaacacagattcatttgtacaatgtggtcataagaaaaataactaaaatgacatttcagtagtctatattcttttctcagcaaattccacataaaatttaactaatttacaattcaaaataagattttaactgccaacaatgtcagactagttgtggttagtacctgaatatcaagctcttctccattttatatattgtaccaaaattttaaatacagctcagcagtgataggtactaataacaatacctgactacatggttaccacccgtgactactgcattgcagcttaaaacatgctttggtcagtaaatttaaaagatatacatcaaataacaaggccagaaaagttgttttagaatttcctgaccttaagtaaactttaaatacattgacacaggccaaaaaatanntatgatcaaatatacagaaaggtttctattttgtcaaccatttggcatttttatattagtaatttgcgctctttaaaataatatttttatactcctgtgcactgatttatcattgctctccgaattaaaactaaactacaattaccttgctagaatggccagtagcatatatattaattgtgtccttttgcatttccacgaagatgatccgtcatcctgtgaactttttaaattttggaccaggaaagaaccaccaaccatatccaatgagaacacaaataatggactccacataataaccatccagggatgtaacacatgagccacccagttgtcttgcaaagctcaacagcatcagatgttcgacaattctggtttgatgctcctactacact

SEQ ID NO: 163455 - DNA, 767 bp, Homo Sapiens
aggcacgtacccaaaggggaaaagctccatccagatgccgtgtgagaggaaggatgtggactgtccttcccatcctcgctattgcagcaccacattaaataccagcatttgctgaagaagaaatatgtatgtccccatccctcctgtggacgactcttcaggcttcagaagcaacttctgcgacatgccaaacatcatacagatcaaagggattatatctgtgaatattgtgctcgggccttcaagagttcccacaatctggcagtgcaccggatgattcacactggcgagaagccattacaatgtgagatctgtggatttacttgtcgacaaaaggcatctcttaattggcacatgaagaaacatgatgcagactccttctaccagttttcttgcaatatctgtggcaaaaaatttgagaagaaggacagcgtagtggcacacaaggcaaaaagccaccctgaggtgctgattgcagaagctctggctgccaatgcaggcgccctcatcaccagcacagatatcttgggcactaacccagagtcctctgacgcagccttcagatggtcagggtcttcctcttcttcctgagcccttgggaaactcaacctctggagagtgcctactgttagaagctgaagggatgtcaaagtcatactgcagtgggacggaacgggtgagcatgatggctgatgggaagatctttgtgggaagcggcagcagtggaggcactgaagggctgccaatgcaggcgccctcatcaccag

SEQ ID NO: 163456 - DNA, 464 bp, Homo Sapiens
  misc_feature (29)..(29): n is a, c, g, or t
  misc_feature (47)..(47): n is a, c, g, or t
  misc_feature (62)..(62): n is a, c, g, or t
  misc_feature (83)..(83): n is a, c, g, or t
aagatgagaccttaccaaaccccaacttnagaaagggaaaacccccnaaagcccacggaganaattcagggaaggtcaaagangagaaggagaagaaggaaattaaagtgggaagtagaggtgaaggtgaaagacagaggagaatgaaattagagaggatgaggaacctcccaaggaagagaggaagaagacgaaaagatgacaaaaagtccacgtttacccaaaaggagaaaaaaagcctccaatccagtatgtccgttgtgagatggaaggatgtggaactgtccttgcccatcctcgctatttgcagcaccacattaaataccagcatttgctgaagaagaaatatgtatgtccccatccctcctgtggacgactcttcaggcttcagaagcaacttctgcgacatggaaacatctcatagtgtacagccacatacaaacaagaacccccccgtgccgaat

SEQ ID NO: 163457 - DNA, 400 bp, Homo Sapiens
gagtgtgaaatgttctcttagctagaaactccgttgtctcttcatgttctatcaatcgtaagtttctcaagagatattcacgtgcagtcttcagacggttttctttcatagcaaactgtcttctagttctcctatgccatcatccaggaggaagtgtgaggatatcaggaaaggacagtccctggagtcccgcgaacactgaagctccaccaccacagcttcctggcctccctccattcccactttctccaaggtgttatattttgcaacttcaaaatcttgaggaagatgaggaatttcaacattctgcataccaaactcagtgagttccacagtgtcttcctcctctgtggcactgtccgggcatagaccttctgttttcacttcagaactgctcgcc

SEQ ID NO: 163458 - DNA, 816 bp, Homo Sapiens
ctttctagatggctctgaacagcaacagaacagtgttcacagcgattcaaagggtggcattgggttggacgttctgggtacaagccaacctagtcccacgttgtacgtgaatgtttaatgtgctctcaaaacatggaaaataagtttagtgcacatagctaaatcacaaaacatccaatttctctgtttcctcaggaagtcattactgcgccaccacatcacatgaccttaacatgatcaatgtatttctctgccttgacatttaaatacataaattgagataagtagattagaaaatcattcaaatgataccataatttgtacgggacagggtgcgggcaatggccacgtggccaaggccccgcaggaacgcgccgaggtctccctcaccctccaggtgtccttcgcacccaacagtgcgtctgaggaacgagctgcagtttgagcgttcccctgagatgtgcgtagcctccgtgtaaatgtccactcccatggcttaattgcctatcagacgcattttcccagacgaaagcaatgttgggttggggaagacagtgcagccacccagcctttaccagcagcgtacggcagacgaaggcagtcgaggtgtggaggtgatcacgaagatacatgtgtttgactgttgaatttgaaagtttacatgcttttatgctttgtgttggtgtgtaatttttgtactcttggtggctagtttttgtcaaatctttttttggaatattgcttaaatgttttgattttatgatagtgaagcttgtattcagtgttttgccaattaatattatatgcttgtaataa

SEQ ID NO: 163459 - DNA, 913 bp, Homo Sapiens
  misc_feature (594)..(609): n is a, c, g, or t
cagactgaccgcggggcagctgcggagcatgtcgaccccggcccggaggaggctcatgcgggatttcaagcggttacaagaggacccacctgtgggtgtcagtggcgcaccatctgaaaacaacatcatgcagtggaatgcagttatatttgtgaccagaagggacaccttttgaagatggtacttttaaactagtaatagaattttctgaagaatatccaaataaaccaccaactgttaggtttttatccaaaatgtttcatccaaatgtgtatgctgatggtagcatatgtttagatatccttcagaatcgatggagtccaacatatgatgtatcttctatcttaacatcaattcagtctctgctggatgaaccgaatcctaacagtccagccaatagccaggcagcacagctttatcaggaaaacaaacgagaatatgagaaaagagtttcggccattgttgaacaaagctggaatgattcataatagacaactggtctgttaatctttttcatcattgttgtgtataatttacctctcattagaaaggctaacaaattttaagtgccacaggttttaaggattctgcagnnnnnnnnnnnnnnnngtccttcagtttagaacctacaaaagcttgtgtatcttgattaatgtactttttattgcatggtgtgaactaagttattgctgcataaatttgtaatatatcctgtttgtatttttttccaagtgtataatgttggtgtggagttttcatgacagaatatacacattttgtaaatctgtacttttttcaaatattgaatgccttatttttgaattctttagatttttaaattggagaaaagcacttaaagttttttatatatgaatattacatgtaaagctgttaaaatacataacttcagtgc

SEQ ID NO: 163460 - DNA, 656 bp, Homo Sapiens
ggggccctgggagagccagaccccaaggcccagacaggctcaggtttccttccttcgcagcttttagaccaaaatatgaaagacttacaggcctcgctacaagaacctgctaaggctgcctcagacctgactgcctggttcagcctcttcgctgacctcgacccactctcaaatcctgatgctgttgggaaaaccgataaagaacacgaattgctcaatgcatgaatctgtacccttcgggagggcactcacatgccgcccccagcagctcccctgggggctagcagaagtataaagtgatcagtatgctgttttaataattatgtgccattttaataaaatgaaagggtcaacggccctgtttatattggtataattatttactcttatttggtataaagggttttcgtgtatctctatgtggatctaaataatacaggattgtctagaagcggtttccaggccaccgctctcctgcctacatcccatcgtggctgctgcggtgtcactgggctaccgtgagatccaagttgaaatcagaagcctactttgatggtaggtttgaatgacgtgtcctacagcctcagaggcagcaggaggctagcaaagctaacatgcctccttctatgcccccagcctctgtccctcttgttgac

SEQ ID NO: 163461 - DNA, 816 bp, Homo Sapiens
actccagctctgcatctggacacactgtcagccatcagatcctgaccaggtgctcagcctctttagggatatgtcacaatttgccgtgcccggtggctctgggcagcctttggacatgtagtggttgtgtcttggaatacaagagttgtgcctgaatctgggactctctgtgacccggggaaaatcacatcagcctctctgaaccccaagttgtctctgatctataaaatgaagacagtatctacttcataggattgatttgatggacatatgtataagcagtgccagggacaactagtaggtggtcattggagtgtggctacagttattatacagttacacatggattccttgattccccattaagccctggtggatgaatgaggaaaatgcagcagggggtccatcctagaaaacccaacccactccagataatcgcgccagcctcacacctgagaagctgcttctacgacctgctgaggacataatgataaacacacacaagaggctactgtgtcccaggcacttgtcttaactcatttaacttttctaacaaccctaaacctagggttctcattttccagatgagaaaactgaggcatgtaaggttaagtaacttgcctgagggtcgccgattagcatcagagccggcatttcaaatagacaggccagctctagaggccaggatgtttggacagcctccaaattgtcaccctagccttcagggcaaggctgcacacacggcctctagtctcctacccctcttcctggcaggaggctggctctgacaggaggttgtttgtgccacaatttagg

SEQ ID NO: 163462 - DNA, 584 bp, Homo Sapiens
ggttggaataaatgtgaggaatgagtagcatagcattctgacaaaagggccccagattcttaatttagcaaactaagaagcccaattaaaaagcattgtggctaaagtctaacgctcctctcttggtcagataacaaaagccctccctgttggatcttttgaaataaaacgtgcaagttatccaggctcgtagcctgcatgctgccaccttgaatcccagggagtatctgcacctggaatagctctccacccctctctgcctccttactttctgtgcaagatgacttcctgggttaacttccttctttccatccacccacccactggaatctctttccaaacatttttccattttcccacagatgggctttgattagctgtcctctctccatgcctgcaaagctccagatttttggggaaagctgtacccaactggactgcccagtgaactgggatcattgagtacagtcgagcacacgtgtgtgcatgggtcaaaggggtgtgttccttctcatcctagatgccttctctgtgccttccacagcctcctgcctgattacaccactgccccccaggcaacatct

SEQ ID NO: 163463 - DNA, 501 bp, Homo Sapiens
atgtacaatatacacataatacatggtatacagtaggtacacaagatgttatataatacaagctgtttgtatgtaattgttgaaactcatcttttgcaattgtatgttgcaacaaggcaaatgtccatttctgtaccaagtttctcaagagtccagggatatgggaaaaattatgttttacacacatactgaaatctgaaatctaagtttgaactttgaggagcgtttttaagtgtactgccatcagctccctgttttggttggaattttcaacagtgcttcccatccagtgactaggaggctttggaagaacactaggagaaggtggatcactaaactttgccccagcataattttccttttggctcacttcagttagaaatgctgatttcttcaaatgcgaatttttaatgttctcggtattcttaaaaggcttgttttcatgcttctgattctgtcagatgaacagatcctgcctaattgttgcatttcttgttggag

SEQ ID NO: 163464 - DNA, 610 bp, Homo Sapiens
  misc_feature (23)..(23): n is a, c, g, or t
  misc_feature (40)..(40): n is a, c, g, or t
  misc_feature (59)..(59): n is a, c, g, or t
  misc_feature (75)..(75): n is a, c, g, or t
  misc_feature (83)..(83): n is a, c, g, or t
  misc_feature (92)..(92): n is a, c, g, or t
  misc_feature (125)..(125): n is a, c, g, or t
  misc_feature (199)..(199): n is a, c, g, or t
  misc_feature (365)..(365): n is a, c, g, or t
ttagggaaccatcaacccttggngatttggacaggctggntacttggaaaaaaaatccncaggtccccttggtgnaaataaanatcgggtcntcccatgtgccttagcacacacttacaaatttntcccattgtctatatacaaaacacctgcaaatgtgggcggggcaaaatacatactttcataacaaaactataantatacctctcaagtatgaacaatatacacataatacatggtatacagtatttacaaaattataaaatataatacaagctgtttgtatgtaattttttaaactcatcttttgcaattgtatgttgcaacaaaggcaaatttccatttctgtaccaaattttctcaangagtccagggatatgggaaaaattatgttttacacacatactgaaatctgaaatctaagtttgaactttgaggagcgtttttaattttccttttggctcacttcagttagaaatgctgatttcttcaaatgcgaatttttaatgttctcggtatttttaaaaggctttttttcctgcttctgaattctgtcagatgaaacagaatcctgccaaaagtgttatcatttctttttgcagagtcgtgg

SEQ ID NO: 163465 - DNA, 866 bp, Homo Sapiens
  misc_feature (786)..(810): n is a, c, g, or t
gggggcccaggcggggtgcgagtggcgcagtcggagcccgttgcggcccctgaggaagcgaggaggcgtcggcgtcggctgaggcgggcggaccggcgaggcgaggcggcggccccaggcccgagggactcgggagctcgagcagcggcggcggcaagacctctccccctcggaggcggcgggcggaggcggcgggagcggtggtgccccccccgggcacggggccatgtacaacgggatcgggctgccgacgccccggggcagcggcaccaacggctacgtccagcgcaacctgtccctggtgcggggccgccggggtgagcggcctgactacaagggagaggatgaactgcggcgcctggaggctgccctggtgaagcggcctaatcctgacatcctggaccacgagcgcaagcggcgcgtcgagctgcgatgcctcgagctggaggagatgatggaagagcaggggtacgaggaacagcaaattcaggaaaaagtggcgacctttcgactcatgttgctggagaaggatgtgaaccctgggggcaaggaggagaccccagggcagaggccagcggtcacggagactcaccagttggcagaattaaatgagaagaagaatgaaagactccgtgctgcctttggcatcagtgattcttacgtagatggcagctcttttgatcctcagcgtcgtgcccgagaagctaaacaaccagctcctgagcctcccaaaccttacagccttgttcgggagtctagcagttctcgctcaccaaccccaaagcnnnnnnnnnnnnnnnnnnnnnnnnntagaggacggtcagaatctgagtcctagtaacgtaagcatagtgtcaaactatatc

SEQ ID NO: 163466 - DNA, 801 bp, Homo Sapiens
aatttaattatcaaaaacccctacaaatacccagtggggaaggcataaggaataaggcaaaaggaactcttttcttgaggaaagaaaaattttgtagatgactctgaaaagtggtggaaatatcaggaaaaaaatgacttataaaacaaaaattgtaatataagggggaaaaactagccatgaggaagctgactgtgaggccctgctaattttgtattttgaggtcctatgcacgcagttctcagtggtgccctctgtgacatatagggaaggaaatactgaccaaagctctagtaattcaaaaccatatatcgacttcagagaagaaagcttccactttgaaatatggaagccccacgtattacaccaaatttactaacatcaaagaggaaaacaaagatgccagtaaaagacaattcacaggaagcataattactttctttagcttctaaaaataatttttaaatggacttctctattatccctcctaactcaaaatcaaataaacaacaacaacaacaactttttaaaaaggggattcatccttcattggcagttgctgtgggaaaaaagaaagccaaaaagctcataaaatatacctcccatgaaatacaatacatagttacaatttcggttctaaaagccaatgtaattcaagcagtccaagttaggtgattttacagtatgcaaaatatatagcttcgaagggtggtaatcaatgatgttcaattacagcactttgggggcttgctgatttgccttgattcactgttctctgaaacggacggagcactctacatg

SEQ ID NO: 163467 - DNA, 1183 bp, Homo Sapiens
gccaagtaacgagcagctacatttgataatcttcattcccaggatattctctgtttcaatgtagaattctccacattcataaaatgatatcttcaacctactgcttacagtcagatatgccagtatcagttcaataaggcaagtcacaccttttagctattctcttaagtcctacagagatagtttcacttcaatttcacagggacacttcatgatttatctaataaaggtgataagacaatcctagtgaaggattcctttaagttgttgcttttctagatggaaccaaataattaaactttctcttctccatactggagtttgtttctttcattatgttttagtatcatggagtcgaacaatgccttggcagggcatgaactatataactcagaagtcaataaacagttgaagatgatcttttctaaagtaaaaatcaactgtttagacaacacttaaatacacattacctgtttaaagacacacacacaaaagcaaaatttaaaaaccaaatcaaggaataacgttttgtgacaatttcagtagcacaattactggtctaacagttttgcattgtgggaatttaaatagcggcttacaatgaaagaactatgcacaatgcttccaggattgcagaggagagaggtaagcccagaggatgaaaagcatacatttgcctaatgtgtgtagaaaattccctgatcaaatgtccaactaacttttaaatactatatttaaccttagaagtacttttctattttttggtgaacatgctgattgaaagaaaaatcaatcattctgttaaatgaagtacagtattctacaggggaagcaccaggggttctggatcaaacccttaggacatgaagaaaacctaagtactctgctggttcaaaatctgtatcacaggaatccctggctcccttccatgtgtccagagatgctctcagctctacaaataccaacagatggaaggaaaagcaagtgaacatgtgaccatgtgggaggggggctggggacggtaatacactgctcagactttcagcagcaacacaatcctgttggtctgaatatcctgagtttataatgataatataaatagtgcaccaacacaataaagaaaatcacagtgtgaacagaattactgaagaagtggaataatgtacatgtcagtgatctgcta

SEQ ID NO: 163468 - DNA, 803 bp, Homo Sapiens
  misc_feature (226)..(234): n is a, c, g, or t
  misc_feature (357)..(415): n is a, c, g, or t
caagaatatcttaacaaaatatcgttgttagtcggatgatcttattcttaatcaatgtcccatggccagatatcctataatatactagatgcatgtgtgctaatttttacttgaatttaattataaattgtaccaatcaaaaggttctttttctttccagctccaattttttgtaaaacagaagttccagagcacagaaggtcatcatcacaagcaaactttattnnnnnnnnnctagaagtgtgctttgattttgctgttatttgttttatcacttctatatttggtgaacagccacagttactgatatttatggaaaagtactttcaagtacaaggtcaatacataagccagagnnnnnnnnnnnnnnnnnnnnnnnnnnnnnnnnnnnnnnnnnnnnnnnnnnnnnnnnnnnaatctgaatctttttgagcactgacttgaccccacaagtggaaaattccccacccgacacctttgctttctgatggttcagtttaaacagattttgttacttgcacaaaaatttttgtataaattaccttcaggctatatgtataaggtggatgtgaaacatgaattatgtaattagagtcgggtcccgtagtgtatatgcagatattccaaacctgaaatcaaaaacacttctggtccctagcattttggataagggatactcagcttgtacctatatattcatatatattcactgttgttagaaatgtttaagttgctgttctgtgatgaatctaaatcttttctcttgctaccaagctattgtcactgctgtgcaacacgaataa

SEQ ID NO: 163469 - DNA, 576 bp, Homo Sapiens
cactagaagctgagatgctcaaaacagtggtgaaggaaatacaggtgctgcagaatcttctttttctcaggaggtttctagagaacaacagccatcatcagcatctgaaagacaggcccctcgagcacctcagtcaccgagacgcccaccacatccacttcccccaagactgaccattcatgccccacctcaggagttgggaccaccagttcagagaattcagatgacccgaaggcagtctgtaggacgtggccttcagttgactccaggaataggtggcatgcaacagcatttttttgatgatgaagacagaacagttccaagtactccaactcttgtggtgccacatcgtactgatggatttgctgaagcaattcactcgccgcaggttgctggtgtccctagattccggtttgggccacctgaagatatgccacaaacaagttctagtcactctgatcttggccagcttgcttctcaaggaggtttaggaatgtatgaaacacccctgttcctagctcatgaagaagagtcaggtggccgaagtgttcccactactccaactcatatcataca

SEQ ID NO: 163470 - DNA, 831 bp, Homo Sapiens
  misc_feature (697)..(697): n is a, c, g, or t
  misc_feature (720)..(777): n is a, c, g, or t
taggaagacccacgtccacacctactcctcctcagcagccgcccagccaggtccccgagcacagccctgtggtttatgggactgtggagagcgctcatcttgctgccagcacccctgtcactgcagctagcgaccagaagcaagaggagaagccaaaaccagatccagtgttaaagtctccttccccagtccttaggctagtcctcagtggagagaagaaagaacaagaaggccagacatctgaaactactgcaatagtatccatagcagagcttcctctgcctccatcacctaccactgtttcttctgttgctcgaagtacaattgcagcccccacctcttctgctcttagtagccaaccaatattcaccactgctatagatgacagatgtgaactctcatccccaagagaagacacaattcctatacccagcctcacatcttgcacagaaacatcagaccctttaccaacaaatgaaaatgatgatgatatatgcaagaaaccctgtagtgtagcacctaatgatattccactggtttctagtactaacctaattaatgaaataaatggagttagcgaaaaattatcagccacggagagcattgtggaaatagtaaaacaggaagtattgccattgactcttgaattggagattctcgaaaatcccccagaaagaatgaaactggagtgtatccncagctcccatccccccttccacnnnnnnnnnnnnnnnnnnnnnnnnnnnnnnnnnnnnnnnnnnnnnnnnnnnnnnnnnnacaattcccaggtcattggttccctgcctgcttgccaactaactgcttaagttt

SEQ ID NO: 163471 - DNA, 457 bp, Homo Sapiens
tgaagtagttgtaagtaatggatggaaagatggatgtgaaggatgaatggagggatggatgtgacccagctgaagtgtgagtaggaacattctcttattatgggtggaggaaagagagaggagattgagaaaataagataaaatacattgatgcgcatcatttttggtgttcgaaaagtaggattgaattaggactaataaatctagagaattttacctctttcaatgcccaagccacacttttctatcactttgaaaccgaaaaagtaaatactttcccaacatttgctttgctggtaggaaatgctttaataaaaatgcaatctctaagttgccatggcatcattaaaagaaaggatgtcatgcccaggtccagaacttgaaggtggcaggcaccagcaagcaccatagctctgaatgggcctgccttacaggtcttcactccaactcatatcaa

SEQ ID NO: 163472 - DNA, 1231 bp, Homo Sapiens
  misc_feature (503)..(525): n is a, c, g, or t
  misc_feature (578)..(591): n is a, c, g, or t
cttgtaacatgaggggacttggactttctttagaggctgggaaaagcgccttggcatatatctccattttacaccaccccctccttccctgatgtctttttcgccaaactgtctctgcctcttcccggagaatccagctgggctagaggctgagcacctttggaaacaacatttaagggaatgtgagcacaatgcataatgtctttaaaaagcatgttgtgatgtacacatttgtaattacctttttgttgtttgtagcaaccatttgtaaaacattccaaataattccacagtcctgaagcagcaatcgaatccctttctcactttggaaggtgacttttcaccttaatgcatattcccctctccatagaggagaggaaaaggtgtaaggcctgccttaccgagagccaaacagagcccagggagactccgctgtgggaaacctcattgttctgtacaaagtactagctaaaccagaaaggtgattccaggaggagttagcnnnnnnnnnnnnnnnnnnnnnnntgtgctgttcaagttttcagctttaagatatctttggataatgttatttctannnnnnnnnnnnnncattagaagttaccaaattaagatggtaagacctctgagaccaaaattttgtcccatctctaccccctcacaactgcttacagaatggatcatgtcccccttatgttgaggtgaccacttaattgctttcctgcctccttgaaagaaagaaagaaagaagactgtgtttttgccactgatttagccatgtgaaactcatctcattacccttttctgggtttgaagctgctgtctctagaagtgccatctcaattgtgctttgtatcagtcagtgctggagaaatcttgaatagcttatgtacaaaactttttaaattttatattattttgaaactttgctttgggtttgtggcaccctggccaccccatctggctgtgacagcctctgcagtccgtgggctggcagtttgttgatcttttaagtttccttccctacccagtccccattttctggtaaggtttctaggaggtctgttaggtgtacatcctgcagcttattggcttaaaatgtactctccttttatgtggtctctttggggccgattgggagaaagagaaatcaatagtgcaactgttttgatactgaatattgacaagtgtctttttgaaataaagaaccagtccctccagcgtatatcag

SEQ ID NO: 163473 - DNA, 1009 bp, Homo Sapiens
  misc_feature (267)..(289): n is a, c, g, or t
  misc_feature (342)..(355): n is a, c, g, or t
  misc_feature (615)..(615): n is a, c, g, or t
  misc_feature (715)..(715): n is a, c, g, or t
cgattgctgcttcaggactgtggaattatttggaatgttttacaaataattccacagtcctgaagcagcaatcgaatccctttctcacttttggaaggtgacttttcaccttaatgcatattcccctctccatagaggagaggaaaaggtgtaggcctgccttaccgagagccaaacagagcccagggagactccgctgtgggaaacctcattgttctgtacaaagtactagctaaaccagaaaggtgattccaggaggagttagcnnnnnnnnnnnnnnnnnnnnnnntgtgctgttcaagttttcagctttaagatatctttggataatgttatttctannnnnnnnnnnnnncattagaagttaccaaattaagatggtaagacctctgagaccaaaattttgtcccatctctaccccctcacaactgcttacagaatggatcatgtcccccttatgttgaggtgaccacttaattgctttcctgcctccttgaaagaaagaaagaaagaagactgtgtttttgccactgatttagccatgtgaaactcatctcattacccttttctgggttgaagctgctgtctctagaagtgccatctcaattgtgcttngtatcagtcagtgctggagaaatcttgaatagcttatgtacaaaactttttaacattttatattattgtgaaactttgcgttgggtctgtggcaccctgngcaccccatctggctgtgacagcctctgcagtccgtgggctggcagttggtgatcttttaagttccttccctacccagtgcccattttcttggtaagggtttctaagagggtctggaagagtgtacatcctgcagcttattgggttacaatgtactctcccttttatggggtctcctgggggccgatgggagaacagagaattcaaagtgccacggttgatactgatattgccagtgtctttggaataaagaccagtcctccaactcaaaaaaacaaggggggcccaaaatacc

SEQ ID NO: 163474 - DNA, 912 bp, Homo Sapiens
  misc_feature (770)..(770): n is a, c, g, or t
gctcgtaccattgcagcgtgactcggtgggaacggagcgcggagcagtagctgggtgggcaccatggctgggatcaccaccatcgaggcggtgaagcgcaagatccaggttctgcagcagcaggcagatgatgcagaggagcgagctgagcgcctccagcgagaagttgagggagaaaggcgggcccgggaacaggctgaggctgaggtggcctccttgaaccgtaggatccagctggttgaagaagagctggaccgtgctcaggagcgcctggccactgccctgcaaaagctggaagaagctgaaaaagctgctgatgagagtgagagaggtatgaaggttattgaaaaccgggccttaaaagatgaagaaaagatggaactccaggaaatccaactcaaagaagctaagcacattgcagaagaggcagataggaagtatgaagaggtggctcgtaagttggtgatcattgaaggagacttggaacgcacagaggaacgagctgagctggcagagtcccgttgccgagagatggatgagcagattagactgatggaccagaacctgaagtgtctgagtgctgctgaagaaaagtactctcaaaaagaagataaatatgaggaagaaatcaagattcttactgataaactcaaggaggcagagacccgtgctgagtttgctgaaagatcggtagcccagctgggaaagacaattgatgacctggaagatgagctctatgccccagaaactgaagtacaaggcccatttancgagggagctgggaccacgcccctcaatgacatggacctctatattaacctggaaattgccccaaaaggagggagccacctcttgtaccccaaagggatgcctgggaccagaacccctgcctttgaccctgaaatggagatg

SEQ ID NO: 163475 - DNA, 525 bp, Homo Sapiens
tggggtatctagaggatccattcggcaacggggttgggatcaccaccatcgaggcggtgaagcgcaagatccaggttctgcagcagcaggcagatgatgcagaggagcgagctgagcgcctccagcgagaagttgagggagaaaggcggtcccgggaacaggctgaggctgaggtggcctccttgaaccgtaggatccagctggttgaagaagagctggaccgtgctcaggagcgcctggccactgccctgcaaaagctggaagaagctgaaaaagctgctgatgagagtgagagaggtatgaaggttattgaaaaccgggccttaaaagatgaagaaaagatggaactccaggaaatccaactcaaagaagctaagcacattgcagaagaggcagataggaagtatgaagaggtggctcgtaagttggtgatcattgaaggagacttggaacgcacagaggaacgagctgagctgcagccccggtgccgaataggagcctctagataagaccgcagcatcagct

SEQ ID NO: 163476 - DNA, 1039 bp, Homo Sapiens
  misc_feature (1010)..(1010): n is a, c, g, or t
ggcctgggtggcgaattcggcacgaggagcaggcggaagtaagggtgagaggaggctgcaacgccgagcggaggaggcaggaaccggagcgcgagcagtagctgggtgggcaccatggctgggatcaccaccatcgaggcggtgaagcgcaagatccaggttctgcagcagcaggcagatgatgcagaggagcgagctgagcgcctccagcgagaagttgagggagaaaggcgggcccgggaacaggctgaggctgaggtggcctccttgaaccgtaggatccagctggttgaagaagagctggaccgtgctcaggagcgcctggccactgccctgcaaaagctggaagaagctgaaaaagctgctgatgagagtgagagaggtatgaaggttattgaaaaccgggccttaaaagatgaagaaaagatggaactccaggaaatccaactcaaagaagctaagcacattgcagaagaggcagataggaagtatgaagaggtggctcgtaagttggtgatcattgaaggagacttggaacgcacagaggaacgagctgagctggcagagtcccgttgccgagagatggatgagcagattagactgatggaccagaacctgaagtgtctgagtgctgctgaagaaaagtactctcaaaaagaagataaatatgaggaagaaatcaagattcttactgataaactcaaggaggcagagacccgtgctgagtttgctgagagatcggtagccaagctggaaaagacaattgatgacctggaagataaactgaaatgcaccaaagaggagcacctctgtacacaaaggatgctggcaccaaaccctggcttgacctgaaaggaaatggagaacgcccccaatcccacccctggctgctgctcctcccctctggacccaaactcccgcctgaggcccagccctgcggggaagctgaccttttaactgaggggctgaatcttttaactgggaagggctgcctttctcccttttaccancccccttccttttcccggggccctttttt

SEQ ID NO: 163477 - DNA, 973 bp, Homo Sapiens
  misc_feature (931)..(931): n is a, c, g, or t
agatatgaaggttattgaaaaccgggccttaaaagatgaagaaaagatggaactccaggaaatccaactcaaagaagctaagcacattgcagaagaggcagataggaagtatgaagaggtggctcgtaagttggtgatcattgaaggagacttggaacgcacagaggaacgagctgagctggcagagtcccgttgccgagagatggatgagcagattagactgatggaccagaacctgaagtgtctgagtgctgctgaagaaaagtactctcaaaaagaagataaatatgaggaagaaatcaagattcttactgataaactcaaggaggcagagacccgtgctgagtttgctgagagatcggtagccaagctggaaaagacaattgatgacctggaagataaactgaaatgcaccaaagaggagcacctctgtacacaaaggatgctggaccagaccctgcttgacctgaatgagatgtagaacgccccagtcccaccctgctgctgctcctccctctgacccagactccgcctgaggccagcctgcgggaagctgacctttaactgagggctgatctttaactgggaggctgctttctcctttcaccaccccctccttccctgtgtctttttcgccaaactgtctctgcctcttcccgggagatccagctgggctagaggctgagcacctttggaaacaacttttaagggaatgtgagcacatgcataatgtcttaaaaggatgtgtgatgacccatttgaattaccttttttgtgggttgaacaacctttgtaacctccaaaaatcccgccgaaccatcatcctttcttgagggtttcctaggttccctcaggagaaggggccgctcaacaaaccgaatcctgaactttcgcacgttcacaggttcgggtctccaacaaaaagggtggnggcgcaaatagaagagccccttgttacaagcccccgcgccgg

SEQ ID NO: 163478 - DNA, 911 bp, Homo Sapiens
  misc_feature (880)..(880): n is a, c, g, or t
  misc_feature (887)..(887): n is a, c, g, or t
caacgccgagcggaggaggcaggaaccggagcgcgagcagtagctgggtgggcaccatggctgggatcaccaccatcgaggcggtgaagcgcaagatccaggttctgcagcagcaggcagatgatgcagaggagcgagctgagcgcctccagcgagaagttgagggagaaaggcgggcccgggaacaggctgaggctgaggtggcctccttgaaccgtaggatccagctggttgaagaagagctggaccgtgctcaggagcgcctggccactgccctgcaaaagctggaagaagctgaaaaagctgctgatgagagtgagagaggtatgaaggttattgaaaaccgggccttaaaagatgaagaaaagatggaactccaggaaatccaactcaaagaagctaagcacattgcagaagaggcagataggaagtatgaagaggtggctcgtaagttggtgatcattgaaggagacttggaacgcacagaggaacgagctgagctggcagagtcccgttgccgagagatggatgagcagattagactgatggaccagaacctgaagtgtctgagtgctgctgaagaaaagtactctcaaaaagaagataaatatgaggaagaaatcaagattcttactgataaactcaaggagagacccgtgctgagtttgctgagagatcggtagccaagctggaaaagacaattgatgacctggaagataaactgaaatgcacccaaagaggagcaccctctgtacacaaaggatgctgggacccagaccctgccttgacctgaatggagatggtagaacgcccccagtccccaccctggctggctggctcctcccctctggaccccagacctccggcctggaggcccagnccctgtncggggaaagcttggaaccttttta

SEQ ID NO: 163479 - DNA, 1672 bp, Homo Sapiens
  misc_feature (1060)..(1082): n is a, c, g, or t
  misc_feature (1135)..(1148): n is a, c, g, or t
gggctgctgatgagagtgagagaggtatgaaggttattgaaaaccgggccttaaaagatgaagaaaagatggaactccaggaaatccaactcaaagaagctaagcacattgcagaagaggcagataggaaatatgaagaggtggctcgtaaattggtgatcattgaaggagacttggaacgcacagaggaacgagctgaactggcagagtcccgttgccgagagatggatgagcagattagactgatggaccagaacctgaagtgtctgagtgctgctgaagaaaagtactctcaaaaagaagataaatatgaggaagaaatcaagattcttactgataaactcaaggaggcagagacccgtgctgagtttgctgagagatcggtagccaagctggaaaagacaattgatgacctggaagataaactgaaatgcaccaaagaggagcacctctgtacacaaaggatgctggaccagaccctgcttgacctgaatgagatgtagaacgccccagtcccaccctgctgctgctcctccctctgacccagactccgcctgaggccagcctgcgggaagctgacctttaactgagggctgatctttaactggaaggctgctttctcctttcaccaccccctccttccctgtgtctttttcgccaaactgtctctgcctcttcccggagaatccagctgggctagaggctgagcacctttggaaacaacatttaagggaatgtgagcacaatgcataatgtctttaaaaagcatgttgtgatgtacacattttgtaattaccttttttgttgttttgtagcaaccatttgtaaaacattccaaataattccacagtcctgaagcagcaatcgaatccctttctcacttttggaaggtgacttttcaccttaatgcatattcccctctccatagaggagaggaaaaggtgtaggcctgccttaccgagagccaaacagagcccagggagactccgctgtgggaaacctcattgttctgtacaaagtactagctaaaccagaaaggtgattccaggaggagttagcnnnnnnnnnnnnnnnnnnnnnnntgtgctgttcaagttttcagctttaagatatctttggataatgttatttctannnnnnnnnnnnnncattagaagttaccaaattaagatggtaagacctctgagaccaaaattttgtcccatctctaccccctcacaactgcttacagaatggatcatgtcccccttatgttgaggtgaccacttaattgctttcctgcctccttgaaagaaagaaagaaagaagactgtgtttttgccactgatttagccatgtgaaactcatctcattacccttttctgggtttgaagctgctgtctctagaagtgccatctcaattgtgctttgtatcagtcagtgctggaagaaatcttgaatagcttatgtacaaaactttttaaattttatattattttgaaactttgctttgggtttgtggcaccctggcaacccccatcgggctgtgaaaccctctgcaatccgggggctggcagttggttgatcttttcagtttccttcctaccagtcccatttctggtaaggttctacgaggcctgtaggtgtacatcctgcagttatggctaaatgtactctctttatgtggctcttg

SEQ ID NO: 163480 - DNA, 1213 bp, Homo Sapiens
gggaggcggaagtaagggtgagaggaggctgcaacgccgagcggaggaggcaggaaccggagcgcgagcagtagctgggtgggcaccatggctgggatcaccaccatcgaggcggtgaagcgcaagatccaggttctgcagcagcaggcagatgatgcagaggagcgagctgagcgcctccagcgagaagttgagggagaaaggcgggcccgggaacaggctgaggctgaggtggcctccttgaaccgtaggatccagctggttgaagaagagctggaccgtgctcaggagcgcctggccactgccctgcaaaagctggaagaagctgaaaaagctgctgatgagagtgagagaggtatgaaggttattgaaaaccgggccttaaaagatgaagaaaagatggaactccaggaaatccaactcaaagaagctaagcacattgcagaagaggcagataggaagtatgaagaggtggctcgtaagttggtgatcattgaaggagacttggaacgcacagaggaacgagctgagctggcagagtcccgttgccgagagatggatgagcagattagactgatggaccagaacctgaagtgtctgagtgctgctgaagaaaagtactctcaaaaagaagataaatatgacgaaaaaaatcaagattccttaactgataaactcaagggaaggcagagacccccggcctgaggtttgccttgagagaaccggtagccaaagcctggaaaaaagaacactttgatgcacctggtgaagaaaaccccttgaaaatggccccccacaagaaaggaagccaccctccttgggtcccacccacaggggattgctttgtggaacccacacacccccttggcttttgaacccttgaaattgggagaatggtagaaaatgcgccgcccaagatcccccagcgcccgtggctgtggcgtggttccttttgccctccggaacaactaaaactttcggtgacgtggaagggccccagcccttgtggggagcaaacctcgggaaccctttataaacttgagacggggcttgcactcctttcaaaacttggaaacgcgccgcctctttttgttccttttgttcacactatcccccgcgttttttttccccgctgtgggttctaattttcttgcacgcaaaactgcgcccctgcgtcccatttttgtccgcgggggagaaatcatcatcgctg

SEQ ID NO: 163481 - DNA, 621 bp, Homo Sapiens
  misc_feature (53)..(66): n is a, c, g, or t
tgtgctgttcaagttttcagctttaagatatctttggataatgttatttctannnnnnnnnnnnnncattagaagttaccaaattaagatggtaagacctctgagaccaaaattttgtcccatctctaccccctcacaactgcttacagaatggatcatgtcccccttatgttgaggtgaccacttaattgctttcctgcctccttgaaagaaagaaagaaagaagactgtgtttttgccactgatttagccatgtgaaactcatctcattacccttttctgggtttgaagctgctgtctctagaagtgccatctcaattgtgctttgtatcagtcagtgctggagaaatcttgaatagcttatgtacaaaactttttaaattttatattattttgaaactttgctttgggtttgtggcaccctggccaccccatctggctgtgacagcctctgcagtccgtggggctggcagtttgttgatcttttaagtttccttcctacccagtccccattttctggaaaggtttctaggaggtctggtaggggtacatccctgcagctttattggcttaaaatgcactctcccttttatggggggccccttggggggccgattgggg

SEQ ID NO: 163482 - DNA, 690 bp, Homo Sapiens
agactggacttctacagaggagatgttgtcattttctataggtaagagagatgaatctggagcaatacatgttactaagcaaaagcatcttcacctatactatgacctcatcaactttacctggataaattcacgcacagttgtgctcttagacagcgtagagaagttgcatgtgattgatcggcaaacacaagaggaattggagacagtggagatctcagaagttcagctggtctacaatagcagccatttcaaatcactagccactggaggaaatgttagccaggcactggctttggttggagagaaggcttgttatcaatccatcagtagctatggtggtcagatcttttatttggggacaaaatctgtttatgtgatgatgctgaggagctggagagaggtgagttcgcaaggaatattcacatgtcagagttactgaaagggtagattcttaacatttctgttatgacttttcagaagaagattatttggtaagattcttaatttcagaagtgtacaagaaaaccattatagctgctaggtacttgatgtggctagaactgagcagtataagttagaattaggttcgtctacatatattagaaaatgtcaaaataatagatggcttaaataagagtttcttgtcatgattatgcacctggagctagtgtccgggcttttgtatga

SEQ ID NO: 163483 - DNA, 647 bp, Homo Sapiens
agcaggacgtaaccatcctccccaagtctcgttgtccgttccatattcatcgtgccgcttatagaccggccttcaggatgtggaagtcaaggctggtgtctaccatcatttcatcagtgacggtgtcaggaactccctgaaggtcgtgccggaaggaatcagaatgaacaaaactgtggctgttcgcaccctggatccagaacgcctgggccgtgaaggagtgcagaaagaggacatcccacctgcagacctcagtgaccaagtcccggacaccgagtctgagaccagaattctcctgcaagggaccccagtggcccagtatgacagaggatgccgtcgacgcggaacggctgaagcacctcattgtgaccccctcgggctgcggggaaccagaacatgatctggcatgacgcccacggtcatcgctgtgcattacctggatgaaacggagcagtgggagaagttcggcctagagaagcggcagggggccttggagctcatcaagaaggggtacacccagcagctggccttcagacaacccagctctgcctttgcggccttcgtgaaacgggcacccagcacctggctgaccgcctacgtggtcaaagtcttctctctggctgtcaacctcatcgccatcgactcca

SEQ ID NO: 163484 - DNA, 881 bp, Homo Sapiens
cctaaaagagtgtgctgtctggcaggatccttgggtgctgggggacaggacagccttgccgttcgcagtctcagaatccattttatggattaccaaaagccctgcgctaggtccctggcaccgcagcagatgctgtgtgtaatggaaatgtcaatgtgcctccccagagttagacagatctaggtctaaagatgctgctgccccccagtccaccctccagtcactgctttaactctggcagggccccaacccattttaggagtcacagattgctccttccttggaaacctggggcccatttggcccggaggggtaggaacaatggagatctcctccaaccgaaagtgtgaaattagcatccaggaaactcagttaatctatgacaattaagaaaacttaccaaaggggagctatgccacagaggtgcctgaaaggaccaacatgactacagagcagcggggaggggaacaagagaggtgaagaggaacacagaaaggaagggaaataagacagaagacagttcaagcaacaagaaactaacagagcaggtagggcaggacaaccaaaggtagggttaatactgagccggtttccagatctgaaggattttgagtgtcattttatgtcttgccatgaagctgctgtgcccagggctggtaggcctgtggtaaatgagaacatacactaaccaggtctttctgagactttcagtgattcaccacattagatggacttcaggacagattggcctttatactaaattccacaatatggctggtattagtacagcctgaatccgcgcctggtcacagaaggaaaaaggttgtagtcacagaaacagagtgttcaaggacatcacactcagatgtctcgcggggtcc

SEQ ID NO: 163485 - DNA, 836 bp, Homo Sapiens
  misc_feature (384)..(660): n is a, c, g, or t
attccaagatatcattgattatatatatataatgtatctccaataagatacatgagaggtgtaataaaataatcaagcgttgagtcttggccttccacgctagactcaggcctcttcagaacagaaggattaagatggaaatggaatagaattcaaatgttaaaagaatgaagggtcaagagcgttggaatgaaggtaaatgggccacctgtagaagtctgaaagtgagctttggagggaagaaaagtaaatactgctttaacaagaagtcctggggaatctgaatgaattagatcctgatcatggatccataacatgtggatgtggagaattaatggtatctagggtccgtatctaactgatattcaagaagtatagttagannnnnnnnnnnnnnnnnnnnnnnnnnnnnnnnnnnnnnnnnnnnnnnnnnnnnnnnnnnnnnnnnnnnnnnnnnnnnnnnnnnnnnnnnnnnnnnnnnnnnnnnnnnnnnnnnnnnnnnnnnnnnnnnnnnnnnnnnnnnnnnnnnnnnnnnnnnnnnnnnnnnnnnnnnnnnnnnnnnnnnnnnnnnnnnnnnnnnnnnnnnnnnnnnnnnnnnnnnnnnnnnnnnnnnnnnnnnnnnnnnnnnnnnnnnnnnnnnnnnnnnnnnnnnnnnnnnnnagaagaagtatagctagaaattctaagaatgactttgtctaaaatatattctctgaagtctgcagaaactaggatgagcagttctttaatctgatccaacagggcatttgtaggacttttgtgaccttaaatgaactgaaataacacaaaaggtcatcagagaatgtccaagcttc

SEQ ID NO: 163486 - DNA, 683 bp, Homo Sapiens
agcaagctctcttcatcttcagatgtcaccaaagctaggtgctgttctacagttcaactcttgatgctaatggcttggaaagaaagagagtgaacacaacaggtttccagggggaggctcggagttcttactcagtattggtgggactgtacttgttttaggatgatgcatcatagcctaatctaatttactgagcatctactaagtgccaagcacagttgtagctctaacagggccagctttgctgtttctagttctgcttaggctactaacccaccatgtggtctcgacagactatgctgagctaaagtatcccatttctttttctgtgtaaaataagagggcttggataaatgttctctcaggttcttccagctcaaacacaatattatttattccttatatattctgaatatgtatactttaaaactttagctgctccacttgaaaatctaagtttttattgtcctcctcaaaggactccttgcttcattatctaatgtttttccctttgaagagagtatatcattcctaagaggggtttaaaagaagattcacctggtctgaacctgatatctccagatgacaattctctacctaaatttaaaaccaagcaaaaaggctgagagctgagatgagagctcgtgggcagtcaatgggccatattttcttccaggttttaa

SEQ ID NO: 163487 - DNA, 1036 bp, Homo Sapiens
ggaacacgtaaatccatgaagagtggaatagaggtcatctatctgcgacctgaaatagttccgcagctctggccttttcgccttcatggttggagtcagaaggccattgtcgatagaaaataattcagggtgcaatgtgatgcctttgacctgttcaaatggtttcagaccagaatccttcccaagtctcaccatatcttcgaggatagcttttttgacatccttatttctgcacagttcctcaaacgacccttcaaatcctctcttttgggcccaggaacataatgtctcaacatctggtaccacaattgcaatgagaaatgcctgcaggctttctccgtggacaaacacctgagcaacaggctcacttcgcatgtagatattttcaatcttttcaggggctatgtattctccttgtgccagcttaaatatgtgctttttccggtcgataattttcaaggtgccatttggtaaccattttccaatgtcccctgtgtgtaaccagccgtctttgtccaaagcttctgctgttttcgctgggtccttcaagtagccctgaaatacatttggccctttcacacacacctcgccctcgccctcggcagccatgtaattcatttcttccacatcaacaagttttatcaaattgcacggcatccgggccccaacatggcctgcggtccagtctccaggcatggttaggcagcacccggcagtgcactctgtctgtccgtatccttcataaaactgacagcccagggctgctctgaggaacgtcagcacagtggcagacaccggggcggctcctgtcaccatcagccggactcttccgcccaggctcgactgtactttgtggaagatcagccggtcccacaggctgttgtttctgatgatgccgctgcgaagctctgcttctttcctcttggaggcaaagtccaagagccatcgcttcagcgtggtgtttgcttgtccgaaaattcggtcaaacatccggttcagcagtcttggaaccacggggaagacagtgtgaagcacc

SEQ ID NO: 163488 - DNA, 1349 bp, Homo Sapiens
gcgacacgccatgtcgagatgttccatgtgggaagacaggaggcatgagattgcccacattgccctggagacgttagagggccaccagagggccatcatggcacatgactgtggaggagatctataaggacaggcagaaattctcagaacaggttttcaaagtggcctcctcagacctggtcaacatgggcatcagtgtggttagctacactctgaaggacattcacgatgaccaggactatttgcactctttggggaaggctcgaacagctcaagtccaaaaagatgcacggattggagaagcagaggccaagagagatgctgggatccgggaagcttaaagccaagcaggaaaaggtgtctgctcagtacctgagtgagatcgagatggccaaggcacagagagattacgaactgaccgaaggccgcctatgacatcgaggtcaacacccgccgagcacaggctgacctggcctatcagcttcagagtggccaagactaagcagcacgcatgcggagcagcgggtgcaggctgcaggtggtggagcgggcccagcaggtggcagctgcacggagcaggagatcgcccggcgggagacgcgaccctggaggcccgggtgcggaaagccaggcggaacgcggagccgctacaaagcaggcagcgccttagcagaaggccaagacgagagctcccacactaatcacagcacggccggcaaggcccgcaacgcccgccgctccaacgtgccgcgaatgtcgctagccacgaacacggccatgcaaccgccgcttcatgccacacttagcgcgcgcgaccgaagccacaggacactccgcacgcgtcttgaagccagctactgggcccccacgaaagcagcacacacgccccccaacccagccgagcaaccacagacgccagcgctccgactcgcaaccctgcctgcattagacacacaaacgaacggacccccacagagctgcgccccgacagcgccatcacttcccgcatcggcgtccgccctatgaaacgtctcacagacgcccaagcaaccgagcgacgcaagtcgactcgatacccaacaggacccagacaagcgaccaccctcggcactacccacccccaattacgtgaccttggctcacacacgtctcatcgggaccttccccttcgaccttccgtccgttgccctccaaccagcatctcggcaacacaaccccctacgccccgtcacccacctcccgtcccggtgtgtcagctttctcgcccgtcctgtgctaactgaacctatccggttgctgcgttgttgctctgctgtcgcctgtgttttgcccctcgggtcctctctgcg

SEQ ID NO: 163489 - DNA, 1177 bp, Homo Sapiens
caggctggtacaggccggaatttcgggatatcgtcgacccacgcgtccggcacagaagagattacgaactgaagaaggccgcctatgacatcgaggtcaacacccgccgagcacaggctgacctggcctatcagcttcaggtggccaagactaagcagcagattgaggagcagcgggtgcaggtgcaggtggtggagcgggcccagcaggtggcagtgcaggagcaggagatcgcccggcgggagaaggagctggaggcccgggtgcggaagccagcggaagcggagcgctacaagctggagcgcctagccgaggcagagaagtcccaactaattatgcaggcggaggcagaagccgcgtctgtgcggatgcgtggggaagctgaggcctttgccataggggcccgagcccgagccgaggctgagcagatggccaagaaggcagaagccttccagctgtaccaagaggctgctcagctggacatgctgctagagaagctgccccaggtggcagaggagatcagtggtcccttgacttcagccaataagatcacactggtgtccagcggcagtgggaccatgggggcagccaaagtgactggggaagtactggacattctaactcgcctgccagagagtgtggaaagactcacaggcgtgagcatctcccaggtgaatcacaagcctttgagaacagcctgagccttcagccctcacagatgcccagcctcatagctgaagttgcctgaatgatcctcctgttgcatgtaacccactggcctccctgagcatgtccattgacagtgaggtcccacccctcatctctccttgccaaatagtttgtgccttgtcttgaagggggttgctccccttgccaacctcacactgctatgattgccaactccagcggtcccatgtcagccttctgatgatcccactccaccccacctcaacttatttaacttcctaattaaatcagactgttcgcacaataagccaaccaatcactaataaaaaacgtgtcgggccgccctgggccctcgaaaaaattttcctaaaccaattccttttgggccgcgcgggcccccaataaggaaaggggaaccaggggtcccaaaccttgttttccccaaggaaaaatccccggggcccaggaaccaaaagggccttgggaattt

SEQ ID NO: 163490 - DNA, 925 bp, Homo Sapiens
cttggtcccactgtcgcttggacaccagtgtgatcttattggctgaaagtcaagggaccacctgatctccctctgccacctgggcagctttctctagcagcatgttccagctgagcagcctcttgggtacagcctggaaggcttctgccttccttggccatctggtcaagcctcggctctggctcgggcccccctatggcaaaggcctcagcttcaccacgcatccgcacagacgcggcttctgcctccgcctgcataattagttgggacttctctgcctcggctaggcgctccagcttgtagcgctccgcttccgctggcttccgcacccgggcctccagctccttctcccgccgggcgatctcctgctcctgcactgccacctgctgggcccgctccaccacctgcacctgcacccgctgctcctcaatctgctgcttagtcttggccacctgaagctgataggccaggtcagcctgtgctcggcgggtgttgacctcgatgtcataggcggccttcttcagttcgtaatctctctgtgccttggccatctcgatctcactcaggtactgagcagacaccttttcctgcttggctttagcttcccggatcccagcatctctcttggcctctgcttctccaatccgtgcatctttttggacttgagctgttcgagccttccccaaagagtgcaaatagtcctggtcatcgtgaatgtccttcagagtgtagctaaccacactgatgcccatgttgaccaggtctgaggaggccactttgaaaacctgttctgagaatttctgcctgtccttatagatctcctccacagtcatgttgccatgatggccctctggtggccctctaacgtctccagggcaatgtgggcatatctcagcctccgtcttccccaggaacatctgaccag

SEQ ID NO: 163491 - DNA, 546 bp, Homo Sapiens
tggtgtcccaggggcaagtgggaccagggggcaagccaaaagtgactgggggaaagtacgggacattcctaactcggcctgcccagagagtgtggaaagactcacaggcgtgagcatctccccaggtgaatcacaagcctttgagaacagccggagccttcaagccctcacagatgcccagccctcatagctgaagttgccctgaatgatcctcctgttgcatgtaacccactggcctccctgagcatgtccattgacagtgaggtcccacccctcatctctccttgccaaatagtttgtgccttgtcttgaagggggttgctccccttgccaacctcacactgctatgattgccaactccagcggtcccatgtcagccttctgatgatcccactccaccccacctcaacttatttaacttcctaattaaatcagactgtttgagcctgttgtctagaatattttcctgaccaagactgagggatgggctggaggttttcaactttgctacccaaataaattgctgatggttagtactaatacaat

SEQ ID NO: 163492 - DNA, 826 bp, Homo Sapiens
  misc_feature (164)..(214): n is a, c, g, or t
  misc_feature (486)..(593): n is a, c, g, or t
  misc_feature (603)..(666): n is a, c, g, or t
gatacaatcgagctccgtaccgttgataccaccttggatccaaacccatagaagccaaatgctgaggatgaggctgcataggctgataaagaggtctgtgtggtggaggagggacagtactactggacggttgtgaaggaacagtctgtggaagtacaccttgnnnnnnnnnnnnnnnnnnnnnnnnnnnnnnnnnnnnnnnnnnnnnnnnnnngaatcgtggaggtaaagacttctgaaactgtttgaaatagccagataatacagccggccgaggttgagaccctgattctggttcggtttcatgcaccactggtgtggcttccttttcactgcgattgctgtcttgtctagtgaaaacgggttcctcctctttattacagctgttttcactttcttgtttttctaccatgggctctaaattaggttctctgggttcaattttcgtcctctaattttaccctttccttctccagctcacattcnnnnnnnnnnnnnnnnnnnnnnnnnnnnnnnnnnnnnnnnnnnnnnnnnnnnnnnnnnnnnnnnnnnnnnnnnnnnnnnnnnnnnnnnnnnnnnnnnnnnnnnnnnnnctgctccttnnnnnnnnnnnnnnnnnnnnnnnnnnnnnnnnnnnnnnnnnnnnnnnnnnnnnnnnnnnnnnnnctgttcttgttctttttcaagttctttctcacgctcccgttctttttctcgctccctttccctaatttcctctggagatggttgtttttccaggatgccaagctctcatccaatcgtttcagtttctccgcacaagctgccttcctttgttcttccatcc

SEQ ID NO: 163493 - DNA, 294 bp, Homo Sapiens
gcggccgcctactactactactatacggctgcgagaagacgacagaaggggaagagcgaagaatggaagaacaaaggaaggcagcttgtgcggagaaactgaaacgattggatgagaagcttggcatcctggaaaaacaaccatctccagaggaaattagggaaagggagcgagaaaaagaacgggagcgtgagaaagaacttgaaaaagaacaagaacaggagcgagagaaggagagggaaaaagacagagagagacagcaggaaaaggagaaagagctggagaaggagcagg

SEQ ID NO: 163494 - DNA, 518 bp, Homo Sapiens
atcgtgccattgtattccagcctcggcaacacagcaggactgtgattttctttggagactcctagattttctgtggttttgaactgaatttgttggatgttggcaagtgcctcttatgagctgtttctttatcctgcatttgccccacaaagacttatctggaggtgagcaaagtatgtttggtagtgaggtcacaaaggcaatcagccccttcctccccactcccattgccatcttctcagtccttctccctttctttccaagtagtttacccacccctcctctttcctcccctgtccctaaaataatccacgtgtcttcctaaaatctctctttgatcctgtcctttgataacaccgtcagtgcctactactgggtctagacagacctctgttgagcagtcagagtcttccctgactccacaatgcccctttccttggctgaccagtatgactactggtccccacctttcccttgcctatccctacctccctcctactaggttgtcccatccctct

SEQ ID NO: 163495 - DNA, 605 bp, Homo Sapiens
agaacatgtcattcacaaaattgtgacctcacagcattatttacaatactgaaaatctggccaaatagcctaagatttctaacaattgaaagaaggtaaacgtaaattataagactacacaataaaatatattaccagcaatatatctttgtgaaaatctataataaccacacataatacttagtaaaaaagaacataaattacatgataaagaatatgatcagaacaatgcaaaaaattcacacccccaaaaaagacaagatatgatatggcaatttcgtggtaaaatattcatgtatttgtgctgcatttctaatatgtccgtaactgacacatcagttttataattaggaaaaaaatacctttttaaagtaaagccgaacacaagattctttagcaatgttcataccatcccacaatagagtctagagagtcacaaaaacctcagcctccttcgagagggggggagcttggtagtgaaaaaaggtcatgaatgactgggtgaagagagggatgggacaacctagtaggagggaggtagggataggcaagggaaaggtggggaccagtagtcatactggcaggccaagtaacggtgcagacga

SEQ ID NO: 163496 - DNA, 767 bp, Homo Sapiens
tcgaggacagtatgctgaattaggcaaattatactcagtagtgtcacagctgattccgctgttgcaatgtctcttcaagaatgcagtcttcaatcaatggtaatcctcctcttcccaatccttttggtgatcctaatttatcacaacctataatgccaattcagcagaatgtggcagacattttatttgtgagaacaagttatgtgaagaaaatcattgaagactgcagtaattcagaggaaaccgtcaaattgcttcgttcttgctgctgggagaatcctcagttctcatctactgtcctcagtgaacttctctggcaggttgcatattcctatacctatgaactgcggccctatatggatctgcttttgcaaatcttactgattgaggactcctggcaaactcacagaattcataatgcgctgaaaggaattccagatgaccgagatgggctgtttgacacaatccagcgctctaagaatcactatcaaaaaagagcataccagtgtataaaatgtatggtagctctatttagtaactgtcctgtggcttaccaaatcctgcagggcaatggagatcttaaaagaaagtggtgaaaattacatctgaaataccacagactgagagaatgcagaagagggctgaacgattcaatgtacctgtgagcttggagagtaagaaagctgctcgggcagctaggttagggatttcttcagttccaacaaaaggtctgtcatctgataacaaacctatggttaacttggatc

SEQ ID NO: 163497 - DNA, 1178 bp, Homo Sapiens
  misc_feature (882)..(883): n is a, c, g, or t
  misc_feature (886)..(887): n is a, c, g, or t
  misc_feature (892)..(892): n is a, c, g, or t
  misc_feature (896)..(896): n is a, c, g, or t
  misc_feature (901)..(901): n is a, c, g, or t
  misc_feature (903)..(909): n is a, c, g, or t
  misc_feature (912)..(912): n is a, c, g, or t
  misc_feature (915)..(919): n is a, c, g, or t
gggctagtggagtgaggggtaacaagatggcgaccgagacggtggagctccataagctaaagcttgccgaactaaagcaagaatgtcttgctcgtggtttggagaccaagggaataaagcaagatcttatccacagactccaggcatatcttgaagaacatgctgaagaggaggcaaatgaagaagatgtactgggagatgaaacagaggaagaagaaacaaagcccattgagctccctgtcaaagaggaagaaccccctgaaaaaactgttgatgtggcagcagagaagaaagtggtgaaaattacatctgaaataccacagactgagagaatgcagaagagggctgaacgattcaatgtacctgtgagcttggagagtaagaaagctgctcgggcagctaggtttgggatttcttcagttccaacaaaaggtctgtcatctgataacaaacctatggttaacttggataagctgaaggaaagagctcaaagatttggtttgaatgtctcttcaatctccagaaagtctgaagatgatgagaaactgaaaaagaggaaggagcgatttgggattgtcacaagttcagctggaactggaaccacagaggatacagaggcaaagaagaggaaaagagcagagcgctttgggattgcctgatgaaaagttcctgatactttctgttctccagtgttttccatttctctccttcttcttggtcacatatatgcctaaatgcacagtcatgtgcctacgtcctgcctcgcaatgagggagcatgtaccccaggtacatccatgaactgcggcagcagtttgacttattgctgtttcagctttaaggttgttgtgtttttgtttttgattatgttgcttgttaatannaannaattngaanagaanannnnnnnaanaannnnnaactcgaggcatctatgtccggtgcgggaaaaagaggtaatgaaaatggcacatgggtcataagctgtttccctgaccccagcttttcttggtaacaaaggtggaaagaatctggccgggtcttcccctattaggggaggccgaaattaaattttccgaaaaaagcccggggttaaacctggccttttaatggaaatcccgggctggcaagtaaccccgggggaaattttataccccggccccttaagtggagcggggc

SEQ ID NO: 163498 - DNA, 279 bp, Homo Sapiens
ggggaccatgtatgatatgagtggagaaagcagcaggaatgaacataggatcaatggaaatagatgttactttaagccaccgacgaaagagagacccacaaagtacccagtgtgttaaagcccaaatctcttcttgcgtttgtttgtttttgctgtgcaagttccacccctatgaaaaagaaattgatccaaagttccaggttttcttgggtctctagtcaattttcacattagtatagatttttcggacaaaggcacttgttcccatgtaaccaatcg

SEQ ID NO: 163499 - DNA, 797 bp, Homo Sapiens
gtaccgattatatcatctcagtcttgaatttactcacgctgattgttgaacagataaatacgaaactgccatcatcatttgtagaaaaactgtttataccatcatctaaactactattcttgcgttatcataaagaaaaagaggttgttgctgtagcccgtgctgtttatcaagcagtgctcagcttgaagaatattcctgttttggagactgcctataagttaatattgggagaaatgacttgtgccctaaacaacctcctgcacagtctgcagcttcctgagtcctgttctgaaataaaacatgaggcttttaagaatcatgtgttcaatgtagacaatgcaaaatttgtagttaaatttgacctcaattgactacaaaatttgtagttaaatttgactacaattggaaatgccaaaaactcactaataggggtgagtctttaattgtaatgactttgttttatccacattacatatttatgtatttcactgttatgtcaacatgtctgcagaatcactgtatgtaacaaacagccatatttaagacatgcctggataaataaaattggtaggaatgttttcttgcccattatatttaacttttcttccttttccttgacaaatcttgataagtttttttatattagttttattttctagaagaatgtacttatagaatttctacctatttgctctagcatgcttacagaaaatgtcagtgtttcctacagctcaaatttgtatagttgttttaaaatgcgtctctttcttcttcccctgtacggatgacggacc

SEQ ID NO: 163500 - DNA, 712 bp, Homo Sapiens
ccactccagagtatccccttaatccgtaccatcagtgtgcatttaaggtttctccatgtctttttgtaattggagaagctcattttttaaaaattttattcttttagattgttgaacagataaatacgaaactgccatcatcatttgcagaaaaactgtttataccatcatctaaaactactattcttgcgttatcataaagaaaaagaggttgttgctgtagcccatgctgtttatcaagcagtgctcagcttgaagaatattcctgttttggagactgcctataagttaatattgggagaaatgacttgtgccctaaacaacctcctacacagtctacaacttcctgaggcctgttctgaaataaaacatgaggcttttaagaatcatgtgttcaatgtagacaatgcaaaatttgtagttatatttgacctcagtgccctgactacaattggaaatgccaaaaactcactaataggggtgagtctttaattgtaatgactttgttttatccacagttaagccttttctcattacatatttatgtatttcactgtcatgtcaagatgtctgcagaatcactgtgtgtaacaaacagccatatttaagacatgcctggataaataaaattggtaggaatgttttcttgccattatatttaacgtttcttctttttccttgacaaatcttgataagtttttttatattagtt

SEQ ID NO: 163501 - DNA, 886 bp, Homo Sapiens; identical to SEQ ID NO: 97823
  misc_feature (778)..(786): n is a, c, g, or t
  misc_feature (827)..(827): n is a, c, g, or t

SEQ ID NO: 163502 - DNA, 867 bp, Homo Sapiens
agtggctcctgtaaggcagcaaggtagcgtggccggcgcccgagctggggttgtgtccctgctgggctgccgttccagctggactgccgccatggaactcagcgccgaatacctccgcgagaagctgcagcgggacctggaggcggagcatgtggaggtggaggacacgaccctcaaccgttgctcctgtagcttccgagtcctggtggtgtcggccaagttcgaggggaaaccgctgcttcagagacacaggttctgtacagagtaatgagatgtgtgacggctgcaaaccaggtgtttttttctgaggctgtgttgacagctgctaatgagtgtgttggtgttttgctcggcagcttggatcctagcatgactatacattgtgacatggtcattacatatggattagaccaactggagaattgccagacttgtggtaccgattatatcatctcagtcttgaatttactcacgctgattgttgaacagataaatacgaaactgccatcatcatttgtagaaaaactgtttataccatcatctaaactactattcttgcgttatcataaagaaaaagaggttgttgctgtagcccatgctgtttatcaagcaatgctcagcttgaagaatattcctgttttggagactgcctataagttaatattgggagaaatgacttgtgccctaaacaactcctgcacagtctgcaacttcctgaggcctgttctgaaataaaacatgaggctttaagaatcatgtgttcaatgtagacaatgcaaaatttgtagttaaatttgacctcagtgccctgactacgatggaaatgccaaaactcgagtctttattggtatgaacttggttaatcac

SEQ ID NO: 163503 - DNA, 903 bp, Homo Sapiens
tctgtcagtgtagggtgcatagaattgttctctggctatatcccattctaggaatcactggatatccatctggagtgaagggctgttaatctaggttcacttgacaccatcttcagcaaatgatcattcctggggtcaaagacatgcctgtcttcttgcacttttctaagttcacacacagtatttctaagaatgttcagcatctactgaacatgaactgtgctgagtggaggtacagaaaagattggaatgccattcaggtcaaacatattgctgtctggggcagtggttttcaaactgtgttcggaagagttcaaggtgttgtaaggaagtccccttaggtgtcaccacggtggtaaaggaagatagttgtagcaggattcaggcccctactcttgcttcactacttcatccagagcagcttcacttttactctgggcttctgcacagttttcactcaaagggcttcatggccacaaagcctttggaaaaccaatgatctaagaataagtcggtcacaaaatgcttgatgtatcaagagaagccttttctggaatctggtgcagccttgtgagatgctgttaggtaaggggactcctaggtagaatttcttacatttgtgtaaaaagttctggttcctgagtaattccaaagaagatgctatgaggagttcaccgtgcctttgatttgatcccaatgggtcagaatatgttttctcattcagtaggctactacaggatttgaagtagaaaaaaacagggtccagtgaccttcacgggatcctagatgttcatgaatttcaatcatttgagattgtggggtgtggtccaatgctgctctcaaaaagatgttgcctttcttcaaacagcattaataactaaaaaatccccgttcaagcgatcg

SEQ ID NO: 163504 - DNA, 833 bp, Homo Sapiens
  misc_feature (43)..(55): n is a, c, g, or t
aatatccttcccccattttaatttttccattactctggcaagnnnnnnnnnnnnnttaaaactcaagttacttgaagcctggacacactttccatgattagccggggctaggtaaaagttggtggctttattcttcctgctctataagcagatccaggccctagaaagatgggaccagggtatataattgtttttgaaaagtgtgctacaaaaatggatggcctgttataagccaggatacaaagttaaggatgggggtaagggagggacattttcttccagaagaaaagacagaatttctgaagagtcccagtccataattttcccaaaatggttggaggagagggtaaaatctcaacatgagtttcaaagtactgtctctgtgaggggccggtagatgccttgctgaggaggggatggctaagtttgaccatgccccatccccagctaggagaatggaaatggaaagtttattgcccagtgggtgtgaaagtgggctgaagcttggttggtactgaattctctaagaggtttcttctagaaacagacaactcagactcttcctctcacttcagcaaagaagttatttttaaaagcacttgggaagttcctcctccaccccgcaggtgggaaggctcagagaagggtgtcatcagtacagccgccttctaggccgtaacggaattcctgaaggttggagactccatagaagtggacaaaggctgctgccaccaccaggacatggaaaatctgatgagactggaaccatatgtcaaatgttccaggaaagaagcgctcaggaattcgagcagcatacagtgcaggtccagtaa

SEQ ID NO: 163505 - DNA, 1365 bp, Homo Sapiens
aatgccctgttaatagccggaatcctagtaaggatggggtagggaggacatgttctccgaagtaatacagatttctaagagttcccatccatgatgttcccaaaatgttggaagaagaagggtaaattctccaacatgagttttcaaagtaactggtctctatgaggggccggtagatgcccttcctgaggaaggggatggctaaggtttgaccatgcccccatccccagctaggagaatgggaaatggaaagttttattgcccagtggctgtggaaagtgggctgaagcttggttggtactgaatttctctaagagggtttcttctagaaacagagcaactcaagactcttccttctcacttcagcaaagaagttatttttaaaagcacttgggaagttcctcctccaccccgcaggtgggaaggctcagagaagggtgtcatcagtacagccgccttctaggccgtaacggaattcctgaaggttggagactccatagaagtggacaaaggctgctgccaccaccaggacatggaaaatctgatgagactggaaccatatgtcaaattttccaggaaagaagcgctcaggaattcgagcagcataaaggccagctccagtgatgtacatcacagccatgaggaagaaccagcccatctggcccactgtggtggccttgacaaagccctcagcgatagtaaagtgcatggtgggcacgacgccactcaagccaagtcccaggaacacgcctgctcttgtctgccggtgcttaggagtggcaaaccggtcccactgcgccacaatgatggcagaaatgcccaggacacagacgatggagaggtagatgagccgtggctgtggggagcagtagaaggaataatagagccaggggacaaagctccccataattagaagagcaatccctgaatagtccagtttggaaaaagtccgagagactttctctgaatgacaatagacggtgtgaaagagccaggagaagctgaggcagagcactgcacccaaaaagaacatcccaaaaaccaccttctcctgtagagaggccatgaagtacatatttggtctgagcatggtcaagattcccaaaaagagaaacagcacgaaaccaagcagatgggtccagatgttgccagtttctgtatgaatgcggaagatgctcttgaagcaagcccgaaaggaggttatgggaggtctatgaccatgtagcagatagtcgttgtcctttagccagtcagggagcacatcatatgggatgaccctccacgacgcgtgggtcgacgatatcccgggaattccggaccgtacacagccttgcttatttgtacagctgtgtatagtcacacagc

SEQ ID NO: 163506 - DNA, 1100 bp, Homo Sapiens
  misc_feature (37)..(37): n is a, c, g, or t
  misc_feature (44)..(44): n is a, c, g, or t
ccccatcttggcccaattgtggtggcctttgaacaanccctcancgaatagtaaagtgcatggtgggcacgacgcccactcaagccaagtccccaggaacacgcctgctcttgtctgccggtgcttaggagtggcaaaccggtcccactgcgccacaatgatggcagaaatgccccaggacacagacgatggagaggtagatgagccgtggctgtggggagcagtagaaggaataatagacccaggggacaaagctccccattaattagaagagcaattcccctgaatagtccagttttggaaaaagtccgagagactttcttctgaatgacaatagacggtgtgaaagagccaggagaagctgaggcagagcactgcacccaaaaagaacatcccaaaaaccaccttctcctgtagaggggccatgaagtacatatttggtctgagcatggtcaagattcccaaaaagagaaacagcacgaaaccaagcagatgggtccagatgttgccagtttctgtatgaatgcggaagatgctcttgaagcaagcccgaaaggagggcatgggaggtctatgaccatgtagcagatagtcgttgtcctttagccagtcagggagcacatcatatgggatgaccctccaacgtccctcccagaccttgtacacaaactcttccatcttctccatggcgtggtgggcttgcaggggaagtgtcagtacccgcacctcctcctcttcttcctggggcactgggcatgtttgctcttcttcagctttgggtgggttggcgattacccgtttgcccttctcttctagcaggggtcccagttcagccagttccaccgtgtcagcttccctgttactggcaggagccccattcccctgtgccaccacagatcctttgtgggaagacatctggctggtacctcaataccctgcagcttcagcttggggaaaggttggggtctctcagccccagggggcagagatctccctctgatggtagacaagccgggcaggcgggctctgctggggccccggtcccccgcgctacatcccgcggcgctggaggcaggcctgccggccgagcggccccgatc

SEQ ID NO: 163507 - DNA, 571 bp, Homo Sapiens
  misc_feature (14)..(14): n is a, c, g, or t
  misc_feature (36)..(36): n is a, c, g, or t
  misc_feature (57)..(57): n is a, c, g, or t
  misc_feature (60)..(61): n is a, c, g, or t
aaaagccttttgcntccccaaccagagctcaaaccnaaacgtttcggtcctcttccnttnngcattaaccctttgcttgatcctcaggggccactcccccaacacccctgtacttgggtaagggatgttggacagagcctgttttcatgtactgcaggtgggggtgtgctgacatgtttgctcttggttgatggagaaggtacagaggccagggagtgaaaatggttgacagaagagggaagagttaggtgtctcatagtcactcatagtggggtggtcaggggtaatggcatctccccactttaggcttctcaaacagacttttgacacctctcaagttcagagctctgatgtggaaagacaggaggtgtggggaaggagggggatttcgtgtgtttgcatgagtgtgcgcttcaggccttgggagttggcaagagggagggaaggaaggagagcaaaatcttcggaaggtgtttcttgtacctgagggatcctgccctgaatctccatagtctccactgtgaactgaggaggggaggggtgtgctggggaataaatcttgtatgagacc

SEQ ID NO: 163508 - DNA, 420 bp, Homo Sapiens
  misc_feature (35)..(35): n is a, c, g, or t
  misc_feature (40)..(40): n is a, c, g, or t
  misc_feature (105)..(105): n is a, c, g, or t
  misc_feature (118)..(118): n is a, c, g, or t
  misc_feature (168)..(168): n is a, c, g, or t
  misc_feature (194)..(194): n is a, c, g, or t
  misc_feature (254)..(254): n is a, c, g, or t
  misc_feature (409)..(409): n is a, c, g, or t
tgggggtgtgcctgaacatgtttgccccttggttnaatgnaaaaggtacaaagcccccaggagtgaaaatggttgacagaagagggaagagttaggtgtcctcanagtcacctcatantggggtggtcaggggtaatggcatctccccactttaggcttctcaaacanacttttgacacctctcaagttcaganctctgatgtggaaagacaggaggtgtggggaaggagggggatttcgtgtgtttgcatgantgtgcgcttcaggccttgggagttggcaagagggagggaaggaaggagagcaaaatcttcggaaggtgtttcttgtacctgagggatcctgccctgaatctccatagtctccactgtgaactgaggaggggaggggtgtgctggggaataaatcntgtatgagaac

SEQ ID NO: 163509 - DNA, 782 bp, Homo Sapiens
gtcgtgtcactggtggatatctagatcagcagctgggccacacagtatccttttcttgtgtgactatgggacttctacccggtttgggttctgctttcttataccaagtggctgctgtggtaactaccaaatacttcaaaaaacgattggctctttctacagctattgcccgttctgggatgggactgacttttctttgggcaccctttacaaaattcctgacctcgtgatccgcccgccttgtcctccaaagtgctgggattacaggcatgagccactgggcgcggccagataagtttttaaggttccttcttgctttagcattctgagaaatgtctaattggtagtaagacaagagtaatagcaacctgtattgttagtatttaaccaaataggctaaaattttaatcaggtaccttaagtattaaatagaaatcggaatgtaccataataaatccaaactctcaattacgccatggtaattcagtcactaaaatatgtaaagatagaaaattttttaatttaaagaagtgtgaaacatagccattgattgatcagaattctggaatctgaatattaaaaccttacttagtgactggaatggtatatgctccctccaaaagtttatctttgtttattgattaaaggtaatccttactttctttgtattacttaggttcttaattaaaggtaatccttactttctttgtattacttaggttcttaaatttctatgataaacatgtattgctaaataataaaaagtatataaaaattgcttc

SEQ ID NO: 163510 - DNA, 861 bp, Homo Sapiens
cggtacccagatggccactgactcctacttcctctgtatagagcaactgttgaactcagctgcctgtaggaagactgaagactttaataacaaactctccaaggtgaaaatgaacacagatagcggtgggtgtgctcgcaaacgtgccgcccatgtctgttacgctaacatctgtgaagagagtgcaaagttctccaaacctattggctgcagggcgtgattctcagtcaccagactcagcttggagatcttacaatgatggcaatgcaggagacactgaacggagatgctacatattcctctcttgcagcaaaaggttttagaagcgttcgaccaaacctacaagataaaagatcaccaactcagagccagataacagtgaatggaaactcaggaggtgccgtgagtcccatgagttactatcagaggccgttttccccctcgtcatattctctcccagcctcactcaactccagcattgtcatgcagcacggcacatccctcgattccacagacacatatccccagcatgcgcagtctctggatggcaccaccagcagctctatccccctgtaccgatcctcagaggaagagaagagagtgacagtcatcaaagccccgcattacccagggatcgggcccgtggatgaatccggaatccccacagcaattagaacgacagtcgaccggcccaaggactggtacaagacgatgtttaagcaaattcacatggtgcacaagccggatgatgacacagacatgtataatactccttatacatacatgcaggtctgtacacccaccctaccgtgctcagtcacagcctgctgcaagacccttcctgctgactctcttcccccg

SEQ ID NO: 163511 - DNA, 578 bp, Homo Sapiens
aggcgtgatctcagtcaccagactcagcttggagatcttacaatgatggcaatcaggagacactgaacggagatgctacatattcctctcttgcagcaaaaggttttagaagcgttcgaccaaacctacaagataaaagatcaccaactcagagccaaataacagtgaatggaaactcatcgaggtgccgtgattcccatgagttactatcagaggccgttttccccctcggacatattctctcatttgcctctctcttgctttttttccttcagacacttggattggacttaatcttaaacctctggagttcaagaccttttaaaaagggctaaataaacaatctctacatgtaaaaggccactgactcctacttcctctgtatagagcaactgttgaactcagctgcctgtagggcgtgattctcagtcaccagactcagcttggagatcttacaatgatggcaatcaggagacactgaacggagatgctacatattcctctcttgcagcaaaaggttttagaagcgttcgaccaaacctacaagataaaagatcaccaactcagtggccatcttt

SEQ ID NO: 163512 - DNA, 565 bp, Homo Sapiens
caactctggcacagacctctcccaaatgggagttcccctgtggaggcctcagcagagagcactggtgttctatagccctggatcaccccatagatggagactgtataaggcgtagcagccttgaggcccgggatgtccacagcccgaaggctgccaggcaacgtgaggttccgagcttgcctccaccttgttgacctcctgcacctgaatgacaaagtgctcataggcatggtcagctgcggtccagttgagtctgaggccatcccagccaacctcagacacggtgaggctttccagctcaggggcttgttcagtggatgccttcacacgtgcgggcttgctcttgtgtctgcctttctcggctgtcaggaggacattgtactcctgtcctggttccaggcctctcaggacataggaagtggtgtttcttggaagctgcactcccacccactggccggcgtggaaaatgttcgtgaggcggtagcggtcaaatatggacaacggtgtcttccagagcagggtcaggctggtctctgcagttcagaaacctgaaggtcctgggcgt

SEQ ID NO: 163513 - DNA, 416 bp, Homo Sapiens
tgttggccaggcaagctatccggttcaatgacaggctccccacaggccactggctgggagtgcagcttccaagaaacaccacttcctatgtcctgagaggcctggaaccaggacaggagtacaatgtcctcctgacagccgagaaaggcagacacaagagcaagcccgcacatgtgaaggcatccactgaagccgaaccggaagttgacaaccttctggtttcagatgccaccccagacggtttccgtctgtcctggacagctgatgaaggggtcttcgacaattttgttctcaaaatcagagataccaaaaagcagtctgagccactggaaataaccctacttgcccccgaacgtaccagggacctaacaggtctcagagaggctactgaatacgaaattgaaccggatagcttg

SEQ ID NO: 163514 - DNA, 555 bp, Homo Sapiens
agaacagatggcagatatggccaaaataaaactatctgtcttgaattctgaagatgaactaaatcgttgggactctcagatgaaacaggatgctggcagatttgatgtgagtttcccaaacagcataattaagagagatagccttcgaaaaaggtctgtacgagatctggaacctggtgaggtgccttctgattctgacgaagatggtgaacacaaatcccactcacccagagcctctgcattatatgaaagttctcgattgtcttttttattgagggacagagaagacaagctacgtgagcgagatgaaagactctctagttctttagaaaggaacaaattttactcttttgcattggataagacaatcacaccagacactaaagctttgcttgaaagagctaaatccctctcttcatctcgtgaagaaaattggtcttttcttgattgggactcccgatttgcaaattttcgaaacacaaagataaacgaaaggttgactctgctccgagacctattccatcctggtacatgaaaaagacgacaagtaggacc

SEQ ID NO: 163515 - DNA, 1680 bp, Homo Sapiens
  misc_feature (144)..(144): n is a, c, g, or t
  misc_feature (1650)..(1650): n is a, c, g, or t
  misc_feature (1658)..(1658): n is a, c, g, or t
ggaagcacgggaagagtccaccaatagccggtttgaaaactacggagacaagtttgcagagaacgatgtgatggctgcttgcggatttgaatgtggaaatgacgtggaactgtcttttaccaagaatggaaagtggatgggcantgctttccgaatccagaaggaagccttggggggtcaggccctctatcctcatgtcctggtgaagaattgcgcagtggagttcaacttcggacagagagcagagccctactgttctgtcctcccggggtttaccttcatccagcaccttccccttagtgagcgtatccggggcaccgttggaccaaagagcaaggcagaatgtgagattctgatgatggtgggcctgcctgctgctggcaagaccacatgggccatcaaacatgcagcctccaacccttccaagaagtacaacatcctgggtaccaatgccatcatggataagatgcgggtgatgggcctacgccggcagcggaactatgctggccgctgggatgtcctgatccagcaggccacccagtgcctcaaccgcctcatccagattgctgcccgcaagaaacgcaactatatcctagatcagacaaatgtttatgggtcagcccagagacgaaaaatgagaccatttgaaggcttccagcgcaaagctattgtaatttgtcccactgacgaggacctaaaagaccgaacaataaagcgaaccgacgaggaagggaaggatgtcccagatcatgcggtcttagaaatgaaagccaacttcacgttgccagatgttggggacttcctggatgaggttctgttcattgagctgcagcgggaggaagcggacaagctagtgaggcagtacaacgaggaaggccgcaaggctgggccaccccctgaaaagcgctttgacaaccgaggtggtggtggcttccggggccgcgggggtggtggtggcttccagcgctatgaaaaccgaggacccctggaggcaaccgtggcggcttccagaaccgagggggaggcagcggtggaggaggcaactaccgaggaggtttcaaccgcagcggaggtggtggctatagccagaaccgctggggtaacaacaaccgggataacaacaactccaacaacagaggcagctacaaccgggctccccagcaacagccgccaccacagcagcctccgccaccacagccaccgtcagcagctacagccctccacagccgagttacagccagccaccctacaaccagggaggttacagccagggctacacagccccaccgcctccacctccaccaccacctgcctacaactatgggagctacggcggttacaacccggccccctataccccaccgccaccccccaccgcacagacctaccctcagcccagctataaccagtatcagcagtatgcccagcagtggaaccagtactatcagaaccagggccagtggccgccatactacgggaactacgactacgggagctactccgggaacacacagggtggcacaagtacacagtagccagtgtgacccagaggctcccggaggcccctgccgacttcctccaccagcgcctgcctcggcccctcctcttgcccccgccagatcccgtgggtgctgggggatgggggtcatnccaggggntgccttcccttccagcccactt

SEQ ID NO: 163516 - DNA, 590 bp, Homo Sapiens
  misc_feature (140)..(216): n is a, c, g, or t
ctataaccagtatcagcagtatgcccagcagtggaaccagtactatcagaaccagggccagtggccgccatactacgggaactacgactacgggagctactccgggaacacacagggtggcacaagtacacagtagccannnnnnnnnnnnnnnnnnnnnnnnnnnnnnnnnnnnnnnnnnnnnnnnnnnnnnnnnnnnnnnnnnnnnnnnnnnnncagatcccgtggtgctggggatggggtcatcccagggctgcctccctccagcccactgcctcccctctgaggggcttccttcccctccatagggccaggcatttttttctggattcaaacaggcaacaatgaccttttattttctgtttgtccccacctccccagccttccacctcctgttcttcctaccttcttcctttttgactaaataatccccacctcccttgatcatacagtgaggctacagtgactgaggggagaatcccctcctgttcactctcccaaccctgctccagcccctcagcttcccagaccctcatgcagttggttgtaaattctcccaggagctgttttactgtctacttttcaggatt

SEQ ID NO: 163517 - DNA, 626 bp, Homo Sapiens
  misc_feature (60)..(127): n is a, c, g, or t
  misc_feature (395)..(403): n is a, c, g, or t
aaggtagcgaggcctgggtggcgaattcggcacgagggaaagagagaactagtctcgagnnnnnnnnnnnnnnnnnnnnnnnnnnnnnnnnnnnnnnnnnnnnnnnnnnnnnnnnnnnnnnnnnnnnaaccccgaaaagtaaacagtaaaaccgctcctgggaaaatttacaaccaactgcatgagggtctgggaaaactgaggggctggaacagggttgggaaaatgaacaggaggggattccccccccagtcactggaccctccctgtatgatcaagggagggggggaattatttagccaaaaaggaaaaaggtaggaaaaacaggagggggaaagctggggaggtggggacaaacagaaaataaaagggcattgttgcctggtttgaatccnnnnnnnnntgcctgggccctatggaggggaaaagaaaccccccctcaaaaggggaaggcattggggctggaagggaaagcaccccctggggataaaccccatcccccaaaaacccaggggaatctggcgggggggcaaaaaggaggggcccaaagcaaggccccttgggggaaagaaaacccggcagggggcccccccgggaaaccctctgggggtcccccaccggctaac

SEQ ID NO: 163518 - DNA, 592 bp, Homo Sapiens
  misc_feature (140)..(216): n is a, c, g, or t
  misc_feature (250)..(250): n is a, c, g, or t
  misc_feature (279)..(279): n is a, c, g, or t
ctataaccagtatcagcagtatgcccagcagtggaaccagtactatcagaaccagggccagtggccgccatactacgggaactacgactacgggagctactccgggaacacacagggtggcacaagtacacagtagccannnnnnnnnnnnnnnnnnnnnnnnnnnnnnnnnnnnnnnnnnnnnnnnnnnnnnnnnnnnnnnnnnnnnnnnnnnnncagatcccgtggtgctggggatggggtaatcccnagggctgcctccctccagcccactgcctncccctctgaggggcttccttcccctccatagggccaggcatttttttctggattcaaacaggcaacaatgaccttttattttctgtttgtccccacctccccagccttccacctcctgttcttcctaccttcttcctttttgactaaataatccccacctcccttgatcatacagtgaggctacagtgactgaggggagaatcccctcctgttcactctcccaaccctgctccagcccctcagcttcccagaccctcatgcagttggttgtaaattctcccaggagctgttttactgtctacttttcaggatt

SEQ ID NO: 163519 - DNA, 443 bp, Homo Sapiens
  misc_feature (97)..(150): n is a, c, g, or t
gctatagcagaaccgctggggtaacaacaaccgggataacaacaactccaacaacagaggcagctacaaccgggctccccagcaacagccgccaccnnnnnnnnnnnnnnnnnnnnnnnnnnnnnnnnnnnnnnnnnnnnnnnnnnnnnnctacagccctgctcggaaccccccaggggccagcacctacaataagaacagcaacatccctggctcaagcgccaataccagcacccccaccgtcagcagctacagccctccacagccgagttacagccagccaccctacaaccagggaggttacagccagggctacacagccccaccgcctccacctccaccaccacctgcctacaactatgggagctacggcggttacaacccggccccctataccccacggctaccccaacgaaaagaatacctcagcccagtataacagc

SEQ ID NO: 163520 - DNA, 1883 bp, Homo Sapiens
  misc_feature (1289)..(1301): n is a, c, g, or t
gatgcatctgagcctgtgatacgctcctctgcagttgttgacctcctgtactggagagacattaagaagactggagtggtgtttggtgccagcctattcctgctgctttcattgacagtattcagcattgtgagcgtaacagcctacattgccttggccctgctctctgtgaccatcagctttaggatatacaagggtgtgatccaagctatccagaaatcagatgaaggccacccattcagggcatatctggaatctgaagttgctatatctgaggagttggttcagaagtacagtaattctgctcttggtcatgtgaactgcacgataaaggaactcaggcgcctcttcttagttgatgatttagttgattctctgaagttgttgacctcctgtactggagagacattaagaagactggagtggtgtttggtgccagcctattcctgctgctttcattgacagtattcagcattgtgagcgtaacagcctacattgccttggccctgctctctgtgaccatcagctttaggatatacaagggtgtgatccaagctatccagaaatcagatgaaggccacccattcagggcatatctggaatctgaagttgctatatctgaggagttggttcagaagtacagtaattctgctcttggtcatgtgaactgcacgataaaggaactcaggcgcctcttcttagttgatgatttagttgattctctgaagtttgcagtgttgatgtgggtatttacctatgttggtgccttgtttaatggtctgacactactgattttggctctcatttcactcttcagtgttcctgttatttatgaacggcatcaggcaaagatagatcattatctaggacttgcaaataagaatgttaaagatgctatggctaaaatccaagcaaaaatccctggattgaagcgcaaagctgaatgaaaacgcccaaaataattagtaggagttcatctttaaaggggatattcatttgattatacgggggagggtcagggaagaacgaaccttgacgttgcagtgcagtttcacagatcgttgttagatctttatttttagccatgcactgttgtgaggaaaaattacctgtcttgactgccatgtgttcatcatcttaagtattgtaagctgctatgtatggatttaaaccgtaatcatatctttttcctatctgaggcactggtggaataaaaaacctgtatattttactttgttgcagatagtcctgccgcatcttggcaagttgcagagatggtggagctaggnnnnnnnnnnnnngcccttttcagtttgtgcactgtgtatggtccgtgtagattgatgcagattttctgaaatgaaatgtttgtttagacgagatcataccggtaaagcaggaatgacaaagcttgcttttctggtatgttctaggtgtattgtgacttttactgttatattaattgccaatataagtaaatatagattatatatgtatagtgtttcacaaagcttagatctttaccttccagccaccccacagtgcttgatatttcagagtcagtcattggttatacatgtgtagttccaaagcacataagctagaagaagaaatatttctaggagcactaccatctgttttcaacatgaaatgccacacacatagaactccaacatcaatttcattgcacagactgactgtagttaattttgtcacagaatctatggactgaatctaatgcttccaaaaatgttgtttgtttgcaaatatcaaacattgttatgcaagaaattattaattacaaaatgaagatttataccattgtggtttaagctgtactgaactaaaactgtggaatgcattgtgaactgatatgagctcca

SEQ ID NO: 163521 - DNA, 370 bp, Homo Sapiens
  misc_feature (245)..(259): n is a, c, g, or t
tctagaggaccccggcacgaggcacaagatctaagcttgtgaaaaactatacatatataatctatatttacttatattggcaattaatataacagtaaaagtcacaatacacctagaacataccagaaaagcaagctttgtcattcctgctttaccggtatgatctcgtctaaacaaacatttcatttcagaaaatctgcatcaatctacacggaccatacacagtgcacaaactgaaaagggcnnnnnnnnnnnnnnncaagctcaacaatctcgtgcaattggccaagagtggggaaggattatctgcaacaaggtaaaatatacgggtttttattccaccaggtgcctcagatgggaaaaagatagt

SEQ ID NO: 163522 - DNA, 312 bp, Homo Sapiens
tagatatgagtggagcaggcggaagacatggcagagaagaggcagctgttcatagaaatgcgtgctcagaattttgatgtcatacgactatcaacttacagaacagcctgcaaattacgatttgtacaaaaacgatgcaaccttcatcttgttgatatctggaacatgattgaagccttccgagacaatggccttaatacactggaccataccaccgagatcagtgtgtcccgcctcgaaactgtcatctcctccatctactatcagttgaacagcgccttccttctactcaccaatagctgtagcaagttg

SEQ ID NO: 163523 - DNA, 403 bp, Homo Sapiens
taagactgtaatgaaactactagacccatttgggctaaagtttggcttttccttccttgagtcatagaacatatccatctcccaggaaatgtccttctctggcgtctgcttgcccttctgagtctgccttttttgcactgaacataagcactttatactaatgggtcacaaatcttgcagcccttaatttgggataagaccagattttcctgacattttcctctaactcattgaactatcaaattataggcaaccactgactagactgatatgagatgaggctaaaagcctttgaacaccacgctgtagtctccaacagaaaaacaccaccaaaacagatacccatgttgaggggttgaatgttttactacaaacaagccacaataaagtgtctatcaacatg

SEQ ID NO: 163524 - DNA, 463 bp, Homo Sapiens
aggggaagagaaatgagcatggattggaaagctggggtataagcacacatgctaaagaaaaacatgtaatttggtccatactcacctggatatactgttcctcaggttaaaaaatacagtactatcctaaatcttgaaggcaactctcagcctatccattgagttaccttcagatctgccctctggttcctagctgtcttgggactaacttctttcctgcgctcagctgttttctggattccatgttttccattttattgagtactaacttgttttgctgcagcacatcctttggtagcttctagaggaagtttgtgtggaggtaaaatttttgagaccttgcatgtctcatgtttgattgatactttatacgtttaggtaggaggtaattttccttcaggactttaaaaatattgttgctccattttactttgtttctattgttgtattgagaaatccaatg

SEQ ID NO: 163525 - DNA, 291 bp, Homo Sapiens
ggcggtccaatgtatgagatgagtggaggatgtattgatatgacgaggaagttagtaagcttgggaacaaaataaccttgtctatgaggaaggtggcatgagttactagaaaagaacacgagcataggaggcgaaaagatatcagttgggatcctgcctctacaatttactacatgacctgtggggcattattaacctctgagcctcagttcagtccttcatgaaataaaataataaaaaatgataaaacccaccacagaggacttttacaagacaaatgatattacacca

SEQ ID NO: 163526 - DNA, 728 bp, Homo Sapiens
cagctcatcctcagtcacttagaggtcccaggagagagtcatggaccatataggtaaggtggggccctctgtgacaccctcataaaccggagctctgcacagtgatgtggacaaaagggaaagttggagagctttgtggagacacacagcagggataggttctggctcatctctctgaattgcgtctttgaaatggactagtgcacaccctgaagggctgttagggttaagtgaaatgacgctggtgctcaataaaccatagcagttgtacttgttttcattgacccctcctctgcctcactccagccttctcactccagctttgcagcttatttcctgttgtctcttgcagctgtcctttcagttcccttcccaacccttttttacatagaacctaggccacagcagtagccttgtagctttttcttggtgtttccactctaaaccacacatgattttcccttaattttcaactcggctctggtgtttcaaaaccttcaagtttccagtgcacacccaattaagtccaatctattctgggacagctatcaacaccctctgagtgtgctcccagcctttcactctctctaatcttaactttcattatttgcctctgaaacccacattccagtcggcaggctagtctgctggccggttccattacgaatccacactttggatgctctttcctgggtttggatgccttcaaaaatccatctttcaaaatc

SEQ ID NO: 163527 - DNA, 498 bp, Homo Sapiens
ttttaaatcatcatgctcatggaggtgaaatactttgaggaatgggaacatctcttcactgtgtttttggatcagccttctctcaaccgccaagaaatgcatgatttccctgccaactctaggaagtagtgctgcatgattgaatcattatttgatgaattctttcattgtaacatagggagtcattttcaaaaaggtagatatgaacttaaattaaattgacttatgaatgctttgcctgtgggcccaacagtgtcatgaccctccaattgaaacatagcatgaattatttttatgtcgagttcttgaactgctaatcaggtgtgtgtttccttgaagtccagagcaggatccaggtcagatgaaggaggtggtatgcctggcttaactgctgaaaatagagcattgaaactcttcacaatgtgctgcattgggtttctgcttggctttctcactgaaaagtaaattggggaaaacgctgcttttactattttgcat

SEQ ID NO: 163528 - DNA, 1072 bp, Homo Sapiens
ccgtaacgaatggatgatgagtggagtaaagagaggcttcgtgagagggacagagatagaagcaggactagaagcagaagcagaacacgaagcagggaaagggatctggtaaaacctaaatatgacctggatagaacagatccattagaaaataattatactccagtctcttcggtacctagtatttcatctggccactaccctgtacctactttgagcagcactattacagtaattgctcctactcatcatggaaacaacactaccgaaagttggtctgaatttcatgaagaccaatgtggaccataactcttacgtaagaccacccatgccaaagaaacggtgtagagactatgatgaaaagggtttttgtatgagaggagacatgtgtccttttgatcatggaagtgatccagtagttgtagaagatgtgaatcttcctggtatgctgcctttcccagcacagcctcctgttgttgaaggaccacctcctcctggactccccccacctccaccaattcttacacccccacctgtgaatctcagtgcccccagtaccaccgacaggtccatagccacccagtctcccacctgttacagatgatatttcttattctttggttttgacaggaccaccacctccacttcctcctttgcagccatctggcatggatgctcctccaaactctgcaaccagttctgttcctactgtagtaacaactggcattcatcaccagcctcctcctgctccaccctctctttttactgcagataccatatgacacagatggctacaatcctgaagccccaaggataacaaacacttccagacctatgtatagacacagagtgcatgcacaaagggcccaaacttgataggactaacattcaggggatatggatcttgccaccccccaaaaaaaccctccccaataaaaactacttttgaggaatagtataggggactccacaatccaggggaaaaaaaccctttggatttctggaacagccctgcacgtcccctaccaagaaagcactctgggctttcaatacaccggaatctctgactaag

SEQ ID NO: 163529 - DNA, 1083 bp, Homo Sapiens
atgtaccagacccgacgccggcgtgatgtggcttccgctggtgctgctcctggctgtgctgctgctggccgtcctctgcaaagtttacttgggactattctctggcagctccccgaatcctttctccgaagatgtcaaacggcccccagcgcccctggtaactgacaagggaggccaggaagaaggttctcaaacaagctttttcagccaaccaagtgccggagaagctggatgtggtggtaattggcagtggctttgggggtctggctgcagctgcaattctagctaaagctggcaagcgagtcctggtgctggaacaacataccaaggcagggggctgctgtcatacctttggaaagaatggccttgaatttgacacaggaatccattacattgggcgtatggaagagggcagcattggccgttttatcttggaccagatcactgaagggcagctggactgggctcccctgtcctctccttttgacatcatggtactggaagggcccaatggccgaaaggagtaccccatgtacagtggagagaaagcctacattcagggcctcaaggagaagtttccacaggaggaagctatcattgacaagtatataaagctggttaaggtggtatccagtggagcccctcatgccatcctgttgaaattcctcccattgcccgtggttcagctcctcgacaggtgtgggctgctgactcgtttctctccattccttcaagcatccacccagagcctggctgaggtcctgcagcagctgggggcctcctctgagctccaggcagtactcagctacatcttccccacttacggtgtcacccccaaccacagtgccttttccatgcacgccctgctggtcaaccactacatgaaaggaggcttttatccccgaggggggttccagtgaaattgccttcccacaccatccctgtgattcagcgggctggggcgctgtcctcacaaaggccactgtgcagaagtgtgttgctggactcagttgggaaagcctgtggttgtcagtgtgcaagaatgggcctgacttggtgaactctattgcccatcgtggtctc

SEQ ID NO: 163530 - DNA, 966 bp, Homo Sapiens
aggatccagcctgtaccccacacaagggagacagcacctcccaggagatccactcagccacaacttcaccttctcctgtttcctccacattaccagagagcatctcttcctctcctcttcctgtgacttcactcctcacgtctggcttggcaaaaactacagatatgttgcacaaaagctcagaacctgtaaccaactcacctgcaaatttgagcagcacctcagttgaaatactggccacctctgaagtcaccacagatacagagaaaactcatccttcttcaaacagaacagtgaccgatgtggggacctccacttctggacatgaatccacttcctttgtcctagctgactcacagacatccaaagtcacatctccaatggttattacctccaccatggaggatacgagtgtctccacatcaactcctggcttttttgagactagcagaattcagacagaaccaacatcctccctgacccttggactgagaaagaccagcagctctgaggggacccgcttagccacagagatgagcactgtcctttctggagtgcccactggtgccactgctgaagtctccaggacagaagtcacctcctctagcagaacatccatctcaggctttgctcagctcacagtgtcaccagagacttccacagaaaccatcaccagactccctacctccagcataatgacagaatcagcagaaatgatgatcaagacacaaacagatcctcctgggtctacaccagagagtactcatacggtggacatatcaacaacacccaaactgggtagaaacccactcgactgtgactcagagattttcacactcagagatgaccactcttgtgagcagaagccctggtgatatgttatggcctagtcaatcctctgtggaagaaaccagctctgcctcttccctgctgtctctgcctgccacgacctcaccttctcctgtt

SEQ ID NO: 163531 - DNA, 496 bp, Homo Sapiens
gattcagaggatcccgagaggtgggacacgggggctgctcccagaagcacttcctcttcctggcccagaaaatcatcatatgacaacagcctcagtatggaggccttccagcaccgttctgtatcctggtcgcagattcaacaagtgagatcctgctggaccgtggcttcaccttttggcagtggtttgatggtgtcctggacctcaccaaacgctgtctcaggagctactggtctgaccggctgatcacttggcttcatcagcaaacagtacgttactagccttcttctcaatgagcccgacggaacctttctcctccgcttcagcgactcagagattgtggggcatcaccatagcgccatgtcatccggggccaggatggctctccacagatagagaacatccagccattctctgccaaagacctgtccattcgctcactgggggaccgaatccgggatcttgctcagctcaaaaatctctatcccaagaagcc

SEQ ID NO: 163532 - DNA, 752 bp, Homo Sapiens
  misc_feature (678)..(700): n is a, c, g, or t
gggagacccggagagacggcgaaggagctggaaaccgagccagggctgagccggctgacaacaggcatcgatcgaaggtttccggtaaccagcatacaccatctcatccgaaacagcggggttcggcttctcctatggcaggatctggggcgaaaagatcaagagatggtgaactggagaccagtctaaacacccaaggttgtaccacagagggagacctgctgtttgcccagaagtgtaaagaactccaaggatttatacctcctctcacagacctactcaatgggctgaagatgggtcgttttgagagaggattaagcagttttcagcagagtgtggcaatggacaggatccagcgtattgtaggtgttttgcagaagccacagatgggggaacgttacctaggaaccttgctacaggtagaagggatgttaaagacttggtttccacaaatagctgcccagaagtcatcattgggtggtggcaagcatcagctgaccaagcattttccaagccaccacagtgattcagctgcttcctctcctgcatctcctatggaaaagatggaccagacacagctaggacatctagctttaaaaccaaagcagccttggcacctcacacaatggccagctatgaaccctcacctgggatccacacccactccaattttgcaannnnnnnnnnnnnnnnnnnnnnnaaggtactaatctcccttttagacccatgggccccttttaggccaactgggc

SEQ ID NO: 163533 - DNA, 798 bp, Homo Sapiens
  misc_feature (700)..(700): n is a, c, g, or t
  misc_feature (707)..(708): n is a, c, g, or t
agattgatatgagttggagtgagacaaaccggcttgagtctaacctctcagttagtctaaggctccaagcttgaaagggttaaatgaagtactatatttgttttgtttcgttttcgttttgtttgaggctttgcactgcactccatcctgggtggcagagtgaggccctgtctcaaaataaataatccagtcccccccaagaaaggaatgaagtgctataatgagaaaaatcctagtacctaacatatagtagacagtggagagtggttctctttcgtttctcaggggcagacagatggggtgctggagtcctctatcaaagagtcagagctctatcccagatgtgtaatgaacgtggtcacagacatattgtcccattaccatttaccttccctataaccactgtgcctccagccttgtagaatagacacataggagcgcagcaatacgtctaaaaataggagtgagagagggcagggcatgcccgttcttgtggtagaagaaaagaatgtcaaagaaagcagctgggactaatgaactttacattagccatattccagtatttcagcttaagtcaaatgtcggtcctcatgaggcaactggctgtgacaggagctacgctaattaccacttaccaacctttaaattctgggtaaaagcaaagagaaaactaatggatttttcatttttccgagagacnagaatannaatatagtagtctgtagaaaaaagaaaacctgcatcaattacaaggaattattaaatgtatcctttaaataaataacccccatttatcct

SEQ ID NO: 163534 - DNA, 363 bp, Homo Sapiens
acgatgtgtaacagttctgccgaactccctctcgcctcagccccttcagtcctctgtgacgtgctgtggcctctacagtgggtctgcccttgccacttccccaaacatctcatcaagtttttccccttcagatctgacagtgcaataggacagacgtgtggactgttataagaactactcagtgtatttgttcctgggcaaggaaggtaggagttctgtgcacttaaggccagtagtcacaaacccttgttttatttaatgagacagaggagaaagtggagcggggagggaatcctagcttattttcccttttctatgaggacttgacacaggttctgctgagttgtcactgacaacgtgcct

SEQ ID NO: 163535 - DNA, 1155 bp, Homo Sapiens
  misc_feature (845)..(904): n is a, c, g, or t
  misc_feature (973)..(974): n is a, c, g, or t
  misc_feature (1001)..(1001): n is a, c, g, or t
gagggagccgagagacccgagtgcacgtgtggagaagcggcggcacaagcgcggcggcgggagacactcccgcccccaccagactcaagccctcactcgactctcgcggccttcgttgctcgcacagctccctgcccaggctaggaggccggcttgcggggttgagtggcccgagctaagggtgcggagacccaagggcggcgactacgacggcgttgatatcggtggtaacgacggcctcagcaggcggggaagatgaaaggtagccggatcgagctgggagatgtgacaccacacaatattaaacagttgaaaagattgaatcaggtcatctttccagtcagctacaatgacaagttctacaaggatgtgctggaggttggcgagctagcaaaacttgcctatttcaatgatattgctgtaggtgcagtatgctgtagggtggatcattcacagaatcagaagagactttacatcatgacactaggatgtctggcaccttaccgaaggctaggaataggaactaaaatgttaaatcatgtcttaaacatctgtgaaaaagatggtacttttgacaacatttatctgcatgtccagatcagcaatgagtcggcaattgacttctacaggaagtttggctttgagattattgagacaaagaagaactactataagaggatagagcccgcagatgctcatgtgctgcagaaaaacctcaaagttccttctggtcagaatgcagatgtgcaaaagacagacaactgaacaaattacaaatgaactttcttgcacttgcttgtcgccaaataaaagagaggcccattgattcctcccccaccccaacnnnnnnnnnnnnnnnnnnnnnnnnnnnnnnnnnnnnnnnnnnnnnnnnnnnnnnnnnnnnctctgagagttttaatactttcaaggactttaaaaaaataatcatggtttgaattgttttctcttattnnttgtgaggtggttttgaaagaaggacnagggtagatctggttaagtttttgcagttgaaagttagatggtccctaaacatttaatttgtcaaataatttccaaatttaatgttcctgcttttcaccattggaagggcagagcctacaaaaccattgttatattttccaaaggaaccaaaac

SEQ ID NO: 163536 - DNA, 698 bp, Homo Sapiens
  misc_feature (48)..(96): n is a, c, g, or t
cgaaggatgcccacagtggtgaaactggtagacagaagcaccttattnnnnnnnnnnnnnnnnnnnnnnnnnnnnnnnnnnnnnnnnnnnnnnnnnaaagaggaggcggcccggaggaaacaggaacaagaagtaatgcattttgtttgggggtgagggctctactgggcaggagtgcaccctgaccccatgccctgtggctctctgtgcctccgtggaccttagccaggcccctgcagaccctcacagaaggagctccgctttctgcctccaccacccaaggcctgccaggcccttctcacatggggtgcagggaaggcctggccaaggggaaggctgtgccatgtggtcacaagctccaagacagcgtttatagacttactactattaggttttctagtaagctttccactattcctgtagaaataacatctggtttaattttaaattccttgtatgttccctccaccttggctttccccttcccatctttcatagcactctgaatctgagggcttggaagcaagttgagggctggaggtatgagcagatgtcgttcacagtgcggagccccaggtgctgctcgggggcagtgactgtgccgtgttgcgtgttctaggcagcaaagctggccaagatgaagattccccccagtgagatgttcttgtcagaaaccgacaaatactccagcttgacat

SEQ ID NO: 163537 - DNA, 907 bp, Homo Sapiens
aagcgtctggtacggtccggagttccgggatatcgtcgacccacgcgtccgggcagttgcggctggccttcctcatgcactcgtggaaggacaccctggactactccagcaacaccatggagtcagcgcttcaatatgagaagttcttgaatgagtttttcttaaatgtgaaagatatcctccgcgctcctgttgacatcactggtcagtttgagaagtggggagaagaagaagcagaactgaataagaacttttatgacaagaagacagcaattcacaaagccctctgtgacaatgttgacacccgcaccgtcatggaagagatgcgggccttggtcagtcagtgcaacctctatatggcagcccggaaagccgtgaggaagaggcccaaccaggctctgctggagaacatcgccctgtacctcacccatatgctgaagatctttggggccgtagaagaggacagctccctgggattcccggtcggagggcctggaaccagcctcagtctcgaggccacagtcatgccctaccttcaggtgttatcagaattccgagaaggagtgcggaagattgcccgagagcaaaaagtccctgagattctgcagctcagcgatgccctgcgggacaacatcctgcccgagcttggggtgcggtttgaagaccacgaaggactgcccacagtggtgaaactggtagacagaaacaccttattaaaagagagagaagaaaagagacgggttgaagaggagaagaggaagaagaaaagacggaggcggcccggaggaaacaggaacaagaagctagcaaagctggccataccatgaagattccccccagtgagatgttcttgtcagaaaccgacaatactccaagtttgatgacaatggtctgcccacacattgaa

SEQ ID NO: 163538 - DNA, 647 bp, Homo Sapiens
ttaccctatcgtcgacccacgcgctccggaagaagaacggcgtcgctgcttagagatgccatggcagatggcgtaaaatagtggtcatataaatgatgtccggcatgcaaacatctggaggtacagccacttcacgttgcagctgctaaaggctatacggaagttttaaaacttttaagtacaggcaggcgtatgatgttaagtattaaagactatgatggctggacaccgtcttcatgctgcagatcattggggtaaagaagaagcatgtcgaatttgagtggacaatctgtgtgatatggagatggtcaacaaagtgggccaaacagccttagatgtagcagatgaagacataacaggatatttagaagagttgcaaaagaaacgaaaatctgctccatagtgaacgaaccgggacaagaaatctccactaattgaatcaacaagcaaatactgggacaagtaatcaggcagcaggaaggaccggtcaagaagacagaacgcgacgctcgacttatgggacccagagaacacaagcgcagtcgccgtaatggaaatcacagggaaacccggaacacgggctagatgaaacgaagaagaagggcacagcaaggactgagcctaggcggcgccagtgaaaggaggat

SEQ ID NO: 163539 - DNA, 1966 bp, Homo Sapiens
tggcttgggtatacttctcctgcattgaatggggattccaggaaatttgtgtacaagttgttgttaataaatggggttcacatctcccatgtgcctcaaggcatataccacatatgccatcttcagtcttcttaggacaaagcagttaatccaggctgagggaaagcagccctcctactaacttgtcgtccaataagatcaggctgactttgaaagggtaaacccactccatcgtcatacatttctctgcaaatcttgtacacggatgcctcatccttaggaaaataaggtctgatagtataaactttggaggtaggagtcagtggaggtggctgaaaaaagagatcatttgccccatcaattggcagcaaacgctggaactctcccgctagaccacctctaaaggcccagggttcttggtctccaattaagaattgtgctgaagaatgactacgacaccctaaccactgtacaaaagacttcaccatagacattatactcttgatatcccaaacataggagtacatgtcataaagaattgtcctgttggcacaattggagagccgagtgaacattcccatcactagtccacacatctcttcaaacttggctgctcgtgaccgccattcttcaattttttcagagtcttttcctttgcaattgacactgacaacactactatttgctcgaagccattgaaattcccgtaacatctgtgctcctttgggtccatgctcgtaaggaaggtagaatagatcagcaagtaactgcaaatcctccagggtcactggttccgcagtgtacaaaggcttttcatttggacctggcacaactgctccttgtttgtctgttcatcagtttgcatgggggcaatgtcactaatacaatcttcttgcatggacatctctggggattttgattcagctatgctctctttatcagtgtccattggtttcaattcctctgccattttcgcttcaacaatttcactcagtatttgattgtcattcttgtggtccgtttcttcttgtttttccaccaccatgtccatgggttcttcatcaggctgtttcttttcttcttccttggtcagagtagtaggctcaccactcaaggctgctccctggctcataatgggctcctgataaactgttgttactacggttgtggcatttaaagagggtgctgcaactaaaggagtcccatcaactacacttgctttagctccactgtgtgcaacttgcctactgctgtattgatgaggcacaccaaactcttgcaaccattctgttaatgctagctttagagccatctgtggactatagagtacatcagtttcaatatcttcatcactgccttcattttctaattttatctggatggacacagcactatcttcactgtcagacatcactacatcttttctcactccattcatggttgatttgtaccaggaggcaagggtgtggatagcaacgtagttggcttcaaattcacaatttggattagtgaggactccttttaaccgtgggatgagttctgtggatcttcctttgtacgggcccagaaacagtctcttctgatcataatcattagcatgaatgttatcccagattactggagctctcttaataatcttagaaacctcttcgatggactctactggaatttctttagaaacaactttgggacctgtccaaagcacttcaattccaggtagaagcttttcacccacagtcctgaaatatggagactgagacacatttggataacagaaagtgccacagtagtctgtgggacagaagaggaaagtttctggctctcctaggtactgatagatttcatttgtgatggagacttgggcatgagcaaaagaactgaatacctctttgtctgctgcacacatattatggtctatatcatcaaaaagcaaagcaaatgatctgcacccaaactgagaaaccta

SEQ ID NO: 163540 - DNA, 520 bp, Homo Sapiens
tagaaagcagaaggcagaatgaaacaaacttagacctagtaagaggcacagcatctgcagatgtttccactgacactcggaaagccggtggccaggaacagaatggtacacagcaaagtcatagttgatggcatatgcgtgaacttcgaagctgagcttccatctctgatccatcgtcggggcatcgacaatgaacccgtggactttagaggttggagattacatcctcactccagaaatgtgcgtggagcgcaagagtatcagtgatttaatcggctctttaaataacggccgcctctacagccagtgcatctccatgtcccgctactacaagcgtcccgtgcttctgattgagtttgaccctagcaagcctttctctctcacttcccgaggtgccttgtttcaggagatctccagcaatgacattagttccaaactcactcttcttacacttcacttccccagactacggattctctggtgcccctctcctcatgcaacggcggagttgtttgaggag

SEQ ID NO: 163541 - DNA, 701 bp, Homo Sapiens
ctactcaaaagtgccagagtgtattcaatgattctcaggagcacttggaaagattttactgtaacccagaaaatgatagaatgagaatgaagtatggaggacaagaattttgggcagatttgaatgccatgaacgtgtatgaaacaactgaatttgaccaactacgaaggctgtccacaccaccctctagcaatgtcaactctatttaccacacagtctggaaattcttctgtagggaccactttggatggagagagtatcccgagtctgtcattcgattgattgaagaagccaactctcggggtctgaaagaggttcgatttatgatgtggaataaccactacatcctccacaattcattcttcaggagagagataaaaaggagacccctcttccgctcctgttttatactgcttccatatttacagacacttggtggggttcccacacaagctcctccacctcttgaagcaacttcatcatcacaaattatctgcccagatggggtcacttcagcaaacttttaccctgaaacttgggtttatatgcatccatctcaggacttcatccaagtccctgtttctgcagaggataaaagttatcggatcatttacaatctttttcataagactgtgcctgagtttaaatacagaattttgcagatattgagagtccaaaaccagtttctttgggagaaatat

SEQ ID NO: 163542 - DNA, 563 bp, Homo Sapiens
gggaagttctgagaatggagtcattcttagtgttcaggtgctaaaggttgttctcctgggggaacagagtgactgaaactggcttgtttgctacaagccctaccctccactctttcattccttgaaagcagtttgcctggtcagtcagcttttgggggtccatcaaaggaggttgctgacctgaccgtgagtgcttcagtatctggtttgtgtcagaaccagacgccaactttgtactgcatttgggatcatatctttccccttctctgtcccccattctctgaatgctgctttctctggcttgtttcctacagtgggggcctgtggggttgagtcttgaggaatcccctcaaatgagaaggccttgggagaaggcctcatctctggctgtttcatgagcaactcattcctaagagttcattgtttgcatgggtttctcacaagcgtccttcctcataggaaggctcatcaactgaatttagtgacatgtacacagtagatgctcaagcagtgtctgcaaggacacaagctgagctttctccttatggggcaaacctatgtct

SEQ ID NO: 163543 - DNA, 333 bp, Homo Sapiens
ttcaatttctacacatgtaatacaaaaggtgctgtgtctcagaggtgtagaaaggtattccagggatagttgtatattaagtcaagaggaatagaaacaaaaagaaggcaatttgacaagtggaatcctactggtagtcttcaggaaaacatgttgtggacttacggaaaacactgatatacttcattgatattgatctgatttcctataactattgactcagtaaaactcctgctctattacttatatcaatgaaaaatttaaaatgggatttgattttagtctttgtccagtttctgatattttgagtaatgaaatagtgtagaaattgaa

SEQ ID NO: 163544 - DNA, 271 bp, Homo Sapiens
ccagcggttggctggagcgagaaagaatggaaagagaaaggttggagagagcagaggttagattagggaaaggctggagagggagcgactggaacaagaacagctggagagagagagacaagaacgggaacggcaggaacgcctggagcggcaggaacgcctggagcggcaggaacgcctggagcggcaggaacgcctggatcgggagaggcaagaaagacaagaacgaggttacgccgtattcgggggggtaccgacgctcgagattcgg

SEQ ID NO: 163545 - DNA, 771 bp, Homo Sapiens
ggaatcatgtcggtgctcagcagatcctcactgaaacagaccatgccgcagcgcgacactgtggccaaggtcgcgtatttcaagtcctgtacctcaaacattattctcacattgggtggaagactgaggcgctctccattgggcaaagttaggagcttattgtcatccatcactgcgttcaagttctcaacccactctggatccacatcgccatcgaagacgatccactggcgcttctgcagctcgcctctcacgctgtcgatgatctttctcagcacgtgtgtgaagagcccatctgtccattccctggtgttggggtccaggattccgtagaggtggtctttgctgatggccttggggtcgatgatatgggccacaccttccacaccctcgagtctctccaatgccttcagcaggacacgccaggccatgctcttcccacttcccgagggccccaccatcatcaggccatgattgatctgggtgatctgatagagctggagaaccttttcaacccacattccaccaacttcttctccatctccatatgtcaaatacatctcctgacacactttcttcagctcctctcgaagggcagtcatctcacccctgtgatactggactccagggaacacgtccgacaggaggctgaagagcagcgggacgtcctctgccaccagctttggcacagatcgtttcacaagacgctactgtatcagaatgctcgttgttgcagggagattttcagcaatttatccttccatcaagtgt

SEQ ID NO: 163546 - DNA, 354 bp, Homo Sapiens
agctccgtaccgccagttccaccaacttctgctccatctccatatgtcaaatacatctcctgagcacactttctgcagactccgtctcgacagggcagtcatctcaccccagtgatactggactccaggggaacacgtccgacagggaggctggaagagcagcgggatgtccgctgccaccagctttggcaccatcgtctcacagacgctctgtatcagaatctcttgttcagggagattttcagcaatttctccttcatcaactgcttcccctcgttcctctttctccctctttatcttctggattctctctctcttcacattgcctgcactcaccagcacactcttcaaagc

SEQ ID NO: 163547 - DNA, 557 bp, Homo Sapiens
tcggtacccctcgaattcgacggtttctccccatgtgatagtctgaaatatggcctcgtgggaagggaaagacctgaccgtcccccagcgtgacacccgtaaagggtctgtgctgagaaggattagtaaaagaagaaggaacgcctctttgcagttgaaacaagaggaaggcatctgtctcctgcccgtccctgggcaatggaatgtctcggtataaaacctgattgtatgttccatctactgagataggggaaaaccgccttagggctggaggtgggacatgcgggcagcaatactgctctgtaaggcattgagatgtttatgtgtatgcatatctaaagcacagcacttaattctttaccttgtctatgatgcagagacctttgttcacgtgtttatctgctgaccttctctccactattatcttatgaccctgacacatccccctctcagagaaacacccacgaatgatgaataaatactaagggaactcagaggctggtgggatcctccatatgctgaacgctggttccccgggtccccttatttctttctct

SEQ ID NO: 163548 - DNA, 261 bp, Homo Sapiens
tatgagttggagtaccactagtaatgcacaaacatgtacaatatggtcattcataaccgatttttatagaatactttttacatgtgcaactccatccgttatgtaaggattacatgaatattgcacattcccttctggtgtcacaaacccattatacatatttcttagtgaggctcattgtacatgtattgaagctagaatcgagtcaagagaaataaagccccattctccaactgcaacatgtgctttcccatactgcac

SEQ ID NO: 163549 - DNA, 241 bp, Homo Sapiens
cttgaatttgcaactgaatgggatgtattcaaaacatctacagagaaattagcaaattgtcacttggatcttgttagaaaattacaagaattaataaaggaagttcagaagtatggagaagaacaagtaaagtctcataaaaagactaaagaagaagttgcaggaactctggaagctgtccaaaccattcagagcataactcaggccctccagaaatccaaggaaaattacaatgccaagt

SEQ ID NO: 163550 - DNA, 325 bp, Homo Sapiens
cgtgggacttacgcatatccatatatgaaaacaggactttaccatgttgctatgcagggaaatctagacgatgtttcatattaacaaaaggatggttccaggatctcagctggagtaattcttaaatctgcatcaatcagcaacattttcttcaacagactaacaaattctcttctatcagctttctcagccaaaagatcacttccttccaagatccatcactgtgttcacatgcgctacatcatccattcagttgcaaattcaagaatttgctcatttctctgtagatgttttgaatacatcccattcagttgcaaattcaagc

SEQ ID NO: 163551 - DNA, 356 bp, Homo Sapiens
  misc_feature (160)..(160): n is a, c, g, or t
tccaacaagaagctgtagatctgcttacaggaatacctggaactttgcatcggtgtaagatatattaattgaatctcttgaatgcatcaacgtagaacttcatcagctcccccaggaggtcaaagtaactctggagcacatcccttgacttacactcgcntgtccacaatgcagtaaaggatgtgctccaagaggcctcgcttcagcaggaacatctggtctgcataggaggtggtccctcggaggaaactctccacagcccgagcttgccaaaacctgaaagacgactctgctggctccttcttcatgacctgcagcagacgagttatagcccctcttccgccgtccgggtcctc

SEQ ID NO: 163552 - DNA, 536 bp, Homo Sapiens
acagacgagaagtatagtgccgtggctagaactgcatagacacatgtccatgtatgtaggaagagcttaaatggtgaggactctactcggcaaagccagagcactgaggcctctgcaagcaacagatttagcaatgacagtcagctacatgaccgatggactttctgaagctaaagaccacacctgaatcagggctgtggtaatcatcttaccatagctgtaaattgtatcaaaacaaaaaattagtagatggatttaggaatatgtaagaaactcaacacataatataaatgcaatgaatgtttatcttctttaaatttaaagttagtatctacagatggaattgtatctacaaccaaatgcctcttatccctgaattcagagtgataattttataagtgtgaaacttaattatgtagggctccccccgtctgaatagaattaattccttaaagtctagttagggtcctgctgtctgtcatgttgccttgtaacggatgtttccacctcctttcacactctaccccgtattcact

SEQ ID NO: 163553 - DNA, 3566 bp, Homo Sapiens
  misc_feature (3092)..(3133): n is a, c, g, or t
ccagttacaacagctcaagaagggccacgtccactacttgatcaagtggcgggacttaccttacgatcaggcttcttgggagagtgaggatgtggagatccaggattacgacctgttcaagcagagctattggaatcacagggagttaatgaggggtgaggaaggccgaccaggcaagaagctcaagaaggtgaagcttcggaagttggagaggcctccagaaacgccaacagttgatccaacagtgaagtatgagcgacagccagagtacctggatgctacaggtggaaccctgcacccctatcaaatggagggcctgaattggttgcgcttctcctgggctcagggcactgacaccatcttggctgatgagatgggccttgagaaaactgtacagacagcagtcttcctgtattccctttacaaggagggtcattccaaaggccccttcctagtgagcgcccctctttctaccatcatcaactgggagcgggagtttgaaatgtgggctccagacatgtatgtcgtaacctatgtgggtgacaaggacagccgtgccatcatccgagagaatgagttctcctttgaagacaatgccattcgtggtggcaagaaggcctcccgcatgaagaaagaggcatctgtgaaattccatgtgctgctgacatcctatgaattgatcaccattgacatggctattttgggctctattgattgggcctgcctcatcgtggatgaagcccatcggctgaagaacaatcagtctaagttcttccgggtattgaatggttactcactccagcacaagctgttgctgactgggacaccattacaaaacaatctggaagagttgtttcatctgctcaactttctcacccccgagaggttccacaatttggaaggtttttttggaggagtttgctgacattgccaaggaagacccagataaaaaaactgcatgacatgctggggccgcacatgttgcggcggctcaaagccgatgtgttcaagaacatgccctccaagacagaactaattgtgcgtgcggagctgagccctatgcagaacgaaatactacaagtacatcctcactcgaaattttgaagcactcaatgcccgaggtggtggcaaccaggtgtctctgctgaatgtggtgatggatcttaagaagtgctgcaaccatccatacctcttccctgtggctgcaatgggaagctcctaagatgcctaatggcatgtatgatggcagtgccctaatcagagcatctgggaaattattgctgctgcagaaaatgctcaagaaccttaaggagggtgggcatcgtgtactcatcttttcccagatgaccaagatgctagacctgctagaggatttcttggaacatgaaggttataaatacgaacgcatcgatggtggaatcactgggaacatgcggcaagaggccattgaccgcttcaatgcaccgggtgctcagcagttctgcttcttgctttccactcgagctgggggccttggaatcaatctggccactgctgacacagttattatctatgactctgactggaacccccataatgacattcaggcctttagcagagctcaccggattgggcaaaataaaaaggtaatgatctaccggtttgtgacccgtgcgtcagtggaggagcgcatcacgcaggtggcaaagaagaaaatgatgctgacgcatctagtggtgcggcctgggctgggctccaagactggatctatgtccaaacaggagcttgatgatatcctcaaatttggcactgaggaactattcaaggatgaagccactgatggaggaggagacaacaaagagggagaagatagcagtgttatccactacgatgataaggccattgaacggctgctagaccgtaaccaggatgagactgaagacacagaattgcagggcatgaatgaatatttgagctcattcaaagtggcccagtatgtggtacgggaagaagaaatgggggaggaagaggaggtagaacgggaaatcattaaacaggaagaaagtgtggatcctgactactgggagaaattgctgcggcaccattatgagcagcagcaagaagatctagcccgaaatctgggcaaaggaaaaagaatccgtaaacaggtcaactacaatgatggctcccaggaggaccgagattggcaggacgaccagtccgacaaccagtccgattactcagtggcttcagaggaaggtgatgaagactttgatgaacgttcagaagctccccgtaggcccagtcgtaagggcctgcggaatgataaagataagccattgcctcctctgttggcccgtgttggtgggaatattgaagtacttggttttaatgctcgtcagcgaaaagcctttcttaatgcaattatgcgatatggtatgccacctcaggatgcttttactacccagtggcttgtaagagacctgcgaggcaaatcagagaaagagttcaaggcatatgtctctcttttcatgcggcatttatgtgagccgggggcagatggggctgagacctttgctgatggtgtcccccgagaaggcctgtctcgccagcatgtccttactagaattggtgttatgtctttgattcgcaagaaggttcaggagtttgaacatgttaatgggcgctggagcatgcctgaactggctgaggtggaggaaaacaagaagatgtcccagccagggtcaccctccccaaaaactcctacaccctccactccaggggacacgcagcccaacactcctgcacctgtcccacctgctgaagatgggataaaaatagaggaaaatagcctcaaagaagaagagagcatagaaggagaaaaggaggttaaatctacagcccctgagactgccattgagtgtacacaggcccctgcccctgcctcagaggatgaaaaggtcgttgttgaaccccctgagggagaggagaaagtggaaaaggcagaggtgaaggagagaacagaggaacctatggagacagagcccaaaggtgctgctgatgtagagaaggtggaggaaaagtcagcaatagatctgacccctattgtggtnnnnnnnnnnnnnnnnnnnnnnnnnnnnnnnnnnnnnnnnnnggtgatgcttcagaatggagagacccccaaggacctgaatgatgagaaacagaagaaaaatattaaacaacgtttcatgtttaacattgcagatggtggttttactgagttgcactccctttggcagaatgaagagcgggcagccacagttaccaagaagacttatgagatctggcatcgacggcatgactactggctgctagccggcattataaaacatggctatgccccggtggcaagaacatccagaatgagccacgcttatgcatccctcaatgagccttcaaggggtgaaatgaacccgtggcaatttcttaagagattcaagaataaggttctagctcgaaggttaagcccttagaacaggcctggggactgggacactgcgccggtggtaactgaccttccgagaacttttaccttagggctctac

SEQ ID NO: 163554 - DNA, 537 bp, Homo Sapiens
  misc_feature (64)..(64): n is a, c, g, or t
  misc_feature (76)..(76): n is a, c, g, or t
  misc_feature (112)..(112): n is a, c, g, or t
  misc_feature (360)..(422): n is a, c, g, or t
taccccacagcaggtagcccagcagcagtaaagatccagacttaataccacttccaccgttaancagtgaccttcntcactttctcttgtcccagtttttcccttgggggcntgagagaccctcaccttccttctgcccatcttccatgttgtaaaggaacagccccagtgcactgggggaggggagggagtgaggggcagtggtgcccttcctgcagaagagacatgcagcagtagcgctggcgccatctgcaggagctggcgggctggccttctggaccctggcttctccccactgtaacgcctgttacacacaaactgttgtgggttcctgccaggcttgaagaaaatgatctgaannnnnnnnnnnnnnnnnnnnnnnnnnnnnnnnnnnnnnnnnnnnnnnnnnnnnnnnnnnnnnngggtattcagagtgggctgggcccctgggcgagacacagctacctctgttggcatctttttaataccaggaacccagcggctctagccactgagcggctaaatgaaataaagtgg

SEQ ID NO: 163555 - DNA, 626 bp, Homo Sapiens
  misc_feature (260)..(260): n is a, c, g, or t
  misc_feature (450)..(509): n is a, c, g, or t
tcccgaattcccccagttgctgtgaggttacagatgtcagagcgtaacattctcagccgcctggcaaaccgggcacccgaacctaccccacagcaggtagcccagcagcagtgaagatgcagactgataccacctccaccgctgagcagtgaccttcctcactttctcttgtcccagcttctcccctggggcctgagagaccctcaccttccttctgcccatcttccatgttgtaaaggaacagccccagtgcactgggnggaggggagggagtgaggggcagtggtgcccttcctgcagaagagacatgcagcagtagcgctggcgccatctgcaggagctggcgggctggccttctgggaccctgggttctccccactgtaaacgcctgttaacacacaaactacttgtggggttcctgccaggctttgaagaaaatgattcttgaannnnnnnnnnnnnnnnnnnnnnnnnnnnnnnnnnnnnnnnnnnnnnnnnnnnnnnnnnnnggggggtattcagagtggctgggcccctgggcgagacacagctacctctgttggcatctttttaataccaggaacccagcggctctagccactgagcggctaaatgaaataaagtgg

SEQ ID NO: 163556 - DNA, 1218 bp, Homo Sapiens
  misc_feature (164)..(206): n is a, c, g, or t
  misc_feature (1017)..(1017): n is a, c, g, or t
  misc_feature (1083)..(1108): n is a, c, g, or t
  misc_feature (1138)..(1138): n is a, c, g, or t
  misc_feature (1167)..(1167): n is a, c, g, or t
  misc_feature (1177)..(1177): n is a, c, g, or t
  misc_feature (1198)..(1198): n is a, c, g, or t
atgaaaaggtcgttgttgaaccccctgagggagaggagaaagtggaaaatggcagaggtgaaggagagaacagaggaacctatggagacagagcccaaaggtgctgctgatgtagagaaggtggaggaaaagtcattgcaatagatctgacccctattgtggtnnnnnnnnnnnnnnnnnnnnnnnnnnnnnnnnnnnnnnnnnnnggtgagtgcttcaggaatggagagagcccccaaggagcctgaatgatgagaaacagaagaaaaatattaaacaacgtgtcatgtttaacattgcagatggtggttatactgagttgcactccctttggcagaatgaagagcgggcagccacagttaccaagaagacttatgagatctggcatcgacggcatgactactggctgctagccggcattataaaccatggctatgcccggtggcaagacatccagaatgacccacgctatgccatcctcaatgagcctttcaagggtgaaatgaaccgtggcaatttcttagagatcaagaataaatttctagctcgaaggtttaagctcttagaacaagctctggtgattgaggaacagctgcgccgggctgcttacttgaacatgtcagaagacccttctcacccttccatggccctcaacacccgctttgctgaggtggagtgtttggcggaaagtcatcagcacctgtccaaggagtcaatggcaggaaacaagccagccaatgcagtcctgcacaaagttctgaaacagctggaagaactgctgagtgacatgaaagctgatgtgactcgactcccagctaccattgcccgaattcccccagttgctgtgaggttacagatgtcagagcgtaacattctcagccgcctggcaaaccgggcacccgaacctaccccacagcaggtagcccagcagcagtgaagatgcagactgataccacctccaccgctgagccagtgaccttcctcactttctcttgtcccagcttctcccctgggggncctgagagaccctcaccttccttctgcccatcttccatgttgtaaaggaacagccccagtgcattnnnnnnnnnnnnnnnnnnnnnnnnnncagttggtgcctttccttgcagaagagacntgcagcagtaggcgttgggcgcatttttncagggagttnggcgggttggcttttttggancttgggttttttcccatttt

SEQ ID NO: 163557 - DNA, 574 bp, Homo Sapiens
ccaatcaacatccaaccccaatcaacatcccggcgcggccgccgccgatcacagcagcaggagccaccgccgccgcggttgatgtggttgggccggggctgaggaggccgccaagatgccgcagtccaagtcccggaagatcgcgatcctgggctaccggtctgtgggttcctcaagccaggacctacgcacctgttgtgagtggtgttatagttctgcagggcgcacaggtgcatccccatgggcacatttaatttagggaaatcctcattgacgattcaatttgttgaaggccaatttgtggactcctacgatccaaccatagaaaacacttttacaaagttgatcacagtaaatggacaagaatatcatcttcaacttgtagacacagccgggcaagatgaatattctatctttcctcagacatactccatagatattaatggctatattcttgtgtattctgttacatcaatcaaaagttttgaagtgattaaagttatccatggcaaattgttggatatggtggggaaagtacaaatacctattatgtttggttgggatgttgattggg

SEQ ID NO: 163558 - DNA, 1182 bp, Homo Sapiens
  misc_feature (1051)..(1052): n is a, c, g, or t
gcgaccgccgccgatcacagcagcaggagccaccgccgccgcgtgtgatgtggttgggccggggctgaggaggccgccaagatgccgcagtccaagtcccggaagatcgcgatcctgggctaccggtctgtggggaaatcctcattgacgattcaatttgttgaaggccaatttgtggactcctacgatccaaccatagaaaacacttttacaaagttgatcacagtaaatggacaagaatatcatcttcaacttgtagacacagccgggcaagatgaatattctatctttcctcagacatactccatagatattaatggctatattcttgtgtattctgttacatcaatcaaaagttttgaagtgattaaagttatccatggcaaattgttggatatggtggggaaagtacaaatacctattatgttggttgggaataagaaagacctgcatatggaaagggtgatcagttatgaagaagggaaagctttggcagaatcttggaatgcagcttttttggaatcttctgctaaagaaaatcagactgctgtggatgtttttcgaaggataattttggaggcagaaaaaatggacggggcagcttcacaaggcaagtcttcatgctcggtggatgtgattctgctgcaaagcctgaggacactggggaatatattctacctgaagaagcaaactgcccgttctccttgaagataaactatgcttcttttttcttctgttaacctgaaagatatcatttgggtcagagcgtcccctcccttcagattatgttaactctgagtctgtccaaatgagttcacttccattttcaaattttaagcaatcatattttcaaattatatattggatttcttaatattatgaccaagaattttatcggcattaatttttcaggggagtttgttggttaaaataatgtaatcatcaaaatgaagcatattgttacactactattaactaggcttcagtatatcagtggttatttcattgggttaaaaggatacttggaaataaaataactgccaaaccgccnntccccgcgcgaaaaagacaacttaaacatgtcaggccggcctcggccctccaaaaaactttctaaacccattcgttttggggccggcgggccccgtaaaggaaatgggaccatgggccataacccgtgtt

SEQ ID NO: 163559 - DNA, 962 bp, Homo Sapiens
acagtgacgtaaagcggctgtacggtccggaatcccgggatatcgtcgaccacgcgtccgggtctgtggggaaatcctcattgacgattcaatttgttgaaggccaatttgtggactcctacgatccaaccatagaaaacacttttacaaagttgatcacagtaaatggacaagaatatcatcttcaacttgtagacacagccgggcaagatgaatattctatctttcctcagacatactccatagatattaatggctatattcttgtgtattctgttacatcaatcaaaagttttgaagtgattaaagttatccatggcaaattgttggatatggtggggaaagtacaaatacctattatgttggttgggaataagaaagacctgcatatggaaagggtgatcagcttatgacagaagggaaagctttggcagaatcttggaatgcagcttttttggaatcttctgctaaagaaaatcagactgctgtggatgttctctcgaaggataatttcggaggcagaaaaaatggacggggcagcttcacaaggcaagtcttcatgctcggtgatgtgattctgctgcaacagcctgagggacactgggaatatattctacctgaagaagcaaactgcccgttctccttgaagataaactatgcttcttttttcttctgttaacctgaaagatatcatttgggtcagagctcccctcccttcagattatgttaactctgagtctgtccaaatgagttcacttccattttcaaattttaaagcaatcatattttcaatttcatatatggtatttcttaatattattgaccaagaatttatcggcattaatttttcaggtgtagtctgtgttttcaccatactgtatcatcaaatgatgcctattgttacactattattaactaggcttcaaaaatatcacggttatttcatcgtgttaatgttactg

SEQ ID NO: 163560 - DNA, 700 bp, Homo Sapiens
  misc_feature (11)..(11): n is a, c, g, or t
ttgtctccctncctgcagtcgctctagaggatcccctcatcttgggcctgtgttatcctgagacactcctcaattgctcaattaattctccaggaaaggcaaacctatagtcaatagttagcttggcaagaatataggttaataattagagttggaggaagctaacagtggagataggacttgagtagctgccactggtagttttatctataacctctcctcgaacctcgcattaacctcagatttcattgaattaaaaagaaggtgggagggcaagtaaatcaatcaaaacttccataaaacaagtaccccaactgaactaccatcaattaaagtgcaaactgcaggggtatatggtggctggggctgaggccatctaaaggccagaggggaaaaaatgcatatgtataaatcagaggatgggtaccagaaactgtccctcctccaatcagatcacagcagagccaaagatgcaggcaaccagtgaaaattctttggaagactctggggtccaacccccacgattaggggaaacgctacctaagaggctgcgtgaggggaaactgggcctttgaagagttacagagccacagttgacactgcacctccacctccgcccagttagcttacaaggcacctcctgcctggtgcctgagatcttgccccaccaatcccacactctcaacctcgtaaacttcac

SEQ ID NO: 163561 - DNA, 1244 bp, Homo Sapiens
tctagatggatcccccgagccctcacatacctctgcagtttgcactttaattgatggtagttcagttggggtacttgttttatggaagtttgattgatttacttgcctcccaccttctttttaattcaatgaaatctgaggttaatgcgaggttcgaggagaggttatagataaaactaccagtggcagctactcaagtcctatctccactgttagcttcctccaactctaattattaacctatattcttgccaagctaactattgactataggtttgcctttcctggagaattaattgagcaattgaggagtgtctcaggatagcacaggccaaggtaggggagtaaaaaggaggtcaggcaaaagggaggagttttctgtcctttcccaggtttcacactcaatttgatatccattaccatgtcttttctacttccttgtaaataggtatgatctttattcccactgtacagtctgttctatcctctgcctcccatcaggccctgtttctttgttcctttgttaatatcttgaatttagtccctccatccttaatccccccatccctccccatcatgcaaccagtggtttaatccatgtaccaataggggctagtaccacagaggcctcctgtggtgccctcgtatcataccacctgttcctgtggagagggaatgaccggcactgaaggtaccttacaactggctcatattatcagaggaccttggtcctttctaaatctctagtctctcttcatatccttcatcaggtgttttaagatgtctctgagaagccatcaaggcaaaagagaactttaagttccttgttccagcccggagttttgggaaagaaagaaaggaaaggtcacagtgacctaggattggaacctccctgcccttttggcttgcagactgccttctatcccagaacagctgagaaatctatgaagctgagattctgaaggacccagcttaggttcttccacttaggcctcaattcccttccttttccaggggcagccttagttcccatggccctgaaacacacacatttcccccttcctttcccagaagccactggccccccatagcacccagggcatcctttttacaagtggaagaactaggatggctttccaaagtctttctagaaatgaagttctttctctgtgcagctttcccaccattggagcaaggagtgaagatgtttcattatcttgggccatgggaaccaacttccccaa

SEQ ID NO: 163562 - DNA, 520 bp, Homo Sapiens
aaggtctggtcactgacgcgtcatagacagatgactttgatacgcagtcaggttcatccattaatagtcaggtcttatgctgcagatgtacctccactgagacttccgcatctgggacctcccaaggagaggcttcaactccagaggagtctcgagatgggaagaaagataaagaaggggaccgggcctctgaggaaggcaaacagaaaggcaagggcagcaaacctttaatgcctacctccactatccttcgtcttctggcagagttggtgaggtcctatgttggtattgctaccctgattgccaactacagctacactgtgggccagtctgaactgatcaaagaggactgcagtgtcgctagctattgttcaggaccacctgctcccacatacccagaatgcagaagacaaggacacccctgccttggcccgcctgttcctcgcaagcctggctgctgcagggagtggcacagatgcccaggtgggcctagtgaatgacgtacaagcagcccttggac

SEQ ID NO: 163563 - DNA, 823 bp, Homo Sapiens
aggcgaatgagacttctcttatatctgagtaacattaagatggaaatcaaattaaaatgcagtccactctgctttttgaagaggctttggttcagctcccaaatctcgattgcttgacgcagtctcctatgagaatactcagaaggtgtcttcttaaacaacaaactatttttagtggtggagccgctcttagtagctgtgtctgcgtgggactgataaccaatcactatctttggaggaagtcctaacctttccttgtataccctccctatatgtgtaacagcttctctgttttcacattcagtagtccatattgctatcttatcacctttagctctaacattaacaacagcgccacatacatcatcactgtagtcatcaaaagattctccaataaggcacagaagtgtctctagccaaaagcgatcgaggtcacttcgtctctgctgtttgttcaatgtaattagccatcgtcctccccgtttgtttttctcatcttcccacataggctcaataccatccttaaaaagtgagtagtcacagccaggcattaaattactagacaactggatatggttgtacagagcccaaaagtcttcaacagtatcaaacttggagatcagccgcaggtttgcttgccaagttttgcttttatcatttttaaaaaaccagagtgcccatctgttctgtaggggatgtttaatatagtgttctgggttagcaacctcctgattagattccgttttctcctcttctgtagtcgggggattaggagtaggggtggtttccggttcgacagtcgccatcttagatcgatctcccc

SEQ ID NO: 163564 - DNA, 780 bp, Homo Sapiens
agggggtcatcacaaaggcggtcttatgcaagggtgagaaagcagagttatcaggcaggtgggactattgctttatgaacgtgatgattggaagcaaaaacgtggggctttttcctattgaatacaaagtaaaataatgaatgctggtgtcagtggttgggaataacaacatttgcaggctcatgagagctgcctgacaaaaagcgtgtaaacaacagtgattgctcctgtggccctgtgattcagcaggtttatggagcagttaagaatcgcagatgtcaaatggccaacacagaatctaacgacatgcttaatacaaattattattagtagaaatgctgaattgcttcatttctgcaatttctgctgcttcttaagatgcttttaatgaataaaatctgccttaaaatttgatacctggtaacttctctctgtgagttttgaattggctgatgtaacccaaatgccagctcttgccatctaactaccattaaaaggaacttctaaagctccgaagtggtcaacagtttcacttccaacttttttaaaagatacacaattttctaaaaaaatttttctttatgggcgattgaatagttgggctttggctaattcctcattagcaatagaattatgtatattttgcaaaccctaatacagaacacttaatgtatcagacaaccatgattatgatgtatatacctggtataaacaatcttttttgcatattgaattccgcattttcttcttaccttcgatacgtatgatgattcaccgtac

SEQ ID NO: 163565 - DNA, 859 bp, Homo Sapiens
  misc_feature (169)..(235): n is a, c, g, or t
acgagaagagtaggcgaactaatcatctaagacagcagaaatcagaaaatggttgctgggacgggaccaagaggggaataaattcactgcaaaaggcacaagggaccctgaggagtgacggaagggttcttaacctggattgggtaagggttacatgggtgtagagagnnnnnnnnnnnnnnnnnnnnnnnnnnnnnnnnnnnnnnnnnnnnnnnnnnnnnnnnnnnnnnnnnnnacaaaccattttcccttaaattagtatttaaaaatttgatttatcacagggctctctggctgttcataggtgtggtgacttatttatctccatttacaatagcctttcctttgagtcagttagctcttcaatataaaacttgaattgttttagaattcactaattaattttctagtgagatgcttctaataaaattttttttgtcctaaataatttattcattattcatcatgttctacttgtatattagaagttaaagacagtagtcgccctaaagatagtccaaacactcctttttaaatataaaaacagatgcctaaactgatttgtctaggatcgtattcttattacatctcaaaaatacattacataaatcatgcattgtcatcctttgcaaatactaaaaactgggcaaagacaacagcttaactttttaagcagatgtagattagacaattatgtctgttctaacttgcaaccgaggaagcagtgcaaataactggttgtcaggaagctggaatattttatatggacgtagacattctagtatcaatcaatcaatcagtcccatattatttaatatagcacatatattctagtaccccggccgttcccatatctcag

SEQ ID NO: 163566 - DNA, 708 bp, Homo Sapiens
ggcggacctggacttctacaagagggaatctacttgctgctttcagcaaacttatcatttatgacattgttgacatgcatgcagctgcagacatcttcaaagcactacatgaagtattacaatgactatggtgatattataaaggaaacactgagtaaaaccaggcagattgataaaattcagtgtgccaagactctcattctcagtttgcaacagttatttaatgaacttgttcaagagcaaggtcccaacctagataggacatctgcccatgtcagtggcattaaagaactggcacgtcgctttgcccttacatttggattggaccagattaagacacgagaagcagttgccacacttcacaaggatggcatagagtttgcatttaaataccaaaatcagaaaggacaagagtatccacctcctaatctggcttttcttgaagtactaagtgaattttcttctaaacttcttcgacaggacaaaaagacagttcattcatacctagagaaattccttaccgagcagatgatggaaaggagggaggatgtatggcttccactcatctcctatagaaattcattagtcactgggggtgaagatgatagaatgtctgtgaacagtggaagtagcagcagcaaaacctcatcagtaaggaataagaaaggacgacctccacttcataaaaaacgagtagaagatgagagt

SEQ ID NO: 163567 - DNA, 293 bp, Homo Sapiens
  misc_feature (214)..(225): n is a, c, g, or t
tgatacaaaccaaagcacgttcaaaaaacagtactatgcagagactgtaggagaaaaacgtgatatgttactgaacagatgagacacttggagaaaagataaacaattattcattttggtttaagacatcaggagtactaataaagaaccaactggtaaactgccgataatcccatataatatagtctagcatacaactacactgaatcattcnnnnnnnnnnnnatatatatcctaaagtttaaggggatacatgtgcacttggtgcaggttagttccttttgtatactgtg

SEQ ID NO: 163568 - DNA, 566 bp, Homo Sapiens
acctggcttctactagaggaggtacagaaaagccaccgagggctacagctcgggaaaagtctcaccggatcatctagatcctgagcgggcaatgctagccctgttctccaatcccaatcccagccgaggcttggaaagtggcctatttctactgcctgagcaacaacaaacacttcctcgagcagattctggtaacagcactaacattgttgaaagaagaagacttcccaaatcttggctgcctacttgatagagaattcaggcccctcagttgcctgcttgtactcctgggctggacacactgccagagcctagagtcagccaagaggctgctccagaccctgcacaggacccagggcccaggctgtgatgagctcctcagggatgcctgtgatgggttgtgggctcacctggaggtcctggagtggtgcatacagcagagcagcaaccccataccaaagagagatctgtggtatcatttacacggtggagacagccactcagtgctctacactctccatcaccttacaaaccttccagccctcaggaaggaagatgttctcaag

SEQ ID NO: 163569 - DNA, 706 bp, Homo Sapiens
aggagacagaggtgaccaggacaccgtcaatcacaggaaggtgtcatcatcagagatgaatgcacacatcccaaagaagtttctcagatagcttctgtgtagattttatgtgaagatatttccctttctactgtaggccacaacgtgctccaaatatccacttgcagattctacaaatagagtgtttctaaactgctcaatcaaaggaaaggttcaaatctgtgagatgaacaaacacatcacaaacaagtttctcagaatgcttctgtctagtttttatgtgaagatatttcattttccaccatagactcaagacgctcgaaatgtccacttgcagattctacaaaaagagtattttaaagctggtccaacaaaagaaaggttcaactctgggagatgaatgcgcacatcacaaagaagtttctcagattgcttctgtctagattttatgtgaagatatttcgttttctaccacaggccacaaagcactcgaaatgtccacttgcagattctacaaaaagagtgtctccaaactgctcaatcaaaagaaagttcaaatctgtgagatgaacacatacatcacaaagaagtctctcagaattcttctgtctagttatcatgtgaagatattccttttccacattagactctaagcgcccaatgtcaattgcagttctaaaaaagagagtcaaactgctcatcaaag

SEQ ID NO: 163570 - DNA, 1058 bp, Homo Sapiens
gggggaagcagcctgggccgctgcgcagaggcgcggcggctgtacaactcggccgttgtcaccatgccggtcgtccggaagattttccgtcgccgccggggcgactcggagtcagaggaagatgagcaggactcagaggaggttcgattaaaactggaagagaccagagaggtacagaacttgaggaagaggcccaacggggtgagtgctgtggccttgctggtgggagagaaggtacaagaggagaccactctagtggatgatccctttcagatgaagacaggtggtatggtggatatgaagaaactgaaggaaaggggcaaagataagatcagtgaggaggaggacctgcacctggggacatcgttttctgcagaaaccaaccgaagggatgaggatgcagacatgatgaagtacattgagacagagctaaagaagaggaaagggatcgtggaacatgaggaacagaaagttaagccaaagaatgcagaggactgtctttatgaacttccagaaaacatccgtgtttcctcagcaaagaagaccgaggagatgctttccaaccagatgctgagtggcattcctgaggtggacctgggcatcgatgctaaaataaaaaatatcatttccacggaggatgccaaggcccgtctgctggcagagcagcagaacaagaagaaagacagcgagacctccttcgtgcctaccaacatggctgtgaattatgtgcagcacaacagattttatcatgaggagctcaacgcgcccatacggagaaacaaagaagagcccaaggcccggcccttgagagtaggtgacacggagaagccagagcctgagcggtcccctcctaaccgcaagcgtcctgctaacgagaaggcaactgatgactatcattatgagaagttcaagaaaatgaataggcggtatctgagttgtgcaagagtgtggatgtaaatatcgccttcctctccctatatccctcaccacgttttctggcttcatagcctggcctggtgatccctgcctccatctcagctctttcgcggtaagctttc

SEQ ID NO: 163571 - DNA, 920 bp, Homo Sapiens
  misc_feature (587)..(596): n is a, c, g, or t
gggtagacggacagaggagtcgtagcggtcgaggcttttgcggctccggcgtgccggaaagtgcgtatgttatgcataaaagtggataatttacatgataaatgaaaatggccaattctttaagaggagaagtactaaaactttataaaaatctgctgtatcttggacgagactatccaaaaggagcagactattttaaaaagcgtttgaagaacatcttccttaaaaacaaagatgtgaagaatccagagaagatcaaagaacttattgcacagggcgaatttgtaatgaaagagctagaagctttgtacttccttaggaaatacagagcctatgaaacaacgctattattcagataacaacaaaactaattgatcattactaactttaatttagctatccgtcgccacctgttcatgcatactcagacgtgggacaaatagctccaccctcgccctgggccaaaaactacccggatccttaaaatataacactttcccccgccactactgcgacctaccccctcattctctccgaaccgcctccttcacataaaaacgaccgcccccaatctacgtaggcctcannnnnnnnnnaccgcctctaacacaattgcttgcgcccacgcccgaacattggccgccttccaccatgttaccaaccattctcttccaacacgcgccacgacaccccccgactactattcacgcccgccaacatatttatgacgtcgtccttacatacctcccacgtatccgttaaccgctttgctcactatctcatctaactctccatgaaagagccccgataccctcacgcacacctctctcgctaacctcgctgtattccattgtaatcgaagacctcgtgatccacacacgtcaagcacattctttgcgtctatgttacttaactatttc

SEQ ID NO: 163572 - DNA, 1381 bp, Homo Sapiens
ggggatatttccgggtacgcgggagccccggcgacccgggcttctgtgaaacatggcggtaggctgggaccataacacaagcatgactatatgaaggaagaggaaggttttcctgaagatgaggcgactgaatcggaaaaaaactttaagtttggtaaaagagttggatgcctttccgaaggttcctgagagctatgtagagacttcagccagtggaggtacagtttctctaatagcatttacaactatggctttattaaccataatggaattctcagtatatcaagatacatggatgaagtatgaatacgaagtagacaaggatttttctagcaaattaagaattaatatagatattactgttgccatgaagtgtcaatatgttggagcggatgtattggatttagcagaaacaatggttgcatctgcagatggtttagtttatgaaccaacagtatttgatctttcaccacagcagaaagagtggcagaggatgctgcagctgattcagagtaggctacaagaagagcattcacttcaagatgtgatatttaaaagtgcttttaaaagtacatcaacagctcttccaccaagagaagatgattcatcacagtctccaaatgcatgcagaattcatggccatctatatgtccataaagtagcagggaattttcacataacagtgggcaaggcaattccacatcctcgtggtcatgcacatttggcagcacttggtcaaccatgaatcttacaatttttctcatagaatagatcatttgtcttttggagagcttgttccagcaattactaatcctttagatggaactgaaaaaattgctatagatcacaaccagatgttccaatattttattacagatgcgccaacaaaactacatacatataaaatatcagcagacacccatcagttttctgtgacagaaagggaacgtatcattaaccatgctgcaggcagccatggagtctctgggatatttatgaaatatgatctcagttctcttatggtgacagttactgaggagcacatgccattctggcagttttttgtaagactctgtggtattgttggaggaatcttttcaacaacaggcatgttacatggaattggaaaatttatagttgaaataatttgctgtcgtttcagacttggatcctataaacctgtcaattctgttccttttgaggatggccacacagacaaccacttacctcttttagaaaataatacacattaacacctcccgattgaaggagaaaaactttttgcctgagacataaaacctttttttaataataaaatattgtgcaatatattcaaagaaaagaaaacacaaataagcagaaaacatacttattttaaaaa

SEQ ID NO: 163573 - DNA, 593 bp, Homo Sapiens
  misc_feature (561)..(561): n is a, c, g, or t
  misc_feature (572)..(572): n is a, c, g, or t
gcccgaaggccggaacaggcgtttagagaaaatggcagacgatattgatattgaagcaatgcttggggctccttacaagaagacttgcctaacgatatctcacctctactcccatgaattcacctttgattccagtgtgaactgtcaatcataaggatgagaacaagttgagcagtgccaacggccatgaagaacgtagcaaaaagaggaaaaaaagcaagagcagaagtcgtagtcatgaacgaaagagaagcaaaagtaaggaacggaagcgaagtagagacagagaaaggaaaaagagcaaaagccgtgaaagaaagcgaagtagaagcaaagagaggcgacggagccgctcaagaagtcgagatcgaagatttagaggccgctacagaagtccttactccggaccaaaatttaacagtgccatccgaggaaagattgggttgcctcatagcatcaaattaagcagacgacgttcccgaagcaaaagtccattcagaaaagacaagagccctgtgagagaacctacttgataatttaactccttagaaatagattgtngaagggggatntctgagcgaatgggcatcaaa

SEQ ID NO: 163574 - DNA, 839 bp, Homo Sapiens
aatcaggagtgtattaatatcagatgcagtagacttcaaagcaaagaaaattactagggataaagaggggcattatttattgatgaaaggatcaatctaaagaagacataatgatccttacttttgtatgcaccaaacaacaaagcttaagctacataaataaaaactgatagaattaagaagaaatttaaaaatccataattgtagatgggatttcagtatccacacccagtattgacagactactgtaaatataatcagcgaagatatagaagaactgaagaatgtcatcaactaagaggatccaattgacatttatagaacactttacccaacaacagaatacacgttactttcaagtgtccataaactattcaccaagatagaaccatatcctgggtcataaaactcaattaaagaaaaattcaactcagagcaatctcttcccgaacacgagcaccacaggcgcccgaaggccggaacaggcgtttagagaaaatggcagacgatattgatattgaagcaatgcttgaggctccttacaagaagacttgcctaacgatatctcacctctactcccatgaattcacctttgattccagtgtgaactgtcaatcataaggatgagaacaagttgagcagtgccaacggccatgaagaacgtagcaaaaaaatactttgcattaaaaatttagatcttcttacatggaagaggtcaaatccagttatagcaaaacacctttactgcagaggccatataaccaaaaagtccaaaggcccagcccagtggaccatttacttcagtgatgttcagtacaaaatttcactgccattaaaga

SEQ ID NO: 163575 - DNA, 734 bp, Homo Sapiens
  misc_feature (248)..(271): n is a, c, g, or t
  misc_feature (659)..(659): n is a, c, g, or t
gtgtgctggtgaatgtgagtacagggaagcagcggccgccatttcagggagcttgtcgacgctgtcgcaggggtggatcctgagctgccgaagccgccgtcctgctctcccgcgtgggcttctctaattccattgttttttttagattctctcgggcctagccgtccttggaacccgatattcgggctgggcggttccgcggcctgggcctaggggcttaacagtagcaacagaagcggcggcggcgnnnnnnnnnnnnnnnnnnnnnnnnatctcttcccgaacacgagcaccacaggcgcccgaaggccggaacaggcgtttagagaaaatggcagacgatattgatattgaagcaatgcttgaggctccttacaagaaggatgagaacaagttgagcagtgccaacggccatgaagaacgtagcaaaaagaggaaaaaaagcaagagcagaagtcgtagtcatgaacgaaagagaagcaaaagtaaggaacggaagcgaagtagagacagagaaaggaaaaagagcaaaagccgtgaaagaaagcgaagtagaagcaaagagaggcgacggagccgctcaagaagtcgagatcgaagatttagaggccgctacagaagtccttactccggaccaaaatttaacagtgccatccgangaaagattgggttgcctcatacatcaaattaagacgacgtttcccgaagcaaaagtccattcagaaaagacaaga

SEQ ID NO: 163576 - DNA, 676 bp, Homo Sapiens
tagaggtgtaccggctccactgttcagaagacatggcccttatgatgaggatgagaagctttaagagaaactgtccgtaaatggtgagtgattgattcggaaagaatggattgggagctgttgccagatgatgaacgtcagtgtgtaaaatgcaaaactacatgcttcatgtctgccatctcctgttcttgtaaacctggccttcttgtttgcctgcatcatgtaaaagaattgtgttcctgtcctccttacaaatataaattgcggtataggaacacgctggatgatctctaccctatgatgaatgcattgaagcttcgagcagaatcttacaacgaatgggccttgaatgtgaatgaagctttggaggcaaagatcaacaagaagaaaagccttgtcagcttcaaggctttaattgaagaatctgaaatgaagaaattcccagacaatgatcttttgcgacaccttcgcctagtcacacaggatgcagagaagtgtgcctctgttgcgcagcagttgcttaatggcaaaaggcaaactagatatcgatctggtggagggaaatcccaaaatcagttgacagtgaatgagctccggcagtttgtaacacagctgtatgctcttccatgtgtcctcagtcagacaccagtataaaggatctcttgaattgacgtac

SEQ ID NO: 163577 - DNA, 446 bp, Homo Sapiens
  misc_feature (436)..(436): n is a, c, g, or t
acctgtgcttctacaagaggtcagatctctctactcctaattcgaaaacttccaaatcctgatttcagagtcaacagcaaggtcagaggctagagtcctgatgggcatggagctcaggaggctggcgagttgctcagcaacgtccgtggggctgcgcacatggaagtagaggccaggaaggcacaggaaaattgccccaaaagaagtttccaagagggtttacgcttggacagggcatagaacctggccgtgagattgcactttgggtatgatggggtcagtcaccgagcaggcctggggagcagagaacctccccacttgccctgggcatgccaaggctccatggtctaggctcagtggtgccaccacagcctgtcacatgtcccagctcctcactgctgggacatctccaggttcttgatgggatacaggtacnacatcactac

SEQ ID NO: 163578 - DNA, 1277 bp, Homo Sapiens
agtgccaatgccaaatacgtgagtaggaagttcgtttgcttcaaacacactgcacttagaaaccagacttgaaataatcgaagccccacagaaaacgcttcatgaaacgaagtgttactttcctagagaataagaaagtcacaagattgaggagtctgttctaaagttctttgctccttgatgtcgaagttaacacaaacacaatcttagcttaacgaaactaagtaatttttgtttatgattatagaactgcaggattctcaagtagtattagagacattccacactgcacactccagtcatatctcttaacaaaatgacataaattgacaatgttcactaacagtatttgctgttacactgaaaaggcacatcaatgttgtcatgcttagaaaaatacacaacactgcacactggatgatatagttagcacatacatttttagatgttccatttttcttttctgcctgatcactattatttttacttcttaatatatgattcaagacataatttcattcttcattttcatttaaaatttgtcttcacattgatgtgaacaactttcaggagtctaaaaaatagtagtctcagacaacctaaaataaatatattcctaaaaaacacttggatgaccttcaaacagatcaaagatatagtcagatattaaagtcagagcagctgttttcagcttcttgtttccttttctaaaacttgaagtagatggcgattaaccttatcatgtttaaacaaccttgacagtataaggtacatgtaccctcaattttcttcatccagtaagacaagtatgcatcttaaagggaaagcttttagttcataacaatatgtttggttgcttttctctgctttcgaaacatttactgtttttcctttattggctttagtgtttgctgccaaccagataacatgttaacatataatttacaactctctctaggtaggtgattacatagaaaactaatgccagctaagatttatggattcaaaagataactgacacaagttcttgtcctctacacttgagagaactagctgtttaacgcataaatatattgatagtaactacaagttaaataacattcagtgtcactatataacatgctgtcttacttgattctgtttttcagacttcattctagtttctctttgttggaagagtctgcagagataatgtgtgctttaattttaaacactcattaccaatatgatttttgcccaaatgtttgttaatgtaagttaaaaaatatatttggtta

SEQ ID NO: 163579 - DNA, 729 bp, Homo Sapiens
gtgctgtcactgcccgtttatagtgttgatgtagtcagtgccgttgccttttcttcattagagacacagaacaatgtattagaatttccagctgtgggtttgaagacttagggggacatccagaacgtgcttcctctttcagacggtgtaaagtcccctggaattacacagctttagtgctgagcttttaacaggaaatgtggccctaggtattagtcttagtttaaaatgttggtgtttagagactgtaaatgcatattcacaaagttatctgatagggccttggaggagaaggtccagttttaaaaaatgacagtttgtgtttaataaatgaaggcatgagaggaagtaagtagcaagttgaaggacaggtagttgagatgaaacacttcaaaaccctggttatagatgtactgtttggatgtagcatagtcttgagtctagcgtccacaaagaattattcaaatgatatttagaagaattataactattacattgaatggagtcccttggatattttgatagtaaaattaatagccataaagtcctagacttcttatttgaagttaaaatttcttatttgaaaagttgaaatttatgagctttgaagattgctaaattaaataatttatagctccataactaaaaatatacttgtatatgtcacagagcattaatccatatttactaatagagttacatctaccagtcacgtcacgggtacgctga

SEQ ID NO: 163580 - DNA, 330 bp, Homo Sapiens
tacccggaaagctcaagctggattgtctccctccccaactccctgcaagctggcccatccctgccaagagccccccataggcactggggctgttgagacgggagatgtccccactgtgctgctcctggtgggcaggggtggggggagagagtaattgctcatcaatgcaccaaattcctgcagaaacaacacagagttcgctgatgctatgcagctgctcccgggtctgcttgtcctcatgcagcaccttggctctctcatccagagcatccataatcaccttcacttggtccacagcatcctcgtcccgctggctccagcgcagatacc

SEQ ID NO: 163581 - DNA, 754 bp, Homo Sapiens
gctgtctccaggcctatagacgtttctctccaaggccctatcccccaatgttgtcagcagatgcctggacagcacagccacccatctcccattcacatggcccacctcctgcttcccagaggactggccctacgtgctctctctcgtcctacctatcaatgcccagcatggcagaacctgcagcccttggccactgcagatggaaacctctcagtgtcttgacatcaccctacccagggcggtggggtctccaccacagccactttgagtctgtggtccctggagggtggcttctcctgactggcaggatgaccttagccaagatattcctctgttccctctgctgagataaagaattcccttaacatgatataatccacccatgcaaatagctactggcccagctaccatttaccatttgcctacagaatttcattcagtctacactgtggcattctctctggcgatggagtgtggctgggctgaccgcaaaaggtgccttacacactgcccccaccctcagccgttgccccatcagaggctgcctcctccttctgattaccccccatgttgcatatcagggtgctcaaggattggagaggagacaaaaccaggagcagcacagtggggacatctcccgtctcaacagccccaggcctatgggggctctggaaggatgggccagcttgcaggggttggggagggagacatccagcttgggctttcccctttggaataaaccattggtctgtca

SEQ ID NO: 163582 - DNA, 432 bp, Homo Sapiens
  misc_feature (193)..(218): n is a, c, g, or t
tgtattggcggtgcttccctcaaaagctactaccaaaaaaaccccacaaatttgccaatccatgaaagtatcataggaagtctacctttccaaggaatctggcattgtggccctgctcttgccaaatgctctccagcattgttggtatcaaggtggcctggttgagtaaacttgaccaaacaaaaattaactnnnnnnnnnnnnnnnnnnnnnnnnnngctgatcaaaaaagcccttcagggtcttttatgcatccaggaggtcattgtagatatcaataatatagtgcctaagtgccactttattgccaagtctagattgatacttttttcagataaaccagctttttatgtaaagagtaagggaaaaagttaaatctttaattctgacctgccataaatacccaaagatataaactgccagcaccaccaa

SEQ ID NO: 163583 - DNA, 666 bp, Homo Sapiens
ggcgggaagagaccgtgaccgccaccgccacttcccaggtagcccagcagcctccagccgctgccgcccctggggaacaggccgtcgcgggccctgccccctcgactgtccccagcagtaccagcaaagaccgcccagtgtcccagcctagccttgtggggagcaaagaggagccgccgccggcgagaagtggcagcggcggcggcagcgccaaggagccacaggaggaacggagccagcagcaggatgatatcgaagagctggagaccaaggccgtgggaatgtctaacgatggccgctttctcaagtttgacatcgaaatcggcagaggctcctttaagacggtctacaaaggtctggacactgaaaccaccgtggaagtcgcctggtgtgaactgcaggatcgaaaattaacaaagtctgagaggcagagatttaaagaagaagctgaaatgttaaaaggtcttcagcatcccaatattgttagattttatgatgcctgggaatccacagtaaaaggaaagaagtgcattgttttggtgactgaacttatgacgtctggaacacttaaaacgtatctgaaaaggtttaaagtgatgaagatcaaagttctaagaagctggtgccgtcagatccttaaaggtcttcagtttcttcatactcgaa

SEQ ID NO: 163584 - DNA, 590 bp, Homo Sapiens
  misc_feature (199)..(262): n is a, c, g, or t
  misc_feature (489)..(526): n is a, c, g, or t
ccgcgcctagaggatccccaagcacaatgtacagctttcttcggtccgtccatgcagagatgtaaaagcttaagggtcaaacaataccaattgtataggcaacaagtgatctggaacactatgacaagactcgtcatgaagaatttaaaaaatatgaaatgatgaaggaacatgaaaggagagaatatttaaaaacatnnnnnnnnnnnnnnnnnnnnnnnnnnnnnnnnnnnnnnnnnnnnnnnnnnnnnnnnnnnnnnnntcaccctaaagttaatcacccaggaagcaaagatcaactaaaagaggtatgggaagagactgatggattggatcctaatgactttgaccccaagacatttttcaaattacatgatgtcaatagtgatggattcctggatgaacaagaattagaagccctatttactaaagagttggagaaagtatatgaccctaaaaatgaagaggatgatatggtagaaatggaannnnnnnnnnnnnnnnnnnnnnnnnnnnnnnnnnnnnnggttgatactaacaaagacagattggtgactctggaggagtttttgaaagccacgttgatttca

SEQ ID NO: 163585 - DNA, 498 bp, Homo Sapiens
cacagctccttgagcctccagttgatcatgctgacgtatgtagactcttcttttcgtttctgaagctcatctgccttcttcttaagttcattttcttgtaaagcaataatatattcatattcttttagttcttcctctgtgaagaactgttgctgatctaatgtctcattcattacatgttccctcattctaagcctttcttcttccatttctaccatatcatcctcttcatttttagggtcatatactttctccaactctttagtaaatagggcttctaattcttgttcatccaggaatccatcactattgacatcatgtaatttgaaaaatgtctaggggtcaaagtcattaggatccaatccatcagtctcttcccatacctcttttagttgatctttgcttcctgggtgattaactttagggtgattttcatgctttttcttcatttcttcaaatttagactcttcttcttttctcttttcttcattcaatgtt

SEQ ID NO: 163586 - DNA, 700 bp, Homo Sapiens
  misc_feature (36)..(36): n is a, c, g, or t
  misc_feature (55)..(55): n is a, c, g, or t
ctaattgaagaatggagaaaagccatgaaatccccnctaaggtaatcacccaggnagcaaagatcaactaaaagaggtatgggaagagactgatggattggatcctaatgactttgaccccaagacatttttcaaattacatgatgtcaatagtgatggattcctggatgaacaagaattagaagccctatttactaaagagttggagaaagtatatgaccctaaaaatgaagaggatgatatggtagaaatggaagaagaaaggcttagaatgagggaacatgtaatgaatgaggttgatactaacaaagacagattggtgactctggaggagtttttgaaagccacagaaaaaaaagaattcttggagccagatagctgggagacattagatcagcaacagttcttcacagaggaagaactaaaagaatatgaaaatattattgctttacaagaaaatgaacttaagaagaaggcagatgagcttcagaaacaaaaagaagagctacaacgtcagcatgatcaactggaggctcagaagctggaatatcatcaggtcatacagcagatggaacaaaaaaaattacaacaaggaattcctccatcagggccagctggagaattgaagtttgagccacacatttaaagtctgaagtccaccagaacttggaagaaagctgttaactcaacatctatttcg

SEQ ID NO: 163587 - DNA, 841 bp, Homo Sapiens
  misc_feature (335)..(505): n is a, c, g, or t
tgatatcgatatgagtaggagaaagtctgggctggagaggctgcgggaggtaggagcataatgtagaatcagtgggcatgttaagcttgttttcctgtaactggatggtcccaccccctgctgtgtggctccttacggctccatggctcaggggttggggagccctgctcaagtgcatccaaagcaacccttcccacaccagtcttcatagtggtcaagtgcagcaaccacttagctcccaaggcatgtgcctcagctggcatttcgtcacaatcaacagtaagtggcagcttgagtcattgtgaggtcacttcgtttcgctgtcacccctctgnnnnnnnnnnnnnnnnnnnnnnnnnnnnnnnnnnnnnnnnnnnnnnnnnnnnnnnnnnnnnnnnnnnnnnnnnnnnnnnnnnnnnnnnnnnnnnnnnnnnnnnnnnnnnnnnnnnnnnnnnnnnnnnnnnnnnnnnnnnnnnnnnnnnnnnnnnnnnnnnnnnnnnnnnnnctgaataacatgttgcccagtcagtctctcttcctggattcagaagtctttcatggtaggtccagaatgaaaggtgatgtctggggctcaggtgtgttgaggtccccatgcctggactatgggtgctgagtgggatttacttgtccatccattttctatattccagcactgggaaactagggtttatccatcttgataagatgtcatttaaattccacttcgcaagaaccacaaatggaagaaaggccatgaaaccacaggacagtacttgtactcaagggaatcttcagctcaggtggctctgtaaaagagaaattacctttggcccttatcgag

SEQ ID NO: 163588 - DNA, 269 bp, Homo Sapiens
tatacaggagtcagtgtaggatgaaccttatcacaaagaacatacatgtcttggccgttgtaacaagaccactcagcttctcagtcatacaatttatagaagaaatccatgtcctcctgaaagagattcttcacagagcatctgacttctggttctaatacagactgatggctttctaggcctgcctcaaggttgtcatcctggaattatattgtcattacaatcttgggtgagatccactgtaccttagaggccatggcttcctccaa

SEQ ID NO: 163589 - DNA, 451 bp, Homo Sapiens
  misc_feature (127)..(216): n is a, c, g, or t
tatgttgttgtcgtctctgaggatcccccttttatctgaaggctgcatgcacggagggtcttgtaacaccagctggggctggccttcttttaggagcttcagtggttctgaaaacttttatttgttnnnnnnnnnnnnnnnnnnnnnnnnnnnnnnnnnnnnnnnnnnnnnnnnnnnnnnnnnnnnnnnnnnnnnnnnnnnnnnnnnnnnnnnnnnagagtgttgggattacgggtgtgagccactgtgcccagccttgaaaactttttcaggttcttccagggttactgggctattaaatatttctatttcattataagtcagtttttcaaagttatattatcttaattaccttttttatatgtattagtgtagagtagcattttatattttgatatcctccttatgcatagtttttcactttttattcctagtttttcgtttttaataa

SEQ ID NO: 163590 - DNA, 484 bp, Homo Sapiens
ccatctattgacactctcagaaggagaccaaaaatcggttcttcatcccaaagacctattaaactcaaagaagcatcatattcaaatgataatcaaattattttgcagagtccttcttcaaatggaactaaaaaagacatacataaatgtgtagactttaaacctaaagatatcaaattgacaaatgctgggagcaagcttgaccatggaattaaaagccttagtagtcctaagattgccagtgatgtgaaacctaaagccgaaggccaggcaagtgaaaataaatggtctcatttacttgttcagagagagaagatgaaagaactcaagaaaggaagaaacagtaaatttagagacaattctgaaaaatgtgtcttagagaaatggaagagaaatcaatttactcaggattataactccaacaagataattaaggaacccttgggatctagaagacagatcagtttcaaatccctataaatcc

SEQ ID NO: 163591 - DNA, 2515 bp, Homo Sapiens
atctctaccccacgccaacacagtttgctcacatgccagttactccagcataaagctgaaatctattcaatactattgtcccataactgatctgactttgtatgtaaatacagaaaaagcttgttcacctgttttcctcattttgtccactggtgaattcaactggaagctccttctatagtctgaagaataccatctgaaagaactagtggttcccaatccccacatttaaaatggaatgtttggtttatttaaagtaaataggctattttttcttactgggtctggcttctctggcccttcgcatacgtgtgtctgctgagtgttcctgcatgtaagaattaagaccaagggaggggagagagaaacccacacataaacaatgcactaaagatcactgaactgtttaaacatttccacttgccagtttaatttcttgaagactgttgcttgtttggaatgtttcttgtcactgattttaaggttgcatctggaaaagactaaaggcttcagtcccctcccaccaccagaaatgaacaaaaagcattttacctaaaaatacaccagcaaaatgtactcagcttcaatcacaaatacgactgcttaaaactgcagaaatttcctcaacactcagcctttatcactcagctggattttttccttcaacaatcactactccaagcattggggaacacaacttttaatcatactccagtcgtttcacaatgcattctaatagcagcgggatcagaacagtactgcatttacttgccaacagaacagacagacctgaagtcaagacaactgcattctctgtgaagtctgtaaaagaaaataaagctacaacaagtaagccccaccccctcctcccatccctccaaattccaggaaaaaaattttgagtatgctgataaactcactgcaaggtctcatacactcactagaacagaaggaagagccaagcactcatatgcaattcaaaatcctgaatggcttcatgaaggatgaaatgcctctgcaaaggaaaattctttaaaaccccacaggcaccccctcccttccctatataaggtcaatagtgtaaaacattgcctaccactctaagattgtaagcatttaaagttaacatgcaaactttggaaatgtgaaaaagtattactctaatcactgtcaatttatagacccctgactttctggaaataaaatgtgtaattaccttttactctgatcataatctcccacctgtctaagaggttatttattccttatttagagggcctctattgccatgtgcctggaattattatatgctcatcactttatgaagaataaaatttgtctttcctgccttaaagttacattcgttcttccgctcaaatcctgatctggtccattaaagagtgttcgcagacaaagtttctgaaagattagagaagaatcccccccaagattgccccaacactgaactacagacaaacactattttatttaaataaggagacagctttctaaaagtatacattctctaataaaaatagtttattattttgaatgatttaatggttttctacacaatttacatcacaacatgtaaattttagcagtaacatctgattctaacagcacatcatgctattcctttcatagagccttcagagattcaatgctaaacaaatttccttagttggcatcaaggcactgatcactttagaggcttttaagaaattatttaaagatgcaaatgcctctgagtgaagtgtactatcccatcactgaagcccacaggaacaagtcctacaattttaaaaaggctcgatggaaaaatttctcaatcctgaaatcccctagggaaggggtcaggagaaagtgccatggttgatatttaagaactccacagctcttaaaaataagcacttatccctaacatgcaatactgcagatgcaagttaaacttatctgttaacagctgcctgctgttttctgctcccagatgaaatgaagcaactcttctgataacgaagagatacctgtctgaggcaaacgaaacattggcacacagcacagcctcctcaatccacttgatcccaactcatctctcatttatttcggcttcttttattccaggattaatgtagtgtaacattttcatttcttttcgcttttattctgcttttgtaaaagcagtattttgagatggacattgcctcttcattgtatttctcatcaattcattatttttgtggttatagcttgacaagcaattaactttaaaatggtagattccgtaactttaaattggtagctttcatttgcttaaaattttttggcatatgcagataatgttctcatcagtagtaagaatctcagggttatgcttattccccaatggaggtatgacatataatcttttctgcctttacttatcaattcaccaaggagctgttttctctgcatctaggccatcatactgccaggctggttatgactcagaagatgttatctgaaaaaagtctat

SEQ ID NO: 163592 - DNA, 895 bp, Homo Sapiens
ttggagatcagcttccgctatgatgctagctggccaagtctgttatgttcacctgaaaaagtcttagcagagaatttttgcattcccacccaaaagccctctcagccactcaaatgcctatcttctccagtctacaagttacatgttcccacccagcattacagttcttgaacatgttatttctccacttactggtttaagttggttttagtcactggataagtattataatagagctacttagctgtggttttaatacccttctgttaacaatttgcaggcaaattaatggccttttctaacatagttcaacccaccaaagacctcgacaccatcgttaccttgaaaccgattatggatcatgcccacaaggatccaagctactggctgcatcgaggtgaggggtgaagggtctgtgctagatcaaaaggcacggggtggcgatgtggcagagaagttgcttgtggggagaccttgcttttaacaggcttctggaaaagctagggaaaagtggttgcccgctttccccctttccctccccttcaagcaccgcttgagatttgggctttattattaagagctgctataaaaacagcttgcttaaatgttaagagaagcccaggggtacttcaagcattccttcggatgcttcactccagaaagagggagttgaggcaagtcctcattactaataaaaatcaggtgaggctgacacttctcttgaccttaggataatagcgctttgttgtctctcctgccacaggaaggctccatggttgtcctactttaagccttcggtgcctttagtgaggggtacctgaaaaatcttaaaaaaaggcttagcgcccacctcacccctcccaccccgtcgggagcggggatccatcatagagat

SEQ ID NO: 163593 - DNA, 376 bp, Homo Sapiens
  misc_feature (169)..(180): n is a, c, g, or t
tccttcaacaatcactactccaagcattggggaacacaacttttaatcatacaccagtcgtttcacaatgcattctaatagcagcgggatcagaacagtactgcatttacttgccaacagaacagacaaacctgaagtcaaaacaactgcattctctgttaagtctgtnnnnnnnnnnnngctacaacaagtaagccccactctccgtgcagacccatcctctttcccgctcctcgctctcggacgccaccaacgctctcccgggctcttccgcgttacctacgatggaaggtcggggcgtgcgggcagctggaaccacccctgtcttggagctccgggtagctctcaaactcgaggctgcgcagctgttgtactg

SEQ ID NO: 163594 - DNA, 311 bp, Homo Sapiens
ccagtgactaaaaccaacttaaaccagtaagtggagaaataacatgttcaagaactgtaatgctgggtgggaacatgtaacttgtagactggagaagataggcatttgagtggctgagagggcttttgggtgggaatgcaaaaattctctgctaagactttttcaggtgaacataacagacttggccaagctagcatcttagcggaagctgatctccaatgctcttcagtagggtcatgaaggtttttcttttcctgagaaaacaacacgtattgttttctcaggttttgctttttggcctttttctagct

SEQ ID NO: 163595 - DNA, 522 bp, Homo Sapiens
cctattggaagttcatagcaaacagacaggcaaatatctgaagataccatacatcaactagtggtttaaacatttgaagaaaaaacatggaaagtatttacatggaccagaaactttatacaaatgctaaaacatgaaaaacacccaataaccagatagagcgtaaccatcaaggtatgaatctagtaatacaaataaaactacaaaaggtacaaagaacatgtagctataggaaataatagtgtaaatagcagtatataaactggcccatgtaaaatacaaaaatattcactgaagtcaggttttctataaaacagtgtttattagaggtattttactatgaatcaggcatataatctgaatgtagaaacttttagaaatattaacagcattcagtcagtgccatgcacttgtgcttccaattatttttttaaataaaatagtgtttgtctgtagttcagtgttggggcaatcttgggggggattcttttaatctttcagaacttgtctgcgacactctta

SEQ ID NO: 163596 - DNA, 1522 bp, Homo Sapiens
ttttatttcaagaagtcgatcaaaaagaaagccccagcgctctagagctcagctgacgggaaagggggtgcgcagcctcgagtttgagagctacccggagctccaagacaggggtgggttccagctgcccgcacgccccgaccttccatcgccggaccatgggaaccccaaagccacggatcctgccctggctggtgtcgcagctggacctggggcaactggagggcgtggcctgggtgaacaagagccgcacgcgcttccgcatcccttggaagcacggcctacggcaggatgcacagcaggaggatttcggaatcttccaggcctgggccgaggccactggtgcatatgttcccgggagggataagccagacctgccaacctggaagaggaatttccgctctgccctcaaccgcaaagaagggttgcgtttagcagaggaccggagcaaggaccctcacgacccacataaaatctacgagtttgtgaactcaggagttggggacttttcccagccagacacctctccggacaccaatggtggaggcagtacttctgatacccaggaagacattctggatgagttactgggtaacatggtgttggccccactcccagatccgggacccccaagcctggctgtagcccctgagccctgccctcagcccctgcggagccccagcttggacaatcccactcccttcccaaacctggggccctctgagaaaccactgaagcggctgttggtgccggggggaaagtgggagttcgaggtgacagccttctaccggggccgccaagtcttccagcagaacatctcctgcccggagggcctgcggctggtgggggtccgaagtgggagacaggacgctgcctggatggccagtcacactgccagaccctggcatgtccctgacagacaggggagtgatgagctacgtgaggcatgtgctgagctgcctgggtgggggactggctctctggcgggccgggcagtggctctgggcccagcggctggggcactgccacacatactgggcagtgagcgaggagctgctccccaacagcgggcatgggcctgatggcgaggtccccaaggacaaggaaggaggcgtgtttgacctggggcccttcattgtagatctgattaccttcacggaaggaagcggacgctcaccacgctatgccctctggttctgtgtgggggagtcatggccccagggaccagccgtggaccaagaggctcgtgatggtcaaggttgtgcccacgtgcctcagggccttggtagaaatggcccgggtagggggtgcctcctccctggagaatactgtggacctgcacatttccgacagccacccactctccctcacctccgagcagtacaaggcctacctgcaggacttggtggagggcatggatttccagggccctggggagacctgagccctcgctcctcatggtgtgcctccaacccccctgttccccaccacctcaaccaataaactggttcctgctatgatc

SEQ ID NO: 163597 - DNA, 214 bp, Homo Sapiens
tagcgcgcgcatgtcaatcacactactccccatatctaacaacgtaaaaatacaatgaagaggcaatgtccatctcaaaatactgcttttacaaaagcagaataaaagcgaaaagaaatgaaaatgttacactacattaatcctggaataaaagaagccgaaataaatgagagatgagttgggatcaaggtggatggagtgtggctgcgcgtgc

SEQ ID NO: 163598 - DNA, 600 bp, Homo Sapiens
gattagtcaacatacactttgtatggattaaatatagatgtaatttttcaaaatcgtttttaatttaaactgtgttttagtgtaaaattgttaacctatgtaagatggataatgtatataagaatgtaggccttaactatttcacatgagtcaaaacaaagcagctttaaaaaaataattggaaacacaagtgcatggcactgactgaatgctgttaatatttctaaaagtttctacattcagattatatgcctgattcatagtaaaatacctctaataaacactgttttatagaaaacctgacttcagtgaatatttttgtattttacatgggccagtttatatactgctatttacactattatttcctatagctacatgttctttgtaccttttgtagttttatttgtattactagattcataccttgatggtaacgctctatctggttttgggtgtttttcatgttttagcatttgtataaagaaactggtccatgtaaatactttccatgttttttcttcaaagtgtttaaaccactagttgatgtatggtatcttcagatatttgcctgtctgtttgctatgaacttccaatagg

SEQ ID NO: 163599 - DNA, 568 bp, Homo Sapiens
gctagatccaaaggcacggggtgacgatctggcagagaagttgcttgtggggagaccttgcttttaacaggcttctggaaaagctagggaaaagtggttgcccgctttccccctttccctccccttcaagcaccgcttgagatttgggctttattattaagagctgctataaaaacagcttgcttaaatgttaagagaagcccaggggtacttcaagcattccttcggatgcttcactccagaaagagggagttgaggcaagtcctcattactaataaaaatcaggtgaggctgacacttctcttgaccttaggataatagcgctttgttgtctctcctgccacaggaaggctccatggttgtcctactttaagccttcggtgcctttagtgaggggtacctgaaaaatcttaaaaaaaggcttagcgcccacctcacccctccacccccacgccaacacagtttgctcacatgccagttatctccagcataaaagcatgaaatctattcaatactattgtcccatagatatgatctggctgtgaatgaaatacagatagccgacact

SEQ ID NO: 163600 - DNA, 242 bp, Homo Sapiens
  misc_feature (146)..(147): n is a, c, g, or t
ctctagaggatccttaaaagtgcactcttctatatctacaagaaataatgaattgatgagaaatacaatgaagaggcaatgtccatctcaaaatactgcttttacaaaagcagaataaaagcgaaaagaaatgaaaatgttacacnntacattaatccgtggaataaagagaagccgcaaataaatgagagatgagttgggatcaagtagatatagaagagtgcacttttggggtaccgagc

SEQ ID NO: 163601 - DNA, 1535 bp, Homo Sapiens
ttttatttcaagaagtcgatcaaaaagaaagccccagcgctctagagctcagctgacgggaaagggggtgcgcagcctcgagtttgagagctacccggagctccaagacaggggtgggttccagctgcccgcacgccccgaccttccatcgccggaccatgggaaccccaaagccacggatcctgccctggctggtgtcgcagctggacctggggcaactggagggcgtggcctgggtgaacaagagccgcacgcgcttccgcatcccttggaagcacggcctacggcaggatgcacagcaggaggatttcggaatcttccaggcctgggccgaggccactggtgcatatgttcccgggagggataagccagacctgccaacctggaagaggaatttccgctctgccctcaaccgcaaagaagggttgcgtttagcagaggaccggagcaaggaccctcacgacccacataaaatctacgagtttgtgaactcaggagttggggacttttcccagccagacacctctccggacaccaatggtggaggcagtacttctgatacccaggaagacattctggatgagttactgggtaacatggtgttggccccactcccagatccgggacccccaagcctggctgtagcccctgagccctgccctcagcccctgcggagccccagcttggaaatcccactcccttcccaacctggggccctctgagaacccactgaagcggctgttggtgccgggggaagagtgggagttcgaggtgacagccttctaccggggccgccaagtcttccagcagaccatctcctgcccggagggcctgcggctggtggggtccgaagtgggagacaggacgctgcctggatggccagtcacactgccagaccctggcatgtccctgacagacaggggagtgatgagctacgtgaggcatgtgctgagctgcctgggtgggggactggctctctggcgggccgggcagtggctctgggcccagcggctggggcactgccacacatactgggcagtgagcgaggagctgctccccaacagcgggcatgggcctgatggcgaggtccccaaggacaaggaaggaggcgtgtttgacctggggcccttcattgtagatctgattaccttcacggaaggaagcggacgctcaccacgctatgccctctggttctgtgtgggggagtcatggccccaggaccagccgtggaccaagaggctcgtgatggtcaaggttgtgcccacgtgcctcagggccttggtagaaatggccccgggtaaggggtgccctcctccctggagaatactgtggacctgcacattttccacagccacccactctcccttcacctccaaccagtaccaagccctacctggcaggactttggtgggagggccatggtatttccaggggcccctgggggaaacctgagcccctcccctcctcatgggggtggccttccaacccccctgttccccaccacctcaaccaataaactggttcctgctatgatc

SEQ ID NO: 163602 - DNA, 1313 bp, Homo Sapiens
caccagctggccgagctggaccgccagatcaagagcttccgcgtagcctccaacccctacacctggtttaccatggaggccctggaggagacctggaggaacctacagaaaatcatcaaggagagggagctggagctgcagaaggaacagcggcggcaggaggagaacgacaagctgcgccaggagtttgcccagcacgccaacgccttccaccagtggatccaagagaccaggacatacctcctcgatgggtcctgtatggtggaagagtcggggaccctcgaatcccagcttgaagctaccaaacgcaagcaccaggaaatccgagccatgagaagtcagctcaaaaagatcgaggacctgggggccgccatggaggaggccctcatcctggacaacaagtacacggagcacagcaccgtgggcctcgcccagcagtgggaccagctggaccagctgggcatgcgcatgcagcacaacctggagcagcagatccaggccaggaacacaacaggtgtgactgaggaggccctcaaagaattcagcatgatgtttaaacactttgacaaggacaagtctggcaggctgaaccatcaggagttcaaatcttgcctgcgctccctgggctatgacctgcccatggtggaggaaaggggaacctgaccctgagttcgaggcaatcctggacacggtggatccgaacagagatggccatgtctccttgcaagaatacatggctttcatgatcagccgcgaaactgagaacgtcaagtccagcgaggagattgagagcgccttccgggccctcagctcagagggaaagccttacgtgaccaaggaggagctctaccagaacctgacccgggaacaagccgactactgcgtctcccacatgaagccctacgtggacggcaagggccgcgagctccccaccgcgttcgactacgtggagttcacccgctcgcttttcgtgaactgagccactccctgggtcacccacccctcgctgcttgccctgcgtcgccttgctgcatgtccgctcctctgtgtgctctcactttccactgtaaccttaagcctgcttagcttggaataagacttaggagaaaatggtgcttcactaacccgcttccggtccagtcacaatcatcatgtcactgtggggacccagatctgtgtcttgaagcagctgccctcattccgacttcagaaaatcgaagcagctggctcctccccttgttctctctcccaccctcccccaaatctgttttcatgtaaaagacaaataaatgatgacttcccccaaaaaaaac

SEQ ID NO: 163603 - DNA, 482 bp, Homo Sapiens
  misc_feature (390)..(390): n is a, c, g, or t
ggatccgaacagagatggccatgtctccttgcaagaatacatggctttcatgatcagccgcgaaactgagaacgtcaagtccagcgaggagattgagagcgccttccgggccctcagctcagagggaaagccttacgtgaccaaggaggagctctaccagaacctgacccgggaacaagccgactactgcgtctcccacatgaagccctacgtggacggcaagggcccggagctccccaccgcgttcgactacgtggagttcacccgctcgcttttcgtgaactgagccactccctgggtcacccacccctcgctggcttgccctggcgttcgccttgctggcatgttccgctcctctgtgtgctcttcacttttccactgtaaaccttnaagcctgcttaggttgggattaaggatttagggaggaaatgggtgctttcattaacccgtttcggttccattcacattcatcatgttcatgt

SEQ ID NO: 163604 - DNA, 472 bp, Homo Sapiens
  misc_feature (14)..(14): n is a, c, g, or t
  misc_feature (62)..(62): n is a, c, g, or t
  misc_feature (73)..(73): n is a, c, g, or t
cggggaaaaaaaanccggaacttatgcgtctcccccaaaatgaaaaccctacgtgggaaggnaaagggccgcnaagctcccccaaccgcgttcgaactacgtggaagttcaccccgctcggcttttccgtgaaactgaagcccactcccctgggtcaccccaccccctcgctgcttgcccctgcgtcgccttgcctgcatgtccgctcctctgtgtgctctcactttcccactgtaaccttaagcctgcttagcttggaataagacttaggagaaaatggtgcttcactaacccgcttccggtccagtcacaatcatcatgtcactgtggggacccagatctgtgtcttgaagcagctgccctcattccgacttcagaaaatcgaagcagctggctcctccccttgttctctctcccaccctcccccaaatctgttttcatgtaaaagacaaataaatgatgacttccccca

SEQ ID NO: 163605 - DNA, 658 bp, Homo Sapiens
  misc_feature (17)..(17): n is a, c, g, or t
  misc_feature (44)..(44): n is a, c, g, or t
  misc_feature (78)..(78): n is a, c, g, or t
  misc_feature (176)..(176): n is a, c, g, or t
  misc_feature (189)..(189): n is a, c, g, or t
  misc_feature (198)..(198): n is a, c, g, or t
  misc_feature (220)..(220): n is a, c, g, or t
  misc_feature (567)..(567): n is a, c, g, or t
  misc_feature (576)..(576): n is a, c, g, or t
  misc_feature (578)..(578): n is a, c, g, or t
  misc_feature (602)..(602): n is a, c, g, or t
  misc_feature (605)..(605): n is a, c, g, or t
aaggacaagtctggcangctgaaccatcaggagttcaaatcttncctgcgctccctgggctatgacctgcccatggtngaggaaggggaacctgaccctgagttcgaggcaatcctggacacggtggatccgaacaggtaaattaattaaggccaggtgctgtgagcctctgcccngggcacccacctnccctccctnctcaggctcttgcttcccccgntcctagagatggccatgtctccttgcaagaatacatggctttcatgatcagccgcgaaactgagaacgtcaagtccagcgaggagattgagagcgccttccgggccctcagctcagagggaaagccttacgtgaccaaggaggagctctaccagaacctgacccgggaacaagccgactactgcgtctcccacatgaagccctacgtggacggcaagggccgcgagctccccaccgcgttcgactacgtggagttcacccgctcgcttttcgtgaactgagccactccctgggtcacccacccctcgctgcttgccctgcgtcgccttgcttgcatgtccgctcctntgtgtgctntnactttccactgtaacctttaaagnctngctttaggtttggaattaagatttagggagaaaatgagtgtttcaataacccg

SEQ ID NO: 163606 - DNA, 642 bp, Homo Sapiens
cagtttcaaaacatttcaatacttattaattccaaagatccgaacaccatgtagttgtggcattttgggaattagtacactcaggagagaagctgtgtttaggatgaagtgagttggatcatacttcgtatagaaacttgccagaaaatatagaattattggagaaattgtgaaaaacttccgtgaagatgtaaactgtactccatagtccagttgttcccaatgagttaggagccttgctttaccctggtcaggagtttcgaaaggtgttcctttcactgcatgcaaaaatacgtacatccccagattatgtataatatttgttaaagtccaagcaacaggaacactgaagaagggaatgctgagtaagacaatatgaagcaagccaactcccaatgcatatgtcagccacataccccggctgttcatgacacgggtatttggattcacttcactgtgggcaactccaacgttcatgtttgctcgagccagtgtgtcaagtagtcagactcttatatttgacttaatgtatccataaagaatggtcagagttcagatcacttctttctgaatactcaatgtggaaggtacatgccgccgccccactccggccgccggctcgcagcaggaccagcccggctg

SEQ ID NO: 163607 - DNA, 586 bp, Homo Sapiens
  misc_feature (37)..(37): n is a, c, g, or t
atgagaagattagagaacagattaagaaatacaggcnccatgtcgtacgattgtgtcactacaacaataaagcccaacgtgaccttcttcatggtttggagtgtgtggtaacaatgcatcaagctcagcttatctccaagatgccacatatcttgaaggagatgtacgatgcagaccttgtagaagaagagggtcatcatcagctggtcggagaaggcctctaagaaatatgtctccaaagaacgtgccaaagagattcggtgtcaaagcaggaccatttataaaatggttgaaggaggcagaggaagattcttctggtggcgaaagaagaagatgaagatgagaacattgaggtggtgtattcgaaggctgccagtgtaccgaaagttgagactgtaaagtcagacaacaaggatgacgacatcgatattgatgccatttaaagggatggatgcaacctagcttaacagtataatgctgcaaattttcctccattatcagccagaagtgcacatgtatgtgcaaagctaaaatggcttaacatcatgctacacatttacactaaaaatctattactgtagtttct

SEQ ID NO: 163608 - DNA, 523 bp, Homo Sapiens
gtgccgacatatcacatagtgtttgaggcttctttagtatttaagactatgttacgtgtgtcttcttctgggagtggagtcccaagcatggggcaggcagagcagggaacagtgctgtgtccctttgaccagctcctgtactgtgtcatcacgatgagctgggcccagccctctccatcagttctccccgtcatttcgtggctcaggctccgcctcctggtgggtcctgagtccacctgcctgcgagccaggcaggtgagctgggatgttggcagggccagtcccagccctgaggctgagaactggggtgatggcctgtccccccaatacagtcttgaccaaactgagagccaagaaaccgacttgctcttctaggcatccctttcgtctgctgccagccacttctccatggtcacattgggcagacacagctaacagggactagtcttgtgtaccagtctaaactggaggcccgtgagtaccgtgaagctcaggagtttggtgctgacgtccgattgatgtt

SEQ ID NO: 163609 - DNA, 610 bp, Homo Sapiens
  misc_feature (510)..(568): n is a, c, g, or t
gacgcatggatatagacaggcgtaagaaagcaggctggtacaggtccggttattcccgggatatcgtcgacccacgcgtcgaccccatggacatgagcacaatcaagtctaaactggaggcccgtgagtaccgtgatgctcaggagtttggtgctgacgtccgattgatgttctccaactgctataagtacaaccctcctgaccatgaggtggtggccatggcccgcaagctccaggatgtgttcgaaatgcgctttgccaagatgccggacgagcctgaggagccagtggtggccgtgtcctccccggcagtgccccctcccaccaaggttgtggccccgccctcatccagcgacagcagcagcgatagctcctcggacagtgacagttcgactgatgactctgaggaggagcgagcccagcggctggctgagctccaggagcagctcaaagccgtgcacgagcagcttgcagccctctctcagccccagcagaactaaaccaaagaannnnnnnnnnnnnnnnnnnnnnnnnnnnnnnnnnnnnnnnnnnnnnnnnnnnnnnnnnntggaagagaataaaaaaagcaaagccaaggaacctcctccta

SEQ ID NO: 163610 - DNA, 1641 bp, Homo Sapiens
  misc_feature (767)..(805): n is a, c, g, or t
  misc_feature (863)..(929): n is a, c, g, or t
  misc_feature (1448)..(1448): n is a, c, g, or t
  misc_feature (1535)..(1535): n is a, c, g, or t
caaacaccggcccaagaaggaccaacccgccctcgtgcggattcggcacgagggtctccaccggtgagacctggaagcgggcgagtctcgtgctgtgtcggacctgcagcccctggccttccgccaccatggagtacctcatcggtatccaaggccccgactatgttcttgtcgcctccgaccgggtggccgccagcaatattgtccagatgaaggacgatcatgacaagatgtttaagatgagtgaaaagatattactcctgtgtgttggagaggctggagacactgtacagtttgcagaatatattcagaaaaacgtgcaactttataagatgcgaaatggatatgaattgtctcccacggcagcagctaacttcacacgccgaaacctggctgactgtcttcggagtcggaccccatatcatgtgaacctcctcctggctggctatgatgagcatgaagggccagcgctgtattacatggactacctggcagccttggccaaggccccttttgcagcccacggctatggtgccttcctgactctcagtatcctcgaccgatactacacaccgactatctcacgtgagagggcagtggaactccttaggaaatgtctggaggagctccagaaacgcttcatcctgaatctgccaaccttcagtgttcgaatcattgacaaaaatggcatccatgacctggataacatttccttccccaaacagggctcctaacatcatgtcctccctcccacttgccagggaacnnnnnnnnnnnnnnnnnnnnnnnnnnnnnnnnnnnnnnncaggcgcactcttgataaatggttaattcagaataaaggtgactatggatataattgnnnnnnnnnnnnnnnnnnnnnnnnnnnnnnnnnnnnnnnnnnnnnnnnnnnnnnnnnnnnnnnnnnntttggtgggccgcctccggcccccaaagaagcttttctaaacctattcgttgtggcgcgccggcgcccagaagggaaagggaactgtggccatactctgtttccaaggaaaatcccggctcttgaactaggggcctgggaattcccccccaaataaaaaaagcccgcggggggcacccggagcggttttgaaacaactcccaaagggagagtccgccggggggattaccggggatccgtgcaagacggggggcccaaggggaaggctccgaatatgcaaaattaggggccacccgcccggtggcgctttttttctccgaatgaccggggaggtgaaaaacatataaaaacatttctgggccgtaactcgtggaccgccaatcggcaaagcggcgcggcggggcaaaccccggaagctcgcccccccagggtgagtcatcaacccttgtgcggggctgtgggtgataaaaaaactttgtcacctcggcgcggggaatccgagggcgtcgtgcataagtcnatgagcctcacgcagcgcgccgcggaagaagaacaaacggctgggcggaagaacctctaccgccggcggtgcgtgcggctgcacccnacatcgctaaagttttcgcaaataaacaccctttcgcgaggaatgaaaggccgacgtgttgattttagattgtgaacacacgccatcttcctcagcacagagacgg

SEQ ID NO: 163611 - DNA, 757 bp, Homo Sapiens
gggcgccaatcttcgctctgaggtgctgtctcaccggtgagacctggaagcgggcgagtctcgtgctgtgtcggacctgcagcccctggccttccgccaccatggagtacctcatcggtatccaaggccccgactatgttcttgtcgcctccgaccgggtggccgccagcaatattgtccagatgaaggacgatcatgacaagatgtttaagatgagtgaaaagatattactcctgtgtgttgggagaggctgggagacactgtacagtttgcagaatatattcagaaaaacgtggcaactttataagatgcgaaatgggatatggaattgtcttcccacgggcagcagctaactttcacacgccgaaacctggctgactgtcttcggagtcggaccccatatcatgtgaacctcctcctggctggctatgatgagcatgaagggccagcgctgtattacatggactacctggcagccttggccaaggccccttttgcagcccacggctatggtgccttcctgactctcagtatcctcgaccgatactacacaccgactatctcacgtgagagggcagtggaactccttaagaaatgtctgggaggagctccagaaacgcttcatcctggatctgccaaccttcagtgttcggatcattgacaaaaatggcatccatgacctggataacattttcctttccccaaacagggttccctaacatcatggtcctcccctccccccttggcccagggaaag

SEQ ID NO: 163612 - DNA, 1139 bp, Homo Sapiens
  misc_feature (855)..(864): n is a, c, g, or t
actttttacttaaactttgagtcctgtacattgataactgctattcaaaaaaaattagacaaagacatctagatttagattaacgtgatcaaagggattattgtggatcattaaaggaaacttaacattaagccttcatgtaccaaatactaatatttaaattaatttcaaaatctataaaggtatgtaattattaatttgcaaaggagaaaactgaggctcagaagttgcacaaaaccatgaactagtggaactgagctttacaaaccaaggctgtcctctactatacattatttctcctcagtacacaataataaattggttcaaaattatctagacctttaaaaagtatataatggaaagtgcttttagtagttaaagtcgtcatgaatgaccctaacaaatgtttgtctaaaagttttactaaaatgctgacatcaggttataatccgtcatttatttgtaaaaagatgaggacacacattaagtgaagtgcaaatcatgtttgtcttctaccaaaataaggtaattttaagcaaaccaatctcaatgatgataaatgcatgtcattatttatttagatgtttcagctctcgcactaagtttttacaagctggtgaacactgacaaaattatttctcccacagaactataaccacacatccccagacagtataaatatatggttgaactaacattaatacacatcaccattttatcaattacataataaaacaaattgtcaagtatccaaatattaagttacacagctcaaaaggcatataaaatattagatgtctgctcaattcattagcagaaacccatttctttttttgcaagagaggttgggaaggnnnnnnnnnntcacactttcaaacaaaaataagttggtaaacacacttctgataagtatgggaaaaaaattacaagaatttcaggaagtttatgattacaataacaaagcatctctaccttttaaaaaaatattttactaaattaaagagcatattctacatgtttgcacaagacaaaggcaacattttgctaaaaataattaatagccccctcccattcttttctcaggccctccctgttaagttgcacctcagagtgcaaacattaaattaatgtaaggctcc

SEQ ID NO: 163613 - DNA, 602 bp, Homo Sapiens
gcggcccgaggagatagcaggatgtatagatgatggcaggtactttagcaaagctcaagaactcccagagctcccagtgaacaggattcccattcccagcagcaatgtcgaccaaaggttgatgttcagcatcatgtggttggagcctgttaggtaatgagcccgcatgtggtcctgggaaacaccagtcagtccatccagggtcagcgataatagcaagagtagctctccatagccgactgtgtgttcttctatcccaacaactttcttgggtttgtacatgaaaagggccactccagccacaattaacagcacacacaggtacttggccaacgggtacttcttcttcaagagggtcaccccaaggagcatgactgggattggcttgcaggatttaccaaggacctgagtggggtagttgacaaactgtagtgctgaattgctggagaccatggcacccagataggagatagaacaggcagcatagagccagctccgggtacgatccaccagatcttggcaaacacagcattgatcacacattgaatgaagaccaaagttaaggcaaaggcgacgtctcctgctatctcctccggtccagg

SEQ ID NO: 163614 - DNA, 950 bp, Homo Sapiens
  misc_feature (87)..(87): n is a, c, g, or t
ttgtaaaatccaagtgcattttttagaatatgggattttgcttgattttattttataaaaaaagactggaactcagtcccatattcntattaagtccatttcccaaggagatgtcactgtttgagataataacttaaatattcttgatgtggaggtagtctctctcttcctagtgggatgtcttcttagctcctttcccaaacttggcatcaagaccaagacccaggaacacaagcacagtgcccacccactgcatggggctgatgggattggcgaagaggatcacagaggccaaaattgtgaagaactttcgagttgtagtgatgatggagcaggtcaggggaccaaaatacacaaccgtcataaagatgaagctctgacccagggcactggtcagcccaaagagcaggatgttatagatgatggcagggtacctttcagcaaagctcaagaactcccagagctccccagtgaacaggattcccattcccagcagcaatgtcgaccaaaggttgatgttcagcatcatgtggttggagcctgtttggtaatgagcccgcatgtggtcctgggaaacaccagtcagtccatccagggtcagcgataatagcaagagtagctctccatagccgactgtgtgttcttctatcccaacaactttcttgggtttgtacatgaaaagggccactccagccacaattaacagcacacacaggtacttggccaacgggtacttcttcttcaagagggtcaccccaaggagcatgactgggattggcttgcaggatttaccaaggacctgagttgggtagttgacaaactgtagtgctgaattgctggagaccatggcacccagataggagatagaacaggcagcatagagccagctccgggtacgatccaccctggcagtgtcaaaaaactggatcaagtatacggcggtaccgagc

SEQ ID NO: 163615 - DNA, 1073 bp, Homo Sapiens
  misc_feature (48)..(48): n is a, c, g, or t
cccccccttctcttccccaaacctcctccccctaagtagcgagcctgngtggcgaattccgcacgagggtcgcctccgccgccgctgctgccggtgccggttgtgagcgggtctccagtcggctcctctgggcgtctcatggcctctagcagctccctggtgcccgaccggctgcgcctgccgctctgcttcctgggtgtctttgtctgctatttttactatgggatcctgcaggaaaagataacaagaggaaagtatggggaaggagccaagcaggagacgttcacctttgccttaactttggtcttcattcaatgtgtgatcaatgctgtgtttgccaagatcttgatccagttttttgacactgccagggtggatcgtacccggagctggctctatgctgcctgttctatctcctatctgggtgccatggtctccagcaattcagcactacagtttgtcaactacccaactcaggtccttggtaaatcctgcaagccaatcccaatcatgctccctgggggtgaccctcttggaaaaagaagtacccgttgggccaagtacctgtgtgtgctgttaattgtggctggagtggcccttttcatgtacaaaccccacaaagttgttgggataaaagaacacccggccggctatggagagctactcttgctattatcgctgaccctggatggactgactggtgtttcccaagaccacctgcggggctcattaccaaacagggctccaaccaacttgatgcctgaacatcaaccttttgggtcgacattgctgctgcggaatgggaatccctgttccctggggaagctctgggcagattccttgaactttttgctgaaaaggaaccccttgccattcatccaattaacttccctggccccttttgggcttgcacccggggcccttggcgcactaaacctttcttcctttatgaaccgccggggcgaatttttggcgccccccttgaaccggctgtcccttcatcccgtaacaacttccgaaaggttcctctaccaaatttttgcgccctccgtgcaaccccccttttcccccaa

SEQ ID NO: 163616 - DNA, 839 bp, Homo Sapiens
gccccgagaccgcaatacctctactcccaggaaagtcctttctcttgttctccatgacttggattttacctaatgagctcattttaaggcttaaaatgagggattctgtgttcttttctggagtctcagtaactgtaacatcagtagggactcctgagaggtgatccctgcctttggaatctctctcatggcttaataatgttcttacccttttaaccccatcactgacattcttgggagaaatatgacaatcaccagtaggcacatctagtaattttactagaagttcctgtctttggggatcaatttggtccaatttgagatcaccagaggtagtttgtacatcattaggtagagttgaggaatattttctatcttgatttgacaaagaaggttctattgagccaaccagtaaagacgctccagcttctgaaggattacatcgactttctcctgatttaggcaaatctttggcaagttctcttttaggagaggttttctctgatgcgtaaaactgagccttggtttcttcttggaaagtagtcattggtttagtattttttaacattttgaaggatggttggattggattcttgatgtctttatctgcctttgtagtagctgctctttccaaaccaacagctggcagtggaaaggtcttcactgtctgttctggtttgtccaccaccaacttagaatttctttcttcattctctgtctctaactctttccctttagctttaattaaatccttgattggtcctttcatctttttagcacgtgggagtgtagctggcttggactgataaactttttgatcagtaggtatgtgagggctg

SEQ ID NO: 163617 - DNA, 1050 bp, Homo Sapiens
tggtacggtcccgaatccttgggatatcgtcgacccacgcgtcggcatctgtctctataaagtcgtcccaaaaactcaagaaaattctggagatcatccttagccctggaaactacatgaatagcagtaaaagaggagcagtttatggatttaaacttcagagtttagatctgctcttagatacaaagtcaacagacagaaagcaaacactgttgcactatatatccaatgtggtgaaagaaaaatatcaccaagtgtccctgttttataatgagcttcattatgtggaaaaagctgctgcagtctcccttgagaatgttttgctggatgtcaaggagctccagaggggaatggacttgaccaagagagagtacaccatgcatgaccataacacgctgctgaaggagttcatcctcaacaatgaggggaagctgaagaagctgcaggatgatgccaagatcgcaccaggatgcctttgatgatgttgtgaagtattttggagaaaaccccaagacaacaccaccctctgtcttctttcctgtcttgtgtccggtttgtgaaagcatataagcaagcagaagaggaaaaatgagctgaggaaaaagccaggaacaagctctcatgggaaaaaactcctagagcaagaagctctgattggagcagcaggatccaaagtctcctttctcataaatcaaagaggcagcgagcagagttatgcaggaattaaggaagacgacacggttaagaataaccgacatggttatgaagggaacagaaatggtgcacttgaggatttaatcgcgccttaagaagaaataattcctagatccaagtcatgcagggaaaggatctctacacacggggggaggtacaaagaagactgagaacacacaaacagcagggacgaacgcgccacagatacagaaccgctgaaggcagaagacatgacaaagtccgaaaggggtgagacccacactgtacgtggggaacaattagatacagcaaaaacaccgcagcgaaaaggtaaaacctactcggttaacatcttcc

SEQ ID NO: 163618 - DNA, 1700 bp, Homo Sapiens
ctccatcctgactgacagccctgctggccctcatcctggtctacctcttctccatcgtcggcttcctcttcctcaaggataacttcattctcgaggtcgaccggctgcccaacaaccactccacagccagccccctggggatgccacatggagctgctgcatttgtggacacctgcagtggggacaagatggactgcgtctcagggctctcggtgcctgaggtcctggaagaggacagggagctggacagcacagagcgggcctgtgacactctgttgatgtgcatcgtcactgtcatgaaccatgggctacgcaacggtggtggcgtgggcgacattctccgcaagccctccaaagatgagtctctcttcccagcccgagtggtctatgacctcctgttcttcttcatcgtcatcatcattgtgctgaacctcatctttggggtaatcatcgacaccttcgctgacctgcgtagtgagaagcagaagaaggaggagattcttaagacgacatgcttcatctgtggtctggagagggacaagtttgataacaagacagtgtcatttgaggaacacatcaagctggagcacaacatgtggaactacttgtacttcattgtgctggtccgcgtgaagaacaagaccgactacacgggccctgagagctacgtggcccagatgatcaagaacaagaacctggactggttcccccggatgcgggccatgtcccttgtcagcaatgagggcgagggggagcagaatgagattcggattctccaggacaagctcaactccaccatgaagctggtgtcccacctcactgcccagctcaacgagcttcaaggagcagatgacggagcagcggaaacgcaggcaacgcctaggctttgtggatgtccagaactgcattagccgctgaggagagccaccgaaggccccaacaggggatgctcatcactggagactgcgactgggaagaacactgccccctccctcgggtttgggtggcccagccagctggccagcctccactcccactctgccagacaccctgacacccacccaggctttgaagagcatggagggggagcctcagagctgacagtcctgcttagagcccttaaaaagacttgaaagttcactgggactcagtttaccttaatgccttagcagaagataaatcctacctagagacctttgttccttaaagcaataactgacaactctttgtagtcctccttgtgggtagttaagagtggggtcacccctttaactccaagcactacattttggcggctgccggcctctgggggaggtggcagttatgctgttactagtgattttagggctttgttatttaacttatttcaagggtgctgtgctcagccctgcccatggctgtgcagctccctccgtgcctcagatctgctgtagccagtgcagacctcactgtcgtgtccatgccacccccggcatggctccaggtggcctggtgactccatgatggacgatcttgctcccaggacctgcctcttcccaggcttcctggggaagagttgtacgcccaggcaacaagggctgacctgcgcttgcgtggctgtttcatgaccgcttgtttttctccttttggtgtaatgttttacaaatcctttggcctgagaactaatatgttaattgccttaaataaattaatagaaatct

SEQ ID NO: 163619 - DNA, 971 bp, Homo Sapiens
gcaggaaaacaactatgacaatctgtagcttcttagatcattatagtgaatgtccccacttactataagtgtttttataatggtgtttcctaaataaaggaacataaatgtacactaaagggtgtttcccaagaataggaggtgaaagatattttcattttgtttaaccccaccaaactatttggtcaaaaggaatatgtaaagctaaataaaagcacatctggtagaatttcatggcaatgcatgtcgacaagatgtgcttggacctcgcttgcagcatctggcagtgggtagcagaacaaaggtaggaatctcacaggctctcctgtgtcttttctggaagaggctccgtggtggtggcactagcatttgcagccgaattcaagacttctccaaaatcaccaccagcaggcttggttccccctactttagactttaagttttcgaccttttcttcaaatgatttaaaagttggggagttttttacatcttccagctttttggtgatgactgagccaacagacgaaaaagcagctgaggccttctgtccagcctgggataaggtttcagatgtcttcttgtaagcagatgttgctgtcacgtcttgccaccctttggcaatgttctgttttagttcctgtagagaattgattccaagtttccgcttgatctctgctagatgcttctcttttgctgctaacacttgagacagagtctggatttcttcttctacctttgcaagttctcttcttagctcttcctgctcctcttccgagagggtctctgtggcactgatcgtggcagcaacatcttctccttcctcagggactgggtatgttctcagcagaccttgctcgccgcggtccatgtctccagcccgccgcctcgtgtcctctgcagcacccccgcctgcagcccgtcccggctcggatcgcccgccgcgccgcgcagagctcctcctcgcctccccc

SEQ ID NO: 163620 - DNA, 1705 bp, Homo Sapiens
  misc_feature (1481)..(1563): n is a, c, g, or t
  misc_feature (1565)..(1565): n is a, c, g, or t
ccgaggcgacatctgtcaacagggcatgccatgaattactaccgagatgtgcttttatttagctttacatattcctttgaccaaatagtatgtgggttaaacaaaatgaaaatagtcttcacctcgtattcttgggaaacaccctttagtgtacatttatgttcctttatttaggaaacaccattataaaaacacttatagtaaatggggacattcactataatgatctaagaagctacagattgtcatagttgttttcctgctttacaaaattgctccagatctggaatgccagtttgacctttgtcttctataatatttcctttttttcccctctttgaatctctgtatatttgattcttaactaaaattgttctcttaaatattctgaatcctggtaattaaaagtttgggtgtattttctttacctccaaggaaagaactactagctacaaaaaatattttggaataagcattgttttggtataaggtacatattttggttgaagacaccagactgaagtaaacagctgtgcatccaatttattatagttttgtaagtaacaatatgtaatcaaacttctaggtgacttgagagtggaacctcctatatcattatttagcaccgtttgtgacagtaaccatttcagtgtattgtttattataccacttatatcaacttatttttcaccaggttaaaattttaatttctacaaaataacattctgaatcaagcacactgtatgttcagtaggttgaactatgaacactgtcatcaatgttcagttcaaaagcctgaaagtttagatctagaagctggtaaaaatgacaatatcaatcacattaggggaaccattgttgtcttcacttaatccatttagcactatttaaaataagcacaccaagttatatgactaatataacttgaaaattttttatactgaggggttggtgataactcttgaggatgtaatgcattaataaaaatcaactcatcattttctacttgttttcaatgtgttggaaactgtaaaatgatactgtagaacctgtctcctactttgaaaactgaatgtcagggctgagtgaatcaaagtgtctagacatatttgcatagaggccaaggtattctattctaataactgcttactcaacactaccaccttttccttatactgtatatgattatggcctacaatgttgtatttgttatttattaaattgtgattgttttattattgtttatgccaaatgttaactgccaagcttggagtgacctaaagcattttttaaaagcatggctagatttacttcagtataaattatcttatgaaaaccaaattttaaaagccacaggtgttgattgttataaaataacatgctgccattcttgattgctagagtttttgttagtactttggatgcaattaaaactatgtgctatcacatgtgaaaagcttaataaattccatctatcagtnnnnnnnnnnnnnnnnnnnnnnnnnnnnnnnnnnnnnnnnnnnnnnnnnnnnnnnnnnnnnnnnnnnnnnnnnnnnnnnnnnntntttgtgggccccctcgcccctaaaaaagttttcaaaacctttctttgggcccggggccccatagggaagggaaacgggggcaaaacctgttcccaagaaaaacccggggcaagaacaaggggcttgggaatctcccaccc

SEQ ID NO: 163621 - DNA, 365 bp, Homo Sapiens
acttcctgtacagaacgtactacctcagctgggagtaaatgttggaaagtggtttaaacacattatcagattcatcttggaggcatagtcaagttcccagatcttcatcaatggtacttggatcatttggaacagacttaatgagagagaggagagatttggagagaagaacagattcctctattagtaatcttatggattatagtcaccgaagtggtgatttcacaacttcatcatcctccttttagaggactcagaagaagaagaaggtgacttatgtagaatttgtcaaatggcagctgcatcatcatctaatttgctgatagagccatgcaagtgtacaggaaggttggggaaggtcggta

SEQ ID NO: 163622 - DNA, 1368 bp, Homo Sapiens
tttacactggaagcaaatgattatcaaaatgagactgcaacttaaggcattttaaaagaaaaaataattaggtgccatatagcattttatttcaaaagtatattttgtcccacttttctcactagcaagagtaaaacacaaaccttttttcataaatatgactacagtaatcataacacaaaaaagggttgataggcattgcttagatatttaaaacaagggtaatactttcccactcacctaaaagaaaaaacctttttgattaccagtttataaacatcggatttgctatgttaaaaagtccagcagaattttaattcagcaacactggagaatgaatatatatatacaggcatacatgtgtatgtatatattcattttatatatagtcaatgtatttattaggcattcccccacaaaagtaatttatatttaattgccatttttaataaacacttatgttcacagatcatccatctgtcttatatgaagttaggcaatatcaaatgtcctgttatggtctccgtcttcttcggaatcatcctctgaagtttcgagatcttccataggtgcctgaagagttcttggcaaggttaataaatcggacacgtgtgcttggttcatgggtatttcccatcagatcagaaaagctttgttcgcacaagggcaataacaccactaggtagagaccagagctgataaactcatactcagcttgttcatttgcatgagctctatgtagttcatgaatatcaaaatgcctccaggttaagctccaacttctctttacatagttcacaggtggttacagcttctaatgaagaaccagagttaattttggcctgtaaccactgttttcatacagtcttggtggacatactgcaaacttcctgtgcacttgcatggctctatcagcaaattagatgatgatgcagctgccatttgacaaattctacataagtcaccttcttcttcttctgagtcctctaaaaggaggctctctttgtattttctgcaatctgttctggatctcttgaaggcgcactgttagttttatcacttttaccatcagctgaattccaacctgaaggaataatatctactgtgatcatgacattgtcggtcaaattactcccaagtgctggggggactgcaaaccggaataaggaaccaggaagaatccctgatattcctgtatttcttccaccttgagccgaatctgatgtagagccacctgttgtggcactgcttgatgctgcagatgcttgtggtctgttggcagcagctccaagaggatcattctgtgcttcaaggtgaaccacttcatttgattctcttctaaaaatatgagatctagatgatgtatca

SEQ ID NO: 163623 - DNA, 674 bp, Homo Sapiens
catctggaacagaatagtatgaataaggggaaacaaagaacagacctttgaggtaaggcttaacagtacctgaatcactgaaagtatagaagtcatgttcctatggaagagtagaattataccacacataggaggttccaaggagttatgttgttatacactgtatgtcaggatagaccacatttaaaatgctgaacatggcttagcagccttaaatataaaaaacaggtaaactagaaaaagtaatgatagtgatcaactcccgtcctctaaccaaaaatctgccttgtcactccgtttcaaaaacaaagtgaaatattctaaacaactgacaaatttttacataaaaacacattgaatttagattaatatcagttatcaagacacaataaatacatgatggggaagacaaagaaaataaagtgcacctttacagtgtaagagactcagaaatcacttcctaaatcggtaatatagattgcaatataaaaataactagcaaagttagattaaaaaattttcagctgaaaaattacagtttttcagtacatcagagggacaaataaccttttatttaaaggtattatatttagagacttgtatatctcaattttgtgtaggagaaaggaaagcattcttctagaaggcctaactggttaaatgtgtgagtgaat

SEQ ID NO: 163624 - DNA, 1890 bp, Homo Sapiens
tttcacatgctatcagtcgatactggtagtacttgtatgataatgcaatgtgcaaggaaattattccaactagtgaatttattaacagtaagttaacagcaaaagcaaataggcaacttcaagatcctttagtaatcatgacaggaaacatcccaacatggcttactgagctaggaaaaacctgcccatttttctttccttttgatacccggcaaatgcttttttatgtaactgcatttgatcgggaccgagcaatgcaaagattacttgataccaacccagaaatcaaccagtctgattctcaagatagcagagttgcacctagatcggatagaaaaaaacgtactgtgaaccgagaggagctgctgaaacaggcggagtctgtgatgcaggacctcggcagctcacgggccatgttagaaatccagtatgaaaatgaggttggtacaggtcttgggcctacactggagttttatgcgcttgtatctcaggaactacagagagctgacttgggtctttggagaggtgaagaagtaactcttagcaatccaaaagggagccaagaagggaccaagtatattcaaaacctccagggcctgtttgcgcttccctttggtaggacagcaaagccagctcatatcgcaaaggttaagatgaagtttcgcttcttaggaaaattaatggccaaggctatcatggatttcagattggtggaccttccccttggcttacccttttataaatggatgctacggcaagaaacttcactgacatcacacgatttgtttgacatcgacccagttgtagccagatcagtttatcacctagaagacattgtcagacagaagaaaagacttgaacaagataaatcccagaccaaagagagtctacagtatgcattagaaaccttgactatgaatggctgctcagttgaagatctaggactggatttcactctgccagggtttcccaatatcgaactgaagaaaggagggaaggatataccagtcactatccacaatttagaggagtatctaagactggttatattctgggcactaaatgaaggcgtttctaggcaatttgattcgttcagagatggatttgaatcagtcttcccactcagtcatcttcagtacttctacccggaggaactggatcagctcctttgtggcagtaaagcagacacttgggatgcaaagacactgatggaatgctgtaggcctgatcatggttatactcatgacagtcgggctgtgaagtttttgtttgagattctcagtagttttgataatgagcagcagaggttatttctccagtttgtgactggtagcccaagattgcctgttggaggattccggagtttgaatccacctttgacaattgtccgaaagacgtttgaatcaacagaaaacccagatgacttcttgccctctgtaatgacttgtgtgaactatcttaagttgccggactattcaagcattgagataatgcgtgaaaaactgttgatagcagcaagagaagggcagcagtcgttccatctttcctgatcatagcaagaaatgcagtgtctgcctgttacagcaaaagaaacaaatcatgatttcttttctaatgttatcacctgagtcaaggaaacatgttacgccttcttgttgtaggaaaaacggcttgcagattataaagagacatttggttgatattcattaatggccccatggacttaaagtgatcaggccccaaaacgttgttgtgatgaggtttctttagcaagttcttgtttaaattatcatttatttgatgagtgaagtttttaacatgctttgctgtgtgaaatttaaaaaagggatgtttttccaggctggaacaataaatgtggctgtgcagttt

SEQ ID NO: 163625 - DNA, 798 bp, Homo Sapiens
gggaaaaaggaatgtgcggcaagaggagaagactatgagaaagtgaagttgctggagatcagtgcagaagatgcagaaagatgggagaggaaaaagaagaggaaaaaccctgatctgggattttcagattatgctgctgcccagttacgccagtatcatcggttgaccaagcagatcaaacctgacatggaaacatatgagagactgagagaaaaacatggagaagagtttttcccaacatccaatagtcttcttcatggaacacatgtgccttccacagaggaaattgacaggatggtcatagatctggaaaaacagattgaaaaacgagacaaatatagccggagacgtccttataatgatgatgcagatatcgactacattaatgaaaggaatgccaaattcaacaagaaagctgaaagattctatgggaaatacacagctgaaattaaacagaatttggaaagaggaacagctgtctaatcccttcaagaactgtttatagaagcttgagaatggggtaaaaatttctgctagcaaaatcaagttctttttgaaattttatcagtaatccagaatttagtagtccatgccttctcactcagcatttagaaataaaaatgtggtttcttaaacgtatatcctttcatgtatatttccacattttttgtgacttggatataagatgtatttcttggagtgaagttggtttgtaaatctactttgaatccattccaattaaaatatttttcccaggatttaaatggaatatgggctggttaatctttgaaacatttt

SEQ ID NO: 163626 - DNA, 326 bp, Homo Sapiens
aaggaaagacaaaatccataagacagcttgataatcacagatcagattagaacacctctctctgaaaataagagacaaatcaaaagaaaaataagtaatactatgaaggctaggaataacaaatactaatcaacctaagagacataatattaacctgataacgaatatatgtactcaggaccccacataaaaagaactcacttcacagagaatggctgcacagcagccaacaaagaaagtattaacaaatttctaaatactgctaacctgcagatcatactcactaacctaaatacagtaacataagaaataatgaaataacagac

SEQ ID NO: 163627 - DNA, 1285 bp, Homo Sapiens
  misc_feature (154)..(186): n is a, c, g, or t
gcggcccaggcaatagcaggaatgatgctgggccttaattcatgttagtgttagcgagccactgccctatgtcaaaatgtgatgcacataagcaggtatcccagcatgaaaggtaatttacttggaagtaacttgggaaaagaattccttcttnnnnnnnnnnnnnnnnnnnnnnnnnnnnnnnnncacattctaaatactagagataactttacttaaattcttcattttagcagtgatgatatgcataagtgctgtaaggcttgtaactggggaaatattccacctgataatagcccagattctactgtattcccaaaaggcaatattaaggtagacagatgattagtagtatatagttacacactatttgggaattagagaacatacagaaggaatttaggggcttaaacattacgactgaatgcactttagtataaagggcacagtttgaatatttttaaatgaataccaatttaattttttagtatttacctgttaagagattatttagtctttaaattttttaggttaattttcttgctgtgatatatatgaggaatttactactttatgtcctgctctctaaactacatcctgaactcgacgtcctgaggtataatacaacagagcactttttgaggcaattgaaaaaccaacctacactcttcggtgcttagagagatctgctgtctcccaaataagcttttgtatctgccagtgaatttaccgtactccaaatgattgctttcttttctggtgatatctgtgcttctcataattactgaaagctgcaatattttagtaataccttcgggatcactgtcccccatcttccgtgttagagcaaagtgaagagtttaaaggaggaagaagaaagaactgtcttacaccacttgagctcagacctctaaaccctgtatttcccttatgatgtcccctttttgagacactaatttttaaatacttactagctctgaaatatattgatttttatcacagtattctcagggtgaaattaaaccaactataggcctttttcttgggatgattttctagtcttaaggtttggggacattataaacttgagtacatttgttgtacacagttgatattccaaatcgtatggatgggagggagaggtgtcttaagctgtaggcttttctttgtactgcattgatagagatttagctataatattttttagagatgtaaaacattctgctttcttagtcttacctagtctgaaacatttttattcaataaagattttaattaaaatttg

SEQ ID NO: 163628 - DNA, 2085 bp, Homo Sapiens
  misc_feature (389)..(434): n is a, c, g, or t
  misc_feature (664)..(664): n is a, c, g, or t
  misc_feature (2007)..(2007): n is a, c, g, or t
  misc_feature (2019)..(2019): n is a, c, g, or t
  misc_feature (2025)..(2025): n is a, c, g, or t
  misc_feature (2036)..(2036): n is a, c, g, or t
  misc_feature (2046)..(2046): n is a, c, g, or t
acagaaagcaggacataaagtagtaatcctcatatatatcacagcaagaaattacctaaaaaatgtaaagactaaataatctcttaacaggtaaatactaaaaaattaaatgggtattcatttaaaaatatacaaactgtgccctttatactaaagtgcattcagtcgtaatgtttaagcccctaaattccttctgtatgttctctaattccaaaatagtgtgtaacaatatactactaatcatctgtctaccttaatattgcctttggggaatacagtagaatctgggctattatcaggtggaatatttccccagttacaagccttacagcacttatgcatatcatcactgctaaaatgaagaatttaagtaaagttatctctagtannnnnnnnnnnnnnnnnnnnnnnnnnnnnnnnnnnnnnnnnnnnnnagaaggaattcttttccaaagttacttccaagtaaattacatttcatgctgggatacctgcttatgtgcatcacatttggacaaagggcagtggctcgctaacactaacatgaatttaaggcccagcatcattgctatttgtcactcttcatcctcatcctcatcataataccgatttctcttttatccgttcttccacagagaagctcttttgaccactttctcccctncccagagttccacatcctgggatttctgattctgagtagtgaattctttcagcaaaggtgttgtctacaaaactcgaccaattcagagacttgggttcttgtggagattgttgtttgaggaagctgttatcatcttcatcggagtctgcaccatcttctacaagattctcattctccatctccaaactatgacctaccttacttcgtcttccctgtctctcctttagattctttgttttgccaggttgtttttcccacattcccattcttcttagaagccttggcattttccacttgtttcctttctgcaactcttccacccacagactcttcactctgctctgacatgctccagcctttcctgataggtggggacacagtttttgggctcttgacagaggtgctttgaaatgaagctgctacagtgaatgggcggcttctttccttcagtgaagaagatcgtcttagcttcttcagatctagatcgacatcctcaggaacttcggccttcctgatttcgtcttcaggagcccatttgggcttcgacatttggatcccttcctccaagccacttcctgaacttccaagttcagtggggggtggccaggcgatcctcagcttcttggtttcagctggcttgtcttccttctcctgctgagaggaggccttggcttccatacttgcagccaggacacccaccttagccataggggcatctcctacccctgggctgtgaggggtctcccttgcatttgccagctgggctggtctctccgaaatctcttcgttttcatttttgcttgcccatagatccttgtgtggtctgtgcccaaagccttcatcatagttgcccttagatttaaagagttgattgaagtgaggcttacaatagattcttccatgtaaagatgcatatgttcctagactgagtttgttgttgcaataggagcaacggaagcagctgaatgtgaaacacctgctggttggccaagagacgctccattggatagactgtcttctgacattccacgcaggtctctcttgcaggtgcctgaaacttcttcattgctttgggaggagaactttcagaaagactggaggctctggaatctggacttagtggcttgggatggacaggctgttgaacctcactcttaacctgggagtcacctggggagtcatcttcggcaggggtggaacggactgccaggctattctcatttgcagaaatcttttccccttctgatgggtgatgcagacctcgggacctgggggcacattctccttttgctccattttatgaattttgatttcgcacaagggggggaagaacctaagttctnccctttggtggnctgaancaagttcaccnagtggtcttnaagtgaacaccaaagattgggacctcttgattgcattga

SEQ ID NO: 163629 - DNA, 847 bp, Homo Sapiens
  misc_feature (725)..(725): n is a, c, g, or t
ggtcctgctgaagtgacaagccacgctgcttctggagccaaagctgaccaagaagaacaaatccaccccagatctagactcaggtcacctcctgaagccctcgttcagggtcgatatccccattattaaggacggtgaggatcttaaagaccacacaacagaaagtaaaaaaatggaaaattgtctaggagaatccaggcatgaagtagaaaaatcagaaatcagtgaaaacacagatgcttcgggcaaaatagagaaatataatgttccgctgaacaggcttaagatgatgtttgagaaaggtgaaccaactcaaactaagattctccgggcccaaagccgaagtgcaagtggaaggaagatctctgaaaacagctattctctagatgacctggaaataggcccaggtcagttgtcatcttctacatttgactcggagaaaaatgagagtagacgaaatctggaacttccacgcctctcagaaacctctataaaggatcgaatggccaagtaccaggcagctgtgtccaaacaaagcagctcaaccaactatacaaatgagctgaaagccagtggtggcgaaatcaaaattcataaaatggagcaaaaggagaatgtgcccccaggtcctgaggtctgcatcacccatcaggaaggggaaaagatttctgcaaatgagaatagcctgggcagtccgttccacccctgccgaaaatgactcccgnggactcccaagttaaagagtgaagtttcaacaggcctgtcccatcccaagcccactaagtccagaattccgaagccctccaggttcttcctgaaaagttctccctccccaagcaattgaaaa

SEQ ID NO: 163630 - DNA, 877 bp, Homo Sapiens
  misc_feature (479)..(487): n is a, c, g, or t
gggagcatgttgttggtcagggtttcagaatacgcgtgatgtcactgagaatgtttgctcacagtcaataattgtctttgtggatgtgataattttggagatacacttctggtcagaactcaggtgagataatcttgcaatactccaaatgcagatactccagccacccgcaaggttccaggaaaggacaatgtcctgcgagaaaatcaggaggcctccacttcctgggccacttgagaagttcctgggcatgtcactacatgttggttgactcagccatttctcatgctgttttgtttcttgcggtggccacttaaccccaaagaatgaagggaggatccacagtgaaagtgcctgagtttctctatgagaccagatgcagtcgaaaccaaacatcttttcctttgctctatgggaacattttagggtttgttttgcacagctggtttccagactagaagattaacaagttttgggtnnnnnnnnntagaatccagtgggctgtctttttaagggggaaggaagtgtggggcttaaactgaaaggcccttttggaggggagcctattaaaggaaaaaaccaaccctgggggacattccccaagtttttcccttatttccctcccaacctggttaaaataacctcccttcctaaaaaataatttccatggaaggttttaaaatgggggataaataatattggcctttgaaaagcgtcttaaccctttttataaaccttgggaaatgggtaaatttgccagggcgattctccttttatttataagagaaactggggggtccctcctgggggaatacaccccacaaggaaaaaaataggtttggggcgcactgtttcaaaatatcctctaaaaggggga

SEQ ID NO: 163631 - DNA, 886 bp, Homo Sapiens
gggtcagctgtccgggctgctttcgcctccgcctgtggatgctgcgcctctccgaacgcaacatgaaggtgctccttgccgccgccctcatcgcggggtccgtcttcttcctgctgctgccgggaccttctgcggccgatgagaagaagaaggggcccaaagtcaccgtcaaggtgtattttgacctacgaattggagatgaagatgtaggccgggtgatctttggtctcttcggaaagactgttccaaaaacagtggataattttgtggccttagctacaggagagaaaggatttggctacaaaaacagcaaattccatcgtgtaatcaaggacttcatgatccagggcggagacttcaccaggggagatggcacaggaggaaagagcatctacggtgagcgcttccccgatgagaacttcaaactgaagcactacgggcctggctgggtgagcatggccaacgcaggcaaagacaccaacggctcccagttcttcatcacgacagtcaagacagcctggctagatggcaagcatgtggtgtttggcaaagttctagagggcatggaggtggtgcggaaggtggagagcaccaagacagacagccgggataaacccctgaaggatgtgatcatcgcagactgcggcaagatcgaggtggagaagccctttgccatcgccaaggagtagggcacagggacatctttctttgagtgaccgtctgtgcaggccctgtagtccgccacagggctctgagctgcactggccccggtgctggcatctggtggagcggacccactcccctcacattccacaggcccatggactcacttttgtaacaaactcctaccaacactgaccaataaaaaaaaatgtgggttttttac

SEQ ID NO: 163632 - DNA, 900 bp, Homo Sapiens
gggtccggcctcagctgtccgggctgctttcgcctccgcctgtggatgctgcgcctctccgaacgcaacatgaaggtgctccttgccgccgccctcatcgcggggtccgtcttcttcctgctgctgccgggaccttctgcggccgatgagaagaagaaggggcccaaagtcaccgtcaaggtgtattttgacctacgaattggagatgaagatgtaggccgggtgatctttggtctcttcggaaagactgttccaaaaacagtggataattttgtggccttagctacaggagagaaaggatttggctacaaaaacagcaaattccatcgtgtaatcaaggacttcatgatccagggcggagacttcaccaggggagatggcacaggaggaaagagcatctacggtgagcgcttccccgatgagaacttcaaactgaagcactacgggcctggctgggtgagcatggccaacgcaggcaaagacaccaacggctcccagttcttcatcacgacagtcaagacagcctggctagatggcaagcatgtggtgtttggcaaagttctagagggcatggaggtggtgcggaaggtggagagcaccaagacagacagcccgggataaacccctgaaggatgtgatcatcgcagactgcggcaagatcgaggtggagaaaccctttgccatcgccaaggagtagggcacagggacatcttttccttgaatgacccgtctgtgcaagccctgtagtccgccacagggcttctgagctgcaactggcccccgtggcttggcatcttggtggaaccggacccacctccccctcaagatttccaacagggcccatggaactcactttttgtaacaaaattcctaacaacactgaccataacaaacacaaag

SEQ ID NO: 163633 - DNA, 406 bp, Homo Sapiens
  misc_feature (309)..(309): n is a, c, g, or t
  misc_feature (379)..(379): n is a, c, g, or t
  misc_feature (389)..(389): n is a, c, g, or t
gctttcgcctccgcctgtggatgctgcgcctctccgaacgcaacatgaaggtgctccttgccgccgccctcatcgcggggtccgtcttcttcctgctgctgccgggaccttctgcggccgatgagaagaagaaggggcccaaagtcaccgtcaaggtgtattttgacctacgaattggagatgaagatgtaggccgggtgatctttggtctcttcggaaagactgttccaaaaacagtggataattttgtggccttagctacaggagagaaaggatttgggctacaaaaacagcaaattccatcgtgtnaatcaagggacttcatgatccagggcggagatttcaccagggggagatgggcacagggagggaaagagcntttacggttnagccgttttcccccgtt

SEQ ID NO: 163634 - DNA, 1035 bp, Homo Sapiens
ctgatgccgattcttgacttcacgtagtcatagtagccttggttcttgtgctcctcctggcaccaggccagctcagcattggggtacttctgcacctccttcagcaggaggtcaaaggggaatggcgacagctgctcaatccttgtgatggccacctgccccaccatgtcgcgtgctttgcgctcccgggtgaggtcataatacactttgccggtgcagaagagaagccttttgacattttctgggttctgagctgcagggccatcttctgggatcacccgctggaagtgggttcctggaagcatctcatcaaagctggatctggcctcggggtggcgcaacagggatttgggggtgaagataattaacggcttccggaatggcagcaggatctggcgtcgtagcacgtggaagaagttgccaggagtggagcagttgacaacaacccaattgcagtcatatagctgattgatgtcgaagttggcttctttaaggtctggcaggacatctgggtcatcgtggcacatctgcaagaaccgctctgggcgggcggaggaatgttctggacccatgccctccatgccatggggcagcagcaacacgatgccattctgccgcacccacttggcttgtcccgggcagatgaactggtcgatgatacactgggccgtgttgtggaagtcaccaaattgggcttcccagaggaccagggcattaggactggccatggcgaagcccagctcaaagcccagcacgccgtactcagacagtgagctgttgcacacagtatagggggcctgattgggccagagatggttcatggggatgcaggttctcttgtccacattctggtcatggagcacatggtggcggtggctgaatgtgccccgctccacgtcctggccgctcagccgaatgtggatgccctccttcaggagcgagccaaacgccatgtactccgctagagcccagtccacagtccggttcttcaccatttccccacgagtcttcaagatccggctcatcgctccatgt

SEQ ID NO: 163635 - DNA, 540 bp, Homo Sapiens
ggctcggtaccgtgtgtcgagtagcccaagcttggtgcagggacaacggcgactatccttattttgaaacaagtgcaaaagatgccacaaatgtggcagcagcctttgaggaagcggttcgaagagttcttgctaccgaggataggtcagatcatttgattcagacagacacagtcaatcttcaccgaaagcccaagcctagctcatcttgctgttgattgttagattgttgatgcattctaaccaactcacacatatacacaaaatcaacatagggatggagaacgagaaatagcgtttacagcagtgtatcatctactaataaaattaaactaatgtcgctgcttcattagttggtgggagaagggacacatccactcttggaggaatatatttactcaataatggcaccttacatttataaattgtaacagttgtctaataacgtttctttaatttaaatatgtaagttgcagagctaataaatgaaatgaccaagactttaattataataaaaataagaaacttgactattctaaa

SEQ ID NO: 163636 - DNA, 1510 bp, Homo Sapiens
tgggaccagcctgcctacaaggaggaggtggtgcgaagaggccatcgtggagctggtggagaatgggaagaaggtgaaggtgaacaaggatgacatccagaagatgaacccgcccaagttctccaaggtggaggacatggcagagctcacgtgcctcaacgaagcctcggtgctgcacaacctcaaggagcgttactactcagggctcatctacacctattcaggcctgttctgtgtggtcatcaatccttacaagaacctgcccatctactctgaagagattgtggaaatgtacaagggcaagaagaggcacgagatgccccctcacatctatgccatcacagacaccgcctacaggagtatgatgcaagaccgagaagatcaatccatcttgtgcactggtgaatctggagctggcaagacggagaacaccaagaaggtcatccagtatctggcgtacgtggcgtcctcgcacaagagcaagaaggaccagggcgagctggagcggcagctgctgcaggccaaccccatcctggaggccttcgggaacgccaagaccgtgaagaatgacaactcctcccgcttcggcaaattcattcgcatcaactttgatgtcaatggctacattgttggagccaacattgagacttatcttttggagaaatctcgtgctatccgccaagccaaggaagaacggaccttccacatcttctattatctcctgtctggggctggagagcacctgaagaccgatctcctgttggagccgtacaacaaataccgcttcctgtccaatggacacgtcaccatccccgggcagcaggacaaggacatgttccaggagaccatggaggccatgaggattatgggcatcccagaagaggagcaaacgggcctgctgcgggtcatctcaggggttcttcagctcggcaacatcgtcttcaagaaggagcggaacactgaccaggcgtccatgcccgacaacacagctgcccaaaaggtgtcccatctcttgggtatcaatgtgaccgatttcaccagaggaatcctcaccccgcgcatcaaggtgggacgggattacgtccagaaggcgcagactaaagagcaggctgactttgccatcgaggccttggccaaggcgacctatgagcggatgttccgctggctggtgctgcgcatcaacaaggctctggacaagaccaagaggcagggcgcctccttcatcgggatcctggacattgccggcttcgagatctttgatctgaactcgtttgagcagctgtgcatcaattacaccaatgagaagctgcagcagctcttcaaccacaccatgttcatcctggagcaggaggagtaccagcgcgagggcatcgagtggaacttcatcgactttggcctcgacctgcaaccctgcatcgacctcattgagaagccagcaggccccgggcattctggcctgctgacgaggagtgctggtcacaaagccacctacaagagttcgtgagaagtg

SEQ ID NO: 163637 - DNA, 1017 bp, Homo Sapiens
  misc_feature (787)..(797): n is a, c, g, or t
gcgagcaggcgctgcgccgccgccgcctgctcctgctgctcggcgccggcggcccgctcctgtacggcctctactgcctcggcagctacttgggcgtgcaggtgctgctggtgcacgctgccacgctcatctgccgcgggctggactacttcagcagcctgtggatctggacgttggtggttggctatgtgttgactgtttcattcaagtggaatgcaagcactgaacgctacttgagagcagtttcaattcctgtctggattatattgctttctcatttagcatacctggctggctcatggagaattccagtattcctggttattcatttcctgatgtctgtgggtaccctctatgaaaaacagaatggaaaagagtcttctggggcatagttaccagggcaggctatctccatggcagcttctactctggcaaacttggccatctctatcacagggtatgaatcaagcagtgaagaatagccctcccctcagcctgcagaagcagtggacagggggagaatccgctccaacgttgatccacctccccttgaccctcctcccccttcatccacttccccttcacctattctgggcaaacgaaagcctgcaaatacgaaccgtttctctaaaagaaagaacactatggaccctccaccttggtgtctctaagtttgggcccacttgcccccattgcaaaacctgggttgaaacctggcgggtttgtcgccgcttggcccgccactggccccatccggacgccctgggattattccaaaaatctccgnnnnnnnnnnnttttgtaaaattttgtgaattttccgaaaacaaaaatagccccaccattgtgtgggcgggggggcgcttctcaaacaaaagtgtttgccccacatgggagccccacgcgggtgagcttatatcccctccccttcccggaccatttatgtcgaggccctcgcgacaaaacattcttttgggcgtacgagtcgcgactacccagcgttgtccactcactccc

SEQ ID NO: 163638 - DNA, 1476 bp, Homo Sapiens
  misc_feature (30)..(30): n is a, c, g, or t
  misc_feature (53)..(53): n is a, c, g, or t
  misc_feature (78)..(78): n is a, c, g, or t
  misc_feature (123)..(123): n is a, c, g, or t
  misc_feature (654)..(671): n is a, c, g, or t
  misc_feature (723)..(723): n is a, c, g, or t
  misc_feature (906)..(906): n is a, c, g, or t
  misc_feature (1178)..(1178): n is a, c, g, or t
  misc_feature (1294)..(1294): n is a, c, g, or t
  misc_feature (1338)..(1338): n is a, c, g, or t
  misc_feature (1459)..(1459): n is a, c, g, or t
cagcaaaaactctgtggtggagaacgccancctgcgattcgtcttccttaatnaaccaggacctcaattgccctcatnagggctgaggctgccaagatcacaccaaagtgagaagtggtggcnaggactcgtgggccctctccggcctgtttcccctgccactccagcccccttgagctgggaactcaggctccctggaaaaacctgggcagtgggaggctcagctgcgggccattgatttgagcctttgagggaggatagggctggcctttgtgaagccagcagaggctgagaacctcaggcttccctagatccagagcccctccccatcttcctctctctaaaaacaaccctaccccccattgccaccttcactcctgtgtctccagctgattagcctcagactcttcttttattgtttttcttttgtaaataaaaacccaccaggttcccgcgtggcctgcaaggacccccgcgcccggccccaggccttcgcgcccgcgcttccgtaaacgatcacgcccccgcacgcaaaggaacctcgcgcggcgacggatgccggccagttcgcgccgccattccccctcccccctgcgtatgcgatccactcccggatgggggagaaccgtacctcctccgcttgcgccctgccgnnnnnnnnnnnnnnnnnntcctatccgtgaagtcgttgttgccccgcgacgaactccctcggctgtgggngggcggcgccgcgctcgcggcgctcgctcgcacgcgccaggtgccgacgggggagataaggtgcccaacacccgaacctaatcacacctcgccgcttcttttcgcgtatgtagcagcgcgatacgttcgccggccgacgcgtcagcgctcgtcgtccaactccggacgagctcgtatatgggngagaaaaggcgcactacacggcacccgggcccgcggaagagtagcgggtacgacggacacatacaatgtcacgcgcgcccgcgcgtatcgcgcccgcgcatcatgaacgcaccgtgagacgtggagtccgccgtggtggcgcccgcctctttgacttcgcccccctccgtcgtccgcgagcgtgctgactccttagaggctgacaggcgcgcgcgcgccgctctctcgtgcggggcctgggacctcctccccctcccacgtgtattcggctnagacgctccgtgccccactagaatcgtgcaggatttatagttcggtgtggaatatgccggagcgcccagctctcctccgccgcgacaggtgatcagcgctgatcgacgtcgcgcgnatatccgccaacctcgaggtaaccagtcgcgggtgaccggacgncgaagtcattccgtgcgtgtgcgtgcggccccgcgcgcacctcggaacatctcatcagcttcgatcacaccctcatcgcccgcacccccgacagacatgagagtgggtggtctaaacccanccgccgcgtgacacccg

SEQ ID NO: 163639 - DNA, 458 bp, Homo Sapiens
gagggaccagcaggctgggcccagataagatgtcatgggagatggtgccaagctagtccgggatgcctttgccctggccaaggagaaagcgccctctatcatcttcattgatgagttggatgccatcggcaccaagcgctttgacagtgagaaggctggggaccgggaggtgcagaggacaatgctggagcttctgaaccagctggatggcttccagcccaacacccaagttaaggtaattgcagccacaaacagggtggacatcctggaccccgccctcctccgctcgggccgccttgaccgcaagatagagttcccgatgcccaatgaggaggcccgggccagaatcatgcagatccactcccgaaagatgaatgtcagtcctgacgtgaactacgaggagctggcccgctgcacagatgacatcttaatctggggcccaagcctgctggtccggc

SEQ ID NO: 163640 - DNA, 1159 bp, Homo Sapiens
cttcgtgtgggttgaggccgagcaagatggaattggggaggaggtgctcaagatgtccacggaggagatcatccagcgcacacggctgctggacagtgagatcaagatcatgaagagtgaagtgttgagagtcacccatgagctccaagccatgaaggacaagataaaagagaacagtgagaaaatcaaagtgaacaagaccctgccgtaccttgtctccaacgtcatcgagctcctggatgttgatcctaatgaccaagaggaggatggtgccaatattgacctggactcccagaggaagggcaagtgtgctgtgatcaaaacctctacacgacagacgtacttccttcctgtgattgggttggtggatgctgaaaagctaaagccaggagacctggtgggtgtgaacaaagactcctatctgatcctggagacgctgcccacagagtatgactcgcgggtgaaggccatggaggtagacgagaggcccacggagcaatacagtgacattgggggtttggacaagcagatccaggagctggtggaggccattgtcttgccaatgaaccacaaggagaagtttgagaacttggggatccaacctccaaaaggggtgctgatgtatgggcccccagggacggggaagaccctcctgtgcccgggcctgtgccgcacagactaaggccaccttcctaaagctggctggcccccagctggtgcagatgttcattggagatgggtgccaaagctagtccgggatgcctttgccctggccaaggagaaagcgccctctatcatcttcattgatgagttggatgccatcggcaccaagcgctttgacagtgagaaggctggggaccgggaggtgcagaggacaatgctggagcttctgaaccagctggatggcttccagcccaacacccaagttaaggtaattgcagccacaaacaggggtggacatccctggaccccgcccttcctccgctcgggggcgccttgacccgcagaataaaattccccgatgccccaatgaaggaagccccgggcccaaaatcatgccagattccacttccggaaagaaaggaattgtccattccctggaaggggaaacttaccgaaggagcctgggccccgcttggcacaagaatggactttccaa

SEQ ID NO: 163641 - DNA, 1203 bp, Homo Sapiens
  misc_feature (938)..(948): n is a, c, g, or t
  misc_feature (1063)..(1073): n is a, c, g, or t
  misc_feature (1075)..(1075): n is a, c, g, or t
  misc_feature (1077)..(1077): n is a, c, g, or t
agatccagccagttgtgcaggacattgtctgacaaatgaccccaaggagtagtttgagaacttggggatcaaccttcaaaacggggtgatgatgtatgggcacccagggacgaggaagaccctcctggcacgggccttgtgccgcacagactaaggccaccttacctaaagatggctggcccccagctggtgcagatgttcattgaagatggagacaagctagtccgggatgcctttgccctggccaaggagaaagcgccctctatcatcttcattgatgagttggatgccatcggcaccaagcgctttgacagtgagaaggctggggaccgggaggtgcagaggacaatgctggagcttctgaaccagctggatggcttccagcccaacacccaagttaaggtaattacagccacaaacagggtggacatcctggaccccgccctcctccgctcgggccgccttgaccgcaagatagagttcccgatgcccaatgaggaggcccgggccagaatcatgcagatccactcccgaaagatgaatgtcagtcctgacgtgaactacgaggagctggcccgctgcacagatgacttcaatggggcccagtgcaaggctgtgtgtgtggaggcgggcatgatcgcactgcgcaggggtgccacggagctcacccacgaggactacatggaaggcatcctggaggtgcaggccaagaagaaagccaacctacaatactacgcctagggcacacaggccagccccagtctcccggctgaagtgcgcaataaaagatggtttaggggccaaacggccgccgcgccttctccgcgccctgatgccgccgatccgccccttccgctgtaaaaaccgcggggtctttcccccccttgagggcgggggaccgtttgttcaacccccctttccgcaaataaacggtaagnnnnnnnnnnnaatttcgactctttttttcgcccctacataatcgcgtccctcccgcccccccacgtcccttatctctccatccccgggccgcgtgaattatgggcgggcgttttctttcctctgnnnnnnnnnnngngntttcccgctggagtttggtttagccctaaggcgtctgtttaggggggtaggcgctgcgccctcccccaagccgcgttaaggatttcacttcgcccccgcccttacaacatcgttctcgccgctcga

SEQ ID NO: 163642 - DNA, 983 bp, Homo Sapiens
  misc_feature (752)..(752): n is a, c, g, or t
ttggtggatgctgaaaagctaaagccaggagacctggtgggtgtgaacaaagactcctatctgatcctggagacgctgcccacagagtatgactcgcgggtgaaggccatggaggtagacgagaggcccacggagcaatacagtgacattgggggttaggacaagcagatccaggagctggtggaggccattgtcttgccaatgaaccacaaggagaagtttgagaacttggggatccaacctccaaaaggggtgctgatgtatgggcccccagggtacggggaagaccctcctggcccgggcctgtgccgcacagactaaggccaccttcctaaagctggctggcccccagctggtgcagatgttcattggagatggtgccaagctagtccgggatgcctttgccctggccaaggagaaagcgccctctatcatcttcattgatgagttggatgccatcggcaccaagcgctttgacagtgagaaggctggggaccgggaggtgcagaggacaatgctggagcttctgaaccagctggatggcttccagcccaacacccaagttaaggtaattgcagccacaaacagggtggacatcctggaccccgccctcctccgctcgggccgccttgaccgcaagatagagttcccgatgcccaatgaggaggcccgggccagaatcatgccgatccactccccaaagaatgaatggtcagtccctgaacgtgaactaacgaagaagctgggtccgnctggcaccgaatgactttcaatgagggcccactccgcccagggtttgtgtggcggccgcaagccctccctttgaatcatcacattgcaatacagggggtgggcacgaggcagcctctcccgcccccagcgagtggggcctactattttggagagcgggtaatcactactgcgcatcggcgggccccaccggctcccccgttgtacacgatcacagcccgcctgttaatctt

SEQ ID NO: 163643 - DNA, 916 bp, Homo Sapiens
  misc_feature (799)..(799): n is a, c, g, or t
  misc_feature (811)..(811): n is a, c, g, or t
  misc_feature (841)..(841): n is a, c, g, or t
  misc_feature (864)..(864): n is a, c, g, or t
  misc_feature (874)..(874): n is a, c, g, or t
ggcctacacgacagacgtacttccttcctgtgattgggttggtggatgctgaaaagctaaagccaggagacctggtgggtgtgaacaaagactcctatctgatcctggagacgctgcccacagagtatgactcgcgggtgaaggccatggaggtagacgagaggcccacggagcaatacagtgacattgggggtttggacaagcagatccaggagctggtggaggccattgtcttgccaatgaaccacaaggagaagtttgagaacttggggatccaacctccaaaaggggtgctgatgtatgggcccccagggacggggaagaccctcctggcccgggcctgtgccgcacagactaaggccaccttcctaaagctggctggcccccagctggtgcagatgttcattggagatggtgccaagctagtccgggatgcctttgccctggccaaggagaaagcgccctctatcatcttcattgatgagttggatgccatcggcaccaagcgctttgacagtgagaaggctggggaccgggaggtgcagaggacaatgctggagcttctgaaccagctggatggcttccagcccaacacccaagttaaggtaattgcagccacaaacagggtggacatcctggaacccgccctcctccgctcgggccgccttgaccgcaagatagagttcccgatgcccaatgaggaggccccgggccagaatcatgcagatccactcccgaaagatgaatgtcagtcctgacgtgaactacgagggagctggcccgctgcacagatgacttncatggggcccantgcaaggggctgtgtgtgtggaagggcggncattgatcgcactggcgcagggngtgccacggnagcttcaccccacgaggaactacaatggaagggcatccctgg

SEQ ID NO: 163644 - DNA, 997 bp, Homo Sapiens
  misc_feature (19)..(19): n is a, c, g, or t
  misc_feature (722)..(722): n is a, c, g, or t
  misc_feature (760)..(760): n is a, c, g, or t
cgtctaggtacgagcctgngtggcgaattggcacgagggttgatcctaatgaccaagaggaggatggtgccaatattgacctggactcccagaggaagggcaagtgtgctggtgatcaaaacctctacacgacagacgtacttccttcctgtgattgggttggtggatgctgaaaagctaaagccaggagacctggtgggtgtgaacaaagactcctatctgatcctggagacgctgcccacagagtatgactcgcgggtgaaggccatggaggtagacgagaggcccacggagcaatacagtgacattgggggtttggacaagcagatccaggagctggtggaggccattgtcttgccaatgaaccacaaggagaagtttgagaacttggggatccaacctccaaaaggggtgctgatgtatgggcccccaggcacggggaagaccctcctggcccgggcctgtgccgcacagactaaggccaccttcctaaagctggctggcccccagctggtgcagatgttcattggagatggtgccaagctagtccgggatgcctttgccctggccaaggagaaagcgccctctatcatcttcattgatgagttggatgccatcggcaccaagcgctttgacagtgagaaggctggggaccgggaggtgcagaggacaatgctggagcttctgaaccagctggatggcttccagcccaacacccaagnttaaggtaattgcagccacaaacaggggtggacatccntggacccccgccctcctccgctcggggccgcctttgaccgccaagattagagttccccgatgccccaattgaggaagccccggggcccagaaatccatgccagaatccacctcccccgaaaagaatggaagtgtccgttccctggaccgtggaaacttaccaaaggaaccttggggcccccgcctggcaacagaaatgaaactttccaaagtggggggccccccaaggtgccaaagg

SEQ ID NO: 163645 - DNA, 534 bp, Homo Sapiens
ccgactcggtgacctataaccccttgttataagcagctgtacggtccggaattcccgggatatcgggaggtgcagaggacaatgctggagcttctgaaccagctggaaggcttccagcccaacacccaagttaaggtaattgcagccacaaacagggtggacatcctggaccccgccctcctccgctcgggccgccttgaccgcaagatagagttcccgatgcccaatgaggaggcccgggccagaatcatgcagatccactcccgaaagatgaatgtcagtcctgacgtgaactacgaggagctggcccgctgcacagatgacttcaatggggcccagtgcaaggctgtgtgtgtggaggcgggcatgatcgcactgcgcaggggtgccacggagctcacccacgaggactacatggaaggcatcctggaggtgcaggccaagaagaaagccaacctacaatactacgcctagggcacacaggccagccccagtctcacggctgaagtgcgcaataaaagatggtttagggtc

SEQ ID NO: 163646 - DNA, 827 bp, Homo Sapiens
aggccatggaggtagacgagaggcccacggagcaatacagtgacattgggggtttggacaagcagatccaggagctggtggaggccattgtcttgccaatgaaccacaaggagaagtttgagaacttggggatccaacctccaaaaggggtgctgatgtatgggcccccagggacggggaagaccctcctggcccgggcctgtgccgcacagactaaggccaccttcctaaagctggctggcccccagctggtgcagatgttcattggagatggtgccaagctagtccgggatgcctttgccctggccaaggagaaagcgccctctatcatcttcattgatgagttggatgccatcggcaccaagcgctttgacagtgagaaggctggggaccgggaggtgcagaggacaatgctggagcttctgaaccagctggatggcttccagcccaacacccaagttaaggtaattgcagccacaaacagggtggacatcctggaccccgccctcctccgctcgggccgccttgaccgcaagatagagttcccgatgcccaatgaggaggcccgggccagaatcatgcagatccactcccgaaagatgaatgtcagtcctgacgtgaactacgaggagctggcccgctgcacagatgacttcaatggggcccagtgcaacgcctgtgtgtgtgcgaggcgcggcatgatccgcactgcgccagggcgtgccacggagctcacccacgaggactacatggaacggcatcctggcaggtgcaggccaaggaagcaaagccaaatctacaatactacgcctagggccacacaggcc

SEQ ID NO: 163647 - DNA, 1399 bp, Homo Sapiens
gttatcctgtacaggaggagctggtcgccgccgcggcgcctggaattgtgggagttgtgtctgccactcggctgccggaggccgaaggtccctgactatggctccccagagcctgccttcatctaggatggctcctctgggcatgctgcttgggctgctgatggccgcctgcttcaccttctgcctcagtcatcagaacctgaaggagtttgccctgaccaacccagagaagagcagcaccaaagaaacggagagaaaagaaaccaaagccgaggaggagctggatgccgaagtcctggaggtgttccacccgacgcatgagtggcaggcccttcagccagggcaggctgtccctgcaggatcccacgtacggctgaatcttcagactggggaaagagaggcaaaactccaatatgaggacaagttccgaaataatttgaaaggcaaaaggctggatatcaacaccaacacctacacatctcaggatctcaagagtgcactggcaaaattcaaggagggggcagagatggagagttcaaaggaagacaaggcaaggcaggctgaggtaaagcggctcttccgccccattgaggaactgaagaaagactttgatgagctgaatgttgtcattgagactgacatgcagatcatggtacggctgatcaacaagttcaatagttccagctccagttttggaagagaagattgctgcgctctttgatcttgaatattatgtccatcagatggacaatgcgcaggacctgctttcctttggtggtcttcaagtggtgatcaatgggctgaacagcacagagcccctcgtgaaggagtatgctgcgtttgtgctgggcgctgccttttccagcaaccccaaggtccaggtggaggccatcgaagggggagccctgcagaagctgctggtcatcctggccacggagcagccgctcactgcaaagaagaaggtcctgtttgcactgtgctccctgctgcgccacttcccctatgcccagcggcagttcctgaagctcggggggctgcaggtcctgaggaccctggtgcaggagaagggcacggaggtgctcgccgtgcgcgtggtcacactgctctacgacctggtcacggagaagatgttcgccgaggaggagggctgagctgacccaggagatgtccccagagaagctgcagcagtatcgccaggtacaccctcctgccaggccctgtgggaaacagggctggttgcgagatcaccggccccccctccctgggcgctgcccggagcatgaatgccccgtggagaaaggtggcctgccaaacacctggggccgttccctccctggaccaaccctggcccgggaacccggcttaccggttccggggaccccccccggcgttcggggct

SEQ ID NO: 163648 - DNA, 442 bp, Homo Sapiens
  misc_feature (30)..(30): n is a, c, g, or t
  misc_feature (40)..(40): n is a, c, g, or t
  misc_feature (173)..(196): n is a, c, g, or t
  misc_feature (319)..(358): n is a, c, g, or t
aaaccaaaaaccttaacccttttttaacantaccccctgnccttaaacatattttaattcccccatataacagtgtgcccctaaacaacccattcccttttttcctagtaaatgcacaatagcaacactagttttccctttttaaggcacgtatgtcaactaagttgaagggnnnnnnnnnnnnnnnnnnnnnnnnttaaactgaaattttaaacagacaaaatggcttccctatagaacagatgaaatatagcagttaacaactctgcctttacatatgccatttcattttataaccaaggaatgataacagcatggnnnnnnnnnnnnnnnnnnnnnnnnnnnnnnnnnnnnnnnntcaaactctggtccccacttttctgaacagtcaaataggtgatgacattgaacaatgtgattcacccccaatcttcatcttccc

SEQ ID NO: 163649 - DNA, 403 bp, Homo Sapiens
caagcgtgcaaagcaaaggtcgaaggaagaatataacacacactccttctacaaaagctgctgtacctctcatcaggtcccagaaaattgacgtagctcatgtgacgtcaaaagtaaatactggattaatgacatcaaaaaaagatagtgcttctgagtcaacactttcattgcctccgggtgaagaacttaaaactgtgacagagaaagatgttgccctgcttggatctgtcagcagctgctcctctacatcttctttggaacacagacagagctaccccaagaaacagaatgcaatcagcagtaacaagaagacaatgagccaaagcccttccctttcatccagagccgtgctggtttgattcctcagccacatctacagccaatatacccgttgcgaggg

SEQ ID NO: 163650 - DNA, 1187 bp, Homo Sapiens
gtgaaaattaacgagcttaagagtgtgcagaatgattcacaagcaattgctgaggttctcaaccagcttaaagatatgcttgccaacttcagaggttctgaaaagtactgctatttacagaatgaagtatttggactatttcagaaactggaaaatatcaatggtgttacagatggctacttaaatagcttatgcacagtaagggcactgctccaggctattctccaaacagaagacatgttaaaggtttatgaagccaggctcactgaggaggaaactgtctgcctggacctggataaagtggaagcttaccgctgtggactgaagaaaataaaaaatgacttgaacttgaagaagtcgttgttggccactatgaagacagaactacagaaagcccagcagatccactctcagagttcacagcagtatccactttatgatctggacttgggcaagttcggtgaaaaagtcacacagctgacagaccgctggcaaaggatagataaacagatcgactttagattatgggacctggagaaacaaatcaagcaattgaggaattatcgtgataactatcaggctttctgcaagtggctctatgatgctaaacgccgccaggattccttagaatccatgaaatttggagattccaacacagtcatgcggtttttgaatgagcagaagaacttgcacagtgaaatatctggcaaacgagacaaatcagaggaagtacaaaaaattgctgaactttgcgccaattcaattaaggattatgagctccagctggcctcatacacctcaggacaggaaactctgctgaacatacctatcaagaggaccatgattcagtccccttctggggtgattctgcaagaggctgcagatgttcatgctcggtacattgaactacttacaagatctggagactattacaggttcttaagtgagatgctgaagagtttggaagatctgaagctgaaaaataccaagatcgaagttttggaagaggagctcagactggcccgagatgccaactcggaaaactgtaataagaacaaattcctggatcagaacctgcagaaataccaggcagagtgttcccagttcaaagcgaagcttgcgagcctggaggagctgaagagacaggctgagctggatgggaagtcggctaagcaaaatctagacaa

SEQ ID NO: 163651 - DNA, 928 bp, Homo Sapiens
  misc_feature (813)..(821): n is a, c, g, or t
tagaggatcccgcgtagtccgtacaagatatgagagccattatgacaaaatatgaaggcgaaatttaaggacaattgagtcacgcacaactcaacatggagcctaactgattatcagctcagatcccgcatatcttgagtttacaaaagctctttcaggtccccatttatactttacgtgagtgcgaatgatttcagcaaaaccccaacttaactaacaagaatgggtaggtatgtctacgtttcattaacaaatttttattatttttattctattatatgagatccttttatattatcatctcacttttaaacaaaattaactggaaaaatattacatggaactgtcatagttaggttttgcagcatcttacatgtcttgtatcaatggcaggagaaaaatatgataaaaacaatcagtgctgtgaaaaacaactttcttctagagtcctcttactttttattcttctttatcatttgtgggtttttcccccttggctctgatcactttaacttcaagcttatgtaacgactgttataaaactgcatatttaaattatttgaattatatgaaataattgttcagctatctgggcagctgttaatgtaaacctgagagtaataacactactcttttatctacctggaatacttttctgcataaaatttatctttgtaagctaactctattaatcaggtttcttctagcctctgcaacctacttcagttagaattgtctaatactgctctattaatcaggtttctagcctctacaacctacttcagttaaaattgtctaatacagcaatatttnnnnnnnnncactgcaattgtcaaggatggaaaatgtgtgatttgtgtaaacaatttttaccaactttacattttcctacagataaatgtgaatttgataagaagtctacgctatg

SEQ ID NO: 163652 - DNA, 616 bp, Homo Sapiens
attcccgtatttattaaagacatgagacagccttagaaataaaagcttttcaattaaaaaattacttgttaggtggaaactgatcttagaaaaacatatccaacataggaaaagggccatgttttctgatatgaccctacactgctattcttcaggcaggaggattggtactgctggccttcagctagccaggtgcctgctgggagatgcttttcctttagaggcatgggtttacgctaattcatttataatcactcaggcttaggaccagagacacacattgataaaacagtcagagtcaaaatgagaaatatagtctatggcaccaaaagactgtcttttcttgtgaaaagtttatagaactgtgtcaatcaaacagcaagtatattttcaataaaatttactcatcaccaaggggtgacacaatgaccaagtgtctgtccaaaaaataatgctgtgacatacatttaattcctagtgaaaaaaggttgcagaagcagaaactcaggtggtaactatctattacttaccttttggaaattagaactagttatctatttctgccagtgtggttgatcagaaaactatggaaaatcttcctcagaaaattaacaat

SEQ ID NO: 163653 - DNA, 515 bp, Homo Sapiens
agtccgtacagacttacaaagaaataggtggactggaaagtgagcctgctatcaaaggagattaatgattttgtgatcccaagcaactatggagtgtgaagttgcatttaagagctccttagaaggaaacaaattatcaactttaagttcttaggaacgacatttttgaatcaaaatttaaaacaatcttcacaaaatgcaaaatagcggctaccctaaaatgtcctgtcggtacaacgcttcccctgcgagagtgaattaactcccctcctcccacctcctccagagctaccctgatggctaagtttcgtttctcttttaatgagaagagagttcatgagtctccgttggacacaacttaattctatcagccacagctgatattttattttcattggaagaattctcagataaagaaaagtgatacattggggaaggaggaaaggtagttaaattaatatttgattttgtagtgaaaaggctcaaaggaaacacagaaggcttgagccggtgtc

SEQ ID NO: 163654 - DNA, 697 bp, Homo Sapiens
aatccgtacacactactattatctacagctaccctggttaataatttataagatgtctaagatgtctaccttaactattgatagcacttttcacagtataccaatttccatttttactttcttctccccttgtcacttaaatgtattactttaactatctgataggaaattttattttacaaattccttgtataattactgaagaggtgattttaaaacataaatggatgcacctgttaatcctgagatggtgatgacagcaaaactaaaaatcagatgattatttttactcaaatttctgctttagttttttttggaagatggctggcagaatagaaagaacagccaagatcatcagaataaatattgagttccaggaaacagcttctcctgctgttgtaagttgatacagtgttgttcctgccttaatggctacaaaagaaggaggtgcgacacctagaaaagtaccaataaaaaaaactttcaatggcacgtttatcacaggagatgtgatattaataaaccaattaggcagaaatggtgttattctcaaaaatataatgtagttaatgagatgttctctatgacgttcaacctgctgtgaccattttactgctttctctgttaggtatttgtatacaactggtctcccaactaaataggaaagcatataacagaaagaggcaccaagtccaga

SEQ ID NO: 163655 - DNA, 647 bp, Homo Sapiens
gccaccgtggcttcccaagtaagcatggccgataggcagaccagcagaaagcagaataagaacaacaaagatcgtgtaaccatgtagttcatcaagtaatcaattttagttcttttaaatctggttttcccactattcttcattattttagtgtcagcacctgcaaaaatgactaagccgtggcagaaatcggtgttcctaattacacagccacgtaacaaaattttatcagcatccaaaggaaaacttgtgtttctccaaaatagtgttcctgtaaacttatctagtcggttattgggttcttcacattcaataaaaccatcaaatgtagccaatgtatcttctctttggaggtactggtctgtgatttcaagtgacatcttaaattttaaattggtttctccgtccagttctgctgtttccacatagcagaggctgttaggctcagagctagacagcaggagaatgtcagctggaacaaaatcattttttttcagacgaatgacgtctccaacttgaatttctttccacttagcaactttgaacctgccatccttaatgacttcacacgtcctattgttgatttccttatccattttatggcgagccacatcgtccaccaggtctttgattgcagtgacgcccaa

SEQ ID NO: 163656 - DNA, 1059 bp, Homo Sapiens
cctaagaagcgtacagctgtgttctggtacaacctcttgcggagcggcgaaggtgactaccgaacaagacatgctgcctgccctgtgctcgtgggctgcaagtgggtctccaataagtggttccatgaacgaggacaggagttcttgagaccttgtggatcaacagaagttgactgacatccttttctgtccttccccttcctggtccttcagcccatgtcaacgtgacagacacctttgtatgttcctttgtatgttcctatcaggctgatttttggagaaatgaatgtttgtctggagcagagggagaccatactagggcgactcctgtgtgactgaagtcccagcccttccattcagcctgtgccatccctggccccaaggctaggatcaaagtggctgcagcagagttagctgtctagcgcctagcaaggtgcctttgtacctcaggtgttttaggtgtgagatgtttcagtgaaccaaagttctgataccttgtttacatgtttgtttttatggcatttctatctattgtggctttaccaaaaaataaaatgtccctaccagaagccttaaagagccttacttggagtatttttaagactggaagcttttaccaggttcatcatttcctatgcatcaccttcatgcaggcagagtctggataatgaatgctttagcagcaaaaaagcatcttgggtcttggatttcagacctggtttcaacacttgtgttccctctaagtgtcagtgtccttttctggaaagtagggtaaatagtttctctttgtctcccagagaacatagcacatgtgttcatgattgtaatgctgttataatgtgtacttcatttttaaattttgagataagaattgttcatgatacacagatgtatacttaaaaaaatatgaaggtgagcaggagcacctgtgtcaacaccaagttagaaaagagaacgttttcaagtcagtacctcaggagccccttgggacccctcctagatcacatctccttcactgcccccagcactttggagataaatcattgtctcatgatgttt

SEQ ID NO: 163657 - DNA, 1602 bp, Homo Sapiens
gggctctgatgcaacgccggaatcgcggaaaccgccggtgcacgttggagtcataagacggcgtcggtgttgcagtctgtgtccttggaggtgaccagggccactgcaggcatggtgctagcagagctgtacgtctctgaccgagagggaagcgatgccacgggagatggaaccaaggagaaaccatttaaaacaggtctaaaggctttgatgacagtagggaaagaaccatttcctaccatttacgtagattcacaaaaagaaaatgagaggtggaatgttatttctaaatcacagttgaagaacattaaaaagatgtggcatagggaacaaatgaagagtgaatcccgggaaaagaaagaggcagaagatagtttacgaagagaaaagaacctggaagaagcaaagaagattaccattaaaaatgatccaagtctcccagagccaaaatgtgtgaagattggtgcgttagaaggatatagaggccaaagagtaaaggtgtttggctgggtccacaggctgcgcaggcaaggaaagaatttaatgtttctggtgttgcgagatggtacaggttatcttcagtgtgtcttggcggatgagttgtgtcagtgctacaatggagttctcttgtccacggagagcagtgttgcagtgtatggaatgctaaatcttaccccaaagggcaagcaggctccaggtggccatgagctgagttgtgacttctgggaactaattgggttgggcccctgctggaggagctgacaaccctgatcaatgaggagtctgacgttgatgtccagctcaacaacagacacatgatgatccgaggagaaaacatgtccaaaatcctaaaagcacgatccatggtcaccaggtgctttagagatcacttctttgatagggggtactatgaagttactcctccaacattagtgcaaacacaagtagaaggtggtgccacactcttcaagcttgactattttggggaagaggcatttttgactcaatcctctcagttgtacttggagacctgcctcccagccctgggagatgttttttgtattgctcagatcataccgggcagagcagtccagaacactgaaggcaccgtggctgagtacactcacgtggaagctgagtgtcctttcctgacttttgacgacctcctgaaccggttggaggacttggtttgtgatgtggtagatcgaatattgaagtcacctgcagggagcatagtgcatgagctcaacccgaactttcagccccccaaacggcctttcaaacggatgaactattcagatgctatcgtttggctaaaagaacatgatgtaaagaaagaagatggaactttctatgaatttggagaagatatcccagaagctcctgagagactgatgacagacaccattaatgaaccaatcttgctgtgtcgatttcctgtggagatcaagtccttctacatgcagcgatgtcctgaggattcccgtcttactgaatctgtcgacgtgttgatgcccaatgtcggtgagattgtgggaggctcaatgcgtatctttgatagtgaagaaatactggcaggttataaaagggaaggggattgac

SEQ ID NO: 163658 - DNA, 1545 bp, Homo Sapiens
  misc_feature (439)..(439): n is a, c, g, or t
  misc_feature (600)..(616): n is a, c, g, or t
ggtggtacggccggaatttcgggatatcgtcgaccacgcgttcgcagcccccaaacggctttcaaacggatgaactattcagatgctatcgtttggctaaaagaacatgatgtaaagaaagaagatggaactttctatgaatttggagaagatatcccagaagctcctgagagactgatgacagacaccattaatgaaccaatcttgctgtgtcgatttcctgtggagatcaagtccttctacatgcagcgatgtcctgaggattcccgtcttactgaatctgtcgacgtgttgatgcccaatgttggtgagattgtgggaggctcaatgcgtatctttgatagtgaagaaatactggcaggttataaaagggaagggattgaccccactccctattactggtatacggatcagagaaaatacggtacatgtccccatnggaggatatggcttgggcttggaacgattcttaacgtggattctgaataggtatcacatccgagacgtgtgcttataccctcgatttgtccagcgttgcacgccataaccattttctccagaagcgtggaggaaagattatgaacaggaacaggctctttnnnnnnnnnnnnnnnnngccagaatcttcctttttttgtttcattggggtttctctttctgtttttctttctactaccataaaaactatctcaaatcacctgaacatcaagtgatattaaggttgtcatcttaagaaaaaatatccatttttttcttaagttcgggaaacaaagttcggggaaaatacctggcatgaaactgtagttagggatacatttcagcattttactcactttatccaagttattcattttattcaagttatatgtatgtataattcaacaattttagattatggtgtaagatactccagtaacttatctttctgtccttttaagtgtacctggaattctttgatttattttattgcatcaatgaattaaaacaaaaatcttgggggaagaaattggcaatatcgtataaaaaatctgctcatattagaacacagtataattcagcagtaaacactagaatcaaatgaatagccttttgtatcagttattaatcttttctaactctgcttagctgctaataatcctgaggcatagaaattgaagaatttgtaaaaatagaattgccttaaaggatttgaagtaagaacataattttggggagagttttttagtgattcacagtatccctcttagcattaatttaaggtaaagaggcagattgattttccctctttcctggtaattcctaagtaattaagaataaataagttccaaaagaaattgtagctggaatcttaataacaattgtgagtggctgtttgagttgcccccaccatgtccttagatctaatctgtgctaccttattaactcacagcaggcttactgaatggcttcatttcagatttagttgatttctccaccaaatgcatgtcatgtattctcaataggctgtattcccagcagtcaataaatgaacacccgtaaaaactc

SEQ ID NO: 163659 - DNA, 977 bp, Homo Sapiens
cccccaggagtgggccatggagggcccccgcgacgggctgaagaaggagcggctactggacgaccgccacgacagcggcctggactccatgaaagacgaggagtacgagcagatggtcaaggagctgcaggagatccgcctcgagccgcaggaggtgccgcgcggctcggagccctggaagcagcagctcaccgaggacggggactcgttcctgcacgttggccatcatccagtgaagaaaaggcactgaccatggaagtgatccgccaggtgaagggagacctggccttcctcaacttccagaacaacctgcagcagactccactccacttggctgtgatcaccaaccagccagaaattgctgaggcacttctgggagctggctgtgatcctgagctccgagactttcgaggaaatacccccctacaccttgcctgtgagcagggctgcctggccagcgtgggagtcctgactcagtcctgcaccaccccgcacctccactccatcctgaaggctaccaactacaatggccacacgtgtctacacttagcctctatccatggctacctgggcatcgtggagcttttggtgtccttgggtgctgatgtcaatgctcaggagccctgtaatggccggactgcccttcacctcgcagtggacctgcaaaatcctgacctggtgtcactcctgttgaagtgtggggctgatgtcaacagagttacctaccagggctattctccctaccagctcacctggggccgcccaagcacccggatacagcagcagctgggccagctgacactagaaaaccttcagatgctgccagagagtgaggatgaggagagctatgacacagagtcagagttcacggagttcacagaggacgagctgccctatgatgactgtgtgtttggaggccagcgtctgacgttatgagcgcaaaggggctgaaagaacatggacttgtatatttgtac

SEQ ID NO: 163660 - DNA, 513 bp, Homo Sapiens
  misc_feature (60)..(68): n is a, c, g, or t
gccagcgtcgacgttatgagcgcaaaggggctgaatgaaccgtgactcgtatattgtacnnnnnnnnngttttatttttctacaaaaagaccatgacacaattttaaagggtgtacttatatccacactgcacactgcctggcccaaaacgtcttattgtggtaggatcagccctcattttgttgcttttgtgaactttttgtaggggacgagaaagatcattgaaattctgagaaaacttcttttaaacctcacctttgtggggtctttggagaaggttatcaaaaatttcatggaaggaccacattttatatttattgtgcttcgagtgactgaccccagtggtatcctgtgacatgtaacagccaggagtgttaagcgttcagtgatgtggggtgaaaagttactacctgtcaaggtttgtgttaccctcctgtaaatggtgtacataatgtattgttggtaattattttggtacttttatgatgtatatttattaaacagatttttacc

SEQ ID NO: 163661 - DNA, 1311 bp, Homo Sapiens
  misc_feature (771)..(936): n is a, c, g, or t
  misc_feature (983)..(1046): n is a, c, g, or t
  misc_feature (1197)..(1197): n is a, c, g, or t
  misc_feature (1230)..(1242): n is a, c, g, or t
tcatttggtctgacacagacagataaagttccaagtaaaacggtagctgctaaaaagggaaaaccgtcttcagatacagtccctaagcccaagagagccccaaaacagaagaaagtagtagaggctgtaaactctgactcggattcagaatttggcattccaaagaagactacaacaccaaaaggtaaaggccgaggggcaaagaaaaggaaagcatctggctctgaaaatgaaggcgattataaccctggcaggaaaacatccaaaacaacaagcaagaaaccgaagaagacatcttttgatcaggattcagatgtggacatcttcccctcagacttccctactgagccaccttctctgccacgaaccggtcgggctaggaaagaagtaaaatattttgcagagtctgatgaagaagaagatgatgttgattttgcaatgtttaattaagtgcccaaagagcacaaacatttttcaacaaatatcttgtgttgtccttttgtcttctctgtctcagacttttgtacatctggcttattttaatgtgatgatgtaattgacggttttttattattgtggtaggccttttaacattttgttcttacacatacagttttatgctcttttttactcattgaaatgtcacgtactgtctgattggcttgtagaattgttatagactgccgtgcattagcacagattttaattgtcatggttacaaactacagacctgctttttgaaatgaaatttaaacattaaaaatggcatannnnnnnnnnnnnnnnnnnnnnnnnnnnnnnnnnnnnnnnnnnnnnnnnnnnnnnnnnnnnnnnnnnnnnnnnnnnnnnnnnnnnnnnnnnnnnnnnnnnnnnnnnnnnnnnnnnnnnnnnnnnnnnnnnnnnnnnnnnnnnnnnnnnnnnnnnnnnnnnnnnnnnttctggttcccgcttaccgtcccgtttcccgattcgtaccccctttnnnnnnnnnnnnnnnnnnnnnnnnnnnnnnnnnnnnnnnnnnnnnnnnnnnnnnnnnnnnnnnnatattttttttgcccgtgacccgcgcccctctccccctatattccttccttcccgtacccgctgcttccgcttcgtctccctaacccgcttcttccgccctttttatccccttcgcccgccctcccccctttccgataccataatccgttnccccgttatttccgccttcctttctgtatccannnnnnnnnnnnngttccggggcgtattccgccttcgtcctttctcctcgtcctctctcccccccgagccccatcgttcccg

SEQ ID NO: 163662 - DNA, 1167 bp, Homo Sapiens
  misc_feature (219)..(247): n is a, c, g, or t
agaagaaggagcctggtaccagagtgagaaaaacacctacatcatctggtaaacctagtgcaaagaaagtgaagaaacggaatccttggtcagatgatgaatccaagtcagaaagtgatttggaagaaacagaacctgtggttattccaagagattctttgcttaggagagcagcagccgaaagacctaaatacacatttgatttctcagaagaagagnnnnnnnnnnnnnnnnnnnnnnnnnnnnncaataatgatttagaggaattgaaagttaaagcatctcccataacaaatgatggggaagatgaatttgttccttcagatgggttagataaagatgaatatacattttcaccaggcaaatcaaaagccactccagaaaaatctttgcatgacaaaaaaagtcaggattttggaaatctcttctcatttccttcatattctcagaagtcagaagatgattcagctaaatttgacagtaatgaagaagattctgcttctgttttttcaccatcatttggtctgaaacagacagataaagttccaagtaaaacggtagctgctaaaaagggaaaaccgtcttcagatacagtccctaagcccaagagagccccaaaacagaagaaagtagtagaggctgtaaactctgactcggattcagaatttggcaatccaaagaagactacaacaccaaaaggtaaaggccgaggggcaaagaaaaggaaagcatctggctctgaaaatgaaggcgattataaccctggcaggaaaacatccaaaacaacaagcaagaaaccgaagaagacatcttttgatcaggattcagatgtggacatcttcccctcagacttccctactgagccaccttctctgccacgaaccggtcgggctaggaaagaagtaaaatattttgcagagtctgatgaagaagaagatgatgtccttttgtcttctctgtctcagacttttgtacatctggcttattttaatgtgatgatgtaattgacggttttttattattgtggtaggccttttaacattttggtcttacacatacagttttatgctcttttttactcattgaaatgtcacgtactgtcttgattggggcttgtagaattggtatagaactgcccgtggcattaagccacagaatttttaaatg

SEQ ID NO: 163663 - DNA, 454 bp, Homo Sapiens
  misc_feature (344)..(344): n is a, c, g, or t
  misc_feature (361)..(361): n is a, c, g, or t
  misc_feature (374)..(374): n is a, c, g, or t
  misc_feature (393)..(393): n is a, c, g, or t
  misc_feature (404)..(404): n is a, c, g, or t
  misc_feature (431)..(431): n is a, c, g, or t
  misc_feature (440)..(440): n is a, c, g, or t
gattctcagagtaaaggatcgtgatgagttcccaatgattttaattggtaataaagcagatctggatcatcaaagacaggtaacacaggaagaaggacaacagttagcacggcagcttaaggtaacatacatggaggcatcagcaaagattaggatgaatgtagatcaagctttccatgaacttgtccgggttatcaggaaatttcaagagcaggaatgtcctccttcaccagaaccaacacggaaagaaaaagacaagaaaggctgccattgtgtcattttctagaatcccttcagttttaggctaccaacggccagggaaaagccctcatcttctctttctnttcctcagttttacatnttgttgggtaccntttttagccttaggacaantgttccacccngtttaggcctttaggacgaagaagttnggcttagtncctttttgttgaag

SEQ ID NO: 163664 - DNA, 541 bp, Homo Sapiens
  misc_feature (402)..(410): n is a, c, g, or t
cgtacaccattatatatagctacttaaaaattatgaaaagtgaaataactcaaacctaaaggctgttatcttcaaagcacttttgaaaaacaaacaaacatagcccttgtcctatgcttatataccattttttaaaatcctcattcagtcgatggcttgtacttaggtgtcatgccatctttaagacacagacctcaagtagagcatttgtaaagaagacctcattgaatgtgaatatattttatcagttatcgttgtatcagtgctgaaatgtttatgtaacaaattgatatctgaataaaaggttctgtaaagtattaaatcaggaatgtacatgatacagtacaattcacagctttctcttcttgttcgcccagatgagatccctcaatttcatgtttnnnnnnnnnccacccaaccttttcgcaaaattcaaggtaactatcagtttaggaattgaattacacaatatcagataagaatattaaaagatcaagatgtattgctaactgccggttatgtttgacagccattagtataa

SEQ ID NO: 163665 - DNA, 1472 bp, Homo Sapiens
  misc_feature (1222)..(1262): n is a, c, g, or t
cagtcactctcctcctggatgcctcccaatgctgctcagcttgcagtcatgcaggtagccaacgtcctcgtaactcagcggaaggggaacttcttcatgggtggttcagatggtggctacaccatctggtgaggaaccaaggccacctctgtgccgggaaagacatcacataccttcagcacttctcacaatgtaactgctttagtcatattaacctgaagttgcagtttagacacatgttgttggggtgtctttctggtgcccaaactttcaggcacttttcaaatttaataaggaaccatgtaatggtagcagtacctccctaaagcattttgaggtaggggaggtatccattcataaaatgaatgtgggtgaagccgccctaaggattttcctttaatttctctggagtaatactgtaccatactggtctttgcttttagtaataaaacatcaaattaggtttggagggaactttgatcttcctaagaattaaagttgccaaattattctgattggtctttaatctcctttaagtctttgatatatattacttgttataaatggaacgcattagttgtctgccttttcctttccatcccttgccccacccatcccatctccaaccctagtcttccatttcctcccgccagtctccattgaatcaatggtgcaggacagaaagccagtcagactaatttccttctttcctcgcacttctccccactcgtcatcttttaactagtgtttcacaaggatcctctgaaaccctctctgtgccccaagtacagatcccattacttctgctttcgtatctcctcaggcaaaagtggagggtgccttatgggccctcctcataggttgtctctgcatacacgaacctaacccaaatttgctttggtgccagaaaaactgagctatgtttgaacaaagatgtcgtgcaaactgtactgtgaacaacagttggtttaaaatatgaggggcaaggaggaggatgcatttcaaaagcttgattgatgtgtcagagctaaattaagaggagttttcagatcaaaaactggttaccattttttgtcagagtgtctgatgcggccactcattcggctccccagaaatcctagactgggttaatagggtcatattgtgaatgtctcactacaaaatgacttgagtccagtgaaatctcattagggtttaagaatatttcagggatccttaatgnnnnnnnnnnnnnnnnnnnnnnnnnnnnnnnnnnnnnnnnnatcttataatttcagttcatctaaattgtgtgttctgtacatgtgatgtttgactgtaccattgactgttatggaagttcagcgttgtatgtctctctctacactgtggtgcacttaacttgtggaatttttatactaaaaatgtagaataaagactattttgaagatttgaataaagtgatgaagttgcattacacctcaaaaaataaa

SEQ ID NO: 163666 - DNA, 1009 bp, Homo Sapiens
aagaggacgaaaaaaataaccgtccgcgacgccgagacaaaccggacccgcaaccaccatgaacagcaaaggtcaatatccaacacagccaacctaccctgtgcagcctcctgggaatccagtataccctcagaccttgcatcttcctcaggctccaccctataccgatgctccacctgcctactcagagcgtctatcgtccgagctttgtgcatcccaggggctgccacagtccccaccatgtcagccgcatttcctggagcctctctgtatcttcccatggcccagtctgtggctgttgggcctttaggttccacaatccccatggcttattatccagtcggtcccatctatccacctggctccacagtgctggtggaaggagggtatgatgcaggtgccagatttggagctggggctactgctggcaacattcctcctccacctcctggatgccctcccaatgctgctcagcttgcagtcatgcagggagccaacgtcctcgtaactcagcggaaggggaacttcttcatgggtggttcagatggtggctacaccatctggtgaggaaccaaggccacctttgtgccgggaaagacatcacataccttcagcacttctcacaatgtaactgctttagtcatattaacctgaagttgcagtttagacacatgttgttggggtgtctttctggtgcccaaactttcaggcacttttcaaatttaataaggaaccatgtaatggtagcaagtaccctccctaaagcattttgaggtaaggggaggtatccattcataaaatgaatgtgggtgaagccgcccctaaggattttcctttaatttccctggaggaatactgtaccatactgggtccttgccttttagtaataaacccttctatttagggtttgggaggggaaacttttgatcctttccctaaaaaatttaaaagtttggccaaatttaatcctggaattggcccccctaaactcttcctttaagggccttgg

SEQ ID NO: 163667 - DNA, 1053 bp, Homo Sapiens
  misc_feature (705)..(768): n is a, c, g, or t
ggctcccagtgctggtggaaggagggtatgatgcaggtgccagatttggagctggggctactgctggcaacattcctcctcctcctcctggatgccctcccaatgctgctcagcttgcagtcatgcagggagccaacgtcctcgtaactcagcggaaggggaacttcttcatgggtggttcagatggtggctacaccatctggtgaggaaccaaggccacctctgtgccgggaaagacatcacataccttcagcacttctcacaatgtaactgctttagtcatattaacctgaagttgcagtttagacacatgttgttggggtgtctttctggtgcccaaactttcaggcacttttcaaatttaataaggaaccatgtaatggtagcagtacctccctaaagcattttgaggtaggggaggtatccattcataaaatgaatgtgggtgaagccgccctaaggattttcctttaatttctctggagtaatactgtaccatactggtcctttgcttttagtaataaaacatcaaattagggtttgaacgggaaactttggatctttcctaaaaattaaaggctgccaaactattccggagttggacctctaatcctccctttaagccctttggaaatataattactctgctcagaaactgggaacggcctttagtgtgtcctggccccttttccctatttccctatnnnnnnnnnnnnnnnnnnnnnnnnnnnnnnnnnnnnnnnnnnnnnnnnnnnnnnnnnnnnnnnncaccgccagatctctgcacctggaagttgaactggggggcccgggacaagaaataggccgatgccagaaaataagtctacgcttctgttttcctcccgcaactttagttccccacattcggtaaatccgtttttaatcttacccggcatttagagagcggatctcccgccagacaacccctttctcgggtggccccccaacgagagggtgggtcatatcaccccctggcctttgtgcaaactcccgctcatggggccacacagacacagggtgcgcccttgggtg

SEQ ID NO: 163668 - DNA, 912 bp, Homo Sapiens
  misc_feature (850)..(850): n is a, c, g, or t
ggggtgacacggaagtagctccgaacaggaagaggacgaaaaaaataaccgtccgcgacgccgagacaaaccggacccgcaaccaccatgaacagcaaaggtcaatatccaacacagccaacctaccctgtgcagcctcctgggaatccagtataccctcagaccttgcatcttcctcaggctccaccctataccgatgctccacctgcctactcagagctctatcgtccgagctttgtgcacccaggggctgccacagtccccaccatgtcagccgcatttcctggagcctctctgtatcttcccatggcccagtctgtggctgttgggcctttaggttccacaatccccatggcttattatccagtcggtcccatctatccacctggctccacagtgctggtggaaggagggtatgatgcaggtgccagatttggagctggggctactgctggcaacattcctcctccacctcctggatgccctcccaatgctgctcagcttgcagtcatgcagggagccaacgtcctcgtaactcagcggaaggggaacttcttcatgggtggttcagatggtggctacaccatctggtgaggaaccaaggccacctttgtgccgggaaagacatcacataccttcagcacttctcacaatgtaactgctttagtcatattaacctgaagttgcagtttaagacacatgttggttggggtgtcttttctggtgcccaaacctttcaggcactttttcaaatttaataaggaaaccatggtaatggatagcagtcacctcccctaaagcaattttgaggaaggggaagttatcccattcataaaaatgaatgtggggntgaaagccgcccctaagggatttcccttttaattttcccctggaaggtataccgggaaccca

SEQ ID NO: 163669 - DNA, 991 bp, Homo Sapiens
  misc_feature (136)..(159): n is a, c, g, or t
cagaaattatagagctgaagaatacatgagtaaaataaaaaatacaatacagagcttcaacagcagacttgatcaaaagaagaaagattcagcaacctcaaacacaggttatttgaaattatccagtcagaggagnnnnnnnnnnnnnnnnnnnnnnnncctccaggatttgggagacatgaatgtgcaagccaatatacacattatagaagtcccacaaggagaatagagaaagaagcagaaaacatatgtaacaaagtaataattgaaaactatccaaattgagggaagaacatagacatccagattcaggaatcctaaaagattccaagtaggttaaacataaagaagtctacacctagacacattataattaaattgttaaaggtaagacaaagagaatttttaaagtagcacaataaaattatttaagtattactaatgcttcatttgcatttgtatttagatatacacataattatatatgcatatcaaaaactataaacagaattttaaaacacttttatctcaattggggaaagttaacaggtaagacaaaactacgtactacagaattttttaggatatctaaactcaaggtaaaaccaatagaaaacatttctacctctttagtaaatggcttgtgtgaaacctcaagctctccctcattttttttacagatgggtttgtctgatgaggattgtgatccaatgattgtttagcagcaattttaccaaactgtaaattcttttattaacaggcattataaacagataatactaatcttatttaaaaaccatgagtgccacactggtgaatatacagcttatgaataacttaaaaagtatgtcccattttaaaaggcaaacccagcatacataaaacctatactaaacaaagaagctataatatggatacatgattgatgtgtctaaaatgatatatacagtacataatgttaattatatgatcagtacatttttcctatgcc

SEQ ID NO: 163670 - DNA, 582 bp, Homo Sapiens
atatcgtacaggatcagcacctcaatgcaggaatgaatgtgtatattattagagcaatccagtttccatacagctaccaatatacacacacccacataccctgttcagccatactgaagagtttacttgtaaatccaggcgaagctgatgctgagaggtggcccgctgtactgattttgtaaaaccagcacgaaaacctctgctcggccgaccactagatgttttagttgcagccactaacatgttaatcaaaagaagcaaatacatgtttttcccttgagaaaacatggatagtggtgtaacggaaattaccttgaattattcctcctcaagtatctatccaatctagatagatggattatctgattgcaccaggagatgcagacctggcagtggctacttctatagcagcatctttaaaggaatcagatcttgggatttccattttcccatttttattcttattttctccctgctaaaaaacagtttgcagaggcacttgaaagtgatataaactccatagtagataatagttgtacatgaacatcgtatcttctatcatatagtcccctatgtaattac

SEQ ID NO: 163671 - DNA, 1358 bp, Homo Sapiens
tctcacttgttcgtaggaagcacggctatacccaacaaatgactaacaggccccttttattccgagatgtcctggtttatatgataaatttatatcgctaccctatcactatgtgctaccatgcaggtgactttgcccctctgagccttggtttcctcatctattaaacaagttctccccatttgtagaccctgttttattctggtagtccttcagtctagcacttcattccacagaagctccagttagcagctatgacatgccattcagatggtcagagggttccccatgaacctaaattaaccaagagctgaagccctgggccagtagagatcactggatcccaggaaccagaggcaagacaaagacgaatttctgagtctaccacagttactgacactcaaatttcccgatagttaggccattaagaaagatgatgcacccattctgatgcaggcaaaatatcctaaacatagcctctacaaacaaagataaacatgtaagtgaggggcactcagagaaaacacatcgctcctgtggcaagtttagcagcggtttcaacaaggtcttctctaactttctataagtccatccaagagggcctggtattgtggtggtcaaggtcatctgatgacacctaggaatggaatactcattcctaatcctccttacccgtgactgccaggaaataaaatagtctttttctattaccatccccctaacctccccacaaagggcctcagaactaatgtctctgagaaaggccgtgcacatacattgtggcatctaccatgccaatgcgccagtgcagagacaggagcacatctttgggttccgcagcaacagatccttagaaacaacgtagagaagaaagaggtagaaggcacagaatagccccactcccatcaattcatccaagaacaggaaaggcggatgctcaccagggtcactgagaagggaagcaaacctgaaacaggagaatgagggcaaactgctcccatcaagtcggcagtgctggccatgcagccaactcccagaggaggaggtaaaggtaccagcttccagggtgaagcagagctttctctggaggcaggagagtggtcagaagggaccaatacaggcagcaccaagatacccaatcagcttccaactaagggatgaggaatttcagagcagacgtctccactgtatgcccttttagaacgtcaggattggaccaatagaaaagaacaaggaaccattcaaaatctggaggccaagaggaagggagaaaggagccactggctttctgtacaccgtacttggtgtccacaggcttctgctggttggtgctctgtagctttcacagactgggcagg

SEQ ID NO: 163672 - DNA, 665 bp, Homo Sapiens
gggataagcaaagtgagagcaaaggcacaaaaggcagcataacatgggaacattaattagactatagcggttaaagcagtctgactggctcacagggcacaaaggaataggaaaataaaaatagcagtaatcttcagttatagattaaggagatctctgagtatcagtgaagagctctgactcatttaataagcaacaacaatagacattttgaagataaacatgaatactgagaaaactaaagatactagtaaattaacgaaagaagttctaacagtagataggatgaacaatacatctaggcatggtaagcatttcattaaaatatgagtaatatgtggtaattttttggcgaaaaacaaaaaatgaggtcagaaatagcataccaaatggaagaaactgcaagaaagtgacataaggatagttaagaaactggtaatttcagctttattcaatattatatggatattaagtatctgctatgtgcagccagggtaggtatcatatgcaaacatttttgcttccctattttttataacaggatattaattttgataccatggctatcttatatctaaggcacattgaagttacatttagttagaccatctatcacagaacatagcacttagggtatttgcctacaacctcacatgtataacgaa

SEQ ID NO: 163673 - DNA, 717 bp, Homo Sapiens
  misc_feature (669)..(669): n is a, c, g, or t
cacattatgtctgtagtagtagcagctgactaacgagggagatagggagatctgacaaacttctactcttgattgtgatcctaattcaaggaatatcaagtcccagcccctgcaacccaggctgctgcttaattttcatgtcagtatcatcaaaatccaatgttctgcttaaactcaagatggaaagtccagtccaaggtacactgttcatctttttcttcacattttgcacatccttcaaggggatctttaacctctttaacctttgtattgcacctcagataatgtgctttttagctcagtacactgaaaccatatgataacacaaattcacatataattgggggttagtcccatactctataacagacttagtcctgtcttttcattagccatgtaataatataactccatgttccatgcaactggatttttggaccctgttaatagcattaaggtagaggtttactctatcacctaacacctcaacactacctgtgggatgccttagttacccagcagcaggttaccaagggctgtctggaaagggagggacaaaaggacccagaagtagaagaatggggatggagtggtgagaattgaatggttaatgcactgccattcataattgccaattgaggacaacacaaatggggattgggtactttnttagtaataaatctggaccagcctggggcaacaggagcaaaattccaa

SEQ ID NO: 163674 - DNA, 865 bp, Homo Sapiens
  misc_feature (36)..(36): n is a, c, g, or t
cctcaacaaagtagctttcccggaactacccttccnagtgcccaagaaagtaaaactatttgcaagcctctttcctggtaataagaatgagggaactcaaaacaaaaaatgctctattatgcaattaaaaagtaaacttaggtaaatcagtttctttttatcaatctctgtcaatttgaattaacggtatttttcaataccatttcaagaatagttaccatactagaactagacaatgttgcaattatctcatatcttacctattcattatcacactagcaaaacagtcctttttaaaaaaaggggagcgatgtggggtgagaaaatctcataaacctcagcaaaagttaatattatgttaattaaaggcagttataattagaaaaattagagttagtcacattgagaaatccccagagtttttaatagctctctttcctaaatactcaaaaaatccagactagaaaaatggaagtgaactgttagataaacacgtaagtactcaacaaatatttaaaaagaaacaaaccaaaaatgggggagttgggggaaacaggatggccttatgaaacactgtggagctacccagcagcaacatttataaaagcttgtgtagatttgcataatgctcctatgcaattcttccccattaggaagacattcctacaaataattcatacactacagattttgatcatagatcatttataatggttatcatggttgtatctttaaaaaacttcatccattaacagttatgacaaacattaggccattctttgctagtatataattcctcaaatattactaatgaaaccaaaacctcagagttgtttgaattagaataaaaatataaagctagaaa

SEQ ID NO: 163675 - DNA, 1225 bp, Homo Sapiens
  misc_feature (722)..(732): n is a, c, g, or t
  misc_feature (989)..(989): n is a, c, g, or t
  misc_feature (1094)..(1094): n is a, c, g, or t
  misc_feature (1140)..(1140): n is a, c, g, or t
  misc_feature (1187)..(1187): n is a, c, g, or t
  misc_feature (1193)..(1193): n is a, c, g, or t
caccatgttacagtgcattctaattactgatgggtgccattacttttaatcgtgttttataaaatagaaaaaaagtggagttttcatgagttatagtaaatcccacgattattaagaaattcaataaaacatcctgcgcaacatgttaccgtgcctttgcctaacctaaatggatagttgccagttaaataagtgagtaattcaaatttcaatgtctcttctgaagtaactatgctatgaattgcaaagacctccataaaaccacccatggccttgcttttacactaactataacaactaaatgttcaatcagtttgtttgcctaactagcaaatgctgacatgtgtttgttctactgcgcaatactcatttgctgtgtgattactgtttagtgttgaaaaaaatcaacttcctagttatcagtgtcttactgtgaagaaaatactggtcttagttgtaattaggatacaatggtacagtgtgtaattaaaactagagtaaaccgttggaatggctgttttacttaaatattatcaaaactagcataacataagcaaaatagataagtacaacactccatttagtgttttgccagattgttaccagaagtctacagataccaaactttcagttctgagtttgtacaggcaagtcctgggctgggtaaaaagttatattaatattgttatccacaagagatgtgattatgggttttgattacnnnnnnnnnnnccaaaccctgcttttgaaatatccttgtacttaaaattcatattgctaagacactgtattagaatatttaatattccccagatcctcttaggataaactgtgggaatcctcctatgccatggatatcaaaggtccacattagtttttatttctccagtgatcagaaacattgatatcaatccctattaaattagtggggggaatattaactttatctacagtgtattactgtatattaaactgaaatagtccattanaggatttttttataaatttattttggattaaaaatatcaacaccaataagtttttagaccaagttgtaattttttccaatatagagtcttttgcatcacactgangcatcttgcacagctgcagttaagggtgagaaagaatgctctgtgntgaagacagtgttacccaatggggttccggttttcctttgcacctgntgcagnattctttaatttctggggctggttctcttctg

SEQ ID NO: 163676 - DNA, 814 bp, Homo Sapiens
  misc_feature (18)..(18): n is a, c, g, or t
  misc_feature (663)..(671): n is a, c, g, or t
atgggtggccagggaagnagggcatctggctcagtgttccaaccaaatcccttaccaagttctggggctggacctctgggtcactcctgaatcccaaggtatccgttacctttacaagaaactggtgtggttcttgtctgctaaagggcaagacctgttttctgaattgactttctgataataaagtaacaccatggaaaagaagaacctcagaaaaatatggggtcaccacatgggctttcccagtgctagctgcctgttttggaaagctgcaatgtaggctacagagggcagtctgaaaagagtccttctgctttcgcttcctggagcttaagaagaaaagaggaattaccaaggttgtggtgggttatttactctggaaatatcttggtcacactgtccgtggcaaaagcggaaagcctagcttatgtggatagttgaaggtgactgtgtgggccatcattatctacaatagaaatgactcaagccctagcatgtaatctcttagggacttaacaagttaaaaagaaacaaaaaatcatattggaaatggcctcttggtttaatataaacttggttacaacattcaaatttatctttacggaaatttcacactgctcctaggagcccttatagcatctgattctaagttattctgaaggnnnnnnnnnttattctgaaatataccttattaggatgatcactggaattctaccagatataagtaaaaggctaaatgggttttaaataaatacaagctaaattaccttcttctggggttaacaattagaatcccaaataccccaacatctca

SEQ ID NO: 163677 - DNA, 763 bp, Homo Sapiens
ttatactatgcagtgtttaaaaagatatcaatcagaataggagtttataacagtggtcattatcaaagcggggttattttccacgagaatatagaatatatattttgggcgagtgtgttttggtgaactaccctacagatattgaatgcaccttgagataatttagtgtttttaactgatacataatttatcaagcagtacatgaaagtgtaataataaaatgtctatgtatctttagttacattcaaatttgtaactttataaacatgttttatgcttgaggaaatttttaaggtggtagtataaatggaaactttttgaagtagaccagatatgggctacttgtgactagacttttaaactttgctctttcaagcagaagcctggtttctgggagaacactgcacagcgatttctttcccaggatttacacaactttaaagggaagataaatgaacatcagatttctaggtatagaactatgttattgaaaggaaaaggaaaactggtgtttgtttcttagactcatgaaataaaaaattatgaaggcaatgaaaaataaattgaaaattaaagtcagatgagaataggaataatactttgccacttctgcattatttagaaacatacgttattgtacatttgtaaaccatttactgtctgggcaatagtgactccgtttaataaaagcttccgtagtgcattggtatggattaaatgcataaaatattcttagactcgatgctgtataaaatattatggg

SEQ ID NO: 163678 - DNA, 1053 bp, Homo Sapiens
ctagtgtgcgcagtgacaagtatctaattcttagaagaatcacttactcccatgatctgtccagacacattaatctaaggacaagtttataaatagcaaacgtgattttcacattgcagtgttctcaagaatgtatatacaagtgtgtagtcctgttgatgggatgtttccccgagttctttctattgatgcgttcatgctcttgaccctggtagagacagttctttctttccacagagcagattttcttttgtcatccaccatttacaatactctgtgaaattagtatttacttattacatttatgaaacggcaatatttggattgtaatagctcttcagtacaattccttgtgtcttctggtaagtctctgcactatcagagagcttttagttataatcattttcctgcaacaacagccaaactcaactattgagtttcagtgtgacacaccctctttgtagcttgctgggttaacccttggcttcaagtcctgatgatgtaatgagggtggggtgtattggcaatcagtacatttccttatcgcaatttacagtcattgaaaatcatgctgtcattaatcccagtctgacataccttttctaaaatgttcacagtgcagtgtttttgtggcctaacaaaatttttctcatatcattaaaaataaacatttttataaaaaatataacactttaaatgtttacgtcgacaaaaccagttagagtaacctacaccacatgcactatacagtagtaagcacaaaattccacagaatgaagcatcacaaagttctgctcagggtggctattccatctaggtgaaatagctgggattttcaattgcctttttcatttgcttctaaagtatgttttgcttaacataaaacacaccctaatgcaaaataaaactccccaaaagttttgtttccaattgcttgcgaggtgggaacctgccaccgagacagaggctaatcttttcaatccatccaccctttctttgctctacctatgagctgtgattggaaccaatgaaccttttagtaaaatgtatcct

SEQ ID NO: 163679 - DNA, 1621 bp, Homo Sapiens
taaaacatctgtaacactttaagtgccttgtagatatctcatttataaagtctgctcagtaaaatagtctaaatattaaatagtaattataacccaaaagagtctcacaagaatcacgtgagaatggtgacagctgtgataaaaggcagattccagccacagccagtaagaaatgctgctgaaggaaaaaggatcgtcctgaaatgtaacgggttcgtgaccctgacacaccagacggctcctcttatcaccaccagtgagagggaggctcagggcgtcttgcgctccctattcagcaaaactcaaaacaagccctgaaaacacccaagatgagatttttgggtttctgtttactgtgactcccaacaggaaaagccttgctgagaccagagaaccccatctgggtgtttgcttagatccaaaccaggccccttcaagtcagactgacttcagcctacaaggagagcgaaacgctcccatattcctccatggatattggtacagcgagtcctgactggaaaccttcctcagaagtaagagcgaacaaagcagaaaaacaccattttagttatttcccccatctggagacttagtacctactggtgctgaaaaaaaggaaaaattccggcttgaaggaaaggagtttagaactctgaaaatttggtgacattgtttttccctgaaagaaatgtgtgttggatttaacagatgaaattatctgccctccaaaagtcctttagaagagccagtgcaaggctgaagaccaaagcgtcaagaacacgccagactctcagcttcctctgctttgctcctttgttgaggaaatgcaaatgcaaagagcttcccgttaaaaacaaggagtgtctgagagccacgtgttcaacacgcttctcctgctgctgacccctctgcacctgcagaggcagtgagcacccaaacatggcgaaggcgcccgtcacacgctcacgtcctctggccagcagccacgtttattgaaggagtgtggcactgtcccatcattgtatatgccctcgtccatgaaggattccagtgtttcacgctgtcccagtatatacaaaatgtacaaaataatgagtagtgtcttcacttgacaggttcgccatgaactctgaaccgatacagacaggtatactcaggatggccccagttagaaaaaatccgaagttccactatttggaaagctgtgtcgtcgggtcttttcagggcctggaacatctggagcgactccccatcctgatcatacgtgaactgtcccagaagctgcccttcttcctgatactcattttctaatccatagacggcgaagtccttgggggcgctgctgatgttgcctgctggcgacagcgtcttagggatgtgctccagagtgaaggcggctgggtggatcatcatggagagcctcaccaccaggtacccctgggagcctttaaatgcccagcagttaccggggtaaatgtcaggctggatgaccacgcgcggggactgcgagaagtaccacagcgggatcccaaacagactcatcagcgccgttttggtttcgtaagtttcagacacagcgagtactcaagatgctgccaccaccagattccagagcaagtcc

SEQ ID NO: 163680 - DNA, 897 bp, Homo Sapiens
  misc_feature (65)..(78): n is a, c, g, or t
  misc_feature (706)..(706): n is a, c, g, or t
catctgcgtcatcaggctataaattatcatgaaaggtcgtccaaactatggcacgtcacttaaannnnnnnnnnnnnnaccattctatcttgtgccagatcttcacagctgtgacatggtttaaattccataatccatccccaagaggagcccacccaaagcaaaaatcaaatttatccatcatcatcagatgatccatccacagactatatcttaacctgatacagtcatcatattgtagtttttggaagggctcgttctgcccaagagaagttcctccttacagctgattcggctgtctaccatttgcacgttggtgctgttttgagtgctacctcctgctggtgaggcttcatacagcacacagatggagccatcctctccaattctgtaggacacttcataggggtcaacccagagtgtgagttcacttgggagaagcctgaacagctcctgactgctcagtccaatccgctgtgctgcctgtccaatcagaggatccattttatggttgatgcgaatacaacggtaacccgatcccttgcatggcttttctgggaaccagtgatgtttataatgttctgccagcagctcctgcaggctctggctgaaggtctgcagctgtcgctcgctcgtgagccccttggtgcggagaaacttgaagatgaaagacaccgcggcggcgatctcgcctatcatgggggcngccccggcgtagaaaggatgcatgggagcggcgtgcgggggcggccccgggctgtctgggcttcgaggcgccgccccgacagcggaccaccaccctgggctttctaacgggctgaaagctgaaaggaaaaaggcgtgaggggccgacgatactttgtctttcttctttaactaaaaaagtatttccagaca

SEQ ID NO: 163681 - DNA, 728 bp, Homo Sapiens
gggtggtaccggtccggaattccgggatatcgtcgacccacgcgtccgtgcagctattgagatcttcgaatgctgcggagctggaggcggaggcagctggggaggtccgagcgatgtgaccaggccgccatcgctcgtctcttcctctctcctgccgcctcctgtctcgaaaataacttttttagtctaaacgaaagaaagacaaaagtagtcgtccgcccctcacgccctctcttcctctcagccttccgcccggtgaggaagcccggggtggttgctccgccgtcggggccgcgccgccgagccccgtgcgcccgggccgcccccgaacgccgaccccatgcatcccttctacacccgggccggcaccatgataggcgagatcgccgccgccgagtccttcatctccaagtatctccgaaccaaggggctcacgagacgagcgacgagctgcagaccttcagccagagcctgcaggagctgctggcagaacattataaacatcactggttcccagaaaagccatgcaagggatcgggttaccgaatgtattcagcatcaaccataaaatggatcctcttgattggacaggcagcacagcggattggactgagcagtcaggagctgttcaggcttactcccaagtgaactcacaatcagggtggaacactatgaagtgtcctaccagaataggagaggatggtccatctgtgtgctgtatgaagccc

SEQ ID NO: 163682 - DNA, 2489 bp, Homo Sapiens
  misc_feature (1710)..(1893): n is a, c, g, or t
  misc_feature (1898)..(1898): n is a, c, g, or t
  misc_feature (1933)..(1933): n is a, c, g, or t
  misc_feature (1947)..(1992): n is a, c, g, or t
  misc_feature (2080)..(2092): n is a, c, g, or t
  misc_feature (2388)..(2389): n is a, c, g, or t
tagaagcaagttgaagtagatcacacacgtgtatgcttgaatcttggatactgcaggaacggagcaatttacagcaatgagggatttatacatgaaaaatggacaaggatctgcattagtttattccatcacagcacagtccacatttaacgattttacaagacctgagagaacagattcttcgagttaaagacactgatgatgttccaatgattcttgttggtaataagtgtgacttggaagatgaaagagttgtagggaaggaacaaggtccaaatctagccagaccatggaacaactgtgcattcttagaatcttctgccaaatccaaaataaatgttaatgagatcttttatgacctagtgcggcaaattaacagaaaaactccagtgcctgggaaggctcgcaaaaagtcatcatgtcagctgctttaatatactaaatacattgtagctctgagccaggtctgaagaactgttgcccaattcaacagtgcctagcattccaacttcgttaaacctaccaacatcttaaatggactttcctgtggtggtaccctttaagaggcggatgaaagctactatatcagtttgcacattctaatcactttccagtatcacaagagagattttaacttatataatagtcctagagtttgcagctggtaaaaccagaggctacatccagtattactgctaagagacattcttcatccaccaatgttgtacatgtatgaaaatggtgtactgtatactttaacatgccccatactttgtattggagagtacaataatgtaaatcctaaaagcaccactattttagcataataaaagaaagtccaaagagctcctatatagactactccagataactttcgcttctttgatacttgtagcttattgtaattttttttaagaaattcaaggtcattattattgtacaaaataagcgctttgattaacacagctatatagtttttttaatttttaaaaaacctgtggagacgatgatcttgtctttaaaacatgatagtcctttcagtataatgtcttagattaaagacgttgcctttaatatctgttgggaaggaaatgtccagacttttcaaatctcttattatatgtttcctttttttgtttacatagggaacaatgtttatagtcgtgtgtacagtgggggtctacaacaagaagtgtatattttcaaacaattttttaatgatttaacaatttttgtaaatcattttcaggcttctgcagctgtagattctcactgtgaatcccttgcttgctcatgcataagtgtatttgcaataccaaatatacaggtttagtatttttgcctgttagtgattgtttcacatgtgtaacgttttggttgagatgttaaatggtggacgagtactgtggatgtgaatgtgggaagtaattttaatcatatgtaattggtcacaaggcctaattttgcagtaactatttgctgttttatttaacaatgccttgttgctttgtatgcattaatgtttggatgtaaagattgtgtgtctatccaacagggagccccagtatttaaattgaccaacctaatgttacaactactttgaggtggccaaatgtaaactaaaagccttaattaaagtggggcaattttgtataacttagcatcagtagttcaataaatttggattgccatgcaagggcttgcattatnnnnnnnnnnnnnnnnnnnnnnnnnnnnnnnnnnnnnnnnnnnnnnnnnnnnnnnnnnnnnnnnnnnnnnnnnnnnnnnnnnnnnnnnnnnnnnnnnnnnnnnnnnnnnnnnnnnnnnnnnnnnnnnnnnnnnnnnnnnnnnnnnnnnnnnnnnnnnnnnnnnnnnnnnnnnnnnnnnnnnnnncaccnaacccggccccaaccaaattcctaaagaaaccccnggcatgggaattcnnnnnnnnnnnnnnnnnnnnnnnnnnnnnnnnnnnnnnnnnnnnnnttttcaaccccgtccggagggcctctcgggaacaaataacggggtggaccaggggggtcccaaaataaaattcgaaacccagtgtggnnnnnnnnnnnnnaaataaaagaaaagcccggggggaattccgttaaactttgtacgcgattgaagaacgcccatgaaaaaccgctagagagacaactgagattcccccaggcgggcccacactccgggaaaccctttcgccaacaaaggcgccccgggggaaaaaagaagggggtaaaatatagggccctaaatttggcccgcgtttgaaatcaacccccccgggagactccgccccagggaaagagagtgaaaaatacacaaaacagtttctttagggaagacaccgtggacggggaattttccccnnaaaatttcccccgaaagacaaaaccacttcttgggataaatacgagggagaaaaaaacggggccggggagatacctcccgggggaaaccacccttccaaa

SEQ ID NO: 163683 - DNA, 1130 bp, Homo Sapiens
  misc_feature (855)..(945): n is a, c, g, or t
  misc_feature (976)..(1056): n is a, c, g, or t
ccatcttggttccagctatatcactgacagcatggtagaagactgcgagcctcacttctagactttcacggtgggacgaaacgggttcagaaactgccaggggcctcatacagggatatcaaaataccctttgtgctagcccaggccctggggaatcaggtgactcacacaaatgcaatagttggtcactgcatttttacctgaaccaaagctaaacccggtgttgccaccatgcaccatggcatgccagagttcaacactgttgctcttgaaaatctgggtctgaaaaaacgcacaagagcccctgccctgccctagctgaggcacacagggagacccagtgaggataagcacagattgaattgtacaattttgcagatgcagatgtaaatgcatgggacatgcatgataactcagagttgacattttaaaacttgccacacttatttcaaatatttgtactcagctatgttaacatgtactgtagacatcaaacttgtggccatactaataaaattattaaaaggagcactaaaggaaaactgtgtgccaagcatcatatcctaaggcatacggaatttggggaagccaccatgcaatccagtgaggcttcagtgtacagcaaccaaaatggtagggaggtcttgaagccaatgagggatttatagcatcttgaatagagagctgcaaaccaccaggggcagagttgcacttttccaggctttttaggaagctctgcaacagatgtgatctgatcataggcaattagaactggaagaaacttccaaaaatatctaggtttgtcctcattttacaaatgaggaaactaaactctgtggaagggaaggggttgcnnnnnnnnnnnnnnnnnnnnnnnnnnnnnnnnnnnnnnnnnnnnnnnnnnnnnnnnnnnnnnnnnnnnnnnnnnnnnnnnnnnnnnnnnnnactgggcaatatagcaagaccccatctctannnnnnnnnnnnnnnnnnnnnnnnnnnnnnnnnnnnnnnnnnnnnnnnnnnnnnnnnnnnnnnnnnnnnnnnnnnnnnnnnttcaaaggctgcaatgagccatgattacaccacgggcactacaaccttggtggcacagtgagaaactgactctt

SEQ ID NO: 163684 - DNA, 731 bp, Homo Sapiens
  misc_feature (439)..(470): n is a, c, g, or t
  misc_feature (530)..(530): n is a, c, g, or t
ggtgtctgtctattattcattcaactctttttacagacctcagtattagtctgtgactacaaaatattttatttgctttaaatttgctggctaccctagatgtgtttttattcctggtaaagacatttgtgattacattttcacacttaagattcaaaatttttcccaaatataaagaaaactaagacagactgtagatgcattttaaatatttaaatatgatcctcagacatgcagctgtgtgtggcagtattttagtaccgggttaagaaaactggcaactgggaagaagtggcctcaaaggcacttaatttgatttttattttttaaatgctgtcaaagttacagtttacgcaggacattcttgccgtattctcatgatcccagataagtgtgtgttttatactgcaacaatatgcagcaatggtaagcgtaaagnnnnnnnnnnnnnnnnnnnnnnnnnnnnnnnnatattatgaagtcttttaacagtctctctttatataaatacacagaagtttggtatgatnatttaaatacatcatctggccagggcatgggtggcttacgccttgtaatcctagccacttttggggaggcccagaacggggcggaatcccctggaagggggagggaggttcaaagaaccaagccctggccccaaaaattaattggaaaaattccccgttcttctctacccaatttatatccccaaaaattttaagcccggg

SEQ ID NO: 163685 - DNA, 501 bp, Homo Sapiens
cgcgcgtaatccgtaccaaacggcagatgtcatctatgtacctaatgcatgcgaggcacttacacatatagtctctttaaagtttaggagatccatttccaaggcaggtactatgattccttttctcatggacaatgagcctaatgctcagagagtctgagtaggctccctacggctggcaaggcaaggcagtggctgggtgctcaccttccttaggcctgaccccacctactcaagcagctggcggaggaaaccacaccagggttgctcagttcactaggctccatcaaggtgcgctgtacgtgtgcttccccagtgtcaggggacagccaatccttggggcaggagcctgctctttctctaggggagaatctgcatcccaggcaggagaggggcaaaagaaaagagaagccgggagaaaggatggggaggaaacgcaggcttgctggccttggtaggtcattcttttgaccttgcttccttctcagaacactgtgaact

SEQ ID NO: 163686 - DNA, 656 bp, Homo Sapiens
ttgttatatcacgtgtttccaaacacacttgggaaataattgatggagatcagtccttagtcaatctgctgtagttcatacatcttcaaagcaggctcatcatgattaagagaaactaggatcagagactacgagagagagagagtgagtgagtcagctggtcctgctttctctggttaacatgccacccaactttctctcttggaaagagcagggacattcagtttacgcacttaactttcttgagtataagtggaagaatacgtaggtaaaattcaatggccttaataaggaaaaaccataatacatcagcagcagtaagcagaatttctattcatatataagagagggtatatatacacaactggtaaatcactgcaaatgtgccacaattagacacctgccaagataaaagggatattatatatattagatgtagagtgcctttcttaaggatgttgtccatttcagtataaaagatatgatgcttacaatttctattactggtatttaggaaaaggaaatatttgaaatataaattcgtgtgccccaaactaatacaactctaattctatttaaattctactagatgaatcatatactggaccaagtgaccaaacgtaaagaaattaaactttagattcttcctttggccc

SEQ ID NO: 163687 - DNA, 690 bp, Homo Sapiens
cggatagtccgtacaccagatctaaaaggcttaactcaccttatatagtgtggcttcattgtagcgcctcaggttggctccagcagagtgtgatggcccacctcgggcatcccgaagcccactgggctgtgccccgcttggcccgaaccgtatagcaggtgaaaagttttgtgtgtcaccacttctcttctgtagacagcacagactcagtactggagaccagctggtgctccctggctaacaggatccactccatcacttaccacccatgcagcaccctctcacaccattgaaatatagcaccagcaaagtgcccagctgcagcaatgagcaccacgcagtctctgggaccatctacttggcaggttctgtagcaacagttctgcctcttctgggggatccttgatgacagagaagcatcagaaacatatctgttgcattcactgagagcaagaaactaagggccaattttcacaaacattatctcatttaatattaccaccctgaggcttgtttccatttgacaaacaaggaaatttgaggcttggcgaggcagtcaagatgaagtggtagaatcacaattcaaacctaaatgggtttgtttccaaacttaattccattacacttaacccttccacaattcagggcagtttctattcaagactggtacggatgacggcgggatctcta

SEQ ID NO: 163688 - DNA, 688 bp, Homo Sapiens
  misc_feature (166)..(174): n is a, c, g, or t
accgtacaggttcgcatgtgtcaaacaagaaagcaaacttcaacactggctctgtcagttgctctgcacccagatgtgcactgatttttgtttagaaatgtaagagactcagctttttttgtttggtaatgcactttcagagtgatggttctatggtgctgaagtnnnnnnnnntgaaattatgacagcacaatacttggcccaaaatcagtactcaaaaattgtagctaatatttttattttaataacagcttggcctgctggacagacactaggctagtcaccagaggcctgtgagggcatataacataacatgcataaaagcaacttgatttcttccttaacaagatggttgatacactttaaggccatattaggatattacctggaaatcctatagccctgttgggataaatacatactagatacctaaaagccagtaaaccatggaagctaggctttgtttcaagctattacttacctttccaattcactgcaagagaaacttagtaatattatcctggaacaaacgactgttaagcagtatagacttcatttttctttatttaaaaaatttttttagagacaagtcttgctatgttgccagactgatcttgaactcctcacctcaagcgatcctcccaactcagcttcccaaagggtggggattatagacgtgagccactat

SEQ ID NO: 163689 - DNA, 1224 bp, Homo Sapiens
  misc_feature (86)..(136): n is a, c, g, or t
agccatcacatacctcactgtaaatgaggatattgtagtacagtcaacagcctggatctcacatattctccaaatgcccttttagnnnnnnnnnnnnnnnnnnnnnnnnnnnnnnnnnnnnnnnnnnnnnnnnnnnttttccagtcgatgagagtcttacaaatagttagttggtgatgggaacaactttctggataaacacctgttgatcgtctcgctctccaaaaggtcctatgtcatttccagaggaatagctacccatgactttctgtctcctcccaggggatagtatcttgaatgacgctaaaggagtagaaccctggctgagtagagatcattcctctgaatcgtgttactgtccacgtccggacatgattattatctgcacagactgatacaagatgcttctctgatagcatgatttttgttacgggacttcggtgaactgtgaaagtctgaaaaagctgaggacctgacccaactgtctctgggtgttgtacaatcactcgtactgctccagagctcgtaccataggcgatctcgatccagttaccactgacacttgttttgggtgtgaggtaaacactcagagcagtaatagcatcatttgaaggatcatgatacagttcagttacaagaagatcattatctttcattcgcaaggggaacttctgcatatctatgtaatatattgatccattgttacatccaagcagaaggaatgatccagcagtgtcataactagttataggaacaacatcttgaacctgccagtgctgagtgacagcattccacactcccactttccctgttattcctagtctccattttcacttctccaacatactctggagccacagtcagtttcttaaaactaaattggtcatttttacccaactgcctaaaaatagttgatgaatccttcacagcagtggttcttaactcatcccccgatttcataacctgaaaaaagccaaacatctaaaacttggtacataagtatcatcaaatggtcgcagacactctgatgctcatcttccagtcataaaggagttaagaatgcccatattaaattcatactccctgggtaacactggtttaacgatcttgtcccataatactttctgacatcatagcctttcatattttttcagttatcctattcgtcacacataactgactgtcatcacacctaaaaatgacattactctatcacattaatca

SEQ ID NO: 163690 - DNA, 462 bp, Homo Sapiens
accccaaacgcagagaggagtattccttggtcaacgcgagaacctctctggttttcctctctgcgtttggcagagaggaggatgcagaaatcattgtcaagatcctttgtggagttttccatagccttctgagactcataaggccatccaggccctcaaatggccgctggtttgctggccgcaaggtggtggctgaagtgttacgaccaggagcgttttgataacagtgtcctctctgcgtttcaaacgcagagaggacaatgcaataattgaaatttccctaaagctggccagtatctaagctgcgcagaacagacaggaatttgctgttggctggctatgaattctgcatttcaactctagaggaaaaaattgaaagagaaaaggaattagcagaagacattatgtcagtggaagagaaaaccaatacccacctcctctctgcgtttgggggatcgtgat

SEQ ID NO: 163691 - DNA, 661 bp, Homo Sapiens
tttccgtagctgtcagctccccgttatcctgtaacatcccttgttggatgttaacccatcctgccaccctccaaacttgttccctgacctcaacatgcgaagtagaagaggcctttcccgaatcagatcggccagagttttgaacgagcagagcacatagccatcttggcagtacgcccgacacatgtgaatgcataagtcttccgcaagcaggagtctacagtgatgttcctgcgcaacatggtggaccccaaggacatcgatgatgacctggaaggggaggtgaccagaggagtgtggcaagttcggggccgtgaaccgcgtcatcatctaccaagagaaacaaggcgaggaggaggatgcagaaatcattgtcaagatctttgtggagttttccatagcctctgagactcataaggccatccaggccctcaatggccgctggtttgctggccgcaaggtggtggctgaagtgtacgaccaggagcgttttgataacagtgacctctctgcgtgacagtggtccctctccccggacttgcacttgttccttgtttcctctgggttttatagtgatacagtggtgtccccggggccaggcgcgctctgcccagcccagcctacagtgcggataaaggtgcggatgctgctggccctgaac

SEQ ID NO: 163692 - DNA, 942 bp, Homo Sapiens
  misc_feature (308)..(322): n is a, c, g, or t
gtatagctgttctagaggatcccgtgtaatccgtaccagtgctacatatgggtgaaccgtaggtccatatttgtctagtttctataaagataaaataattgggggccatctagaaatagaaaggcagtgggaagacagattctacggcactgctttcatttaattgggctttaggcactccattcgaatgcagaacctcacctctagttgagaccaagaattggcaaatttgcatgagctcctggaaagagttgctgactttgtatctaagacctgccagggaataccaaaagttgtttctacagacnnnnnnnnnnnnnnngtatgggagaagatactgtggcaaccaggaaggaatggaaaaaaaattcttttctctacagcaaattaatgtgaggaagctcctccaatcctctggctatttaaggttcaaaatcaagtgcctagggaaaattccaatggatgattttctgggagctatcttgtctaccttgaggttcctgaacaatgaattcccattaatgagcagtcttcagtattaaaaccactgtcttgtcacctcattttgcattactgtcttccgtggatgtttcagttacaactgtaatgttatttatagaacaacattaatccattaaagctaacctatttttcaatatttatgataatctatgtacatatattgtctgtccatatgtatttgtaaataggttgtatataatgtcaggtttgggtcttgggttcaagtgtatatattcctgtaagtttcttaactgcattttgatgaattcacattatgtaactataagaattgtcccaaaagtacctgtacagaaaattgaatattgaaaaattgacaaattgtgtacaaacactaaaaaaacttgtttacaattgtatttgcaatatacacatcaaattttttcatgaatcttggtacga

SEQ ID NO: 163693 - DNA, 683 bp, Homo Sapiens
  misc_feature (165)..(173): n is a, c, g, or t
tagaggacccccagcacgtcacatacctatatttaacttccagaagtattcaactaaacagtagaaccacagtacttggaattctcagccaaggagtatataatcctactactacaatgtattacgtttaatacattttaaaaaatgtgttaagactgaaaattnnnnnnnnnttcaattgtgataggttaataaactagttaattgtctagttgtttattttttaaatagaacagtccattcaacttaatatgtaggtacaacctcaatgctattagagatggattagttctttaaaaagactcacaaacttccaaatggtggtaagagtatcgtggactcacctctgaacactggagagccagctagctcttttgagccgagtcctcctccccctccaaatacaacaccctggtaaaaaaagctacagttctgggaacctcacaggtgacctcccctgaggaatgctcagacaaggggaagaggctaactcacataaaacagcaaacccctatgatttacagtggaagaaatacctacctacttatggtaggattacagtacctagcacagtgccttgtcggtagaaaatgttaataataaatgatggctgttttttagcctgcgttcaaccttttgtacaagggattaacataggtacctgatactgcccctgtaggaat

SEQ ID NO: 163694 - DNA, 1446 bp, Homo Sapiens
  misc_feature (46)..(64): n is a, c, g, or t
tagcgctctagaggatctcgttatccgtacattacagatattcttnnnnnnnnnnnnnnnnnnntttaacaagcaaggctagggattagataaatccatcttgtgatccattcttgtgcattcttcacttcttgagtcactcccaaaatccatttgtattgttactcctcgaaccaaaaaggaccagaacaaaaagttaacttcaattgtccccataggaaactcagcttggttagtgtgtcaggcactttctgagaatcacagcccacccctcgagccctctcagcaactctacaggccaaccacaatgcaagttcagcacaatcacagctgtataacgagagcaaaggctgctatacatgtttaaaacagcaaatgttactcatttgagtatcaagttgcaaaagctgtggcaaaaaaacatttaaagttaataacttccacacatgatcacataacaaccagaaatctgagaacattccaatgttccaagacatctcctttcaaagtatatacctgtttttgtggcagatttacaaatagcctaaaccactcccaccctaccaaccaagtctttctgaagttctgtaggcagagtaaaagtattttacccaaactggctttataaaacttcttacctaaaggatgatttacaggtcagtatcaaaccaggccagctgattgctgtcacctggaggcagcccatccatgaggtcctgggcatgccccagatctggcagcccatcaactggatagtcagcaccagggtggtggccacccatctcatgttccatcatggggtccatacccaaggcatcctggccatatccaccagagtgaaaagaacgatagctaggatcatcctggcgatatccaaggggttctccctgggcaccaatatcaagtccaagatcagcagtctcattccaagccattggctctgttctgaagagagagctggtcagctcaactgaaagccgtttcttgtaatcttgtggcttgtcctcagacattcggaacaaaacagcagctgcatatgtcgccacaccttcattcctagagtgaagtaactctgtcagaggagctgtggctccctcagcttcaatagcttctgcagcttccttgtcctgagcaagttcacagaggacccctgcagctactctttggatgttttcaatgggagaataaagcagctgcacaaacaatggaatggtatttagtcctctgataacaattcggttgtgaacatcccgagctaggatgtgaagggctccggtacaaccttcaactatttcttccatgcggaccccctccacaaattgctgctgtgtcccacccatggacgtacggcgctgggtatcctgatgtgcacgaacaagcaactgaactagtcgtgcaatggcaccctgctcacgcaaaggtgcatgatttgcgggacaaagcccg

SEQ ID NO: 163695 - DNA, 494 bp, Homo Sapiens
  misc_feature (25)..(25): n is a, c, g, or t
  misc_feature (429)..(445): n is a, c, g, or t
accagctctctcttcagaacagagncaatggcttggaatgagactgctgatcttggacttgatattggtgcccagggagaaccccttggatatcgccaggatgatcctagctatcgttcttttcactctggtggatatggccaggatgccttgggtatggaccccatgatggaacatgagatgggtggccaccaccctgatgctgactatccagttgatgggctgccagagctggggcatgcccaggacctcatagatgggctgcctccaggtgacagcaatcagctggcctggtttgatactgacctgtaaatcatcctttaggagtaacaatacaaatggattttgggagtgactcaagaagtgaagaatgcacaagaatggatcacaagatggaatttagcaaaccctagccttgcttgttaaaannnnnnnnnnnnnnnnnaaagaaatatctgtaagtggtactgactttgcttgctttgaagtagctc

SEQ ID NO: 163696 - DNA, 535 bp, Homo Sapiens
  misc_feature (466)..(485): n is a, c, g, or t
atccccgcgttacatccgaccagaatgccttgggtatggaccccatgatggaacatgagatgggtggccaccaccctggtgctgactatccagttgatgggctgccagatctggggcatgcccaggacctcatggatgggctgcctccaggtgacagcaatcagctggcctggtttgatactgacctgtaaatcatcctttagctgtattgtctgaacttgcattgtgattggcctgtagagttgctgagagggctcgaggggtgggctggtatctcagaaagtgcctgacacactaaccaagctgagtttcctatgggaacaattgaagtaaactttttgttctggtcctttttggtcgaggagtaacaatacaaatggattttgggagtgactcaagaagtgaagaatgcacaagaatggatcacaagatggaatttagcaaaccctagccttgcttgttaaannnnnnnnnnnnnnnnnnnnaagaatatctgtaatggtactgactttgcttgcttagaagttagcctcct

SEQ ID NO: 163697 - DNA, 1478 bp, Homo Sapiens
tgccaagcgtagtacccaacaacaacaaaattactatacaagggtttattaaatacttgctagacacataaaagaacaatttcagagcccacatgattttataaagcttaatggccagccatgtcagcctgctctttaacctctggccagaatgttcctatcacttgccagcgccgtgtctttttccttctttcaacaggcaacaagcctgcaaggaggtggagggtttccccacgtcatcgtccaggtcaggacagctcacacagtttcttcaccaagcaaaggcaatgtttaggttcgaatgaggggtgctctttcatccgctgttccctcatccatggatccctgtcctttgcatgcaagccaggtaaaaaccaaaccaaagaacacacccagcgccatgatgatgtagggtatgttggtgatgatcaaagtagtgttaatcatagacttcagtcgactcgccgtctctttatcaatgtgaacactctcattgaggtacatcactgggaaaaccatggttctaatgtctcccgtttcaacaaagtcatctaattttttgacataaatgttgatttggaacctcttggctgcttttaggattattccagtcaaaggattaatgtccacaaatgtctcatggtcttcctgatttgggtgcatgccttctatggcagaaacaaacctctcatctgcttggtaaaagtgtgggaaagacataatgatgggtgcaccattcttgcagatgctgacattcagaactcctgagcccaggcagtttccctcaggtatacagaagccggcattgtctgacgtattggctaatatttctgcaggaactttataccgaaaggcaggcagtccctgtacactctcatagtcactgaaagtaatatacactgacctgcaaaagtcagatgggaagacataaaggacctcatctttggttattagtgggtgaaaagaatctccatctgttccattaatcatattgcacttgtctgttatccaccagtcaagtgacgtttgcccattccattccacaatttttgtaaagttaaggtaactgtcttctccagttagaaaaacatagtctccatcattagtcccatttttctcatagaataggccaaaatagggagagatatcgggcctgaaaacatggataagggacaagatttcatctttgtagccccagagcaattcgtcaactgtgtgagtcacaaagagcttctgctgataggctttcaacatggcctcgatgatctccctgaggaagtgcacctgggaccactctatgacagtcaatacaggaatatttaatgttctaattaagtcaattttagggtctccaacagattggtctcgttcaaaaacataggccttgttgctaacagcagatattgttgttccattatctccaaattgaatatttgctttgtttctgagttccctgtaggtgtatggccccacttctt

SEQ ID NO: 163698 - DNA, 1046 bp, Homo Sapiens
ggttatccgtaccatttgtccctggcttccctcacagagaagatacaaaagatggaagaaaaccaccatagcactgcagaagaactacaggctactctacaagaattatcagaccagcaacaaatggtacaggaattgacagctgaaaatgagaagctggtggatgaaaagacgattttagagacatcctttcatcagcatcgagagagggcagagcagctaagtcaagaaaatgagaagctgatgaatcttttacaagagcgagtaaagaatgaagagcccaccactcaggaaggaaaaattattgaactggagcagaagtgcacaggtattcttgaacagggccgctttgaaagagagaagctactcaacattcagcagcagttgacctgtagcttgcggaaggttgaggaagaaaaccaaggagctttagaaatgattaaacgtctgaaggaagaaaatgaaaaactgaatgagtttctagaactggaacggcataataataacatgatggccaaaactttggaagagtgtagagttaccttggaaagggctaaaaatggagaatggatctttgaagtctcatttgcaggctgagaagcagaaagccacagaggccagtgctgtggagcagacggcagagagctgcgaagttcaagaaatgttgaaagtagcccgagcagagaaagatctactggaactgtcttgcaatgagctcagacaagaattactaaaggcaaatggtgaaattaaacatgtttccagtctgctggccaaggtggaaaaggattattcatacctgaaggagatatgtgatcaccaagccgaacagctgagcagaaccagcctaaagctgcaagaaaaagcatcagagagtgatgcagagatcaaagacatgaaagaaaccatatttgaattggaagatcaggtggaacagcaccgggctgtcaagttacacaataatcaactcatcagtgagctagaaagtagtgtgatcaagctggaggaacagaagtcagacctggagaggcagctgaagaatctga

SEQ ID NO: 163699 - DNA, 1264 bp, Homo Sapiens
  misc_feature (17)..(17): n is a, c, g, or t
tgtctacacactaaggnaggagtggggaggtgcctttactacatgtgtgatctgaaaaccctgcttggttctgagctgcgtctattgaattggtaaagtaataccaatggctttttatcatttccttcttccctttaagtttcacttgaaattttaaaaatcatggttatttttatcgttgggatctttctgtcttctgggttccattttttaaatgtttaaaaatatgttgacatggtagttcagttcttaaccaatgacttggggatgatgcaaacaattactgtcgttgggatttagagtgtattagtcacgcatgtatggggaagtagtctcgggtatgctgttgtgaaattgaaactgtaaaagtagatggttgaaagtactggtatgttgctctgtatggtaagaactaattctgttacgtcatgtacataattactaatcacttttcttcccctttacagcacaaataaagtttgagttctaaactcattagaattgttgtattgctatgttacatttctcgacccctatcacattgccttcataacgactttggatgtatcttcatattgtagatttaggtctagatttgctagctccaagtaattaaggccatgtaggagagcatggtaaccacagatagaactggtattatcccaagtggtctgcagactgctgagtggggatgggatctgctctctgttgagagttggtaatcattggtttgaaatgtgatgaaaccactcaagccaatgaaggtgggtgtgtaggtggggagtactttgccataatattttaaaacattacctggttagagttctaagtggtacttatttttgtttggttaggggaaagcctgaataaaaacagaaatggacacataatatgcatattccatagtctttgggaggctggaatgtgcctgggatttgggtctaagtgtatgcgtaattcttacctcactaaagaatttgccttgtttttttccttttggtgagtgactaaaacgtctgggcttccctgtgtgcgtgctacagtaagcaagcagaggctgtgcaaaggtgtgagcaggatcacgtggaatctggaggatacatcttggcttgcaaactgcctctgtctcctgggtgggactgttctgtccttgcactgctgttctgtgtacctcttggggtgtaaggttttgcttacaggagacaaactttggccgctagaatggatagccactcaccagcctctgtggtaccgagctcgattc

SEQ ID NO: 163700 - DNA, 176 bp, Homo Sapiens
aagaggaaaaccatgagcaatgggataaattaaacatttcagttgaataaatgcttaccaaattgctaataaagaataggctctgtactttgccataatatttcaaaacatcacctggttagagttctaagtggtacttatttttgtcttggataggggaaacctgaataaaaaca

SEQ ID NO: 163701 - DNA, 1267 bp, Homo Sapiens
  misc_feature (261)..(274): n is a, c, g, or t
  misc_feature (683)..(754): n is a, c, g, or t
  misc_feature (910)..(934): n is a, c, g, or t
  misc_feature (1058)..(1070): n is a, c, g, or t
ctgctgttctagaggatcccgacgtatccgtacacggctaatgaagaaggaacaaacaaaattggtgtgaaactttcataacacatgttcaaattttatcatgccagtaggagaaatctcagctccacaacccaagcaacatttgtatggatttaagagtattttaagaagacatactgcttgattttaatacattgatcaggccatccaggacaccacgattctcccaaagtaccttgaactcttagtgattgagactcnnnnnnnnnnnnnngacttgagacaatgttttcttcaacatgctccaaatataagacatttgtttgctgtacagaaagtatcacaaatggaatatatcagtacctctcaagctagtgtttctagctaaataaatgggtgtatataattttatggtggaaaagaactgtactgtctgttatgatttccttcaatgtgcataatgataaaataaataattttaatattcttttgtttccatggttgcctgacctaaattagataaattgtagggctttagctttcttatttttgtcaaaagttggtgttgacatacattccctctaatttgaactggtattgtttacgtttgatacaacattaaggaatttgatgattttcatttcatgaaaatgacattaaatgcaataattttacttatcctnnnnnnnnnnnnnnnnnnnnnnnnnnnnnnnnnnnnnnnnnnnnnnnnnnnnnnnnnnnnnnnnnnnnnnnntaaacacaaaaatttgtcggcccgccttcggcccccaaaaaattttccaaaacatttcgtttgggcgggccgggccacataaggcaaaggtgcccctgggcccttaccgcgttcccaaggaaaaccctgggaattgtgacaaggggctttgaattnnnnnnnnnnnnnnnnnnnnnnnnngcgggccaaacccgaagggcctgtgaaacaaaacccaaattgggagtctcttaaggcccctttccttggatccttttcaccccgggaattccaaaaagcgaggctccctatccccaaattatannnnnnnnnnnnnttggaccacttttttccaagagaacgtggtttgatattctccttttagcgtctcctccccccgaaactgtggtaaaccccctccccaccaacagggtacatggacgcaaaccctgaaaattcgcccaagcggacttttcacacacccctttggctcaccccctgtccggcattaaaataactccggccgccgttggg

SEQ ID NO: 163702 - DNA, 1498 bp, Homo Sapiens
ggggcttctcatcatggcggaccctagagataaggcgcttcaggactaccgcaagaagttgcttgaacacaaggagatcgacggccgtcttaaggagttaagggaacaattaaaagaacttaccaagcagtatgaaaagtctgaaaatgatctgaaggccctacagagtgttgggcagatcgtgggtgaagtgcttaaacagttaactgaagaaaaattcattgttaaagctaccaatggaccaagatatgttgtgggttgtcgtcgacagcttgacaaaagtaagctgaagccaggaacaagagttgctttggatatgactacactaactatcatgagatatttgccgagagaggtggatccactggtttataacatgtctcatgaggaccctgggaatgtttcttattctgagattggagggctatcagaacagatccgggaattaagagaggtgatagaattacctcttacaaacccagagttatttcagcgtgtaggaataatacctccaaaaggctgtttgttatatggaccaccaggtacgggaaaaacactcttggcacgagccgttgctagccagctggactgcaatttcttaaaggttgtatctagttctattgtagacaagtacattggtgaaagtgctcgtttgatcagagaaatgtttaattatgctagagatcatcaaccatgcatcatttttatggatgaaatagatgctattggtggtcgtcggttttctgagggtacttcagctgacagagagattcagagaacgttaatggagttactgaatcaaatggatggatttgatactctgcatagagttaaaatgatcatggctacaaacagaccagatacactggatcctgctttgctgcgtccaggaagattagatagaaaaatacatattgatttgccaaatgaacaagcaagattagacatactgaaaatccatgcaggtcccattacaaagcatggtgaaatagattatgaagcaattgtgaagctttcggatggctttaatggagcagatctgagaaatgtttgtactgaagcaggtatgttcgcaattcgtgctgatcatgattttgtagtacaggaagacttcatgaaagcagtcagaaaagtggctgattctaagaagctggagtctaaattggactacaaacctgtgtaatttactgtaagatttttgatggctgcatgacagatgttggcttattgtaaaaataaagttaaagaaaataatgtatgtattggtaatgatgtcattaaaagtatatgaataaaaatatgagtaacatcataaaaattagtaattcaacttttaagatacagaagaaatttgtatgtttgttaaagttgcatttattgcagcaagttacaaagggaaagtgttgaagcttttcatatttgctgcgtgagcattttgtaaaatattgaaagtggtttgagatagtgtacggataacgcgggatcctctagaacacta

SEQ ID NO: 163703 - DNA, 287 bp, Homo Sapiens
  misc_feature (184)..(184): n is a, c, g, or t
  misc_feature (204)..(204): n is a, c, g, or t
  misc_feature (211)..(211): n is a, c, g, or t
  misc_feature (223)..(223): n is a, c, g, or t
ttgtagtagttctatagtaaattacctactaaacagtggtagccatgacatggaaagtcaactgattctacaagtggacattcatttgtgtgccctggaatttccaactagtaataaacaactactgttgagtgtagttttaaaccacgttgagagggactcagtgaagcatcctgcaacatanaatttgcattttgacatcangatttcntttttttacctngaaaaacaactaaccttctaacaactatctttcaaaagtaaatgcaatagaacaactacaaccg

SEQ ID NO: 163704 - DNA, 466 bp, Homo Sapiens
agtagttcttctattgcatttacttttgaagatagttgttagaaggttagttgtttttcaggtaaaaaaagaaatctgatgtaaaaatgcaaatttatgttgcaggatgcttcatgagtcccttcacggttgtagttgttctattggcaaatcaatatgtatttttctatctaatcttcctggacgcagcaaagcaggatccagtgtatctggtctgtttgtagccatgatcattttaactctatgcagagtatcaaatccatccatttgattcagtaactccattaacgttctctgaatctctctgtcagctgaagtaccctcagaaaaccgacgaccaccaatagcatctatttcatccataaaaatgatgcatggttgatgatctctagcataattaaacatttctctgatcaaacgagcactttcaccaatgtacttgtctacaatagaacaactacaaccg

SEQ ID NO: 163705 - DNA, 1084 bp, Homo Sapiens
gacaagaagatacatttatttcactgcccaattattttcttaaaaaagcttaatgtttgataaaataaaacaaacttttagtaccatagaaacctttcaacatgtacaatgacatattattactatgtacaacttcaaaaacaaatgcttccagctgcaagttaaactgatgttgaacatcctgcctatatttcagctgtacgaaatttcctggatggccaatggtctccttggcttggaaaaaattatataaataagaccttcaatgagttgggaatcataaaaatgctatctgaaattcagtcatctggatcttgggaagtttgcaatagctctaagagttcaacaagcaaaataaaaccctgtggatatttaaacttcagttgtccaagacgtcttgtaggttcacagttagtctatcaaaaataaaagctattcctatcgtggcaaacaaaacttggtatctggttcaaataccatttttcaccagctcatgaactccattctcatcgatgattagaggtgcatggaattctttatctgccacataactttctaatccttctccagcataggagataagaggagagatttcacattggattggtacatcattggcatccttcaagcggggaattgctggaaggcgagagccattttcatctatgaaatggccccctgcattgaggacccagcaatgatgaagggacatcaaagcatgccttgcagtagtagggttgtctttcccattctgactatcagcattctttagtggggaaaactcatcttctcgcaatacttcatataccacaaacttctttgcaaactggaagatgtcaaagacaaatttttccatctttattccattgggtttgtctggcttaattaactgtccttgggtatccacataaggaatcttcttttgagccacatggtgctgcaactgaggttcataaacattgacaacatctctcagaaatggtacagtgaagaaatggttggcaatgttccccgaattgaaaaacagtcgtccgtctgagcttcgtatcagagctgtagccagggaaatctcactatattctac

SEQ ID NO: 163706 - DNA, 793 bp, Homo Sapiens
caagtatgtctagtatatactgtagggcaaaggagaaaacaatgtaagcacgtcacacacatctggctaatgatctttccctaatctacataaccagtaacttcatgcaggatgtaatgttgtttaatttcgagtttgcaaaaacattctatttaagtggaaaaggcatcatccagagcgtttttgctacgaatatgtcaagcctttcttgatgtttaaaacaatactgtgaaaaacgtcgatagactgcgtagatgactgagccattagtaaagaaatgtttttaaagggaaattttaaacatttattaaaatagcctgaaacatcatttttgtccgcatagtcaactgtttagatttccctgggagaaaaatgtattttaccgactattcagaaatcttaagccaaggtttaaaacacagaacgcagtaccaatacaaaatctcgtgacccctacctacgaaatcaacgattcttcacattatcccagcgcgcccgaaagactagccatttcagaaccaccataaccgttctagaaatatctggctaaaaaactgtaactgatccaataggaatattccacagaacagggccacagagcaggataaacacctaggggatattcatccacggtaaatgccgaacacagaacatggcacagagctcgaaatgcaaagaacgatgcggcgactacaccacggtactccaaaaccctttgtctggaaaccggaaggtcccacaccacacgatcctctctggaggaacctggactaatactatgataatgtgatag

SEQ ID NO: 163707 - DNA, 469 bp, Homo Sapiens
gcgttatccgtacagcatcatgaagccatatttgtctatgctgctacgtctccagtgaatggttattttggaggaagtctgtatgctagacaaggaggaaggagatggataaagcagatgtttattggggcattccttatcccagctatggtgtgtggcactgccttcttcatcaatttcatagccatttattaccatgcttcaagagccattccttttggaacaatggtggccgtttgttgcatctgtttttttgttattcttcctctaaatcttgttggtacaatacttggccgaaatctgtcaggtcagcccaactttccttgtcgtgtcaatgctgtgcctcgtcctataccggagaaaaaatggttcatggagcctgcggttacttgtttgcctgggtggaattttaccttttggttcaatctttattgaaatgtatttcatcttcacgtctttctgggaaata

SEQ ID NO: 163708 - DNA, 1582 bp, Homo Sapiens
cggggccacttctacaccgggaacagggtaaactttcgggggcttctttcgcccagggcccccagccccaggaaacaaaggcctcacccggggcggtttggtagcgcctggccccttctttcgggtgtgtcgattggccgctcgcggccacgggaattcccgccccgttcctagatataataccagttcccgttaaggccccggcaaacttcccattgggctcgggtccttccctttgggccgggaggtaattctttcccaaaggccagggtcttccgtcaatatctgggatacaggatccttcagggggattctcagggaatattctccagcagccatgactttgtaattgggaatgatgtcagggaaagtaacagcagaaagttctttcttcgtgtaggggttcaaccgcatggaagtccaggttcgcctccgttctgggaccgctccacccatgtgaatgtgatggccccttcccgggagctctcactgaaccgcagcaggaaggtccccggctgctggtccttcaacagggcacgctctcgctccttgctgatgaagcccatgatgcacccatcattccagagagggagcaggtgttttttaatgagttctaggatgctttcaatccaaagccagaagggaaaatttttatcatttatattttccttacaaaacctcgtccacggaatgagaccatcggggctggcgttaggaccaagaagcttctctcccaacatgttcagctggtccacattgagacctcttttggtgacagaagaaaactgccaactcagcacttctgaaagctgagcccatcgtgcacatggtggagtcaggaagaaggacagattcctgggttccgccaccagcatgttgtaccaaaggatggaggcccaaccgctcgggagctggctgacgttggagatcaccacaacgggcagagaggtcgtctcgaggtcaattaccaaaccaggctggcacaattgggtttcaaaactaagggagtgaagctcttcagtaacgatgagaggaccctcattcgttctggtgccagcatttttctgttctttcaattgcaggtgccgaaattcagccgccagactgccattggtggactcctccatgttcatcacttttgtgtgcgtgcccaaaatgttgaacttcctaaatccttttactgtatttctctcattcacatctttatcaaataagactttgactttcaaattataattcagctcttgcaatttcaccaacagtctcaacttcacagtgaactggacccctgtcttcaagaccagcggcctctgagggtgcgttggcatgcagggctgtctttccaccacaaacgagctctgaatgagctgctggaaaagactgaaggtgcggtcccataacacttgtgtgttttttgtgatagggtcatgttcgtaggtgtatttctgttccaattcctccaactttttaagctgctgccgaacttgctgcagactctacgcaactatagtgaaccagttctgcagctgatccaaggcagcattgggcggcccccaatacggcgctagctgtctccgttccc

SEQ ID NO: 163709 - DNA, 824 bp, Homo Sapiens
  misc_feature (792)..(792): n is a, c, g, or t
  misc_feature (798)..(798): n is a, c, g, or t
gaatgatgggtgcatcatgggcttcatcagcaaggagcgagagcgcgccctgttgaaggaccagcagccggggaccttcctgctgcggttcagtgagagctcccgggaaggggccatcacattcacatgggtggagcggtcccagaacggaggcgaacctgacttccatgcggttgaaccctacacgaagaaagaactttctgctgttactttccctgacatcattcgcaattacaaagtcgtggctgctgagaatattcctgagaatcccctgaagtatctgtatccaaatattgacaaagaccatgcctttggaaagtattactccaggccaaaggaagcaccagagccaatggaacttgatggccctaaaggaactggatatatcaagactgagttgatttctgtgtctgaagttcacccttctagacttcagaccacagacaacctgctccccatgtctcctgaggagtttgacgaggtgtctcggatagtgggctctgtagaattcgacagtatgatgaacacagtatagagcatgaatttttttcatcttctctggcgacagttttccttctcatctgtgattccctcctgctactctgttccttcacatcctgtgtttctagggaaatgaaagaaaggccagcaaattcgctgcaacctgttgatagcaagtgaatttttctctaactcagaaacatcagttactctgaagggcatcatgcatcttacttgaaggtaaaattgaaaggcattctctgaaaatgggtttcacaagtgaaaaacatncagatncacccaaagtttcaggacgagaatga

SEQ ID NO: 163710 - DNA, 1376 bp, Homo Sapiens
ttgttggggcacaaggtggcaggatgtctcagtggtacgaacttcagcagcttgactcaaaattcctggagcaggttcaccagctttatgatgacagttttcccatggaaatcagacagtacctggcacagtggttagaaaagcaagactgggagcacgctgccaatgatgtttcatttgccaccatccgttttcatgacctcctgtcacagctggatgatcaatatagtcgcttttctttggagaataacttcttgctacagcataacataaggaaaagcaagcgtaatcttcaggataattttcaggaagacccaatccagatgtctatgatcatttacagctgtctgaaggaagaaaggaaaattctggaaaacgcccagagatttaatcaggctcagtcggggaatattcagagcacagtgatgttagacaaacagaaagagcttgacagtaaagtcagaaatgtgaaggacaaggttatgtgtatagagcatgaaatcaagagcctggaagatttacaagatgaatatgacttcaaatgcaaaaccttgcagaacagagaacacgagaccaatggtgtggcaaagagtgatcagaaacaagaacagctgttactcaagaagatgtatttaatgcttgacaataagagaaaggaagtagttcacaaaataatagagttgctgaatgtcactaaacttacccagaatgccctgattaatgatgaactagtggagtggaagcggagacagcagagcgcctgtattggggggccgcccaatgcttgcttggatcagctgcagaactggttcactatagttgcggagagtctgcagcaagttcggcagcagcttaaaaagttggaggaattggaacagaaatacacctacgaacatgaccctatcacaaaaaacaaacaagtgttatgggaccgcaccttcagtcttttccagcagctcattcagagctcgtttgtggtggaaagacagccctgcatgccaacgcaccctcagaggccgctggtcttgaagacaggggtccagttcactgtgaagttgagactggcggtgaaattgcaagagctgaatcataatttgaaagtcaaagtcttatttgataaagatgtgaatgagagaaatacagtaaaaggatttgggaagttcaacatctttgggcccgccccccaaaactgaaggaacctgggaggaatccacccaatggccagtctgggcgggcttgaattttctgcaccctgcccatttggaggggaacccgaaaaattggctgtgccccacgaacccaaatgaaggggtccttcctccatctcctttaccgggaagaagctcttccccttcccctcttacgttattctggaa

SEQ ID NO: 163711 - DNA, 946 bp, Homo Sapiens
aggcggaccagtgcacgctcggatatgtatgcagacacaatagtcaatctttgtttttcttttgtgtacaaaaataccagtgcttgttatactagttactaaaagaagaagaaactcaaaattcctatctgcgtgctaatttgaaaagaacaacgtagatagatttgttggcacatatatatggcatattcacatatggcatatatacatatggggagaaaacatgaaccaaaggccaattcagttatgggagctcatctccttccatctctcctaatcaagagcaaagggaacagcaggcctaacagcagggttgggaaggcaaaaggactggcactgaactaagtgaaagggcgtctggtctattcagaggaagaggctggaatggcttaacaatagcaggcatttataagtgcccaccctcaccaatgcatcgggggtggtccctagatatgaaaggtgaggaagtctctgcatactgtgatggtaccacgggctgcttctattgtaaggcaaaggaagcaggaaagaaaggaagggatgcatttagaggcttttccacacaagcgagtgtgccacgcccctctgggttttcagcagtgaggtaaccattcagatttaaccatgccaactctcctctctgaagctcaaggggaagaagaaactcaaaccctaaagaacccacaagtgtccagagggatttctaggtgatctctctcttaacccctttagggacaggagagtcattccagaggacagatgatactatgggaaggatctagccttaagactgtcactcagggctagaaccagccattgttttatccatttagaattctgtccccatttaatatattgcacaaaatctttctaggggagggaaggcatcacaaataagatccttgcacaaaaactcactaatggaaaactccagggggaacaggaa

SEQ ID NO: 163712 - DNA, 692 bp, Homo Sapiens
tacacgggtgaacagcaaagagaaacccgggtctccagaatcacaatttagcccttctatattactgcaagtgacctgttttttctgaaggctccccgcaaatgaagtcctggaatggaaaaaatccataagtccataaattaacttgataaatattttagaacagacaaaagaaaatattgagtgatgtagttctaatcctcctaatatggaacctggcaagactgaatcattttactgtgaaatatataaacacaatagaatgagccaacatgatggtttctctccagtaagagtttttcttttggaaatgaggttaacctagccccaaatctagcaattctcataaaatccgattttagaattagcctcccagattaatctgaatgattgacttattttttcttaggcaagtcagtaagccacccactagacagccatatccagcaaaataagagaagtttccagatgccaaatgataagccaccatcaacccagaggggaagccttctggttggtttggctgtatgagattcaggaaggccagaatacccaaaattattcacacgacgttaacttattggtactggctaagcaatacatgtatttcctaaaggaggagatggtcttttggttgatttatggacacacttgtttcatctgactgtaaatatattgcatgctttattctg

SEQ ID NO: 163713 - DNA, 2514 bp, Homo Sapiens
tcagaaatatttcagtttatttaaattgttaagtagaatatgaaaccgaatttgtagctagtaccagagaatggacttaactgtttggtgtttaatgagaacagcttctacacaggatcccaagagacttacagaaaaggggcaaagccctaatattaagcaaataaaactcatgtttcaaacagattatacaaaaattgatttatacttcatttcccttttttgatatttagaaagtgcagatttaacaaaaggtagccatatcctttctatgtacaatgccgattataattatgcaaaactgtcagtctgttatccaaaaatcccagtgtttagctctccaaccttaagtcatggaattgaataagaattaaagagggttaaaataaaaaagctaatgccacattccagataaagggaagcaacaaatacattaatctaacaacagtaggtttaacctaaacttttcaaaaagcttaacatcatttcattatatttttagtggaaaattagggattatttggcaatgctgctttttactagtagtaaacaatgataaagtcaagtgtgggaataacctaagaataacaaccagtgaggcatataaaattgtttttagggcactatctgaaaaatttgtggattttcatagcagatacgtccctatgttgtttgcttatgtgagccaagaggtcattaaaatgctattcacgacacagaaagacttctcaatggaagctgctgtcctaaactcagcctctgctagaaatgaatcatgctattcacaattctttcaacaaaggtatcatcttaggatgctagcagcatagcaaacttcacttaccctatcctaatgataagcaatgaagcaaaactagaaaaaatgcagtgaaaaaaggacagggttagagatagctaaagatcttatctttacatgaaaagcctttcgttgtcctttttccaaactcatggtaatacaagttttccaaaaggatgtaaagacaggacttaaaattaataatattctaaagtatttctgaatcttaaggtaaagaaacttaacactgaaaaagtgttcttcagaggccaaatctcaatacatttggaaaacatgttaataaaattcactcctccttcctgcttttccttttttaaaaaaacaacctgtactaggctaccaagctgctagaggagttgccaaaatgcagactactcaaatttaggttaagagatttattctaggaaagtgaataggctatacacctaattagaaagacaaaccacaacaccctccaaacactagtgcatgcagttaactcttccatttcataaactcaatggatagacaggaagggaacaaagagaggaggaaaagcagaacatagaagtaaaacagcaaatgaaggcatctgggacacattttagggaagagagcaaatgaggggggaagacaccaattaactgacattggatagtaggcagttagaacttatctttccgtttacctagcaagttacatcagtgctttatattaaacttgacaaacctactagtttgtccctttcactcttaaatataccatgaggtggttggggagggagaagcaaataaagcagcatgcagggagacgcaaggaagaagtggccaaggagaagaaatggtggcaggaatagttttaaatatcaaggccacttaaaacaagactcagcaaaccaaagctatcacttctgcattaccctttgtcctcaattaactactttgaaaattacagccaagcaaaccacaaacattttaatggtttatgtttggatgatatgtctcctgcacatgcttccaccagaacaaaaaaggaaaaccaaagaagttcctttccacataaggcacaggacaaaattaatcccatttacatattcaaggcgaaaatgagtgttttcctggcttttgtttgtttcttttgctatcacatgtctatagattatagggactcaagcacattatccatgacagaaaattccactgttgtacaaaataaaattgttaattctaactttattcttatacaatttgcagaatagatttgaaatgattgctataggttttaatgttgataagaactggactataatacaactgaaatgcagttgagctgagcaagtacatttaaaaatgaagtcacagacatgatctttctatacatttttttgtttgaagaaaattatgataaagtcagcaagcagtcacagatgaaagaacaaataaaataggtggcttggatagttaagatgagaaacaaaaatatctgtttagagttaaaaatggacagagtggtttattttgcagcaagaagagaaaacggggtagtggatggcaactgatggaacaggagaatgctcagcagcatttgctcttccagcctgtcacgcctcctccactgctgatatctacattttcactgttgggctcttttacaggggtctttcgaaggatatcttcagctaacgtgaggaacgcctt

SEQ ID NO: 163714 - DNA, 679 bp, Homo Sapiens
aggacccgcgctatccgtacattgaaaatggagcagtgtatcgacatcagtggagaacctcagtttctggaactaatgcaagctgaagtatcatgagaaagctgcagacaaaggggtttatatcataggaagcagcggctttgactccattccagcagatctgggagtaatatataccagaaataaaatgaatggtactttagactgctgtggcaaagtttcctgactaatacattcaggacctgaggggtagagcattcatgatggtacctggaagtcagcaatatatggtttaggagatcagagtaatttcttattgtcgggaactcaaaggtaataccataaccttcatatgggatctagatgtagtctgtagtaaggaggactcaacgttacttgtatgaaaatttagaggaatcaccagttcagtatgctgcgtatgtaacagtgggaggcatcacctctgtaataaagcagatgtaagcaggacttaactattagtactattgtgaggtaaggaataggaaggcaacttctcataaaattcccatggttactatcaccttatggctatctttcaaaacaaggcccaacacaaaaacagatagatgctgcctcatacacgctgaacattctttggacacggatacagccaaggaactggtacggataagcgcgg

SEQ ID NO: 163715 - DNA, 2000 bp, Homo Sapiens
  misc_feature (1619)..(1627): n is a, c, g, or t
gggggaggagggagcgggagtcgagcgagagcctgtggaggagtccgcctgctgtagcgtgcgtaagcaaggcagctacgccgggcggctacgctgcggaatcggcgtaggcgcctttggagaatcggcgggctgcgctccgctggggctggtcgcggagggggggaggggatgtcggtcagtgcgagatccgctgctgctgaggagaggagcgtcaacagcagcaccatggtagctcaacagaagaaccttgaaggctatgtgggatttgccaatctcccaaatcaagtatacagaaaatcggtgaagagaggttttgaattcacgcttatggtagtgggtgaatctggattgggaaagtcgacattaatcaactcattattcctcacagatttgtattctccagagtatccaggtccttctcatagaattaaaaagactgtacaggtggaacaatccaaagttttaatcaaagaaggtggtgttcagttgctgctcacaatagttgataccccaggatttggagatgcagtggataatagtaattgctggcagcctgttatcgactacattgatagtaaatttgaggactacctaaatgcagaatcacgagtgaacagacgtcagatgcctgataacagggtgcagtgttgtttatacttcattgctccttcaggacatggacttaaaccattggatattgagtttatgaagcgtttgcatgaaaaagtgaatatcatcccacttattgccaaagcagacacactcacaccagaggaatgccaacagtttaaaaaacagataatgaaagaaatccaagaacataaaattaaaatatacgaatttccagaaacagatgatgaagaagaaaataaacttgttaaaaagataaaggaccgtttacctcttgctgtggtaggtagtaatactatcattgaagttaatggcaaaagggtcagaggaaggcagtatccttggggtgttgctgaagttgaaaatggtgaacattgtgattttacaatcctaagaaatatgttgataagaacacacatgcaggacttgaaagatgttactaataatgtccactatgagaactacagaagcagaaaacttgcagctgtgacttataatggagttgataacaacaagaataaagggcagctgactaagagccctctggcacaaatggaagaagaaagaagggagcatgtagctaaaatgaagaagatggagatggagatggagcaggtgtttgagatgaaggtcaaagaaaaagttcaaaaactgaaggactctgaagctgagctccagcggcgccatgagcaaatgaaaaagaatttggaagcacagcacaaagaattggaggaaaaacgtcgtcagttcgaggatgagaaagcaaactgggaagctcaacaacgtattttagaacaacagaactcttcaagaaccttggaaaagaacaagaagaaagggaagatctaataaactctctattgaccaccagtaaacgtattagttgccaatatgccagcttggacatcagtgtttgttggatccgtttgaccaatttgcaccagttttatccataatgatggatttaacagcatgacaaaaattannnnnnnnnatgttcttaatggaaattaaaatgccttgaatggtctagggtgtactgtacttagaaagtaagagctctaagtacctttcctacattttctttttttattaaacagatatcttcagtttaatgcaagagaacattttactgttgtacaatcatgtactggatgatatgatggtttacaggatattccaaaataaaaggactctggaagatttacatggaggataaatggccataatatgatgcaaacggtgctactctatgataattacaatacaaaggttccattcagtgcagcatatacaataatgtaattaagtctaacacagttgaccctatttttggacacttccattgtttaaaaatacacatggaa

SEQ ID NO: 163716 - DNA, 1050 bp, Homo Sapiens
  misc_feature (428)..(533): n is a, c, g, or t
  misc_feature (535)..(544): n is a, c, g, or t
  misc_feature (550)..(555): n is a, c, g, or t
  misc_feature (561)..(683): n is a, c, g, or t
  misc_feature (746)..(755): n is a, c, g, or t
  misc_feature (887)..(895): n is a, c, g, or t
  misc_feature (913)..(923): n is a, c, g, or t
taagtgccagcgtatgaggtaattagattggttctctccagaggtaacctgccaagaagagatgctatagatgttactcctatactgtaaaacattgtgaaatcagattactttaaaatgatgtattacaaagttatgcaaaaaagcagttgtgactatggaagcccaaggcttatatcccagctctgtcttacactaaatatgggtacagtgtttccactctgtccataaaatgggagctaatattctccaacctgtgtgcctgacatgatggttaaagggattaaacaaaacaatagtttgtaatttattctgtcagagcaaactgctggtaaataaaagggactaagttgacgaaaaataaattttaaaaaacctaataaaacaagtttgtaatttataattgtatacaaataaaagatgttacnnnnnnnnnnnnnnnnnnnnnnnnnnnnnnnnnnnnnnnnnnnnnnnnnnnnnnnnnnnnnnnnnnnnnnnnnnnnnnnnnnnnnnnnnnnnnnnnnnnnnnnnnnannnnnnnnnnaaaaannnnnnaaaaannnnnnnnnnnnnnnnnnnnnnnnnnnnnnnnnnnnnnnnnnnnnnnnnnnnnnnnnnnnnnnnnnnnnnnnnnnnnnnnnnnnnnnnnnnnnnnnnnnnnnnnnnnnnnnnnnnnnnnnnnngggccgcggaggcggccccgaaaggtccccacacaaaaaccccccggggggcccaaagggcgnnnnnnnnnnccaattaaaaagaaaatcccggcgggactctaaaaattgttttgaaaaacctcgcctggaggctttttggggggttcttgtggggattttcttacaccggatttgggggcaatttgtttattttattttttnnnnnnnnngtgggaccaccctttatnnnnnnnnnnntggaacatttttataaacccctggcggcagaaaaaattggcccccccttggggaaaaaggtggggttgaacaaaatgtgggccaaatgggggccccaacaatttgtgttgccacctggggggaaaaa

SEQ ID NO: 163717 - DNA, 752 bp, Homo Sapiens
ggtagggaggctattgaagcagtttttctgaagcctgcattttgagttagtttatagtgctaatagattctatataactgtgagagtttggtagtaaaccagtagggattgttttctctcctaaaaatttgcacactacttcattgtctaccaactttttacatattggaaaatagaaattgcaaatacatacatgtatggaaacatattcagattgggaaaaacaatggacattagtttttaaaaagttacgtggaagcaagatttctatatttgtttttttaaaggaagcagtcattctttctactaaatccatttcaagctagttctctgaaaattttgccatttatctacagaaatttgattataaatatgttcctttttcaaagaaactttattctagaacaaaatagtctatatggtacttgatctacatttaagtggaaaaattaccagtatttgaaagctcagtttatgtcattgtcttaacttcagataccaataactgaacagaaagttttaacctttaatatctcctgttctgttttttattcccaattttccttttatgttaattcccttatatacttctgaaagggcacccttactttttgggaaaccaaatccttctggtaatttaccaccataaataattttttaacaaaccattttaaaataaattcccaaaggctggctcttcgataaataaggcccaccttttgcgcatattataatgggaaatttccctaacc

SEQ ID NO: 163718 - DNA, 773 bp, Homo Sapiens
ttcccattaatgtcattttgctgagggtgacttggtccttttgaattgctgtggtgtacgggtatgttctgatttttcatgcaagctcctcctgccattacaccgctctgaggagtaattgtagcacttcacatgtgctgtggttgtgatcacatggtgacatacatagcatgtgtgttcccagctgttgtgtgtttatgtgacatttgatgccaatacatatgtcttcaaggtatgcttgttccctcccagctcgtggaatatcaaaaaaattcattgctggaaaaattatttcatagacaaaaatgttaatgttctcttggggacttagagttgaaaatatttgtatagatttggttctcaagtccacagaatcgtatctgctgtggtctccctttggtgctcatctgggagccatgtgtatggaagattctgtcacaggcggctgggatgtgggcagatgctgttagcctccctctccacgtggtggtccatgcctgacgtgtcccctagttcaaggaagcgccatctttagcatgaaaacaattgcgttcccctaggaaactgaagaaaaaatgagctgaaatttccttatacactttgaatttgttcattttttaaagagacattttgttgtctgctttgtggtacttataaaatttgttttccattgaaattgccatttataaatttgcagatatgtactaatttagattttttaagtgttcaataaaataaggatatatttactgtgaaaaaccacacacaaaagg

SEQ ID NO: 163719 - DNA, 1497 bp, Homo Sapiens
aattccccaaaggcccctctatgtttcacttggccccccggggaattctccccctaaggggaaaaccagggttatgggccccatggttcccctttacccctactgggggccccgcggcgccccaaaaggaaatggtcttggaaagtttttttcgagggcccgaggcggcccgacaaatttttgtattcttgtcgcggtgggtgggtggcgggttacgcaacaaaaaaaactttattgaattacaaattttaaaatggatcacttaaaagtgagattattttattctgaaacattatttcaaaaatgtactttgtttttgaaataaaacaaaatcttcaactatgaactgacaaaatagaggtgagttggtaccagcgggccaattcttaacacggacatttaaaaatgctgctttctgtattacaacaaaatgatatgcaataagaaattggaaaaagggagcaaaggagagtgcaaagcatgtactgaggtctttctacgggtgcctgacagaatgcagattcagcataaaatgtagactttgcaacagtggcctttaaagtatgctagagcaagtgtaccctagggaacctatgtcaaaacaatttttgtcttactccaaacagaaaaaatggtacacactttaacaaaagcaaaacttaattgtaagatctgtactgtaaagctacttgctatagcccatatattcagtttgttcaacaatctcactcatgacagaaaaagtcagcaaataagacttgggacaaaattattttctatcagtctccacatggaaagaccacagctttaatgaattatacaatccttaagattaatccttggtcagtatagatttccgaatcaaaatctagtcatgaactgtttacaatagctatactacactaagatgctaaacattttctttccagtatgtcttcctaagaggggaaaaaaatagtgggaagttttcatctttgcctatgaggggatttatgaaaagccttctaaactacaacagtgttcttctgcaaaactaaaacacattataaagtcaaacaggtaaattaacaggaaaacccaactgatctcaataaagtcttgtttccaaaaatctattaagtacaagtaatatacatgtacaagaaattacaagaaatgatgatcacagttagttacagatgcaaaataatatctaatattccaagcttgtgaacataataattaaaatcaaattcataagctacctcaaaattatgtacattttagataagctggtcaagtattatttgaatacacaccatatttggtaaacctaaaattatattaccttttctcctcctttaatatttgtagctacatgccaatatggaaaaaaatgtattttcatttatgtattaataacagagagtaacagaatttctactgtgtatgtttcacagtgtaaaagaaaaaaagttaaggtatattttcctttaagaaagcggacgcgtgggtcga

SEQ ID NO: 163720 - DNA, 1424 bp, Homo Sapiens
gcctgttagtgtcgcttgtaggaggtttcccttccttctcctgatgctgacgctctgcatccagctcgggggaggacagaagaaaaaggagaatcttttagctgaaaaagtagagcagctgatggaatggagttccagacgctcaatcttccgaatgaatggtgataaattccgaaaatttataaaggcaccacctcgaaactattccatgattgttatgttcactgctcttcagcctcagcggcagtgttctgtgtgcaggcaagctaatgaagaatatcaaatactggcgaactcctggcgctattcatctgctttttgtaacaagctcttcttcagtatggtggactatgatgaggggacagacgtttttcagcagctcaacatgaactctgctcctacattcatgcattttcctccaaaaggcagacctaagagagctgatacttttgacctccaaagaattggatttgcagctgagcaactagcaaagtggattgctgacagaacggatgttcatattcgggttttcagaccacccaactactctggtaccattgctttggccctgttagtgtcgcttgttggaggtttgctttatttgagaaggaacaacttggagttcatctataacaagactggttgggccatggtgtctctgtgtatagtctttgctatgacttctggccagatgtggaaccatatccgtggacctccatatgctcataagaacccacacaatggacaagtgagctacattcatgggagcagccaggctcagtttgtggcagaatcacacattattctggtactgacagatgccgctatcaccatggggatggttcttctaaatgaagcagcaacttcgaaagccgatgttggaaaaagacggataatttgcctagtgggattgggcctggtggtcttcttcttcagttttctactttcaatatttcgttccaagtaccacggctatccttatagctttttaattaaatgaagccaagtgggatttgcataaagtgaatgtttaccatgaagataaactgttcctgactttatactattttgaattcattcatttcattgtgatcagctagcttattcttgtgtactttttttaaactgtgggttttcctagtaaatttaatttacagaaatcaatggtagcatttagtaatctacaaaggaaatatcaaagtgtttttcaagcctgttatattcagtgtgtgccacaggattgaaataaatgacaatgtaattatgaattcatgttttagagctgtttactcattagtaaaggaccgcaatgttagtaaagaaaacctatgaaatgtatgttaaagattcttagtattgtacagggataaagcaaatgcatgaaaatatgtcatgtactgaaaattaaacttacttcagtttca

SEQ ID NO: 163721 - DNA, 1227 bp, Homo Sapiens
  misc_feature (932)..(966): n is a, c, g, or t
tgacttccaagtagaatttaatctccccattgagtgtgtcatggtacaaatcactattcgtttttggtgttttttagggatgtgcaatgtgcattacataatgacagaaatactgagaaggttctgtgtgcccatttgaaaggagtgggaggaatacagcagttgtttttcaacatgaatctgatattgatttaaactgtgtttcacttacaagttttaaaaaaatgacagggtttaatggagcgtgcataaaaatgtactgttttcacctttgtttatatgtaaatgttgtaagtatatgggcctatctgtaagtgggtaagtctgtatgtgtgtatcatacacatcaacctccatgtccttagtcctgggtttttgaaaaagtgctaaaacggacaagtagaataaatgttgctgtggaatgccatgctttagaacaaaccctttttgatcttaatgcttctgaaaactaggtctgactctggggatttttttccagccgaaggaaaatcacttccgttatgtccccctctaatttagccgctcgacattttacacaacccggatatgttgtatatttgacccaaagttacaggtaggtttaagagaatttttagccatgacttttggagcactattccattgtcagttattaataaagaattccattgcttagctaaccaacaggttttttttgtttccaagagagttatttgaaaagttaacagaacaatgagataacagtgacagtttaacaaagataaaattctgaactgcgttttattcatttgtgtactatgtgattttttaaatgtcccctttagtatttaatggaaaattggttcctgcaagacaaagggtgagagttagcgtcctgtagatacacacagagactaggccgtatattaactagaagcagctttatgtctagnnnnnnnnnnnnnnnnnnnnnnnnnnnnnnnnnnnagattcctgagagatgtctctggaagggaaagtttttgagaactaatggctattttttgaggacaaaaattacatccttaaagctaaattcccttaaataccatacaggtagggtgaaatttttcacgggacaataatttggcccttcacaaaccccttgcctttacattttggaaaaaaggtccttttttttccccctttaaacctcctttcctggaaactgtggaaatttttttcccttaccacaaaaaacccttattt

SEQ ID NO: 163722 - DNA, 1052 bp, Homo Sapiens
aattagatatgacacccgggtttcaaagcaggctggtaccggtccggcaattccgggatatcgtcgacccacgcgtccgggctacaattcagaatcttctgaacccatctatgtaatgaatggggattatacattggaattttgtcatgacacatttgccaaatcagtaggatatattgtttggcagcctatcacgcagaggctagtggtatatttatgtaagaaaatgactgtaaatctcaagaaaaatctcagcagctaatagcaactcatttatttcatttggtcttaatgctttgtaaacaggtcaaaaaatactgtcatactctaagcttctattttccacactggacatacttctagttgtattctccatactattagactgtgtagtgatgtgacttccaagtagaatttaatctccccattgagtgtgtcatggtacaaatcactattcgtttaggtgtttttagggatgtgcacatgtgcattacataatgacagaaatactgagaaggttctgtgtgcccatttgaacaggagtgggaggaataccagcagtttgtttctacaacatgaatctgatattgatttaaactgtgtttcacttaacaagttttacaaacaaatgaacagggtttaatggagcgtgcctaaaaatgtactgtttcaactttcgttcatatgtacactgttcgtaagtatatgggccatctggacagtgggtaaagattgcaatgtggtgtatccatacacaatcaaccctccaggtcctttgatccgcgactatggacacagtggctaacgggcccagtagacttaaatgtgctggatgatgtcagtgctcgcaccacccttgtaactacatggctctgaaacaggtcggacctggggatagcacccacggcatacagcatgatccccttatagcctgactcaacacgaattcttcgccacgcgtggtcaatccgctgccacctaatacaaggatccgttgtccatggcaagcaagaaagcctacatacctgagcaaggttcgttatcatctcggt

SEQ ID NO: 163723 - DNA, 628 bp, Homo Sapiens
tcagtacagtcaccatcatgtagatcctgtgacacaagatatatgcgaggaactcttaagcttagtctttgattctgacagaggtattctatggactgctgcattgaaaagggcttgctgttttcatccaacacctctgtgttgtgtggtcttgctgtgaaaaagaagacaataccttgtattcagtttaagtaggaccactggaggatgcaattatcgggactgtttttaaaacctaaaagcacgtttctttagccgaactctgaagggacagtaaagatacagtattttataaatcaatattctgcatcaaaaagcctcccaaagtgccgtgctgggattacaggtgtgagccaccgcacccagcctaatgtttttaaagagcaccctatgctaaagctggatgtttagactaagatctatgcagcatcctggtcatataaaactcttccatgtttccttgtctttatgcatgtttcatatgtctatgttgcttcatggctcctgtcaactgactgactttacaaataatgtattttttaaattatattaatttacttcaactcagttaaatcctttccatttcttgtacgtaagaaaagttatttattgcctacatggacaggag

SEQ ID NO: 163724 - DNA, 856 bp, Homo Sapiens
ggactcttgagactcaaggtgaagatgaggaagataaagagaatattccttccacagatgtctcatcacccgccatggatgctgctggaatacacctacggcagtttagtaatgaggcttctacccatggtacacatttggttgtgactgccatgtctgttacacaaaatcagtccagtgcttctgagaaagaattagcactgttgcaggatgttgaaagggagaaagacaataacactgtggatatggttgatcctatagagatagcagatgagaccacttggattaaggagccggttgataatggcagcttacccatgactgattttgtaagtggcattgccttcagtattgaaaactctcatatgtgcatgtcacctcttgctgaaagcagagtcattccttgtgaaagcagcaacattcagatggatagtggctataatacgcagaattgtggaagcaatattatggatacagctggggcagaaagttactgcagagaaagtgatgcacagacatgtgaagttgagagtaaatctcaagcatttaatatgaagcaagaccacacaacacagaggtgttggatgaaaacagcaagcccttttcaatgcagcagtccatagaatacctctgtcagaatcaaagactaagcctaagagttcctcgcatatatcgatgtgcacaggatcaacatgatggtgacttggggaaaaaattacttcaagtaacatgcttagctttccctccttaatgtgaaaaatcaagggcttactgacataggaacaacagaaatgctcctggaacttcaagttgctgaattataagtttattttttatcaataaatatttttatact

SEQ ID NO: 163725 - DNA, 758 bp, Homo Sapiens
ctgtatcccggggaggggcacgggcacccccgcggtcctcgggaggctatagatcatggaagggaagtggttgctgtggaggttactggtgcttggaactgctattgttgaggctcatgatggacatgatgatgatgtgattgatattgaggatgaccttgacgatgtcattgaagaggtagaagactcgaaaccagataccactgctcctccttcatctcccaaggttacttacaaagctccagttccaacaggggaagtatattttgctgattcttttgacagaggaactctgtcagggtggattttatccaaagccaagaaagacgataccgatgatgaaattgccaaatatgatggaaagtgggaggtagaggaaatgaaggagtcaaagcttccaggtgataaaggacttgtgttgatgtctcgggccaagcatcatgccatctctgctaaactgaacaagcccttcctgtttgacaccaagcctctcattgttcagtatgaggttaatttccaaaatggaatagaatgtggtggtgcctatgtgaaactgctttctaaaacaccagaactcaacctggatcagttccatgacaagaccccttatacgattatgtttggtccagataaatgtggagaggactataaactgcacttcatcttccgacacaaaaccccaaacgggtatctatgaagaaaaacatgctaagaggccagatgcagatctgaagacctattttactgataagaaaacc

SEQ ID NO: 163726 - DNA, 1209 bp, Homo Sapiens
cgaaagggtatcactctgataggagtggttaatatcgaggtgatgcttttgatatctggggccaagggacaatggtcaccgtctcttcagcctccaccaagggcccatcggtcttccccctggcaccctcctccaagagcacctctgggggcacagcggccctgggctgcctggtcaaggactacttccccgaaccggtgacggtgtcgtggaactcaggcgccctgaccagcggcgtgcacaccttcccggctgtcctacagtcctcaggactctactccctcagcagcgtggtgaccgtgccctccagcagcttgggcacccagacctacatctgcaacgtgaatcacaagcccagcaacaccaaggtggacaagagagttgagcccaaatcttgtgacaaaactcacacatgcccaccgtgcccagcacctgaactcctggggggaccgtcagtcttcctcttccccccaaaacccaaggacaccctcatgatctcccggacccctgaggtcacatgcgtggtggtggacgtgagccacgaagaccctgaggtcaagttcaactggtacgtggacggcgtggaggtgcataatgccaagacaaagccgcgggaggagcagtacaacagcacgtaccgtgtggtcagcgtcctcaccgtcctgcaccaggactggctgaatggcaaggagtacaagtgcaaggtctccaacaaagccctcccagcccccatcgagaaaaccatctccaaagccaaagggcagccccgagaaccacaggtgtacaccctgcccccatcccgggatgagctgaccaagaaccaggtcagcctgacctgcctggtcaaaggcttctatcccagcgacatcgccgtggagtgggagagcaatgggcagccggagaacaactacaagaccacgcctcccgtgctggactccgacggctccttcttcctctacagcaagctcaccgtggacaagagcaggtggcagcaggggaacgtcttctcatgctccgtgatgcatgaggctctgcacaaccactacacgcagaagagcctctccctgtctccgggtaaatgagtgcgacggccggcaagcccccgctccccgggctctcgcggtcgcacgaggatgcttggcacgtaccccgtgtacatacttcccgggcgcccagcatggaaataaagcacccagcgctgcctggccc

SEQ ID NO: 163727 - DNA, 426 bp, Homo Sapiens
ccagcactggaagtcggcggtgtttccattcggtgatcagcactgaacacagaggactcaccatggagtttgggctgagctgggttttcctcgttgctcttttaagaggtgtccagtgtcaggtgcagctggtggagtctgggggaggcttggtccagcctgggaggtccctgagactctcctgtgcagcctctggattcaccttcagtagctatgccatgcactgggtccgccaggctccagggaaggggctggagtgggtctcagctattactggtaatggtggtactagatactatgcagactccgtgaagggccgattcaccatctccagagacaattccaagaacacgctgtatctgcaaatgaacagcctgagagccgaggacaccggtgtttatttctgtgccgagagatcccagttac

SEQ ID NO: 163728 - DNA, 105 bp, Homo Sapiens
  misc_feature (76)..(76): n is a, c, g, or t
attcagacacgtcaccggtcggggaagtagtcatgaccaggcagcccagggccgctgtgcccccagagtgctcttnggaggagggtgccagggggaagaccgatg

SEQ ID NO: 163729 - DNA, 1548 bp, Homo Sapiens
gtatactgttctcctgtaggaaaacccatgaacgtgcgaaatatgagatcgcctagcgatgcggggtcttggactcggggtaggcagcagtgcaagtgaaggtcttcccatggttccatggctcggcacagcccgacaggacactggacacgctgtagcagccacagaggtcacgcgcaggtggtccttgaacagcgctcttcccacttggagggcgtccaggtgaaggcgacacctgaagcatctctcaagccggtcagtgtgcacgtgagggtcgcttctgaacctaagagcaggtcctggacctcccgtgcaagaacatgaaacacctgtggttcttcctcctgctgggggcagctcccagatgggtcctgtcccaggtgcagctgcaggagtcgggcccaacactggtgaagccttcacagaccctgtcccttcacctgcactgtctctggtgcctccatcagcagtggtgacgactactggagttggatccgccagcccccagggaagggcctggagtggattggctacatctattacaatgggaacacctactacaacccgtccctcaagagtcgagttaccatatcaacagacatgtccaagaacgagttctccctgaagctaaactctgtgactgccgcagacacggccgtgtattactgtgccagatcatataacaacagaggggacttctggggccagggaaccctggtcaccgtctcttcagcatccccgaccagccccaaggtcttcccgctgagcctctgcagcacccagccagatgggaacgtggtcatcgcctgcctggtccagggcttcttcccccaggagccactcagtgtgacctggagcgaaagcggacagggcgtgaccgcagaaacttcccacccagccaggatgcctccggggacctgtacaccacgagcagccagctgaccctgccggccacacagtgcctagccggcaagtccgtgacatgccacgtgaagcactacacgaatcccagccaggatgtgactgtgccctgcccagttccctcaactccacctaccccatctccctcaactccacctaccccatctccctcatgctgccacccccgactgtcactgcaccgaccggccctcgaggacctgctcttaggttcagaagcgaacctcacgtgcacactgaccggcctgagagatgcctcaggtgtcaccttcacctggacgccctcaagtgggaagagcgctgttcaaggaccacctgagcgtgacctctgtggctgctacagcgtgtccagtgtcctgccgggctgtgcgagccatggaaccatgggaagaccttcacttgcactgctgcctaccccgagtccaagaccccgctaaccgccaccctctcaaaatccggaaacacattccggcccgaggtccacctgctgccgccgccgtcggaggagctggccctgaacgagctggtgacgctgacgtgcctggcatttggcttcagcccaaggatgtgctggttcgctggctgcaggggttaaaggagctttccccg

SEQ ID NO: 163730 - DNA, 526 bp, Homo Sapiens
aatgcagggatacaattcaggtctcaaacaagccctccagcccccatcgagaaaaccatctccaaagccaagggcagccccgagaaccacaggtgtataccctgccccattcccgggatgagctgaccaagaaccaggtcagcctgacctgcctggtcaaaggcttctatcccagcgacatcgccgtggagtgggagagcaatgggcagccggagaacaactacaagaccacgcctcccgtgctggactccgacggctccttcttcctctacagcaagctcaccgtggacaagagcaggtggcagcaggggaacgtcttctcatgctccgtgatgcatgaggctctgcacaaccactacacgcagaagagcctctccctgtctccgggtaaatgagtgcgacggccgcaagcccccgctccccaggctctcggggtcgcgcgaggatgcttggcacgtaccccgtgtacatacttcccgggcgcccagcatggaaataaagcacccagcgctccctggcccctgcg

SEQ ID NO: 163731 - DNA, 410 bp, Homo Sapiens
acgttcaagttggtccctttaaaaaaccgctccttcccaacttgaaggcctcccaattgaaagttgaacaccctgaggcatctcctcaggccggtcaagtgtgccacgtgaaggttcgcttctgaacctaaaagcaggtccctcgagggccggtcggtgcagtgacagtcgggggtggcagcatgagggagatggggtaggtggagttgagggagatggggtaggtggagttgagggaactgggcagggcacagtcacatcctggctgggattcgtgtagtgcttcacgtggcatgtcacggacttgccggctaggcactgtgtggccggcagggtcagctggctgctcgtggtgtacaggtccccggaggcatcctggctgggtgggaagtttctgcggtcacgccctg

SEQ ID NO: 163732 - DNA, 364 bp, Homo Sapiens
cccccatggttcccatggctggcacagccaggcaaggacactggacacgctgtagcagccacagaggtcacgctcaggtggtccttgaacagcgctcttcccacttgagggcgtccaggtgaaggtggcaccagaggcatctctcaggccagtcagtgtgcacgtgaggttcgcttctgaacctaagagcaggtcctcgagggccagtcggtgcagcgacagtcgggggtggcagcatgggggaggtgggggaactgggcagggcacagtcacatcctggctgggattcgtgtagtgcttcacgtggcatgtcacggacttgccgtctgggcactgtgtggccggcagggtcagctggctgctc

SEQ ID NO: 163733 - DNA, 164 bp, Homo Sapiens
ctggcggatccagccccagtagtaattagtattgctgatggagccaccagagacagtgcaattgagggacagggtctccgaaggcttcaccagtcctgggcccgactcctgcagctgcagctgggacaggacccatctgggagccgccaccagcaggaggaaga

SEQ ID NO: 163734 - DNA, 361 bp, Homo Sapiens
gagcgctgttcaaggaccacctgagcgtgacctctgtggctgctacagcgtgtccagtgtcctgccgggctgtgcgagccatggaaccatgggaagaccttcacttgcactgctgcctaccccgagtccaagaccccgctaaccgccaccctctcaaaatccggaaacacattccggcccgaggtccacctgctgccgccgccgtcggaggagctggccctgaacgagctggtgacgctgacgtgcctggcagcgggcttcagccccaaggacgtgctggttcgctgggctgcaggggtcacaggagctgccccgcgagaagtacctgacttggggcatcccggcaggagcccagccaggg

SEQ ID NO: 163735 - DNA, 367 bp, Homo Sapiens
  misc_feature (23)..(23): n is a, c, g, or t
  misc_feature (45)..(45): n is a, c, g, or t
  misc_feature (96)..(96): n is a, c, g, or t
  misc_feature (135)..(135): n is a, c, g, or t
  misc_feature (143)..(143): n is a, c, g, or t
ttaacgcttgaaatttccttggnacggggctttaagccccaaagnaacgtgctggtttcgctggctgcaggggttcacaggaagctgccccgcganaaagtacctgacttgggcatcccggcaggagcccagccngggcaccnaccaccttcgctgtgaccagcatactgcgcgtggcagccgaggactggaagaagggggacaccttctcctgcatgggttgccacgaggcccctccgctggccttcacacagaagaccatcgaacgcttggcgggtaaacccacccatgtcaatgtgtctgttgtcatggcggaggtggacggcacctgctactgagccgcccgcctgtccccacccctgaataa

SEQ ID NO: 163736 - DNA, 392 bp, Homo Sapiens
tggtcccttgaaacagcgctcttccccacttgaaggccatcccagttgaaaggtgacacctaaggcatctctcaggccggtcagtgtgcacgtaaggttcgcttctgaacctaagagcaggtcctcgagggccggtcggtgcagtgacagtcgggggtggcagcatgagggagatggggtaggtggagttgagggagatggggtaggtggagttgagggaactgggcagggcacagtcacatcctggctgggattcgtgtagtgcttcacgtggcatgtcacggacttgccggctaggcactgtgtggccggcagggtcagctggctgctcgtggtgtacaggtccccggaggcatcctggctgggtgggaagtttctgcggtcacgccctg

SEQ ID NO: 163737 - DNA, 358 bp, Homo Sapiens
ccttgaactcggggtaaggcaagcagtgccaagtgaaggtccttccccatggttcccatggcctcgcacagcccggcaggacactggacacgctgtagcagccacagaggtcacgctcaggtggtccttgaacagcgctcttcccacttgagggcgtcccaggtgaaggtgacacctgaggcatctctcaggccggtcagtgtgcacgtgaggttcgcttctgaacctaagagcaggtcctcgagggccggtcggtgcagtgacagtcgggggtggcagcatgagggagatggggtaggtggagttgagggagatggggtaggtggagttgagggaactgggcagggcacagtcacat

SEQ ID NO: 163738 - DNA, 358 bp, Homo Sapiens
aacagtcgggggtggcaagcaatgggggaaggtgggggaaactgggcagggcacagtcacatcctggctgggattcgtgtagtgcttcacgtggcatgtcacggacttgccgtctgggcactgtgtggccggcagggtcagctggctgctcgtggtgtacaggtccccggaggcatcctggctaggtgggaagtttctggcggtcacgttctgatcctttcgctccaggtcacactgagtggctcctgggggaagaagccctggaccaggcatgcgacgaccacgttcccatcttggggggtgctgtcgaggctcagcgggaagaccttggggctggtcggggatgctgaagagacgg

SEQ ID NO: 163739 - DNA, 246 bp, Homo Sapiens
  misc_feature (32)..(32): n is a, c, g, or t
  misc_feature (55)..(55): n is a, c, g, or t
  misc_feature (68)..(70): n is a, c, g, or t
  misc_feature (77)..(77): n is a, c, g, or t
  misc_feature (124)..(124): n is a, c, g, or t
  misc_feature (168)..(168): n is a, c, g, or t
  misc_feature (176)..(176): n is a, c, g, or t
  misc_feature (212)..(212): n is a, c, g, or t
gggaagagtatgacacgcgcgctggtcagggncgcactgagttccacggagcacncagtcaccggttnnngaagtantcttgaccaggcagcccagggccgctgtgcccccagaggtgctcttnggaggagggtgccagggggaagaccgaatgggcccttggtgganggctgaangagacggtcgaccattgtcccttggccccagatatncaaaacgccaaatggtcgtagtcaccgtagtccc

SEQ ID NO: 163740 - DNA, 415 bp, Homo Sapiens
  misc_feature (33)..(33): n is a, c, g, or t
  misc_feature (37)..(37): n is a, c, g, or t
  misc_feature (63)..(63): n is a, c, g, or t
  misc_feature (74)..(74): n is a, c, g, or t
  misc_feature (80)..(80): n is a, c, g, or t
  misc_feature (90)..(90): n is a, c, g, or t
ggggtgtcccacagctcgctcatagaaggcacncgtncacacaagactcggctgaaggcagtngagattcctgnagagantgtaggacangccgggaaaggtgtgcaacgccggctaggttcaaggggcgcctgagtttccaacgaacaccgtcaccggttcggggaatatcttgacagcagcccaggccgctgtgcccccagaggtgctcttggaggagggtgccagggggaagaccgatgggcccttggtggaagctgaagagacggtgaccactgtcccttggccccagagatcaaaagcagttcgaacggggttaaaaccgtagtccccccctctcgcacaataatacacagccgtgtcctcggctctcaggctgttcatttgcagatccagtgaattcttggcgttgtct

SEQ ID NO: 163741 - DNA, 499 bp, Homo Sapiens
  misc_feature (41)..(41): n is a, c, g, or t
  misc_feature (45)..(45): n is a, c, g, or t
tgggttgctagctgctttctacccctgatacctcagtatgntctngactcataggataaccatgcgccgctcccccaggtcttcccgctgagcctctgcagcacccattcagatgggaacgtggtcatcgcatgcctggtccagggcttcttcccccaggagccactcagtgtgacctggagcgaaagcagacagaacgtgaccgccagaaacttcccacccagccaggatgcctccggggacctgtacaccacgagcagccagctgaccctgccggccacacagtgcccagacggcaagtccgtgacatgccacgtgaagcactacacgaatcccagccaggatgtgactgtgccctgcccagttcccccacctcccccatgcttgccacccccgactgtcgcttgcaccgaccggccctcgaggaccttgttcttaggttcagaagcgaacttcacgttgcacattgaaccggcttgagagatgcttttggttgcca

SEQ ID NO: 163742 - DNA, 457 bp, Homo Sapiens
acaataatccgaaaacacattcccggccgagggtacaacctgtgacacagccgtcggaggagctggccctgaacgagctggtgacgctgactgcctggcacgtgcttcagccccaaggatgtgctggttcgctggctgcaggggtcacaggagctgccccgcgagaagtacctgacttgggcatcaccgacaggagcccagccagggcaccaccaccttacgtgtgacaagcatactgcgcgtggcagccgaggactggaagaagggggacaccttctcctgcatggggggccacgaagcacctccgctggccttcacaaagaagaccatagaccgcttggcggtaaacccacccatgtcaatgtgtctgttgtcatggcggaggtggacggcacctgctactgagccgcccgcctgtccccacccctgaataaactccatgctcccccaagcaaaa

SEQ ID NO: 163743 - DNA, 585 bp, Homo Sapiens
ctgagcgtgactcttgtggttctacagcgtgtccagtgtcttgccgggtttgcgagccatggaaccatgggaagaccttcacttgcactgctgcctaccccgagtccaagaccccgctaaccgccaccctctcaaaatccggaaacacattccggcccgaggtccacctgctgccgccgccgtcggaggagctggccctgaacgagctggtgacgctgaagtgcctggcacgtggcttcagccccaaggatgtgctggttcgctggctgcaggggtcacaggagctgccccgcgagaagtacctgacttgggcatcccggcaggagcccagccagggcaccaccaccttcgctgtgaccagcatactgcgcgtggcagccgaggactggaagaagggggacaccttctcctgcatggttgccacgaggccctccgctggccttcacacagaagaccatcgaccgcttggcgggtaaacccacccatgtcaatgtgtctgttgtcatggcggaggtggacggcacctgctactgagccgcccgcctgtccccacccctgaataaactccatgctcccccaagcaaa

SEQ ID NO: 163744 - DNA, 447 bp, Homo Sapiens
ttccgggcccgagaggtccaaccttttgccgccgcccttgggaggagcctgcccctgaacgaagctggtaacgctgaactgctgggcaagtgggttcagccccaaggatgtgctggttcgctggctgcaggggtcacaggagctgccccgcgagaagtacctgacttgggcatccccgcaggagcccagccagggcaccaccaccttcgctgtgaccagcatactgcgcgtggcagccgaggactggaagaagggggacaccttctcctgcatggtgggccacgaggccctccgctggccttcacacagaagaccatcgaccgcttggcggtgaaacccacccatgtcaatgtgtctgttgtcatggcggaggtggacggcacctgctacttgagccgcccgcctgttccccacccctgaataaactccatggttcccccaagcagc

SEQ ID NO: 163745 - DNA, 535 bp, Homo Sapiens
  misc_feature (478)..(478): n is a, c, g, or t
  misc_feature (507)..(507): n is a, c, g, or t
  misc_feature (518)..(518): n is a, c, g, or t
acgaatcccagccaggatgtgactgtgccctgcccagttcccccacctcccccatgctgccacccccgactgtcgctgcaccgaccggccctcgaggacctgctcttaggttcagaagcgaacctcacgtgcacactgaccggcctgagagatgcctctggtgccaccttcacctggacgccctcaagtgggaagagcgctgttcaaggaccacctgagcgtgacctctgtggctgctacagcgtgtccagtgtcctgcctggctgtgccagccatggaaccatggggagaccttcaccttgcactgctgcccaccccgagttcaagaccccactaaccgccaacattcacaaaatccgggaaacacatttccggcccgaggttcaacttgctggccgtcggcgttcggagggaagcttgggcccttgaaacggaggttgggtgaaggttgaagttgccttgggaatttggggttttnaagccccaaagggttgttggttgggtttnggttggggttngaaaggggttgaaaagg

SEQ ID NO: 163746 - DNA, 680 bp, Homo Sapiens
  misc_feature (229)..(229): n is a, c, g, or t
  misc_feature (349)..(349): n is a, c, g, or t
  misc_feature (593)..(593): n is a, c, g, or t
  misc_feature (599)..(599): n is a, c, g, or t
  misc_feature (616)..(616): n is a, c, g, or t
  misc_feature (621)..(621): n is a, c, g, or t
  misc_feature (626)..(626): n is a, c, g, or t
  misc_feature (645)..(645): n is a, c, g, or t
  misc_feature (664)..(664): n is a, c, g, or t
gcagccgtctattactgttccgcggatgtcccgagtcgtggttcgggggaacttgactactggggccagggaaccctggtcaccgtctcctcagcatccccgaccagccccaaggtcttcccgctgagcctctgcagcacccagccagatgggaacgtggtcatcgcctgcctggtctagggcttcttcccccaggagccactcagtgtgacctgggagcgaaaggaancagggcgtgaccgcaagaaacttcccacccagccaggatgcctccggggacctgtacaccacgagcagccagctgaccctggccggccacacagtgcctagccggcaagtccgtgacatngccacgtgaagcactacaagaattcccagccaggatgtgactgtgccctgcccagttccctcaactccacctaccccatctccctcaactccacctaccccatctccctcatgctgccacccccgactgtcacttgcaccgaccggccctcgagggacctgcttttaggttcagaagcgaaccttaagtggcacattgaacgggctttagagatggcttcaggtgttaactttaacttggggangccttnaaagtgggggaaggaanccttnttttnaaaggggccaattttaggntttaaatttttttggggtngtttaaaaaggttttt

SEQ ID NO: 163747 - DNA, 672 bp, Homo Sapiens
attcggaacaggggctttctcctctgccagagatcaccctgtgttctgcgccctggtcaatggtgaaggagaagtgacagacttcccccgaccagccccaaggtcttcccgctgagcctcgacagcaccccccaagatgggaacgtggtcgtcgcatgcctggtccagggcttcttcccccaggagccactcagtgtgacctggagcgaaagtatcagaacgtgaccgccagaaacttcccacctagccaggatgcctccggggacctgtacaccacgagcagccagctgaccctgccggccacacagtgcccagacggcaagtccgtgacatgccacgtgaagcactacacgaatcccagccaggatgtgactgtgccctgcccagttcccccacctcccccatgctgccacccccgactgtcgctgcaccgaccggccctcgaggacctgctcttaggttcagaagcgaacctcacgtgcacactgaccggcctgagagatgcctctggtgccaccttcacctgggacgcccttcaagtggggaagagcgctgtttcaaggaccaccttgaggcgtgacctctgtgggtggttacagcgtgttccagttgttcttgcctggggtgttgtcccaggccattgggaaccattgggggagaactttcaacttg

SEQ ID NO: 163748 - DNA, 511 bp, Homo Sapiens
  misc_feature (458)..(458): n is a, c, g, or t
cactacacgaatcccagccaggatgtgactgtgccctgcccagttccctcaactccacctaccccatctccctcaactccacctaccccatctccctcatgctgccacccccgactgtcactgcaccgaccggccctcgaggacctgctcttaggttcagaagcgaacctcacgtgcacactgaccggcctgagagatgcctcaggtgtcaccttcacctgggacgccctcaagtgggaagagcgctgttcaaggaccacctgagcgtgacctctgtgggctgctacagcgtgtccagtgtcctgccgggctgtgcgagccatgggaaccatggggaaggaccttcactttgcactgctggccttaccccgagtccaaggaccccggttaaccgccacccttttcaaaatccggggaaacacatttccgggcccgaggttccacttgtttgccgccgnccgttgggaggagttgggccttgaaaggagtttggtgaagttgaagttgctgg

SEQ ID NO: 163749 - DNA, 486 bp, Homo Sapiens
  misc_feature (410)..(410): n is a, c, g, or t
  misc_feature (448)..(448): n is a, c, g, or t
  misc_feature (462)..(462): n is a, c, g, or t
attcggcactagggcgaacctcacgtgcacactgaccggcctgagagatgcctcaggtgtcaccttcacctggacgccctcaagtgggaagagcgctgttcaaggaccacctgagcgtgacctctgtggctgctacagcgtgtccagtgtcctgccgggctgtgcgagccatggaaccatgggaagaccttcacttgcactgctgcctaccccgagtccaagaccccgctaaccgccaccctctcaaaatccggaaacacattccggcccgaggtccacctgctgccgccgccgtcggaggagctggccctgaacgagctggtgacgctgacgtgcctgggcattgggctttcagcccaaggatgttgctggtttcgttgggttgcaggggttaaaggagctttccccgngaagaagttacctgaatttggggatttccgggaagagnccaggccaggggancaaccaactttggttgttgaacag

SEQ ID NO: 163750 - DNA, 570 bp, Homo Sapiens
  misc_feature (18)..(18): n is a, c, g, or t
  misc_feature (74)..(74): n is a, c, g, or t
  misc_feature (84)..(84): n is a, c, g, or t
  misc_feature (96)..(96): n is a, c, g, or t
  misc_feature (110)..(110): n is a, c, g, or t
  misc_feature (131)..(131): n is a, c, g, or t
  misc_feature (157)..(157): n is a, c, g, or t
  misc_feature (164)..(164): n is a, c, g, or t
cctaagcaatctctaaanccgttcaatttcaacttcaagttcccttctaaacctaaaaacaagtccctccaagnccgttcgttncaataaaattcnggttggcaaccatnaaggcaaaatggggtaagtgnaattgaaggcaaaatggggtaagtgnaattganggaaactgggcagggcaacagtcacatcctggctgggattcgtgtagtgcttcacgtggcatgtcacggacttgccggctaggcactgtgtggccggcagggtcagctggctgctcgtggtgtacaggtccccggaggcatcctggctgggtgggaagtttctggcggtcacgccctgaatactttcgctccaggtcacactgagtggctcctgggggaagaagccctggaccaggcaggcgatgaccacgttcccatctggctgggtgctgcagaggctcagcgggaagaccttggggctggtcggggatgctgaagagacggtgaccatggtcccctggccccagaagtcaatagcgcacggtcctagacatccccaacttatgagtctcgcacaataaaacac

SEQ ID NO: 163751 - DNA, 689 bp, Homo Sapiens
  misc_feature (116)..(116): n is a, c, g, or t
  misc_feature (169)..(169): n is a, c, g, or t
  misc_feature (233)..(233): n is a, c, g, or t
  misc_feature (265)..(265): n is a, c, g, or t
  misc_feature (608)..(608): n is a, c, g, or t
  misc_feature (617)..(617): n is a, c, g, or t
  misc_feature (644)..(644): n is a, c, g, or t
caaatgaacagcctggaaaccgaggacgcagccgtttattactgtaccactttaggatacggtggtgcctccaactactggggccagggaactctggtcaccgtctcctcagcatncccgaccagccccaaggtcttcccgctgagcctctgcagcacccagccagatnggaacgtggtcatcgcctgcctggtccagggcttcttcccccaggagccactcagtgtgacctnggagcgaaaggtatcagggcgtgaccgccagnaaacttcccacccagccaggatgcctccggggacctgtacaccacgagcagccagctgaccctgccggccacacagtgcctagccggcaagtccgtgacatgccacgtgaagcactacacgaatcccagccaggatgtgactgtgccctgcccagttccctcaactccacctaccccatctccctcaactccacctaccccatctccctcatgctgccacccccgactgtcactgcaccgaccggccctcgaggacctgctcttaggttcagaagcgaacctcacgtggcacactgaccggcctgaggagatgcctcaggtgttcacctttcactgggacggncttcaagtngggaagagcggtgtttcaagggaccanttgaccgtggacttttgtgggttgttaaaggtttttcagtgttct

SEQ ID NO: 163752 - DNA, 441 bp, Homo Sapiens
ccggaaaaaaaattccggccccgaggtcccaacctgtgccgcccgccgtcggaaggagctggcccctgaaacgaagctggtgaacgctgaaatcccctggcacgtggcttcagccccaaggatgtgctggttcgctggctgcaggggtcacaggagctgccccgcgagaagtacctgacttgggcatcccggcaggagcccagccagggcaccaccaccttcgctgtgaccagcatactgcgcgtggcagccgaggactggaagaagggggacaccttctcctgcatggttgccacgaggccctccgctggccttcacacagaagaccatcgaacgcttggcgggtaaacccacccatgtcaatgtgtctgttgtcatggcggaggtggacggcacctgctactgagccgcccgcctgtccccacccctgaataaactcca

SEQ ID NO: 163753 - DNA, 542 bp, Homo Sapiens
  misc_feature (18)..(18): n is a, c, g, or t
  misc_feature (32)..(32): n is a, c, g, or t
  misc_feature (64)..(64): n is a, c, g, or t
  misc_feature (123)..(123): n is a, c, g, or t
cttaaggttccccttctnaaaccctaaaaaancaagtccctccaaaggcccggtcggttgccantgaacaatccgggggtggcaaccatgagggaaaatggggtaaggtggaattgagggaanatggggtaaggtggagttgagggaaactgggcagggcacagtcacatccctggctgggattcgtgtagtgcttcacgtggcatgtcacggacttgccggctaggcactgtgtggccggcagggtcagctggctgctcgtggtgtacaggtccccggaggcatcctggctgggtgggaagtttctggcggtcacgccctgctacctttcgctccaggtcacactgagtggctcctgggggaagaagccctggaccaggcaggcgatgaccacgttcccatctggctgggtgctgcagaggctcagcgggaagaccttggggctggtcggggatgctgaggagacggtgaccagcattccctggccccagtagtcaaagtagtaggaataaacaccactgtcatagtaaaaatgaactctc

SEQ ID NO: 163754 - DNA, 491 bp, Homo Sapiens
  misc_feature (46)..(46): n is a, c, g, or t
  misc_feature (303)..(304): n is a, c, g, or t
  misc_feature (408)..(408): n is a, c, g, or t
  misc_feature (447)..(447): n is a, c, g, or t
gagatgcctctggtgccaccttcacctggacgccctcaagtgggangagcgctgttcaaggaccacctgaccgtgacctctgtggctgctacagcgtgtccagtgtcctgccgggctgtgccaagccatggaaccatgggaagaccttcacctgcactgctgcccaccccgagtccaagaccccactaaccgccaacatcacaaaatccggaaacacattccggcccgaggtccacctgctgccgccgccgtcggaggagctggccctgaacgagctgggtgacgctgacgtgcctggcagtnnggcttcagccccaaggatgtgctggttcgctgggctgcaggggtcacagggagctgccccgcgaggaagtacctgacttggggcattccggcaggagcccagcnaggggaaccaccaactttggttgtgaaccaggataattngggttggcagccgaggtattggaagataggggggaaaacttttt

SEQ ID NO: 163755 - DNA, 724 bp, Homo Sapiens
  misc_feature (38)..(38): n is a, c, g, or t
  misc_feature (94)..(94): n is a, c, g, or t
  misc_feature (106)..(106): n is a, c, g, or t
  misc_feature (235)..(235): n is a, c, g, or t
  misc_feature (259)..(259): n is a, c, g, or t
  misc_feature (275)..(275): n is a, c, g, or t
  misc_feature (638)..(638): n is a, c, g, or t
  misc_feature (695)..(695): n is a, c, g, or t
aggagccctgtagcatctgcacgcacacgggccgtgtnattactgtggcgagaagccattaatgactacggtgaataactactactactacggntatggacgtctngggtccaagggaccacggtcactggtctcctcaggcatccccgaccagccccaagggtcttcccgctgagcctctgcaggcacccagccagatgggaacgtggtcatcgcctgcctggtccagggcttnttcccccaggagccactcagtgtnacctggagcgaaaggnaccagggcgtgaccgcagaaacttcccacccagccaggatgcctccggggacctgtacaccacgagcagccagctgaccctgccggccacacagtgcctagccggcaagtccgtgacatgccacgtgaagcactacacgaatcccagccaggatgtgactgtgccctgcccagttccctcaactccacctaccccatctccctcaactccacctaccccatctccctcatgctgccacccccgactgtcactgcaccgaccggccctcgaggacctgctcttaggttcagaagcgaaccttcacgtgcacactgaccggccttgaggagatggccttcaggtgttcaactttcaactgggganggccttcaagttggggaaggagcggttgttttaaagggaccaacttgaacgttgaanttttgttgggttgttaaaaggttgttttt

SEQ ID NO: 163756 - DNA, 539 bp, Homo Sapiens
  misc_feature (14)..(14): n is a, c, g, or t
  misc_feature (29)..(29): n is a, c, g, or t
  misc_feature (35)..(35): n is a, c, g, or t
  misc_feature (42)..(42): n is a, c, g, or t
  misc_feature (48)..(48): n is a, c, g, or t
  misc_feature (60)..(60): n is a, c, g, or t
  misc_feature (92)..(92): n is a, c, g, or t
  misc_feature (120)..(120): n is a, c, g, or t
aaaagcaatctctnaagccgttaaatttncacttnaagttcncttctnaaacctaaaaancagttccttcaaaggcccggtcgttgcaaccnaacagtcgggggtggcaagcaatggggnaaggtggggaaactgggcagggcaacagtcacaccctggctgggattcgtgtagtgcttcacgtggcatgtcacggacttgccgtctgggcactgtgtggccggcagggtcagctggctgctcgtggtgtacaggtccccggaggcatcctggctaggtgggaagtttctggcggtcacgttctgatactttcgctccaggtcacactgagtggctcctgggggaagaagccctggaccaggcatgcgacgaccacgttcccatcttggggggtgctgtcgaggctcagcgggaagaccttggggctggtcggggatgctgaagagacgggtgaccacgggctccctggccccagaggtcaaaggaccagcctctaccatctctaacacaataatagacggccgtgtcgtcgcttttca

SEQ ID NO: 163757 - DNA, 455 bp, Homo Sapiens
cgctgtaatgagtggcatgtgagctcatctggtggagtcgggggaggttggtcagccgggggggtccctgagactctcttgtacagcctctggattcaccttcagtgactatgcaatgcactgggtccgccaggctccagggaagggactggactatgtttcaggtattagtggtgatgggcaaaccagatacgacgcagaatccgtgaagggcagaatcatcatctccagagacaattccaagagcacgctgtttcttcaatagaccactctgagaactgaagacacggctgtatattactgtgtgaaagatcggtcttcggttataggaatggccacgcgctttgactactggggccaggggtctctgctcatcgtctcttcagcctccaccaaggccccatcggtcttccccctggcaccctcctccaagagcacctctgggggcacagcgg

SEQ ID NO: 163758 - DNA, 873 bp, Homo Sapiens
gatatgcacatccggttgaggtgcatcagttttcttatactccataccactggtctgtttctttccagaacagcagaagaggataaccaggaacacaggaagggctacagttagaatatagactacccacagccacgggcgctcttcagctgcctcgatcatctgccccacaacgcctggctcagcagccccatcagcagctttcttcaggccccatccatcattggcccaatcatcaactattcttcgatcagcacaaatgataaagttgtcaaaaaaaatgtcagaggtcatggaccacagctccaaaccaatagcactaaaaggagtcattctgaaaggttccagatcttcaaagaaatctggatttggtattttcctgggtttccagattccctggtaactgggattgtcaatcataggaggcttccatttgcctttataattggggttgtcaatcacaggtcgctgccagacaccacatccaggagctgactcacatctagggttggcaatctgaggagcctcccattctccatccatgtcttcatcccaatcctcaggtttctctgcgtctggatcaggtacgtactcaggctcatcatctaaccagccttcgggttttgtggcctcttcatctggaatcttagcaggggcatcttcatcccagtcatctggcttgacagcttctggatctgggatttttggtctttcatcccaatcctcgggcttccggtcttctgggtcctcaatttcacgtgaaggatttacaggaggagtcatgtcattgagcagatttccactattcaccacagattggtcaaccagtatttcaaaactattatctgattcaggagatgggggtcctctaga

SEQ ID NO: 163759 - DNA, 250 bp, Homo Sapiens
  misc_feature (84)..(84): n is a, c, g, or t
  misc_feature (129)..(129): n is a, c, g, or t
  misc_feature (173)..(173): n is a, c, g, or t
  misc_feature (181)..(181): n is a, c, g, or t
  misc_feature (216)..(216): n is a, c, g, or t
gtaggacagccgggaaggtgtgcacgccgctggtcagggcgcctgagttccacgacaccgtgcaccggttcggggaagtagtcnttgaccaggcagcccagggccgctgtgcccccagaggtgctcttnggaggagggtgccagggggaagaccgaatgggcccttggtgganggctgaangagacggtcgaccattgtccctagccccagatatncaaaacgccaaatggtcgtagtcaccgtagtccc

SEQ ID NO: 163760 - DNA, 291 bp, Homo Sapiens
  misc_feature (15)..(15): n is a, c, g, or t
  misc_feature (35)..(35): n is a, c, g, or t
  misc_feature (167)..(167): n is a, c, g, or t
  misc_feature (175)..(175): n is a, c, g, or t
  misc_feature (187)..(187): n is a, c, g, or t
  misc_feature (190)..(190): n is a, c, g, or t
  misc_feature (202)..(202): n is a, c, g, or t
  misc_feature (211)..(211): n is a, c, g, or t
  misc_feature (230)..(230): n is a, c, g, or t
  misc_feature (247)..(247): n is a, c, g, or t
  misc_feature (249)..(249): n is a, c, g, or t
  misc_feature (252)..(252): n is a, c, g, or t
  misc_feature (273)..(273): n is a, c, g, or t
ggataatcggatgangggcgactacggtgaactanaactgttttgatatctggggccaagggacaatggtcaccgtctcttcagcctccaccaagggcccatcggtcttccccctggcaccctcctccaagagcacctctgggggcacagcggcctgggctgcctgngtcaagantacttccccganccngttgtaaaccgngatcgttcngttgctgtcaacatctccnatgggcgccctccttgnanccncaggccgggcccgttcgcacnaacttttttcctctgtgg

SEQ ID NO: 163761 - DNA, 415 bp, Homo Sapiens; identical to SEQ ID NO: 163740
  misc_feature (33)..(33): n is a, c, g, or t
  misc_feature (37)..(37): n is a, c, g, or t
  misc_feature (63)..(63): n is a, c, g, or t
  misc_feature (74)..(74): n is a, c, g, or t
  misc_feature (80)..(80): n is a, c, g, or t
  misc_feature (90)..(90): n is a, c, g, or t

SEQ ID NO: 163762 - DNA, 640 bp, Homo Sapiens
  misc_feature (41)..(41): n is a, c, g, or t
  misc_feature (45)..(45): n is a, c, g, or t
  misc_feature (553)..(553): n is a, c, g, or t
  misc_feature (559)..(559): n is a, c, g, or t
  misc_feature (576)..(576): n is a, c, g, or t
  misc_feature (581)..(581): n is a, c, g, or t
  misc_feature (586)..(586): n is a, c, g, or t
  misc_feature (605)..(605): n is a, c, g, or t
  misc_feature (624)..(624): n is a, c, g, or t
tgggttgctagctgctttctacccctgatacctcagtatgntctngactcataggataaccatgcgccgctcccccaggtcttcccgctgagcctctgcagcacccattcagatgggaacgtggtcatcgcctgcctggtgcagggtttcttcccccaggagccactcagtgtgacctggagcgaaagcggacagggcgtgaccgcaagaaacttcccacccagccaggatgcctccggggacctgtacaccacgagcagccagctgaccctgccggccacacagtgcctagccggcaagtccgtgacatgccacgtgaagcactacacgaatcccagccaggatgtgactgtgccctgcccagttccctcaactccacctaccccatctccctcaactccacctaccccatctccctcatgctgccacccccgactgtcacttgcaccgaccggccctcgagggacctgcttttaggttcagaagcgaaccttaagtggcacattgaacgggctttagagatggcttcaggtgttaactttaacttggggangccttnaaagtgggggaaggaanccttnttttnaaaggggccaattttaggntttaaatttttttggggtngtttaaaaaggttttt

SEQ ID NO: 163763 - DNA, 570 bp, Homo Sapiens; identical to SEQ ID NO: 163750
  misc_feature (18)..(18): n is a, c, g, or t
  misc_feature (74)..(74): n is a, c, g, or t
  misc_feature (84)..(84): n is a, c, g, or t
  misc_feature (96)..(96): n is a, c, g, or t
  misc_feature (110)..(110): n is a, c, g, or t
  misc_feature (131)..(131): n is a, c, g, or t
  misc_feature (157)..(157): n is a, c, g, or t
  misc_feature (164)..(164): n is a, c, g, or t

SEQ ID NO: 163764 - DNA, 694 bp, Homo Sapiens
  misc_feature (116)..(116): n is a, c, g, or t
  misc_feature (169)..(169): n is a, c, g, or t
  misc_feature (233)..(233): n is a, c, g, or t
  misc_feature (509)..(509): n is a, c, g, or t
  misc_feature (585)..(585): n is a, c, g, or t
  misc_feature (623)..(623): n is a, c, g, or t
  misc_feature (673)..(673): n is a, c, g, or t
caaatgaacagcctggaaaccgaggacgcagccgtttattactgtaccactttaggatacggtggtgcctccaactactggggccagggaactctggtcaccgtctcctcagcatncccgaccagccccaaggtcttcccgctgagcctctgcagcacccagccagatnggaacgtggtcatcgcctgcctggtccagggcttcttcccccaggagccactcagtgtgacctnggagcgaaaggtatcagggcgtgaccgccagaaacttcccacccagccagggatgcctccggggacctgtacaccacgagcagccagctgaccctgccggccacacagtgcccagacggcaagtccgtgacatgccacgtgaagcactacacgaatcccagccaggatgtgactgtgccctgcccagttcccccacctcccccatgctgccacccccgactgtcgctgcaccgaccggccctcgaggacctgctcttaggttcagaagcgaacctnacgtgcacactgaccggcctgagagatgcctctggtgccacctttcacctgggacgtcctcaagtgggaagagcgnttttcaaggaccacctgagcgtgacctgtgtgggctgntaacagcgtgttccagttgttcctgtctgggtttgtccagccatgggaancattggggagaattttcaact

SEQ ID NO: 163765 - DNA, 542 bp, Homo Sapiens; identical to SEQ ID NO: 163753
  misc_feature (18)..(18): n is a, c, g, or t
  misc_feature (32)..(32): n is a, c, g, or t
  misc_feature (64)..(64): n is a, c, g, or t
  misc_feature (123)..(123): n is a, c, g, or t

SEQ ID NO: 163766 - DNA, 423 bp, Homo Sapiens
agtgtcaggctgaatttctcctgaatgtcatcagtttctttctttcttcctgcaatggttttagctctctctgtggctgctgtagtttagcctcataaaatttctctcttgccttttcatttactccagtatctttctgtgttttattggcatttcctctagtgttatttgaattttgcttggtgtcttcttctgctgggtagaaatcatccaaatttgatgcactggcagagataactccttgagctgcatcatcatcctgtaccatagcaacaagatcttgtaactgtctaagtttctgttttgcagccataagtcggttgatcttctgttcaaattcagcatcttctggatgctcatcaaccagactgctcctgtgactagataatgaagctccactgactacggcctcactgacaacgg

SEQ ID NO: 163767 - DNA, 274 bp, Homo Sapiens
tgtttttttcctggtattaaaagtgaacctctgatgaatgagagcagtagagggttagagagaaaaggatggaatatattataaaacatgaaggaagatggactgcaagtagagacttgagttcaagaggaaacgagtttagaaagaccttgattgataagaggactaagaagacacagacaaaaaactaggtataagaaacagaaaataattattaggcatttcccttcaaaatgtcaaaaacaacataatgatgtacgatttagcactgacg

SEQ ID NO: 163768 - DNA, 493 bp, Homo Sapiens
  misc_feature (72)..(120): n is a, c, g, or t
atatccgtacaaatgaaagtagaaaaattaggcactgatactagtgttagatgttggttaaagcttctggcnnnnnnnnnnnnnnnnnnnnnnnnnnnnnnnnnnnnnnnnnnnnnnnnncagtttatgctgtaatccagaccaaggtttcaatctaatgaagttaatgccagtgttgctgctacctattttgtctttagtcattcagccatgcttcctacttatactgaataagctagcttaatctaacaatcaaaaaagaaagctgttgcctaagttaagaaaaacagtttgaactgttttcaaactaaatacccgtagactctctagttgtgacaggagaatgcttaattcagaattgtcctgcagtagatcattttatctcattcctgttcttctataggatagcttatttgtttgaaattgtatttaatatgttgtgatttttgtgtgcttgtttctatttttcactggatagactcaagataaaacc

SEQ ID NO: 163769 - DNA, 1368 bp, Homo Sapiens
gtagtgtggcgtagttgttcgtggaagttcccagcgagtgcgaagacctacgcagaaaaagatcgtgtttccgcttagggaatgtgttaaggaatcatgattttattgagacctaccgttctgatggagtacagcgttgggtgaattttccccaaaacattctttagagatagtctttctaggatacctccatagaccatatacgggtgctgtattcctcagcttctgagttggtaccagggataatgcagaagtagcccaggaaaacggtattcctgttgccttatgcacaaggttataaccaacacaacattctcaaaaatggagtcactctcatggggacaccaggtgacgtgaaataaggccagagggtgtggtatgtgttgcaatgtcctgtaagatacaagtttaagagactgtctttcttggaagtgtctaatacaggtagtaggtgctagtttctggtatctagataggccagaaagtttctcccaggtttcaagtgctgaggatttgctgtgagcctgctcagttttagagggtgtgacactgcgtcctctcctttagtaattccaacaaatgtgtatgcagaaacagtattggctagtctgttgaactgtttatcattcagaactctaaatgctttctaacaatttatctgttattttctagggacattccagcgacatcacacaccttgactggtccccagacaacaagtatataatgtctaactcgggagactatgaaatattgtactgggacattccaaatggctgcaaactaatcaggaatcgatcggattgtaaggacattgattggacgacatatacctgtgtgctaggatttcaagtatttggtgtctggccagaaggatctgatgggacagatatcaatgcactggtgcgatcccacaatagaaaggtgatagctgttgccgatgactttggtaaagtccatctgtttcagtatccctgctccaaagcaaaggctcccagtcacaagtacagtgcccacagaagccatgtcaccaatgtcagttttactcacaatgacagtcacctgatatcaactggtggaaaagacatgagcatcattcagtggaaacttgtggaaaagttatctttgcctcagaatgagactgtagcggatactactctaaccaagagcccccgtctcttccactgaaaggtgtcatccaatctaaatactcgcaaacggcgccttcttcagcccttaaatgagacagctgaagaggaaagtagaataagcagtctccacattctgggaaagctggacaaatgggggcaagtgagacacaggaggggatgtagggcggggacgagtgaatggatcagccagtgtctg

SEQ ID NO: 163770 - DNA, 533 bp, Homo Sapiens
gtgtaaaagtaaagtccgtctgtttcagtatccctgctccaaagcaaaggctcccagtcacaagtacagtgcccacagcagccatgtcaccaatgtcagttttactcacaatgacagtcacctgatatcaactggtggaaaagacatgagcatcattcagtggaaacttgtggaaaagttatctttgcctcagaatgagactgtagcggatactactctaaccaaagcccccgtctcttccactgaaagtgtcatccaatctaatactcccacaccgcctccttctcagcccttaaatgagacagctgaagaggaaagtagaataagcagttctcccacacttctggagaacagcctggaacaaactgtggagccaagtgaagaccacagcgaggaggagagtgaagagggcagcggagaccttggtgagcctctttatgaagagccatgcaacgagataagcaaggagcaggccaaagccacccttctggaggaccagcaagacccttcgacctcgtccaaccaatagggtt

SEQ ID NO: 163771 - DNA, 689 bp, Homo Sapiens
gagctcctcacataccttgactggtccccagacaacaagtatataatgtctaactcgggagactatgaaatattgtactgggacattccaaatggctgcaaactaatcaggaatcgatcggattgtaaggacattgattggacgacatatacctgtgtgctaggatttcaagtatttggtgtctggccagaaggatctgatgggacagatatcaatgcactggtgcgatcccacaatagaaaggtgatagctgttgccgatgacttttgtaaagtccatctgtttcagtatccctgctccaaagcaaaggctcccagtcacaagtacagtgcccacagcagccatgtcaccaatgtcagttttactcacaatgacagtcacctgatatcaactggtggaaaagacatgagcatcattcagtggaaacttgtggaaaagttatctttgcctcagaatgagactgtagcggatactactctaaccaaagcccccgtctcttccactgaaagtgtcatccaatctaatactcccacaccgcctccttctcagcccttaaatgagacagctgaagaggaaagtagaataagcagttctcccacacttctggagaacagcctggaacaactgtggagccaagtgaagaccacagcgaggaggtatgtgagggctgggggtcctctagagcgccg

SEQ ID NO: 163772 - DNA, 304 bp, Homo Sapiens
ctagaactactaattatctctcaaggctgaaaaattaattgccttaggtggagaacttaattcctagtatccaccaaacttaactccgtatctccatatggtgtctccatatctactgtgtgagctacttaactgacgccctcttcctccaactgaaggatcgcccaacgtttttggattatagaattattatttcctgctttctttctttgggacttttgaatttctttggtttcgtttttaagaagtaacccaacattcctactacactatataaaatgtacggattaccgggacctctaga

SEQ ID NO: 163773 - DNA, 879 bp, Homo Sapiens
atatgcgtacatgtatggatttaatctagtctaataatttgtgccccgcagtggtgccagagtgcatagtctgagtaaaatctaggtgatagattcatcatgcacgacctgcctcagtccattgtaacctgtagcaaccttctgcattcataaatcttgtaatcatgttaccattacaaatgggatataagaggcagcgtgaaagcagatgagctgtggactagcaatatagggttttgtttggttggttggtttgataaagcagtatttggggtcatattgtttcctgtgctggagcaaaagtcattacactttgaagtattatattgttcttatcctcaattcaatgtggtgatgaaattgccaggttgtctgatatttctttcagacttcgccagacagattgctgataataaattaggtaagataatttgttgggccatattttaggacaggtaaaataacatcaggttccagttgcttgaattgcaaggctaagaagtactgcccttttgtgtgttagcagtcaaatctattattccactggcgcatcatatgcagtgatatatgcctataatataagccataggttcacaccattttgtttagacaatcgtctctttttcaagatgctttgtttctttcatatgaaaaaaatgcattttataaattcagaaagtcatagatttctgaaggcgtcaacgtgcattttatttatggactggtaagtaactgtggtttactagcaggaatatctccaatttctacatttactacatcttttcaacaagtaactctgtagaaatgagccagaagcaaaggccctgagtcggcagtggccaactaagtgtaaaataaaagtttacagaaaccttaaaa

SEQ ID NO: 163774 - DNA, 361 bp, Homo Sapiens
ctagaggatcccttagcactaaacaagttcttgctctcaggaatttgtcagaaaaaagaataaatcacctgagacgcacataccagattataaactcatctcgtaggtatgaattgcttactcacatgtcataaattaaccacagcttcatttgaccaccaggtctaaagtcggttgacagtttcagcatgactgaatcgctcattttttttatttgctttcagaaatgggatgggttctctttagaagttggtgtaaacatgccatgtaataaatgatttccacttaatggtacaacagaattattgctttcttagatgtatgtgtagtacaagtcaatatacacatttatataatttct

SEQ ID NO: 163775 - DNA, 539 bp, Homo Sapiens
gtagaatactggtacatgagaagggagaggccatcactaataactttcctttgcaaaaactgcagtgtgctagcctgttctggggaagatatccatgtaattgagaaaatgcatcacgtcaatatgaccccagaattcaaggaactttacattgtaagagaaaacaaaacactgcaaaagaagtgtgccgactatcaaataaatggtgaaatcatctgcaaatgtggcccaggcttggggaacaatgatggtgcacaaaggcttagatttgccttgtctcaaaataaggaattttgtagtggttttcaaaaataattcaacaaagaaacaatacaaaaagtgggtagaattacctatcacatttcccaatcttgactattcagaatgctgtttatttagtgatgaggattagcacttgattgaagattcttttaaaatactatcagttaaacatttaatatgattatgattaatgtattcattatgctacagaactgacataagaatcaataaaatgattgttttactctgaaaaaaaa

SEQ ID NO: 163776 - DNA, 791 bp, Homo Sapiens
tatcctgtaattgagaaaatgcatcacgtcaatatgaccccagaattcaagtgagtccagaaagacccatttttacatttttccacaaggggtgaagcaggttgcattgtaaatgttctttcaaaatagtgcaaatgagattcatttattttacaacttcctctcctttagcctctcaattatattcctattttaaatgtctatgttttaaataaactgcactggggcaggaaaagagaagtgtaagaaccaaagccattttgatccaaggcacgtatttttgtatgctcatcatttgttctcaaatttttgaacaactaaagtcaagttaatataaccaacagacttgaaagaagttatgaaaggcaacatgccccttgagaggtatgtgtagaagagaagcattgccttagttgcaataacaagcctgggaagcaggagggaaggaaggaatgccgtgtagaataccgcaggcatgcggatgagctccaggtccaataacccatgaactacacactggtattttgtcagttctccatgatgattctttccctttgatacttatagggaactttacattgtaagagaacacaaagcactgcaaaagaagtgtgcccactatcaaataaatggtgaaatcatctgcaaatgtggccaggcttggggaacaatgatggtgcacaaaggcttagatttgccttgtctcaaaataaggaattttgtagtggttttcaaaaataattcaacaaaggaaacaatacaaaaagtgggtagaattacctatcacattt

SEQ ID NO: 163777 - DNA, 437 bp, Homo Sapiens
  misc_feature (46)..(127): n is a, c, g, or t
gcatgtctgatgatcgctggctccaccgggacagcaacggttcttnnnnnnnnnnnnnnnnnnnnnnnnnnnnnnnnnnnnnnnnnnnnnnnnnnnnnnnnnnnnnnnnnnnnnnnnnnnnnnnnnnccataccctagcctgctagctaccacattacctttgaaaaatccctaacctccaagccttagatgagtatgatttgagtaataactctgcctcccacatggtgtggatggcatcatgtcaattaacctctttctttactgcagtgccagggtctccatgaactgatttttttgtgcagtgggcaggaagaacccatcgggcagctacacatcttgaaagagaagctcttcctgtgaggtacatcaactgtggttaagaatcttacatacttatcattttttgttgttgtgagaagagttaaaaatctccc

SEQ ID NO: 163778 - DNA, 622 bp, Homo Sapiens
  misc_feature (356)..(396): n is a, c, g, or t
ccggtaagcgagctgctagagtggacagtgaagcacaccatacactgtacagtgctcgacagtgtccatgagaccataagtagatagctgaatttggctttagacagcccaataatactgttacagtcatgctaagacgaaacggaaggaccaagaactaaatcttgccaaagctgtgtcaaatagcagaatttgacaggctgcactggtaaccacgacaaatggttggcaaacttaatggaatagttatcataataatttgacctctgatgatgaaagcaccagtgtgtttcagtaaggttgacgaaaatcctcagacttgatgaaatggcaaatttttcaactgtataattttnnnnnnnnnnnnnnnnnnnnnnnnnnnnnnnnnnnnnnnnnctgcagacttaaagaaatatatccatattccttctgcattaataaagtaaaatcttatactgagagcaatgaactctgtggcaatattcacattctacctttagaccttatagacattcaattcaactgtatggacacacacaaatttaagaataaagggtggtcctgtttagttttaaagtttctccattgtcttgcatccaattttctttatttaatagcgaag

SEQ ID NO: 163779 - DNA, 354 bp, Homo Sapiens
gttgtttgttttttcgccactaattttagtattcattctgcattgctagataaaagctgaagttactttatgtttgtcttttaatgcttcattcaatattgacatttgtagttgagcggggggtttggtttgctttggtttatattttttcagttgtttgtttttgcttgttatattaagcagaaatcctgcaatgaaaggtactatatttgctagactctagacaagatattgtacataaaagaatttttttgtctttaaatagatacaaatgtctatcaactttaatcaagttgtaacttatattgaagacaatttgatacataataaaaaattatgacaatgtcaaaaaaa

SEQ ID NO: 163780 - DNA, 850 bp, Homo Sapiens
gggggagaccagcctacagccgcctgcatctgtatccagcgccaggtcccgccagtcccagctgcgcgcgccccccagtcccgcacccgttcggcccaggctaagttagccctcaccatgccggtcaaaggaggcaccaagtgcatcaaatacctgctgttcggatttaacttcatcttctggcttgccgggattgctgtccttgccattggactatggctccgattcgactctcagaccaagagcatcttcgagcaagaaactaataataataattccagcttctacacaggagtctatattctgatcggagccggcgccctcatgatgctggtgggcttcctgggctgctgcggggctgtgcaggagtcccagtgcatgctgggactgttcttcggcttcctcttggtgatattcgccattgaaatagctgcggccatctggggatattcccacaaggatgaggtgattaaggaagtccaggagttttacaaggacacctacaacaagctgaaaaccaaggatgagccccagcgggaaacgctgaaagccatccactatgcgttgaactgctgtggtttggctgggggcgtggaacagtttatctcagacatctgccccaagaaggacgtactcgaaaccttcaccgtgaagtcctgtcctgatgccatcaaagaggtcttcgacaataaattccacatcatcggcgcagtgggcatcggcattgccgtggtcatgatatttggcatgatcttcagtatgatcttgtgctgtgctatccgcaggaaccgcgagatggtctagagtcagcttacatccctggagcaggaagtttacccatggaagatgg

SEQ ID NO: 163781 - DNA, 613 bp, Homo Sapiens
ccatgctactcggcgtgaaacgtgtgatcaataactaagggatgaaaatggactctaaattcattagttagcagtatgacactggaaaatataatgcaacttctttaaatctcagttcctcctttgtaaagttgcgatactccctattagaagatcaataagtcctcttccaggctccaagcgcaagatgttccggggaatgagatggaagctacatccctttatggtccagcctcagcagtcacccggggtaacttccctgcactcagtaggtgacagtaatgccagactgcctagtatcaagggaaggacttagtctacctccagatacaggaaatggcaatgtcacattctagaagggcatattgctgtgagatgtgtgatacccatcttaggaacatatgccacatcagattactgttctgtgaaatgaagaaaaatgagttggggctgcagttaattggtaagacctcttctaacattagaatgatgcacttctttaaaattaaaatcccattttctttaaaaacataatttaccaaatgatgatatgcttttttagagagtctactttaggatatcttaaatagagagtaccctgtacgactcaccg

SEQ ID NO: 163782 - DNA, 1683 bp, Homo Sapiens
  misc_feature (649)..(684): n is a, c, g, or t
  misc_feature (1110)..(1277): n is a, c, g, or t
  misc_feature (1286)..(1299): n is a, c, g, or t
  misc_feature (1305)..(1418): n is a, c, g, or t
  misc_feature (1455)..(1511): n is a, c, g, or t
  misc_feature (1569)..(1624): n is a, c, g, or t
tgaaaaactttttataaaaaattgtttgatatttcttaatgtctgctctgagccttaaaacacagattgaagaagaaaagaaagaaaaaacttaagtatttatttctatgctttgttgcctccgagaataatgacaatttatgaatttgtgtttcaaattgataaaatatttatggtacaaataacaagactaataatattttcttatttaaaaaaagcatgggaagatttgtatttatcaaaatatagaggaaatgtagacaaaatggatataaatgaaaattaccatgttgtaaaaccttgaaaatcagattctaactggatttgtatgcaactaagtatttttctgaacacctatgcaggtcttagtttacagtagttactaagggaacacacaaagaattacacaacgttttcctcaagaaaatggtacaaaacacaaccgaggagcgtatacagttgaaaacattttgttttgattggaaggcagattattttatattagtattaaaaatcaaaccctatgtttctttcagatgaatcttccaaagtggattatattaagcaggtattagatttaggaaaacctttccatttcttaaagtattatcaagtgtcaagatcagcaagtgtccttaagtcaaacagnnnnnnnnnnnnnnnnnnnnnnnnnnnnnnnnnnnnagaaagttctagaaaataggaaaacgaaaaatttcattgagatgagtagtgcatttaattattttttaaaaaactttttaagtacttgaattttatatcaggaaaacaaagttgttgagccttgcttcttccgttttgccctttgtctcgctccttattctttttttggggggagggttatttgcttttttatcttcctggcataatttccattttattcttctgagtgtctatgttaacttccctctatcccgcttataaaagaaattctccaacaaaaatacttgttgacttgatgttttatcacttctctaagtaaggttgaaatatccttattgtagctactgtttttaatgtaaaggttaaacttgaaaagaaattcttaatcacggtgccaaaattcattttctaacaccatgtgttagnnnnnnnnnnnnnnnnnnnnnnnnnnnnnnnnnnnnnnnnnnnnnnnnnnnnnnnnnnnnnnnnnnnnnnnnnnnnnnnnnnnnnnnnnnnnnnnnnnnnnnnnnnnnnnnnnnnnnnnnnnnnnnnnnnnnnnnnnnnnnnnnnnnnnnnnnnnnnnnnnnnnnnnnttttggggnnnnnnnnnnnnnnaaaaannnnnnnnnnnnnnnnnnnnnnnnnnnnnnnnnnnnnnnnnnnnnnnnnnnnnnnnnnnnnnnnnnnnnnnnnnnnnnnnnnnnnnnnnnnnnnnnnnnnnnnnnnnnnnnnnnccccggggggaaaccagaggttttaaaaaaacccaannnnnnnnnnnnnnnnnnnnnnnnnnnnnnnnnnnnnnnnnnnnnnnnnnnnnnnnnattatttcccccccccttggaaattttggaaaaaaggggggaaaatcttaaaaacttnnnnnnnnnnnnnnnnnnnnnnnnnnnnnnnnnnnnnnnnnnnnnnnnnnnnnnnnaaaaccactttgggcccctgggataaaaaaatttcccccccgggggaaaaacggggggg

SEQ ID NO: 163783 - DNA, 941 bp, Homo Sapiens
gtgaaatcgtacagtttaccaggaatgcttcattaaatcaaacaggcaggcgaactgcttaagcaactgatgaacagaatcaagccactggaggaacacagggcattgttcgttatggtcctccacattctcttggtggccacagcgatctccaaacttgtgcccaaaatccagccagtcagactccactaacacttggaagccctccaacgtcctgtaatatgggtccagtaatattttggccagggctacgatctgcggtgtgcggtcccagccatctgagcagtgtaccagcacaggccggccttcccggtctactgtattagccaccagcacagctgcttttagcatcaccgacaagtgctgcagccatttggtactctccagtgccgacaaccagttgctaggatccggcatctggctacacacagcccggaggtactgaaagctgttccggatggcatggatgttggccattcccatgaacacgacctcacagttgggatagtactcttcacattcacagcctccacccttggcccggtgggccactgctaacgtgtaggatcgcgcatccaggatcagcagcttttgaggagctgctgtgctctccactccagagcacgcagtcagagaagaatctaaacacacagcaggaaggagtccctgagtcagccagccacccaacctcttgctggccctctggcactccctctcagaaggcagaacatgcaactagagacccctcataccccacagcttctgacaaggcagggaccccagcaccccgtgtgttgtcatcttcccagactctcactggggactccctgggagccaatgaagccaaggagggggcctgctccctggggggttagcatcatccacaccttaccaaagtcagcatcacacgcctcgccggtatcattattcccggtgctgag

SEQ ID NO: 163784 - DNA, 944 bp, Homo Sapiens
tttggaaatctgcatccctccacaaagtagtgtcttccatctgaaattgaagtgaaatacaaaatggctgaatgttatacaatgctaaaacaagataaagatgccattgctatacttgatgggatcccttcaagacaaagaactcccaaaataaacatgatgctggcaaacctgtacaagaaggctggtcaggagcgcccttcagtcaccagctataaggaggtgctgaggcagtgcccattagcccttgatgccattctaggcttgttgtacctttctgtaaaaggggcagaggtggcatccatgacaatgaatgtgatccaaaccgtgcctaacttggactggctctctgtgtggatcaaagcgtatgcttttgtgcacactggtgacaactcaagagcaatcagtaccatctgttcactagagaaaaaatccttattgcgagataacgtggacctattgggaagcttggcagatctgtacttcagagctggagaccataaaaactctgtcctcaagtttgaacaggcacagatgttggatccttatctgataaaaccaaatttagagtatttagagaactgtaattcgtagggcatggctggatcatggagccccaagtgaaggaaggaggtaggaggtgaggctgaagacagattgcagaaaataaatgcaaaactaggctgagaaagagtgactagcacggtcgaggggatcttaacctaacacgtgggggatgagtggtatatagataaataaagggtcttggtggcactctagaatctatgcttatttctagtactggtctatgaaatttgtatactgagaaaaactcattttatgtttcaaccttggtaatccagccctttgtctgaagccaaaaaaattacatagttgaagactgtgcttatgtattagctgaccctcatcttcctgtacgatgt

SEQ ID NO: 163785 - DNA, 754 bp, Homo Sapiens
  misc_feature (450)..(473): n is a, c, g, or t
gctgcggatcaccggaaagagacctgtgagcttactctatctggtacggttaacgcgcgtaatccgtaccagatgaaacccagaaaacaccaaatgatgttcttcatgctgagaatgttaaagcaggccgtgataagtacaagactctgcgacagattcgacaaggccataccaagcagcgtatcgatgagtttgaagccatgtgagagctgttattttgcatatatgttcttcataagctgaaccacctacagagaaaagcaggcctttgcagatatgatggaatgcatcccaccttgcccaagcacttacaccagtttgactgtgctagctaaaagacaaatttaaggggagctcttcaacattaaggcagtatgatatcatgcttggttttcttttttcttttggtcccgggaatggagaatggtgttccattgcctcttttcacannnnnnnnnnnnnnnnnnnnnnnnctgttgaagattaacactaattatcacgtctgacaaatgtgtatgtgtggtttcagttctgtgtacattttaaaggataatggtgaacattttaatgggtttcccttgccctttccatatttaacctatttccacattctctctcactcacattttctcagtgtgcccttctcttatctgccatgtccatagccataattccaccatcatacagatcaggcagtgtttaaaatgatggtaggtagcacagtggacagtctttgatcacgtgtagaaattga

SEQ ID NO: 163786 - DNA, 1023 bp, Homo Sapiens
cctcaccatccaagccagcttctgccccagcctccagatctgggtccaagagcactcagactgttgcaaaaaccacaacagctgctgctgttgcctcaactggcccaagcagtaggagcccctccacgctcctgcccaagaagcccactgccattaagactgagggaaaacctgcagaagtcaagaagatgactgcaaagtctgtaccagctgacttgagtcgcccaaagagcaagcttacagtgcttgaatgaaacactcacatcatgcaccaaagaagtaggaaaggctgctttggaaaaacagatagaagaaataaatgagcaaatcagaaaagagaaagaggaagctgaggctcgtatgcgacaagcatctaagaacacagagaaatcaactggtggaggtggaaatggaagtaaaaagtggtcagaagatgatctacaattactaattaaagctgtgaatctgttccctgctggaacaaattcaagatgggaagttattgctaattacatgaacatacattcttcctctggagtcaaaagaactgccaaagatgttattggcaaagcaaagagtctccaaaaacttgaccctcatcaaaaagatgacataaataaaaaggcatttgataagttcaaaaaagaacatggagtggtacctcaagcagacaacgcaacgccttcagaacgatttgaaggtccatatacagacttcaccccttggacaacagaagaacagaagcttttggaacaagctttgaaaacatacccagtaaatacacctgaaagatgggaaaaaatagcagaagcggtgcctggcaggacaaagaaggactgcatgaaacgatacaaggaacttgtcgagatggtaaaagcaaagaaagctgctcaagaacaagtgctgaatgcaagtagagccaagaaatgacaatctttgttgtgtgtgcatttttataataaaactgaaaatactggtaaacattttcattcttaaaattatactcatggtaataatttgaaa

SEQ ID NO: 163787 - DNA, 1025 bp, Homo Sapiens
  misc_feature (877)..(919): n is a, c, g, or t
cgtacaaggccccgctgcaggggtggttcccagccgagtcaaaggccacaacccattgccctcccgggcccttccacaactcctttcatagacaagaagcccacctcggccaaacccagctccaccaccccccggctcagccgcctggccaccaatacttctgctcctgatctgaagaatgtccgctccaaggttggctccacggaaaacatcaagcatcagcctggaggaggccgggccaaagtagagaaaaaaacagaggcagctgctacaacccgaaagcctgaatctaatgcagtcactaaaacagccggcccaattgcaagtgcacagaaacaacctgcggggaaagtccagatagtctccaaaaaagtgagctacagccatattcagtccaagtgtggttccaaggacaatattaagcatgtccctggaggtggtaatgttcagattcagaacaagaaagtggacatctctaaggtctcctccaagtgtgggtctaaggctaacatcaagcacaagcctggtggaggagatgtcaagattgaaagtcagaagttgaacttcaaggagaaggcccaggccaaggtgggatccctcgataatgtgggccacctacctgcaggaggtgctgtgaagactgagggcggtggcagcgaggctcctctgtgtccgggtccccctgctggggaggagccggccatctctgaggcagcgcctgaagctggcgcccccacttcagccagtggcctcaatggccaccccaccctgtcagggggtggtgaccaaagggaggcccagaccttggacagccagatccaggagacaagcatctaatgatgacattctggtctcgtctatccgtctcccccgtgtnnnnnnnnnnnnnnnnnnnnnnnnnnnnnnnnnnnnnnnnnnnatgtcactgcgagattgagacctacaggctgacgttccgggcaaatgccaggtcccggacccgacacgggggcgacattgttctccgtaccccaattagaaaaaag

SEQ ID NO: 163788 - DNA, 1052 bp, Homo Sapiens
cttggataagcggatgagggggtagtgcagcttgccggccgaggaggattctgtgttagaaaaactaggggaaaggaaaccatgcaacagtcaaccttctgagctttcttcagagacctcaggaatagccaggccagaagaagcaaggcctgtggtgagtgggacaggaaaggacatcaccaccccaccggaaaaaggagctcccaccaagcccagagaagaaaacaaagcctttggccaccactcaacctgcaaagacttcaacatcgaaagccaaaacacagcccacttctctccctaagcagccagctcccaccaccattggtgggttgaataaaaaacccatgagccttgcttcaggcttagtgccagctgccccacccaaacgccctgccgtcgcctctgccaggccttccatcttaccttcaaaagacgtgaagccaaagcccattgcagatgcaaaggctcctgagaagcgggcctcaccatccaagccagcttctgccccagcctccagatctgggtccaagagcactcagactgttgcaaaaaccacaacagctgctgctgttgcctcaactggcccaagcagtaggagcccctccacgctcctgcccaagaagcccactgccattaagactgagggaaaacctgcagaagtcaagaagatgactgcaaagtctgtaccagctgacgttgagtcgcccaaagagcacctccaccagttccatgaagaaaaccaccactctcagtgggacagcccccgctgcaggggtggttcccagccgagtcaaggccacacccatgccctcccggccctccacaagctcctttcatagacaagaagcccacctcggccaaacccagctccaccaacccccggctcagccgcctggcaccaatacttctgctcctgatctgaagaatgtccgctccaaggttggctccacggaaaaacatcaagcatcagactggacggaagccggggtccagaatagtactccaacaaaaggtgagctaacagacataattcagtccaagtgttggtccaa

SEQ ID NO: 163789 - DNA, 605 bp, Homo Sapiens
cgcgtttatccgtacattgaaggaggagaacaaatcgtggaagatggaattggaatggctcacacagaacatgtaccagggactgcagagaatgcccggtcatgtattcgagcttatttttatgatctacatgaaactctgtgtcgtcaagaagaaatggctctaagtgttgttgatgctcatgttcgtgaaaaattgatttggctcaggcagcaacaagaagatatgactatttggttgtcagaggtttctgcagcctgcctccactgtgaaaagactttgcagcaggatgatagtagagtggtcttggcaaaacaggaaattacaaggttactggaaacattgcagaaacagcagcagcagtttacagaagttgcagatcacattcagttggatgccagcatccctgtcacttttacaaaggataatcgagttcacataggaccaaaaatggaaattcgggtcgttacgttaggataggatggtgctggaaaaactactatcttgtttaagttaaaacaggatgaattcatgcagcccattccaccaattggttttaacgtggaaactgtagaatatacacatctaaaattcactatctggga

SEQ ID NO: 163790 - DNA, 866 bp, Homo Sapiens
ggggtagtctcggaggcggcgccgcaggggattgaggggttgactgagcgttgcgagccttagctttctcccgaacgccagcgctgaggacacgatgtcgcggctctcccgctcactgctttgggccgccacctgcctgggcgtgctctgcgtgctgtccgcggacaagaacatgacccagtccccgaacgtgacgactttagcgcccatctccaacgtaacctcggcgccggtgacgtccctcccgctggtcaccactccggcaccagaaacctgtgaaggtcgaaacagctgcgtttcctgttttaatgttagcgttgttaatactacctgcttttggatagaatgtaaagatgagagctattgttcacataactcaacagttagtgattgtcaagtggggaacacgacagacttctgttccgtttccacggccactccagtgccaacagccaattctacagctaaacccacagttcagccctccccttctacaacttccaagacagttactacatcaggtacaacaaataacactgtgactccaacctcacaacctgtgcgaaagtctacctttgatgcagccagtttcattggaggaattgtcctggtcttgggtgtgcaggctgtaattttctttctttataaattctgcaaatctaaagaacgaaattaccacactctgtaaacagacccattgaattaataaggactggtaattcatctgtgtaactcactgaagccaaaatacttcaaataagatgtctcacatggaagacgctattccaggatctttaaagttccggtgatcctaagagtcgaagtgcatgcatacaagagactaaaatcaggcaagctagaaccct

SEQ ID NO: 163791 - DNA, 3659 bp, Homo Sapiens
  misc_feature (97)..(98): n is a, c, g, or t
  misc_feature (123)..(123): n is a, c, g, or t
  misc_feature (177)..(179): n is a, c, g, or t
  misc_feature (184)..(202): n is a, c, g, or t
  misc_feature (215)..(215): n is a, c, g, or t
  misc_feature (221)..(221): n is a, c, g, or t
  misc_feature (233)..(233): n is a, c, g, or t
  misc_feature (305)..(305): n is a, c, g, or t
  misc_feature (343)..(343): n is a, c, g, or t
  misc_feature (351)..(351): n is a, c, g, or t
  misc_feature (437)..(437): n is a, c, g, or t
  misc_feature (459)..(460): n is a, c, g, or t
  misc_feature (479)..(479): n is a, c, g, or t
  misc_feature (537)..(537): n is a, c, g, or t
  misc_feature (566)..(566): n is a, c, g, or t
  misc_feature (595)..(595): n is a, c, g, or t
  misc_feature (631)..(631): n is a, c, g, or t
  misc_feature (890)..(898): n is a, c, g, or t
  misc_feature (949)..(972): n is a, c, g, or t
  misc_feature (3581)..(3581): n is a, c, g, or t
tgtcgtgccgctctggcgggggccgaagaaaagtgatgtgtcgcgcggtcccaccgccggcagggtcgacatcactcaaacaatctaccatcaacannaacaccacccgcccgcgcggcgggnctgaccgctaccgtaggatgtacgatccgcgtcgactgcctccctcctcatgannnggttnnnnnnnnnnnnnnnnnnntctggcttccatncatcanatctaggggcgnccggcgcgcgcggttgagttctgcgctctatctatcacgtagttactgtttattcctcccccccgactggancagcccgtgttctcgtcgcgctgcatatgcatccacancacgcgcnccacaccaaaacagcctcggcgtgcgcgcgcgggacgccctcagcaattagtctccggcgtttggaatttgagagtagagggcggnggcgcgtagaaagggagggggnnagtggaggggggaccggcncgcgtcgacgctgtgtggtggtgggtgagggggggaggcaggggcccgctgccgcgcngtgggttggagttacgacggcgcgcggtntccgcatagccagggagaaggacgaatancccctccctgacgcctctagggtggtcggtgggatngtgttttgtgtggttttctcatagataaaaaaagactcacagcgacggggtgggtgtgtgtgtgtcgtctcgggcgccccgcgggcgggggcgcgggaggtttatgtttgtgagtggggtgggtggggggtgtcccgcggtcgaggcggcgcgccgtgttggtgggtgtgggggcggcgaagaggagtttcctctgttgtgcgaggaagaggagagacggagagaggcgccgcttcttgtgcgggtctcacacaatatnnnnnnnnncgagggtgcggcgacaaggaaaaagggtttttatggtgaagttttttgttnnnnnnnnnnnnnnnnnnnnnnnnaccaagatggttattttgtggtttgcgcgtttgtgtggtggtgttggccctaattgtattgttcgtttgtgttctggcgggttcgcggtgggaatggatggtgctcgtttttcttttcttgcgtgctctttcggggttgtggtggtgctttgtgttttggtggtttttttgcaataaacatgtagatttattttaagtcagtttggtacatgatacagattggttttgcagtttttaatgaactgaaatagaaatgtctaaatacagcagtatctgcctgtgcaacaaatatctgtaaggtaaaataaggtatttgatagaagaacatctgcaagaacaaatcagatgaaaaatctgaaaaggtttctatataccttctggattttaaaaaaacccaaaaattaatggctcaagatactacattgctaaagttaggggaaaaaagtaaaaaggctgtgagttctgttgcaagagctcatttgtagacttgcaaaatctaactaattttatattatgcttgttgttagagcagtgctcaaaattacagaagcttcaaattgttatgttttccaaaatttgctacatatgttgacatgaatgtgtgtcagggaattcatacccaggtaaatgacaattacatcagtatagctaatttttggcaccttgggaggaatggaattctgcctattttcgaattaatctacagcactcactaaaaactaacagccatggcaccataatacattttgtgaggtacctagaatattactaatggaaacaaaaaatgtgaggtaaaccgacctttccccaagaaactttgaagccagagattttaaacaattaaggcacttgaaaacattaagtatatgtacaaatgtgcaagtaaaacaaacagctgtaccaacgagtaacaaagaaacagtaaatcttcatcttaacaacctttaatagttatctaaatgcagagtttgtttatgaaatgaaacaaagcagtttgtcatttcttactataaaatattgaaaatcaagtgcgaaactcagccactattggctaaagaaactaaataaaaaacgttaatgacctagaaaagcaaaagcccattttaaactacttaaagcctctgcactagtccaatgagtcaaaggcaagggagaagtaaacctctaaaactgaagacgaccctctaaaggagaaaactatagaagttaaagtatgcatgcttattatactatgggaaaccaagaaggaagggagagaaaaagaaaaagcacagtctattcatccaggacaatcagtaaaaatctacagtaacctgatcaaccaaaaaatccttaggtgttgtgaaattacattggtcacttctgttatcttaaaacttaaaatgattgtctcatttaaaataaatgattctaaaataatatgattgtctcatttaaatagtaaatgattctaaaataatgtatatccttcttgcctcaccaaagaagtcactactcaagacagtctggtggaaatcctttcaaggtacaatagtgctagcatacttttttttaaagtacaaaggaaagtgtaattaaatcaatttagctctatacttttcaacagccataagaaaaatgttgggaggttcaagatacgaaggctttcaattctgtataacagactttagcttaagtttctccgctctgaaataaattttcaataaaatattaacagtatgatatctaaaacaggtttactactgctcacatcaagttacatcctctgaccaatccttaccttccttaatgtcaaagaacaaatcatagacattaagctagagcttacctttcactgtcttctaaggcactgttctttatattctcaatgacataaggtgctttacaagtatgaacaataatctgttatacacactaatggtatcctttcatttctttaaatctggaatgtagttccttgtgtggcatcttatttctaatgtagaaaaaacagctgttatcaagcacaaaattttaatctaaggataccatttagtactactaaattaataaatttattccacttttgaaatgacagccaaaaatccacctaattgattctcatttggcacgttcttctcaattctgttcactaaattaaaattactaaatttaaactgccaagagccatgatgttgtctgcacaagacaacattttccatcactttcagaaagttatatttggcatgttaaggaaaaaaaatataatcccacagcagcagctatttaaaataagacagccacaggattcatgcagaatattttaaatattcctgttgaacacaatgatttaattgattttttcttcacggatgatgctcccaaacatcctatatgcatccatggaaatttaaagatcctggaatagcgtcttccatgtgggacatcttaaaagatagtattttggcttcagtgagttacacaaatgaatcaccagtccttattaattcaatgggtctgtttacagagtgtggtaatttcgttctttagatttgcagaatttataaagaaagaaaattacagcctgcacacccaagaccaggacaattccttccatgaaactggctgcntcaaaggtagactttcgcacaggttgtgagggtggagtcacagtgttatttgttgacctgatgtgtaactggcttgga

SEQ ID NO: 163792 - DNA, 886 bp, Homo Sapiens
ttgcaccagacatcgactgaaagacctttcattcaagaagctgtttcgtcctgtgactgcagatgaacagttgcacacactaagagatctcctcaaagaagtttgtccttctgctattgatcctgaagatggggaaaaaaagaatcaagtgatgattcatgggaattgaaccaaagttggaaacaccttctgcagtggctgagtgaacatctgagctacccggataattttcttcatattagtatcatcccacagccaacagattgaaggatcaactatttgcctgaacagaatcatccttaaatgggatttatcagagcatgtcacccttttgcttcaatcaggtttggtggaggcaacctgaccagaaacacttcgctgctgcaaagccagacaggaaaaagattccatgtcagataaggcaactgggctggtcttactttgcatcacctctgctttcctccactgccatcattaaacctcagctgtgacatgaaagacttaccggaccactgaaggtcttctgtaaaatataatgaagctgaaacctttggcctaagaagaaaatggaagtatgtgccactcgatttgtatttctgattaacaaataaacaggggtatttcctaaggtgaccatggttgaactttagctcatgaaagtggaaacattggtttaattttcaagagaattaagaaagtaaaagagaaattctgttatcaataacttgcaagtaattttttgtaaaagattgaattacagtaaacccatctttccttaacgaaaatttcctatgtttacagtctgtctattggtatgcaatcttgtaactttgataatgaacagtgagagatttttaccaaacaaaaacccacaaagagaaagaac

SEQ ID NO: 163793 - DNA, 460 bp, Homo Sapiens
ccatcagtacacctgaaagtgtcgatctcctcaaaagaaaacacaaccacccacacaaataaatgccacggtcaacaaaaccaccaaatcaaccgtgctgacgtacatacgtcatcagagtgtgtctccagacactatccctttaccacgaaagagcaaacggtgacaaaagtttctgtagaaaccaaactcctggagcacttttataatgtccacttacctaagaaccaccacaatacagaactttaaagagagaaatcaacaatatgttctcacttaaaatgcgctggatgtcatgacccaccccactaacgtcctggctaaatgatgaaaggacgttcagccttttccttcctttttcattttctctttaaggaaacactgatagttcctaaaataagcaccattaggaagagaatacttaagttcactcatttgacattcccacaaaatcagtacc

SEQ ID NO: 163794 - DNA, 1663 bp, Homo Sapiens
tatcgtacatagtacaggccacaacctgttacagttgtgaattctcagacatgcttcaccatccatctgtaattccacagcagtctccattacacacaggggtaccaggacagatcccttcaggcactcctgttacagtaattcaacaagctgtcccacagagtcatatgtttggcagagtacagaacataccagcatgtacttctacagtttcacagggtcaacagttaatcaccacatcaccccaaccggtgcaaacttcatctcaacagacatcagctggtagccagtcacaagatactgttatcatagcacccccacagtatgtaacaacttctgcatccaatattgtctcagcaacttcagtacagaattttcaggtagctacaggacaaatggttactattgctggtgtcccaagtccacaagcctcaagggtagggtttcagaacattgcaccaaaacctctcccttctcagcaagtttcatctacagtggtacagcagccaattcaacaaccacagcagccaacccaacaaagcgtagtgattgtaagccagccagctcaacaaggtcaaacttatgcaccagccattcaccaaagtggttcttgctaatccagcagctcgtccagctggtcagacagttcagctaactggacaacctaacataactccatcttcttcaccatcacctgtcccagctactaataacaaagtccctactgccatgtcgtcgtcctctacccctcaatcacagggaccacctcctactgtcagtcaaatgttatctgtgaaaaggcagcaacagcagcaacattcaccagcacccccaccacagcaggtacaagtacaagttcagcagccccaacaagtacagatgcaagttcaacctcaacagtcgaatgcaggagttggtcagcctgcctctggtgagtcgagtctgattaaacagcttctgcttccgaaacgtggtccttcaacaccaggtggtaagcttattctcccagctccacagattcctccccctaataatgcaagagctcctagccctcagatggtctatcaggtggccagtaaccaagccgcaggttttggagtgcaggggcaaactccagctcagcagctattggttgggcagcaaaatgtacagttggtcccaagtgcaatgccaccctcagggggagtacaaactgtgcccatttcgaacttacaaatattgccaggtccactgatctcaaatagcccagcaaccattttccaagggacttctggcaaccaggtaaccataacagttgtgccaaatacgagttttgcacctgcaactgtgagtcagggaaatgcaactcagctcattgctccagccaggaattacccatgagcggaacgccagacaggagtttggacttcccagtacaaaacgccttcccaagccactccaagccatcctcctgcctgggacaaatcatcatggtaactaactgcctaactcccccccatttcaaaagggtgaataaaaaataattttgccccaaaaagggagggaaggaaagcaaaagggaaagccacacagggtttttaccatgtttccatggaaacggttaaaaatttggaaagtctcatgggaagaaaaccccgttccctgggcccgaaccaaagggaag

SEQ ID NO: 163795 - DNA, 877 bp, Homo Sapiens
atggatacatgttgctctcaaatgggcatagtctcttggatctaatagacttgtagtgcatttaagcttcagggtatcttccagagtctgtacctactttaaaaatagtaataataaaggctgtaacatactcaaagttaggtcggaccttccaaaatcgagacgggaactggagccaagttccggccctgtttcaccccacaccggcagcagagtgattttagcagttttgtatcaggcctttgtaccagcagcaggcccacagcccctggaccatgggcacaaatgccagaccagtgtggtggaaaccaaaccaactcggggccgccccagctcctcagcgtacagactggttgagatcctggtgaatcatttacctttccaagccccaactgcaaatagtatcctatcacacactgccttccaggacaattaggtgaaattaaataaaatccatgaaagagcaccttgcacagtgccagcccatattaagcacttcacaaatattgattcctttaacacctgtgtgtggaaataaaagagggaagagaggttggatcttcagagttctgattgagagatcaagcgtggtacattgaaattgacaaatgtgaaccaccattaaatgtcgtttacataaatatcaacccaaaaaaagttcattgtcaggtgttagggtagaaggcggggtgtgatgtatgggagaggaagtgtcttggggtgataggacagttctgtttctctattgtggtggttacattaatctgtacactcaccgccatgaaaagtaacacctgtgaaaatgtgaaattctaatgctgtctatagcttgattagtaattgtcttggaccgtacttggtgtctctggtaccggat

SEQ ID NO: 163796 - DNA, 648 bp, Homo Sapiens
atatcgtacaagattgacgcttgtgcagcattatagtacaagctaggaacaggatgtggttctcttaactgggaaaggagctacagagtagaaaataaatatgtttgtcatgagtcaggggtttgtgaaaattgtgcctttgggccatgtgttatttaggctacttggaaaaagaacaaaaaggacttggttcatcttcagaaaggggaagccaacccctcctgtgctgccagtcactgtaacccactagaactaataattaccaatcccctagatccccattggaaaaagggagaatgtgtaaccctggggatcgaagggacagggttaaacccccaagttgccattttagttcaaggggaggtccacaagcactctcccaaaccagtgtttcaaaccttttatgaggagttaaatctgccagcaccagaacttctgaaaaagataaaaaatttgtttctccaattagcagaaaatgtagctcattccctaatgttacttcttgttatatatgcgggggaaccactatcagagaccgatggccttgggaagcctgagagttggtgcccactgatccagctcctgatataatgggggcttgtccaggatctcatcaggactggatggctctcgctggactatactgga

SEQ ID NO: 163797 - DNA, 645 bp, Homo Sapiens
agaggatcccccgttaatccgtacccatgaaattctatgcaaagaacgattataatttgggggacaaagtgacaaatacttggatgaaaaacaattatgtagagaagggtccaggagaattttatcattcacatctttgcttaaggaggtccttacctaagatattgcagtaggcagtcattaaacctacgtggttaggaatatctttgattccataccttctttgccaaattgatttcttacaaagccattccttctttattttactactctgtttagaggaaatcaagaaacacggagagaataatgaaacaaagcacagaagaaaacgtcagtgatttgtattcactgaattcaatattgtgtgttacttctagtgcaaaagagaatgtgaatggaagaaaaaagaggagagagggaactattaatagagtagattacattgaattaatcttatttgtttctctcagggaagaaataagcatagtgaaaaatcacacaatggaaaccatcccttcccctgacctgttcccacgtgttaagataacagagggaaggaagatcacatgctctgtccagaggtccacaaactaagctgaccctttctttgaatggtacggataacgcgggatcctctagaacagc

SEQ ID NO: 163798 - DNA, 925 bp, Homo Sapiens
cacttgccaagtttggagcactgctcacctcaaacagtacaaagaaagtggttccatattttacaaacagaagagtagcatcagagccctgacctcctgtctttggtgtgtaaaagctcccagaggccggtgtccggctccttcccctgtggtttgggctggtgaactgagcccaagtgtattctctggcctgggccccttccagaatcagtgcgagcgtcctgcagaggcatggccttcctgccactgcagagtgggaagcttcctgggggacctcagccagctccggggctctcatcttccactcggatctcagataggttcgttgtggatgctctggctaggctcggcggccttttccaggcttcaggcctgaacaaaacaggctgtatgctgtgaggagctagatgacaccaagacacagacacgtactcttcaccggctccttttgcttctccttcctgcaggacgtgagttatgtctggtcccaaaacccttgagtaaactagctgagccattgcaaatgaaggtacagatggattgaaacataaaattgtagcttttggtgtccttctgaagggtcagaatatgtaattatttgataaccaaggaagtcaagtcagatggctaagtagtaactttccaatatgatttctccgtggtacttcacctggtggcacttttggggggcaatgttaacaactatcacattttactcatcaagtctctttcatttcggcagtttaaagacacaactgtgggctttctgaggcgatgcccgttgggcaaacttaggtttatgtgttaggtttttcagctgacgtggaagccctgggtgggcgtcacctggctggcctggcttttgggttccagtctgtatgtatggagctgggttggggcccccacgccttgctgctacttgatc

SEQ ID NO: 163799 - DNA, 1037 bp, Homo Sapiens
ccgatcaggttagacactaagatgcatctgacggggattctgttcgagagagactccccaattccactgtagaacctgctccagtctctctgcatctgacaaaagtgacagccattctagccttcctcgtgttgcccaaccgattactggtgccccttgtgcctgaccttcaagatgtggctcagttgcgttcccctctgcccaggggcattattcgaattcacctgctggctgctcgagggctgagttccaaggacaaatatgtgaagggcctgattgagggcaagtcagacccatatgcacttgtgcgtttgggtacccagacattctgcagtcgtgtcattgatgaagaactcaacccacagtggggagagacttatgaggtgatggtacacgaggtcccagggcaggagattgaagtggaggtgttctgacaaggatccagataaagatgactttctgggcagaatgaagctggatgtagggaaggtgttacaggctagcgttctggatgattggtaccctctacaaggtgggcaaggccaagttcacttggaggctagaatggctgtcacttttgtcagatgcagagaaactggagcaggttctacagtggaaattggggagtctcctctcgaccagatcccccgtcagctgccatcttagttgtctacctggatcgggcccaggatcttcctctgaagaaggggaacaaggaacccaaccctatggtacaactgtcaattcaggatgtgactcaggagagcaaggctgtctacagtaacaactgcccagtgtgggaggaagcgttccggttcttcctacaatgacctcaaagccaggagctcgatgtgcaagtgaaggatgattccagggccctgactttaggagcactgacgctgcctctggcccgcctgctgactgccccagaactcatcctggaccagtgcttcccgctcagcagttctggtccaaactccatactctatatcgacctagtcatgaggatcctgtaccttggcttcatcagaactatg

SEQ ID NO: 163800 - DNA, 341 bp, Homo Sapiens
ccaaaaccagaaaatgatgttagagcaggaacgtctaagagtagaacatgagaagttgaaagccacagatcaggaaaagagcagaaaactacatgaacttacggttatgcaagatagacgagaacaagcaagacaagacttgaagggtttggaagagacagtggcaaaagaacttcagactttacacaacctgcgcaaactctttgttcaggacctggctacaagagttaaaaagagtgctgagattgattctgatgacaccggaggcagcgctgctcagaagcaaaaaatctcctttcttgaaaataatcttgaacagctcaataagtgcacaaacagtt

SEQ ID NO: 163801 - DNA, 704 bp, Homo Sapiens
tgctctagacgatccgtgtaatccgtacatccactatgactgaattttacatcggatatggatgaaattatttctgagaagaaggacctactgctgggatcttcaggctcttcaaaaaacttggagtgtctgtcgcacagggccgaggagcgcatgtcacacaggcggatggtccctttgctactgctgtagacgaacacgttgcactggtgcgggtggaactcggctgcagtgatgacttcggtcagctcctccatgttagcaggcttgatgtccacgatgttaaagcttctatctgtgatttctaagtgccataaattaattctcaggtcatctgcagaaagatatgtttcatgatcactatttactgaaatgtaatttatatgatatgtgtgagcatttgcaaaaattcgccgtggactcgcttctaccataagatccatgggcttcaatattgggacccgtagcgccgtgatcctaaatgggtctcgaagtcttccatcttcgtctttcaggttataaccttctgctcttttatcccgttcacttactttccataattttatagttttatcatttgtagacagtagaaaatgagcagcattctgttgtggtaacacctaatttattaatttttcctcatttctagactttcagatagtcaactccggtcatgtacggataacgcggtacgagtcaattct

SEQ ID NO: 163802 - DNA, 642 bp, Homo Sapiens
tgatgccttactctgacagaaaaatgtccggattagctatgcaagacaagagtcggccgtcacgtacgcagtctctagttagattgtgtcctggaatatgtacaagttattggtggcagccacggcaatgacattgtccacggggtgccaggctgtgtgcaggatcttcttgttgaagtccagactgtccacactgatctcgtctttcctccgcttaccccccgtacacaccttccggggtttgaggctggcgcgcggtttgctgctctctctcgaggcctccagggtcacatccctccgcgtgtctctatcaaacatcctgaagaagttgttataggacccggtcatgatggcgctatccgaaccgttccagcaacactcaaacttgtcaaagatgcagtcgttctcatagagagagcagagcttgctgcgcaggtactcgtggacctggtgggtctccaccggcctgctctccatgttgaggtcccacaccttcaccgacaggtagtctctggtcatcatgtaccgcccactatgactgaattttacatcggatatggatgaaattatttctgagaagaaggacctaccgctgggatcttcaggctcttcaaaaaacttggagtgtcgggtaccgagctc

SEQ ID NO: 163803 - DNA, 2032 bp, Homo Sapiens
  misc_feature (1466)..(1685): n is a, c, g, or t
ggggtcggctcgagtactccccgtaacgaggaggtgttctcggcggtcccacccttcactgccgtctccgggctgcgccgccggagccgggacgcgcctccgcagccctcgccgcctccatccccgcggccgcagctcctctcgccgtccgcgcgcacaccatgacgaagaacgagaagaagtccctcaaccagagcctggccgagtggaagctcttcatctacaacccgaccaccggagaattcctggggcgcaccgcaaagagctgggctttgatcttgctcttctacctagttttttatgggttcctggctgcactcttctcattcacgatgtgggttatgcttcagactctcaacgatgaggttccaaaataccgtgaccagattcctagcccaggactcatggtttttccaaaaccagtgaccgcattggaatatacattcagtaggtctgatccaacttcgtatgcagggtacattgaagaccttaagaagtttctaaaaccatatactttagaagaacagaagaacctcacagtctgtcctgatggagcactttttgaacagaagggtccagtttatgttgcatgtcagtttcctatttcattacttcaagcatgcagtggtatgaatgatcctgattttggctattctcaaggaaacccttgtattcttgtgaaaatgaacagaataattggattaaagcctgaaggagtgccaaggatagattgtgtttcaaagaatgaagatataccaaatgtagcagtttatcctcataatggaatgatagacttaaaatatttcccatattatgggaaaaaactgcatgttgggtatctacagccattggttgctgttcaggtcagctttgctcctaacaacactgggaaagaagtaacagttgagtgcaagattgatggatcagccaacctaaaaagtcaggatgatcgtgacaagtttttgggacgagttatgttcaaaatcacagcacgtgcatagtatgagtaggatatctccacagagtaaatgttgtgttgtctgtcttcattttgtaacagctggaccttccattctagaattatgagaccaccttggagaaaggtgtgtggtacatgacattgggttacatcataacgtgcttccagatcatagtgttcagtgtcctctgaagtaactgcctgttgcctctgctgccctttgaaccagtgtacagtcgccagatagggaccggtgaacacctgattccaaacatgtaggatgggggtcttgtcctctttttatgtggtttaattgccaagtgtctaaagcttaatatgccgtgctatgtaaatattttatggatataacaactgtcatattttgatgtcaacagagttttagggataaaatggtacccggccaacatcaagtgactttatagctgcaagaaatgtggtatgtggagaagttctgtatgtgaggaannnnnnnnnnnnnnnnnnnnnnnnnnnnnnnnnnnnnnnnnnnnnnnnnnnnnnnnnnnnnnnnnnnnnnnnnnnnnnnnnnnnnnnnnnnnnnnnnnnnnnnnnnnnnnnnnnnnnnnnnnnnnnnnnnnnnnnnnnnnnnnnnnnnnnnnnnnnnnnnnnnnnnnnnnnnnnnnnnnnnnnnnnnnnnnnnnnnnnnnnnnnnnnnnnnnnnnnnnnnacgacgggaggcgggggaggacaagaaaagacgacccacactaaggaggaacgcagcaccccaacacgagacgcgaccgcaccgccagcacatcgagagaggaaggagaggagagggggcggacaagaagagaagcgaggggcaaagtgctacagaggaagagcagaaggcgcgcagcgcggcacggacgaaaggggagcgaacgaaagagaagggaacaagcgagcgagacagcacgagatacaggaagaaaaagaaaagacgcaccagaagggagggagaaaaaggaaggagggagacgcacgccaagagcaaaaaagcacgcaaaaggaggggaaacaacccca

SEQ ID NO: 163804 - DNA, 972 bp, Homo Sapiens
  misc_feature (35)..(35): n is a, c, g, or t
  misc_feature (51)..(51): n is a, c, g, or t
  misc_feature (78)..(78): n is a, c, g, or t
  misc_feature (84)..(84): n is a, c, g, or t
  misc_feature (177)..(177): n is a, c, g, or t
  misc_feature (183)..(183): n is a, c, g, or t
  misc_feature (406)..(625): n is a, c, g, or t
cccccccctggaaaaaggtgttgtgggtaccatgnacattggggttaccanccaaaaccgtgccttccccagatccanagtgtncaagtgccccccctgaaagtaacctgccctgttgccctctgcctgcccctttgaacccagtgtacagtcgcccagatagggacccggtgaacncctgantcccaaacatgtaggatgggggtcttgtcctctttttatgtggtttaattgcccaagtgtctaaagcttaatatgccgtgctatgtaaatattttatggatataacaactgtcatattttgatgtcaacagagttttagggataaaatggtacccggccaacatcaagtgactttatagctgcaagaaatgtggtatgtggagaagttctgtatgtgaggaannnnnnnnnnnnnnnnnnnnnnnnnnnnnnnnnnnnnnnnnnnnnnnnnnnnnnnnnnnnnnnnnnnnnnnnnnnnnnnnnnnnnnnnnnnnnnnnnnnnnnnnnnnnnnnnnnnnnnnnnnnnnnnnnnnnnnnnnnnnnnnnnnnnnnnnnnnnnnnnnnnnnnnnnnnnnnnnnnnnnnnnnnnnnnnnnnnnnnnnnnnnnnnnnnnnnnnnnnnnacgacgggaggcgggggaggacaagaaaagacgacccacactaaggaggaacgcagcaccccaacacgagacgcgaccgcaccgccagcacatcgagagaggaaggagaggagagggggcggacaagaagagaagcgaggggcaaagtgctacagaggaagagcagaaggcgcgcagcgcggcacggacgaaaggggagcgaacgaaagagaagggaacaagcgagcgagacagcacgagatacaggaagaaaaagaaaagacgcaccagaagggagggagaaaaaggaaggagggagacgcacgccaagagcaaaaaagcacgcaaaaggaggggaaacaacccca

SEQ ID NO: 163805 - DNA, 397 bp, Homo Sapiens
ctcggtacccacacgccgagtgaccagacaggattaaattttattgaattacagttacaagtggaaaaaatgactgacttactgcatggagaagtattatgtcaacctgttaaaagctatggaaattaaaatgttcatgtatatacaaaatataaatgacatgtaaggtaaaattacagtgatcaatttacaacaaagaaattaacagtagttttccagcttgtttgattaatcaagcaggtttactcttgaatccatagcatttctacaatttaatttggacaaagttctattccagatcagccaggttttaaaactgaaatgtgttaagggtggattgttagcttccccaggattggtgtggatgataaatactttttttaaaaattaattatta

SEQ ID NO: 163806 - DNA, 722 bp, Homo Sapiens
ggatcctgcgctaaatccgtaccagaggaagacggcgagatgacatagctcgagcttttgtgggctttgaatatgaagactctcgaggtcggagattcatgtgctctgggcctgacaaagtaatgaaagtaatgggaagtgggccaaaggaatcagctttaaaagccctaaatagtgacatgcccttatatattctgtcatcctctcaaggtagagggctgaaacctcattatgctcaacttatgaggctttttgttgtggttcctgatgctcctttgcagataatactaatgcctcaggttcagccaggcccaccaccatgtccggtattctacccagaaaaacaagaaatcacccttccacctgatggcctttgggttttgagatttccttatgcatatgtgactgagagaggaccttgtttcccccctaaggaaaatgtgcagttaatgagctacaaggtgctccgtggggttcttaaggcagtaacacaataagtgtttaccagccagttcaatcctatacttgagctggtttttgtttttggtatttgtggctgtgtttttggtatgtgtttactgtgttttcccaaatccaaaatgtgttttggttacaggagttcagtatttggaaactaatttgttctactttttcattatattgttgatatttattgtaaacgtgactacaactttctaataaagattggttgttctaaaaaa

SEQ ID NO: 163807 - DNA, 1000 bp, Homo Sapiens
tcggtacgtataatccgtacaaatttaaagaggaagtccttacacatattaagcactacagtgtgccttatacatgtatatgtactgaagtatgagttcagtgactttttggacagaacacaaacttctttcattagaaatttttaaaaaatgacttgggcatttgttgcaggagaaggacttgataatctgtggaatttaaatgttattcatgcttcttattttaaaagtgcttcaaatccttcaataaggttctgaaagcttgtccgattggatggttggaattcccagcatttcctcataagttgataaacctcatctggacagttaggtgggcacggcaggcgttttccttcttttaacgtattcacaagtcttgtgactgtcatctggccatgggttgggcctatcattttcaggaacaaagccatgggactagaatctgaatcacagtaagtcagcagctcatgcagagtgactccaaaagaccagacgtcagaggcaatataaaatttagattgcattaaacattctggagcataccaaaacacagggctgtcccggtcatccttgacggtgtaatactccttatcggtttcaattgctttggttaaaccgaagtctccaattttcacttggtgttcactctcaacaaggacatttcttgctgccaagtcccggtgaacgtatcgccgagaacccaaataggccatccccttacaaatctgaacggcatattttagctgctgtttgagggttattttgttcttattctttggaagatattccttaaggcttcccgaaggcagaaattccatgatgagcttaataccatttcctccgtcttctgtgcagattcctttgtacttcacaatgttctcatgatagaggttccttaagatctcgatttcctttttcagatcagctatgtggttacctccactctcaggcttcagagatttaacagccacctgctcccctgtattgtccccttcgggcc

SEQ ID NO: 163808 - DNA, 1192 bp, Homo Sapiens
  misc_feature (514)..(644): n is a, c, g, or t
  misc_feature (648)..(653): n is a, c, g, or t
  misc_feature (655)..(655): n is a, c, g, or t
  misc_feature (657)..(659): n is a, c, g, or t
  misc_feature (661)..(661): n is a, c, g, or t
  misc_feature (663)..(663): n is a, c, g, or t
  misc_feature (668)..(668): n is a, c, g, or t
  misc_feature (670)..(671): n is a, c, g, or t
  misc_feature (673)..(683): n is a, c, g, or t
  misc_feature (690)..(706): n is a, c, g, or t
  misc_feature (731)..(731): n is a, c, g, or t
  misc_feature (734)..(734): n is a, c, g, or t
  misc_feature (744)..(856): n is a, c, g, or t
  misc_feature (862)..(862): n is a, c, g, or t
  misc_feature (1118)..(1118): n is a, c, g, or t
ccttgagtggggttatctctgtgttaggggtatatgatgggggagtagatctttctaggagggagacactggcccctcaaatcgtccagcgaccttcctcatccaccccatccctccccagttcattgcactttgattagcagcggaacaaggagtcagacattttaagatggtggcagtagaggctatggacagggcatgccacgtgggctcatatggggctgggagtagttgtctttcctggcactaacgttgagcccctggaggcactgaagtgcttagtgtacttggagtattggggtctgaccccaaacaccttccagctcctgtaacatactggcctggactgttttctctcggctccccatgtgtcctggttcccgtttctccacctagactgtaaacctctcgagggcagggaccacaccctgtactgttctgtgtctttcacagctcctcccacaatgctgaatatacagcaggtgctcaataaatgattcttagtgactttaannnnnnnnnnnnnnnnnnnnnnnnnnnnnnnnnnnnnnnnnnnnnnnnnnnnnnnnnnnnnnnnnnnnnnnnnnnnnnnnnnnnnnnnnnnnnnnnnnnnnnnnnnnnnnnnnnnnnnnnnnnnnnnnnnncccnnnnnnanannnananaaaanannannnnnnnnnnnacccaannnnnnnnnnnnnnnnnaaaaccacccccacacaacacccantanccccccaccnnnnnnnnnnnnnnnnnnnnnnnnnnnnnnnnnnnnnnnnnnnnnnnnnnnnnnnnnnnnnnnnnnnnnnnnnnnnnnnnnnnnnnnnnnnnnnnnnnnnnnnnnnnnnnnnntattanaaaccattccccttttctcccttcccccacttcctaaaaacccctttcctccaaacccaaaaattctctttttccccctacacaaaacaccacaccccccaccccctttaaataacccaactcttttccccaacaccctccttttccccattcctttttacccctccctttacatcacttccctttacttaaccccctaaataattagtgtggagccctcccatataaagagtggacctccggtccgcctccggcntcagctcccacaacaacacaagatccgggtcggctggcccccacctcggataccccctaacatccgcggggcgg

SEQ ID NO: 163809 - DNA, 1116 bp, Homo Sapiens
  misc_feature (407)..(407): n is a, c, g, or t
tggggggggaaacggggaaccccgggaccctctggggaacccgagagaaaaccagtcccaggcccagtattttaccaggaagctggaaagggttttttggggttaagacccccaattcttccccaattccctttaaggcccttccagtggcttcacagggggttcaaacgttagtcccaggaaaaggcaattacttcccagcccccatatgagccccccgtggcatgcccctgtccatagcctcttactgcccccatcttaaaaatgtctgactcctttgttccgctgctaatcaaagtgcaatgaactgggggagggatggggtggatgaggaaagttcgctggacgatttgaggggcccagtgtctcccctcctagaaagatctactccccccatcatatacccntaacacagagataaccccactcaagggggcctgtgccaccacatgggaccctcacccccacagctagaggagggggcggtcgctgcttgagctgcctgaggtagaactagggtgcccttcttcttgtgtgtcccttccccttccagtccattgagctgggggtgggggtgggacaggcacctcagagccacctggagctgagagggtactgaagggaaaggacaagggggagggacagcagcagaggggaattgcagagcccagctggagaagaagggtagctggggctcctcaaaaggtacaggggagccaaagagggaaaaggctcaacactgagacgggctccccagtgcaggtcagaggggccatgagggcaggcggggtggtctgctccaggaccccaccttccccctgccttcacaagacagaggggggtatcaagagccaggagggtaccaggtccccagctcagccctaggctgtgctcacttcagggtcaccctgcccaaccttagaggaggtgaggggactccaaagtttttgatgatgcccccactcggtgaggccccttcaaagtgccatctgtttacttctcaaatgaaaaagaattcaggtctgagtgtccaggaaagggggtgaatttcataaccgcctgtgacagcgatgggaaggagcccctcgtgccgaattcgccacccaggcctcgccc

SEQ ID NO: 163810 - DNA, 891 bp, Homo Sapiens
  misc_feature (18)..(18): n is a, c, g, or t
  misc_feature (31)..(32): n is a, c, g, or t
  misc_feature (103)..(103): n is a, c, g, or t
  misc_feature (395)..(395): n is a, c, g, or t
caccatggggaccccttnccccccccaccannctagagggaggggggccggtcccctgcttgagcttgccctgagggtagaacttaggggtgcccttccttcnttgtggtgtcccttcccccttcccagtccattgagctggggggtgggggtgggacaggcacctcagagccacctggagctgagagggtactgaagggaaaggacaagggggagggacagcagcagaggggaattgcagagcccagctggagaagaagggtagctggggctcctcaaaaggtacaggggagccaaagagggaaaaggctcaacactgagacgggctccccagtgcaggtcagaggggccatgagggcaggcggggtggtctgctccaggaccccaccttcccncctgccttcacaagacagaggggggtatcaagagccaggagggtaccaggtccccagctcagccctaggctgtgctcacttcagggtcaccctgcccaaccttagaggaggtgaggggactccaaagtttttgatgatgcccccactcggtgaggccccttcaaagtgccatctgtttacttctcaaatgaaaaagaattcaggtctgagtgtccaggaaagggggtgaatttcataaccgcctgtgacagcgatgggaaggagccacacccctccagagggtaccacccagcggacaagtggggaggaggaagtagctggcatgaagccggcccacccaacctccgggagagaggaaaaggagaacacgggatgaggaggctttaaatagtatttcataaaataaaaatgcccagcactcttaggaacctctcattcaaccgcctagtttttgtttaaataattctaatgccagaggctggggggcagggggcgg

SEQ ID NO: 163811 - DNA, 1156 bp, Homo Sapiens
  misc_feature (102)..(102): n is a, c, g, or t
  misc_feature (171)..(171): n is a, c, g, or t
gaacccttacaacccccccaacaaagttaagaggaaggggggcggtcgcttgctttgaagctgccctgaagttagaaactaggggggcccttccttccttgngtgtccctttccccttcccagtccattgagctgggggtgggggtgggaacagggcacttcagagcccanctggagctgagaggtactgaaagggaaaagacaaaggggggagggacagcagcagaggggaattgcagagcccagctggagaagaagggtagctggggctcctcaaaaggtacaggggagccaaagagggaaaaggctcaacactgagacgggctccccagtgcaggtcagaggggccatgagggcaggcggggtggtctgctccaggaccccaccttccccctgccttcacaagacagaggggggtatcaagagccaggagggtaccaggtccccagctcagccctaggctgtgctcacttcagggtcaccctgcccaaccttagaggaggtgaggggactccaaagtttttgatgatgcccccactcggtgaggccccttcaaagtgccatctgtttacttctcaaatgaaaaagaattcaggtctgagtgtccaggaaagggggtgaatttcataaccgcctgtgacagcgatgggaaggagccacacccctccagagggtaccacccagcggacaagtggggaggaggaagtagctggcatgaagccggcccacccaacctccgggagagaggaaaaggagaacacgggatgaggaggctttaaatagtatttcataaaataaaaatgcccagcactcttaggaacctctcattcaaccgcctagtttttgtttaaataattctaatgccagaggctggggggcagggggcggccagggtatgtacatgaggaggtgtttaaattaaaacacaaataataattaagacacacaaactgagactaaggcagaagatgtagagcgggcctttgaggccctcgcgcttccaggactgcaggcttcctgtgggcggattagggcttcctcttggagaagatcagccggcgtttggagtggtagaaatctgtcatgctggtctgccgccgttttcgaccctgagagtctccaggtccacctggggacccttcagcctgctcccctg

SEQ ID NO: 163812 - DNA, 985 bp, Homo Sapiens
tcgtagtccgtacagctcagcttgtggcccctctgttgtagtaaagggcactctttctgtcacctcctccgaactctattttgaggtggatgaagaggatcctaacttcaaaaaaatcgaccccaagatcttggcatatacagaagggctgcatggaaaatggctgttcacagagatacgatcaatcttttctcgtcgttatcttttgcaaaatacagccctggagatctttatggcaaacagagttgctgtgatgttcaacttcccagaccctgcaacagtaaagaaagtggttaactatctacctcgtgttggcgttggaacaagttttggattgcctcaaaccagacgtatttcattagctagtccacgtcagctttttaaggcttctaatatgacccagcgatggcaacacagagagatatctaattttgagtacttgatgtttctcaacacgatagcaggacggagttataatgacttaaatcagtatccagtgtttccttgggtcatcactaattatgaatcagaagaactggatcttacctgacccaccaacttcagagatttgtccaagccaataggagctctgaacccaaaaagagcagcattcttcgctgagcgttatgaatcatgggaagatgatcaagttccaaagtttcactatggtactcattactcaactgcaagttttgttcttgcatggctgctaagaatagaaccctttacaacttatttcctaaatttgcaaggaggcaaacttgatcatgcagatcgaactttttcatcaatttccagagcttggcgaaacagtcagcgtgatacctctgatattaaggagttgatccctgaattttattatctccctgagatgtttgtcaacttcaataattataatcttggagtgatggatgatgggacagtagtgtctgatgtcgaacttcctccttgggccaaaacctcagaagaatttgttcacataaac

SEQ ID NO: 163813 - DNA, 1303 bp, Homo Sapiens
acgtaccacctggtaacaattctgtagacgactcagctgactttgtgagcttttttccagcatttgtgtggactctcagagatttcaccctggaactggaagtagatggagaacccatcactgctgatgactacttggagctttcgctaaagctaagaaaaggtactgataagaaaagtaaaagctttaatgatcctcggttgtgcatccgaaagttcttccccaagaggaagtgcttcgtcttcgattggcccgctcctaagaagtaccttgctcacctagagcagctaaaggaggaagagctgaaccctgatttcatagaacaagttgcagaattttgttcctacatcctcagccattccaatgtcaagactctttcaggtggcattccagtcaatgggcctcgtctagagagcctggtgctgacctacgtcaatgccatcggcagtggggatctaccctgcatggagaacgcagtcctggccttggcccagatagagaactcagccgcagtggaaaaggctattgcccactatgaacagcagatgggccagaaggtgcagctgcccacggaaaccctccaggagctgctggacctgcacagggacagtgagagagaggccattgaagtcttcatgaagaactctttcaaggatgtggaccaaatgttccagaggaaattaggggcccagttggaagcaaggcgagatgacttttgtaagcagaattccaaagcatcatcagattgttgcatggctttacttcaggatatatttggccctttagaagaagatgtcaagcagggaacattttctaaaccaggaggttaccgtctctttactcagaagctgcaggagctgaagaataagtactaccaggtgccaaggaaggggatacaggccaaagaggtgctgaaaaaatatttggagtccaaggaggatgtggctgatgcacttctacagactgatcagtcactctcagaaaaggaaaaagcgattgaagtggaacgtataaaggctgaatctgcagaagctgcaaagaaaatgttggaggaaatacaaagagaagaatgaggagatgatggaacagaaagagaagagttatcaggaacatgtgaaacaattgaccgagaagatggagagggacagggcccagttaatggcagagcaagagaagaccctcgctcttaaacttcaggaacaggaacgccttctcaaggagggattcgagaatgagagcaagagacttcaaaaagacatatgggatatccagatgagaagcaaatcattggagccaatatgta

SEQ ID NO: 163814 - DNA, 308 bp, Homo Sapiens
agagatgcatgtagtacagagtgtcacgcagcatcttgaacatggtcaggtagagagggtcactgaaggaagtgtagtagagatcagcactggggttggcccagatagagaactcagccgcagtgcaaaaggctattgcccactatgaccagcagatgggccagaaggtgcagctgcccgcagaaaccctccaggagctgctggacctgcacagggttagtgagagggaggccactgaagtctatatgaagaactctttcaaggatgtggaccatctgtttcaaaagaaattaggggtaccgagctcg

SEQ ID NO: 163815 - DNA, 411 bp, Homo Sapiens
caagatgaagagctggaccctgaatttgtgcaacaagtagcagacttctgttcctacatctttagcaattccaaaactaaaactctttcaggaggcatcaaggctgaagagattctgcagacatacttgaaatccaaggagtctatgaccgatgcaattctacagacagaccagattctcacagaaaaggaaaaggagattgaagtggaacgtgtaaaagctgaatctgcacaggcttcagcaaaaatggtggaggaaatgcaaataaagtatcagcagatgatggaagagaaagagaagagttatcaagaacatgtgaaacaattgactgagaagatggagagggagagggcccagttgctggaagagcaagagaagaccctcactagtaaacttcaggtatccaaatgc

SEQ ID NO: 163816 - DNA, 1735 bp, Homo Sapiens
  misc_feature (1659)..(1659): n is a, c, g, or t
  misc_feature (1687)..(1687): n is a, c, g, or t
  misc_feature (1697)..(1697): n is a, c, g, or t
gtgtagtgtatccgggaactccaggcaggctgcctgactccagtgttgtgctcagaactattcctgaaatgagagacttggaaagataaaagtttcgtatgaaatagtgcccagttggaagcaaggcgagatgactttgtaagcagaattccaaagcatcatcagattgttgcatggctttacttcaggatatatttggccctttagaagaagatgtcaagcagggaacattttctaaaccaggaggttaccgtctctttactcagaagctgcaggagctgaagaataagtactaccaggtgccaaggaaggggatacaggccaaagaggtgctgaaaaaatatttggagtccaaggaggatgtggctgatgcacttctacagactgatcagtcactctcagaaaaggaaaaagcgattgaagtggaacgtataaaggctgaatctgcagaagctgcaaagaaaatgttggaggaaatacaaaagaagaatgaggagatgatggaacagaaagagaagagttatcaggaacatgtgaaacaattgactgagaagatggagagggacagggcccagttaatggcagagcaagagaagaccctcgctcttaaacttcaggaacaggaacgccttctcaaggagggattcgagaatgagagcaagagacttcaaaaagacatatgggatatccagatgagaagcaaatcattggagccaatatgtaacatactctaaaagtccaaggagcaaaatttgcctgtccagctccctctccccaagaaacaacatgaatgagcaacttcagagtgtcaaacaactgccattaaacttaactcaaaatcttataatcgatcgaaaaagataagaaaaagcatgtcgggccgccttcggccctcgaataagtttttctagacccttccgctgggcgccgcgggccacggaaggtcaaagggaatatgggccataggcgggttctcctaggccaattccggggcctgggacgagcgggctgggtatccttccccacataaacaaacggcccgggggtaaacctaatacgggctcctgagctgaacttctaagatgggcctaggcgcaggtgcagtgaacgcgggaccgcgtggaacggggacacccatagaagagggcgtcggagaaggcgaaaagtctaagagccactgcgggtgagaagctgcccaggccgagaccggtggtaggaaggaatcatctcaaaacaattatcgcaagaagaattggggcgagctgtagagatagatgcgcggtccaggagattagcattctaggagccggagaagtgaagtgccgcaatcatccgccctcataggtgtgcatgactccgtagcatgtgacgcccagcagctatgcgcaccggcttaaacgtgacgacccgcattatctaatcgtattgtacgcatcatacgttgacgaagcggatttcgacgtagaacgggagttttggagtatcaagatcctatggtaccgcagtctatgagagggcaaccgccgggaagagcacacttagagcgcaccgcattagaggtgtaaggtgagaatccacgagtgcacatcacgaatgacgtgagcgagacactagagatacaccacagacaggacggagaatatatacacatcactacancgtgcgcggctgagacgcccgtattgcncgcggtgtcnagtgtatattacgcgtcgactcacatgaagcacgagat

SEQ ID NO: 163817 - DNA, 497 bp, Homo Sapiens
gtgacaaccccggagattcgtaaatacaagaagaggttgacctctgagattctgtgtgctgccttatggggagtgaatttgctagtgggtacagagagtggcctagatgctgctggacagaagtggccaacgggaaggtctatcctcttatcaaccgaagacgatttcaacaaatggacgtacttgagggcttgaatgtcttggtgacaatatctggcaaaaacggactaacgttacgtgtctactatttgtcctggttaagacaataaaatacttcacaatgatccagaagttgagaagaagcagggatggacaaccgtaggggatttggaaggatgtgtacattataaagttgtaaaatatgaaagaatcaaatttctggtgattgctttgaagagttctgtggaagtctatgcgtgggcaccaaacccatatcacaaatttatggcctttaagtcatttggagaattggtacggatacgcgggatcctctagaa

SEQ ID NO: 163818 - DNA, 762 bp, Homo Sapiens
tttgccttcatccacccatgtttattaagaatcattgtgcttaataataccaagactaagcaccactaaccaagaaatactaatgtaaagattgtttcttgtttcaggaatggttaattcttcaacgttggtatgataatgataacttgttttgacttgaataaagtactacatcagtgtagaaaaaaattctgatacattagcagctatgtaaatgacctaattgatagcaggtgtaataagactatcgtcttcctacacataggaggctcattctctggacacactatcacctattacattttactgattaacaaataaattggaatttaaaaatatcgatatcaccatgatttaatccagatctgggattatgtagctaaacattgtgatgattattatttaaaaccattatttaataagagtaaaaatatgtgaatctggatatattttaaaaaagaaatttgatgcccagataatatattaggcactactgatttttttagttaaattgatgcactacacttttgatgtttgaagttacaaacctgtaatttttttgtaaaggaaataattgccaaatacctaggcccattgctgacgattagttctaaaatcttattcctcctcttctcccctcacttttccctacttcctctgcaaaaagatttaacaaatacattcataaggaaatgtgtgttgtaacaaatatattgcaaaaacatagtttgtaaaggcattctataagctatttatgtaaaa

SEQ ID NO: 163819 - DNA, 808 bp, Homo Sapiens
  misc_feature (751)..(751): n is a, c, g, or t
  misc_feature (773)..(773): n is a, c, g, or t
ctcatcggttctaccatatgtcctttgactataattatggacaatatttcactttgtgggataggattggcggctcattcaaaaatccttcatcctttgaggggaagggaccgctcagttatgtgaaggagatgacagagggaaagcgcagcagccattcaggaaatggctgtaagaatgaaaaattattcaatggagagtttacaaagactgaatagattattgcccagttattcttaagtaaggacaaagaaggaaatatcatcgtatttcttttttttaataaggaaaaaataatctccatacagtcaagatacatagtaaatggtatcatttggaaatcagcatcgtgggcactgctgaggaatgatcctagtggtaggtcagaagaagatgctgtgaacaccaggactttaatcttatgcttaaaatgccagatgttgttcgggggacaacttgtatctttctagcagcagatctgtagtttgtatagcctcaacaacaattttaaataagatggagaataaattattgaggggactaggctatatgcatttgccttcatccacccatgtttattaagaatcattgtgcttaataataccaagactaagcaccataaccaagaaatactaagtgtaaagattgtttcttgtttcaggaatggttaattcttcaacgttggtatgataatgataacttgtgtttgacttgaattaaagtactacattcagtgtgggaaaaaaatttntgattacctttaggcagctatnttaaatggacccaatttgatagccgggtgttaatt

SEQ ID NO: 163820 - DNA, 973 bp, Homo Sapiens
  misc_feature (45)..(45): n is a, c, g, or t
gcctgggtggcgaattcggcacgaggcccaagtctgcgggtgtgngccaccttcgtcatacaggaagagttcgaccgcttcactgggtactggtggtgccccacagcctcctgggaaggttcagagggcctcaagacgctgcgaatcctgtatgaggaagtcgatgagtccgaggtggaggtcattcacgtcccctctcctgcgctagaagaaaggaagacggactcgtatcggtaccccaggacaggcagcaagaatcccaagattgccttgaaactggctgagttccagactgacagccagggcaagatcgtctcgacccaggagaaggagctggtgcagcccttcagctcgctgttcccgaaggtggagtacatcgccagggccgggtggacccgggatggcaaatacgcctgggccatgttcctggaccggccccagcagtggctccagctcgtcctcctccccccggccctgttcatcccgagcacagagaatgaggagcagcggctagcctctgccagagctgtccccaggaatgtccagccgtatgtggtgtacgaggaggtcaccaacgtctggatcaatgttcatgacatcttctatcccttcccccaatcagagggagaggacgagctctgctttctccgcgccaatgaattgcaagaccggcttctgccatttgtacaaagtcaccgccgttttaaaatcccaggggctacgatttggagtgagcccttcagccccgggggaaggtgagcagagcctgacgaatgctgtcgactcatcgcgttagtcacgtgtggttcaatatgctggttggttcattggtcggcccccccactcagcagcacaccctggggggaagaaggaacagggatccggcaggaaagccagcccttcccccagtgactggcatgtatctggggcggggcctttaaagccccccaacttgtttggctctatttccggg

SEQ ID NO: 163821 - DNA, 730 bp, Homo Sapiens
gtgacgcgtgggtcgacccacgtcgtccgtacatcgccaggtccgggtggacccgggatggcaaatacgcctgtggccatgttcctggaccggccccagcagtggctccagctcgtcctcctccccccggccctgttcatcccgagcacagagaatgaggagcagcggctagcctctgccagagctgtccccaggaatgtccagccgtatgtggtgtacgaggaggtcaccaacgtctggatcaagtgttcatgacatcttctatcccttcccccaatcagagggagaggacgagctctgctttctccgcgccaatgaatgcaagaccggcttctgccatttgtacaaagtcaccgccgttttaaaatcccagggctacgattggagtgagcccttcagccccggggaagatgactttaagtgccccattaaggaagagattgctctgaccagcggtgaatgggaggtttcggcgaggcacggctccaagatctgggtcaatgaggagaccaagctggtgtacttccagggcaccaaggacacgccgctggagcaccacctctacgtggtcagctatgaggcggcggcgagatcgtacgcctcaccacgcccggcttctcccatagctgctccatgagccagaacttcgacatgtcggtcagccactacagcagcgtgagcacgccgtcctgcgtgcacgtctacaagctgagcggcccgacgacgaacc

SEQ ID NO: 163822 - DNA, 910 bp, Homo Sapiens
gcagagcccgtcccctcccttcaaagagaaggcaaataaagcactcaagagatactggtctcattgactagtttcaacataaaatgattaatcaggttggaagcaaatacattactgctgcttctcaaccagaggattaagtgatcacacaggacccttctgcagagtgcaggttttctacctgacggtgaagaaaggagggaaggacacttcttcttgcccaaggtcaacacacaaaatatttggtttgagatttaagacagaaggcacttttaacattctgatatcagatgttaaccatacaaacatcctgtcacaatttcatttgggtgtactcaaatccccttacaaaagtcttcttactgcatgtgtgtcattatgagagcagtggcgacatgagcagatttagccttgagatgtgtctacctgttgctattctcccgatgaagcaaactgggcagcatgtcagccctgaaggttacaaatccagtatttgactgcaaaacaattaaattagacatctgagtggttagtgcagaaagaaacaattagcaagaacactggctcccactccggagcgatggggcttggactggtcttttccatcataatactctttgcttgactggcaccaacgttaaggaaaaatatctgcatgaaaattcaactagtggaagaaactttacctaaaaatgccatgtttatatttccagcttttctccaaagaaaaatacccattttcccatccttagtgtctgaaggccttggacttgaaggtctggccacatgactcgtactgtaaggttaacaactggcccagttatatgactgaacacaaactggacttgaacgttccaattcaattttttccttacagagtatggttgggctagtcggggtactgagctcg

SEQ ID NO: 163823 - DNA, 638 bp, Homo Sapiens
taccgtcatccgtacaggcattgacgatgatgaggcccattctggactcttctgcctcaattatccttcggacagattcctgcatcagccggacagcggactccgcctcttgcttcttctgcagcacatcggtggcggcgctttccctctgcttctccaattccttctctttctaagccctgaggtatggtttgatgatcagacggtgcatggcaaagtagaccactagaggccccacggtggcatagaacatggcgctgggcagaagctggtccgtcaagtgaatagggaagaagtatgtctgactggccctgttgagcttgactttgagagaaacgccctgtggaactccaacgctgacaggtgcacccaaaacgctgtgcctggagatcttcctctcagctccgtactccaccaccgtcccaaagaagcctgctttgagggatcctttcacacgagtctgatcgtcatcttggaatttgtgctgatagctgatcagtgcaaaggagtgagggattcccagctgcagggccacagtgaagtggctggttttagtgtctcggacgatgctagtgttcatggctgactggattccccatcgcgactgctggttgtcgacgatgggtgcgttggcccga

SEQ ID NO: 163824 - DNA, 1421 bp, Homo Sapiens
tgtccgacttctggtgtgttggtccagaaggctcaagcagtcgtctcagatataagaggacgctttgtgatgatccaacatgctgaactatttaaccagttgtggactgttgaagaacagataatgctggaacagctactcatcgaataccctcctgaagaagtagaatctcgacgctggcagaagatagcagatgaattgggcaacaggacagcaaaacaggttgccagccgagtacagaagtatttcataaagctaactaaagctggcattccagtaccaggcagaacaccaaacttatatatatactccaaaaagtcttcaacaagcagacgacagcaccctcttaataagcatctctttaagccttccactttcatgacttcacatgaaccgccagtgtatatggatgaagatgatgaccgatcttgttttcatagccacatgaacactgctgttgaagatgcatcagatgacgaaagtattcctatcatgtataggaatttacctgaatataaagaactattacagtttaaaaagttaaagaagcagaaacttcagcaaatgcaagcggaaagtggatttgtgcaacatgtgggctttaagtgtgataactgtggcatagaacccatccagggtgttcggtggcattgccaggattgtcctccagaaatgtctttggatttctgtgattcttgttcagactgtctacatgaaacagatatttcacaaggaagatcaccaattagaacctatttataggtcagagacattcttagacagagactactgtgtgtctcagggcaccagttacaattaccttgacccaaactactttccagcaaacagatgacatggaagagaacatcatttactagtcctcttcaacacatagcaatggtatcattgttaattatgtgcacagtttggaaagattctctgctttcccagaaatgacactcacagcatgagagcttcctgagtgttctcgtcaagtacagctctgcaccgttgtggctctagatcactgttcagcagctgaacattcctggtgagcaaaggtttccctggtgaatttttcaccactgcgttttaggtggtgatcttaaatgggtgagatggaacgagagcacacattaaagagagagtaaattccaaaggtttcaaagaacttggtcataaatatgataatgagaagacaaagtatttatattaaaacagtttagtagccttcagttttgtgaaaatagttttcagcacagaaactgacttctttagacaaagttttaaccaatgatggtgtttgcttctaggatatacactttaaaagaactcactgtcccagtggtggtcattgatggcctttagtaaattggagctgcttaatcatattgatatctaatttcttttaaccacaatga

SEQ ID NO: 163825 - DNA, 903 bp, Homo Sapiens
atccgatgaagaagcaatgacacagatcatccgagtgtcctaaccccacgccatgtgatggagctgatcaaggtcatgtttctcactgttccaggaaattgatcaactcttccaatgggacattgatgatcacattctgccctttactacaggaaagaaaccacttagtttttaataagtggcccagtattacaattgcagcgatgcctggcaaattgaagttgcaagcctttgtcttactctttcagtcaggacctatttcagactgttgatgacattgacatttcatggattcggatgatgcaaggagacacatgccaccccagcagtacacaaagcacttaccttgactggtgaagtcagccagccatctcagcagggaagaacaaccttctcaaccaaaactgcaatcaggaaagcagcagcccactccttcccatggaatctagacagcatttatccctctggtgggggaatctcacactgactaactgaatggacgctttgtattcagagatggcttccaggcaaggaagttctatcttgtgatacggaaacaataaattcctgagatacattcttccaatctgtggtaataataagaattcctctctgcccagatggtaggttgatatttctggactctagccaagaaaaagctaattctggggatagaatgataaaagactcaagcactaaaaatatacattgccgaatctctttttctagctttgaaaagttgtggcctgcttgtccctctgttgactggtcatctggaccatcgtacttgctgtggctacttccaagacaatgtagagggttattaaaccttgaaactgcctttcctaagtagagaacaagactattgaacaattattggtgatagacactgagtagaggtgt

SEQ ID NO: 163826 - DNA, 637 bp, Homo Sapiens
tagtagtgcattgaactgagacctggcattcacttgttgaatccgccctttttgccgggtttcctcatctccgcagcctgaactgctcaactctaaacccaaattagtgtcagccgaaaggaggtctcaagatagtcctgtcagtatatgtggtgaccttcagattagacagtcttcatttccagccagtggagtcctggctccagagccatctctgagactcgtactactggatgttttaatatcagatcattacccaccatatgcctcccacaggccaagggaaaacagacaccagaacttgggttgagggcactaccagactgacatggccagtacagaggagaactagggaaggaatgatgttttgcaccttattgaaaagaaaattttaagtgcatacataatagttaagagcttttattgtgacaggagaacttttttccatatgcgtgcatactctctgtaattccagtgtaaaatattgtacttgcactagcttttttaaacaaatattaaaaaatggaagaattcatattctattttctaatcgtggtgtgtctatttgtaggatacactcgagtctgtttattgaattttatggtccctttctttgatggtacggattaaggggatc

SEQ ID NO: 163827 - DNA, 906 bp, Homo Sapiens
  misc_feature (847)..(847): n is a, c, g, or t
  misc_feature (871)..(871): n is a, c, g, or t
  misc_feature (880)..(880): n is a, c, g, or t
acggatagcggatctgcatggattatgtactgaggatacttgcaaaggtcaactcacgggacacaaaaaacgattgtttacattccagttcaacaacttaggcaatactgatatcaactacatcaaagatgataccaggcatataagatttgatgataggcagcttaggctagatgaaagatcttttcttgctttggattgggatcctgatttgaaaaaaagatattttgatgaaaatgctgctgaggactttgaaaaacatgaaagtgtggagtataaacctcctaaaaaaccctttgtgaaattaaaagattgcattgaactttttacaacaaaagaaaagctaggtgctgaagatccctggtattgtccgaattgtaaagaacatcagcaagccacaaagaaattggatttatggtccctgcctccagtacttgtagtacatctcaagcgattttcttacagtcgatacatgagagacaagttggataccttagttgattttcctatcaatgacttggatatgtcggaattcttaattaatccaaatgcaggtccttgccgctataatctgattgctgtttccaaccactatggagggatgggaggaggacactatactgcttttgcaaaaaataaagatgatggaaaatggtactattttgatgacagtagtgtctccactgcatctgaagaccaaattgtgtccaaagcagcatatgtactcttctaccagagacaagacactttcagtgggaactgggcttttttcctcttgacccgagaaactaaaggtgcttcagctgccactggcatcccatttaggaaagtgatgaaggtaggccantgataattgacaatgatattgganaatggaaanctgtttggcacacttactatggaagt

SEQ ID NO: 163828 - DNA, 511 bp, Homo Sapiens
ggaaaatggtactattttgatgacagtagtgtctccactgcatctgaagaccaaattgtgtccaaagcagcatatgtactcttctaccagagacaagacactttcagtggaactggcttttttcctcttgaccgagaaactaaaggtgcttcatgctgccactggcatcccattagaaagtgatgaagatagcaatgataatgacaatgatatagaaaatgaaaactgtatgcacactaactaatgaaagtcctagaagccataaaagagacactttcctgctggtggtatctatggaaatgatgaagttacccaccacattaaaacaaaagtctgagatggggagtttcagataaccgaatgtaaatcctttatcagattttaacttgtgcagtacttgaagtgaaacacaatgaaaactttaacagaaattgtctcttaatacatttacagtcttgtatttacaagctaaatatatataggaaatcacaaataaatcccttttaagttt

SEQ ID NO: 163829 - DNA, 643 bp, Homo Sapiens
ataaataattatttaaaagtcatagctccagtcactactgaaaacataattttggtgataaacataatttgagaaacttaatttctgaatgtttttatagaaaattactgaaaatctattactcatggaagacttttaaagaataaccttttttcctgttttataaattcccattgttatatggtagtatttcagctacacaatattttagcttttagctagacatttataggttttcatttgttgaaatggtaatcatctgcatgtttttgtcacttatttcaggttagtgattgcctaacacttataagccaaaataatctttgcaaaattccatacctaaaattttgaaagcccctaatgttttcacacatctttctgtattagttatagttttgtgaaatctttgtgtgatcttcaaacattatcatttaatgtacaatactgtaaataaactgtgcatggcttttatacagctttagtaaatgtcaaataaagtggtacagactcattacaacaagtttctcataaaaatacaataaataggaaaatgaaattcagaaacccatagactgggaataggttccagttacagcttggatctggcataaaataaatttgaaataaaatattttgatgctcc

SEQ ID NO: 163830 - DNA, 754 bp, Homo Sapiens
  misc_feature (55)..(55): n is a, c, g, or t
  misc_feature (118)..(118): n is a, c, g, or t
  misc_feature (147)..(148): n is a, c, g, or t
gaggtcagcgctctcttgctgggggagctgacccagtgggcccccaaggccccanaagaggggtccaagtcccgaaagggctgggacctggacggctgggacaatgagccactctggnacaggagtcagaggacgaaggccagggcnngtctcacgaggagggagcagcggcgtccaaagcaccggccgtcggaggcggacgagaaagagctggctcggcgccgagaggcccggaagcaggagcaggccaacaaccccttctacatcaagagctcgccatcgccacagaagcggtaccaggacaccccgggcgtggagcacattcccgtggtgcagattgacctctccgtccccttgaaggttccagggctgcctatgtcagatcagtatgtgaagctggaggaggagcggcggcaccggcagaagctggagaaggacaagaggaggaaaaagaggaaggagaaggagaagaagggcaagcgccgccacagctcgctgcccacggagagcgacgaggacatcgcccctgcccagcaggtggacatcgtcacagaggagatgcctgagaatgctctgcccagcgacgaggatgacaaagaccccaacgacccctacagggctctggatattgacctggataagcccttagccgacagcgagaaactgcctattcagaaacacagaaacaccgagacctcaaaatcccgctgagaaggacgttcccatggtagaaaagaagagcaagaaacccaag

SEQ ID NO: 163831 - DNA, 1355 bp, Homo Sapiens
  misc_feature (53)..(53): n is a, c, g, or t
  misc_feature (192)..(214): n is a, c, g, or t
cttcccaataaaagaaaggaacagtgtcaatccataaagtcagaccagcagtntaataagatcctcttcatagctcagttctcagtgcatacagagattcaatatagccccatcgctctcagttattagaatctgagagggataaaagcaataactattgtttaaaagcctaagagtgaaaacagatgtccnnnnnnnnnnnnnnnnnnnnnnngccaaattctttcatcccaggatgtctgaaaaagagagactctatggagcgtggatgtagaaaaggagttattcctacccgaaaaaaatgaactgtggacacagtcactcaagaccagagaaacaaccactatgagtaagtagcttcaatttcactgttaccaggagggcacacaccagaaagcctgggacaaagcctgggctagagccctcaggattcattctcaggcttcctggtgctgtggttcaacagcccttgtggggatggggagaaccagagactatcaccatcacatgtcaaaaatattaccacagcaacagctgtcaaaaaccagctggagctgaagttacacaccatttgaaatccacactgtacttgctttcttgtgatgggcttgagacatgtgcagagacaccttaaacatgtgtaggtgaccagccttttgaaaggcagaggagggcctcttcatgaactctttctactcatttgttttcctatcagttcaccatttcaactagaaaagatgctgcaagctacctcagctagcttctaatttggacacagcaccaatactacacacactattgaatgaatgaccacatcttcctggttcttccattgggcagggtcaatatgcttctttggactgaataggtgtgatcttgtttgagaaaagtgtgtaaacgtagggccagattttgttcgtctccgttccggaaaattggtggagcactcctcggctcttgtataattcaatgactggctttgccacgtctttgtactgtcttagcctggcagcaactgcttcgggtttatcatcctcctgctggactaacggttcaccagtgacgtcatcaataccatgtacatgaggtggattgaagtccgggttatatacccttccgctaggagggtgaatccaacggcggctgagacgatctttaagtgtttcaaatggaatattcaaactgatcactagatccacttcacagattttgtccagggcttcggcttgtcctaatgtcctaggaaaaccatcaaggagccagtgctgccacgcctgttctccaactcggacatcattaggcgtgtgatcacatggtctggaaccaaaagacttttctctatggtagaaccgact

SEQ ID NO: 163832 - DNA, 608 bp, Homo Sapiens
tgatatggtacagtttctagtgtatataaagaaggtggcagcactgactgctctttctcctgtgaaatcctggaaataccattgtgactgctgggctgtgctgaagaaaattcaaatcgtgttctgtttaacaaggattgattgaagaacccctaggctcagtgctagtacaaagataagcaaggaaggaactccagaataagagagaaaaaacttggataataattatccaaacccgtatttattgagcacctactgtgccccgtagagtagtaattaccggaggtaaatatctaaaacttacatagctcttcaccgaacatacatctgttcttgcttctgtgtttgattttattagctttcctctgtacacataagcttttagtgtatgtcctattattgaagtcccgagttttattatttttcacttatttgggcatagatagttcccgaatttacttgtcttcctcattctcattgttaatctcatttttcttccctggagaatatggactttccaaactatttttccatcaaggcccaaatatttcttaaaattcacttctatttaaaacccctgatcacatcccggagatatctgagtagaa

SEQ ID NO: 163833 - DNA, 749 bp, Homo Sapiens
cagacctccttctgctatctacaaaagcagctgcacaacagtatacaacggctatgggaagggccatagtggtggaagtggcggaggcggcagcggtagtggtcccggaattaagaaaacagagcgacgagcaagaagcagcccaaagtcgaatgattcagacttgcaagaatatgagttggaagtaaagagggtgcaagacattctttcgggaatagagaaaccacaggtttctaatattcaggcaagagcagttgtgttgtcctgggctccccctgttggactttcctgtggaccccacagtggtctttccttcccctacagttacgaggtggccttatcagacaaaggacgagatggaaaatacaagataatttacagtggagaagaattagaatgtaacctgaaagatcttagaccagcaacagattatcatgtgagggtgtatgccatgtacaattccgtaaagggatcctgctccgagcctgttagcttcaccacccacagctgtgcacccgagtgtcctttcccccctaagctggcacataggagcaaaagttcactaaccctgcagtggaaggcaccaattgacaacggttcaaaaatcaccaactaccttttagagtgggatgagggaaaaagaaatagtggtttcagacagtgcttcttcgggagccagaagcactgcaagttgacaaagctttgtccggcaatggggtacacattcaggctggccgctcgaaacgaca

SEQ ID NO: 163834 - DNA, 400 bp, Homo Sapiens
gtatgacgcgacgcaaatcgcctctggaactgccagccattgctgaacggagaggtagccatgatgccccacttggtgaatggagatgcagctcagcaggttattctcgttcaagttaatccaggtgagactttcacaataagagcagaggatggaacacttcagtgcattcaaggacctgctgaagttcccatgatgtcacccaatggatccattcctcccattcatgtgcctccaggttatatctcacaggtgattgaagatagtactggagtccgccgggtggtgcgtcacaccccagtctcctgagtgttatcccccaagctacccctcagccatgtctccaacccatcatctccctccctatctgactcaccatccacattttattcataactca

SEQ ID NO: 163835 - DNA, 1118 bp, Homo Sapiens
  misc_feature (666)..(723): n is a, c, g, or t
cttattttccccttccaccaaaaatctacaaacacccattaaaatgaggacatcctataaacacaggcctggtttgccctttaagatccaatttcttctaatggaaggaatacttaagcatttactgaaacgtctcacacactcagtattctcttgcatgaatgccgtgtgcaagtacttggaggtttaattgctttaagtgctgacagctaaagactttacccttttgttaacacaccctggagattttaaaaacactttatttaataaaagttaaacatacaaaactgaaataatacacatcctaaaaattaccttcttccattaataggaagacccttttctatgcatgtatttggcttaaactcaactcaggataactgtgatgatgttcacttacaccaacaaatgcagacaacctgatctaattaacaaaaattacaaacagctaaatgaacataatatacagggaaattatcgtcagattaatgcacaagaaatacaagaaatttttaatgatgaaatattcagtattcttgttcattaatttagccttgtgtttttacaaaaatagtatctacactgtatacagggctatacatcagctttttgttctcccatataaacatcacacatccaaaacatggtaccactgccgtaaatggnnnnnnnnnnnnnnnnnnnnnnnnnnnnnnnnnnnnnnnnnnnnnnnnnnnnnnnnnnggagctcatcctaaggtttcttacataaaactaagagtacataaaaataaaacagctagatcaattttagagatggcctaataggcctgggaaacaagttattgaggaaaaacctcaaaacaaactttgccatttacaaattaacctatctttaagcttaactgaacgacagctaagttttaaagctgaaaataagaaaaatgaaaagatctcttttagcaggttggtgtttttgccttggtgttccaatgaattgctagagtatgtgtcaagttcaaagcatctgaaaatttcaagttacacttacaaaagtacataccataggttaagtaggcgcctgatattaggaagatcaataattcatctaagtgctgtatgatacagcatttacaagc

SEQ ID NO: 163836 - DNA, 483 bp, Homo Sapiens
agccaggcacggtgtggggagtgcacacagcccacgtacatctctcctccttgcttggcaactgagtgctttgaccctgcatccccttctactagctctgctgcttggcagaggggctcaaccttgaggttatcattcacaattctactagggtttcaactggaaattaagagccatttcccagcaaagctgggcctgccagcttttcctctctagggaaccagcaactacaccattcagaccaaacatatgccaagcaaaatattctccaagtcccaccttggggcaccagtaaggactgtccctattcctgagagctgacagacccagcaggcccaagagaagctcccagcctcactcgctgtccttggcattaagctgtgaagcctgcatgctgcttccctgctaggccttttattttactagggggttgaggagtaaggttgcagaaatgatgggagaatatataattctctatccatg

SEQ ID NO: 163837 - DNA, 1336 bp, Homo Sapiens
ggtatttcaaatccaggcagagcacacaccagtttattttgaaatgcaacacagatcagtattttatgaatacaacttattactacattatcaggtaaaaacagctttcaaatgcatgcatagaaagttaagcgtagtctctggactccttatttctaaatatacaaaaaatacatttaaattatataattttagtgaatcaaagacttataaaattacaattttggttttcacaacatagaaaaaatacaaaaatgactatatatacggttgtacaattttttacccaaatttcaaaggagcagtatgtattgaatttaatgttttataatgttttatctgaaactcagaactgcaagtaatttgcaggttgtaccatatcaatgccaaccttttattataaatgaataaccaaaaaaataagtgaaaaatgagggcacgatctcttcttacacctcttcaactctccagcatctaaacctttcctgtcagaagtctgctctggagacttttttcatctgcaaggacagtgctttattccatgactaactctccatggtgcctctggataatggttggtacgtgttaaatgaataagcccaacctcagcaaacagaacgcagcaagatgtagattagcagtctgtgctgacaaaagcactactgcggacctcaaagaattctctgtcagaagaaggcccccacggagggatctgaaatacataatcaagtgggtagttgggaggatgatgcctttgactatgccctgaaatgaaacctctaagtctgacaaaatacccacaaaaacatgaccttccttgttcacactttataagaaggtgtgacatttggtggtgtggttgttctcaatttataaaataataaatgacttcaaaggagaaatgaattcatgttagggataaagaaaccagttactgagagaggttactgaaggacacagtgacatgccttacttatctgccataagtattctaaatgttgatgtacaaaaatacacactggggttgagaccctttttgaaaagggagctgtgtgctgtgttctcattgccaaagttcaattcaatgcaacaccactgtttgcaacagaatgttttttataagtagtgacaaattataataaggaggcccaaataaaacccccagtccagcaaccctggaaaagctgcatttttcatcctgatttctagaatttttccaaaaacaactgaaaaaatctaacagaacaaagtaaatgacaaatataacccaagttgattctattttatagtagaaatacattatggaagaatacatgagagaaaagtcatgcacggg

SEQ ID NO: 163838 - DNA, 238 bp, Homo Sapiens
gccggtcctatactgtgcggcatgctgtgtgtcatccggggcgtcatgctgcgaggacagtgctttattccatgactaactctccatggtgcctctggataatggttggtacgtgttaaatgaataagcccaacctcagcaaacagaacgcagcaagatgtagattagcagtctgtgctgacaaaagcactactgcgtacctcaaagaattctctgtcagaagaaggccctccgcatg

SEQ ID NO: 163839 - DNA, 890 bp, Homo Sapiens
gaagtatacttaaggaatttattcagctgatttttaagtgaaggagctcagttagtcaatatcctaccatcttgaaagctcccttccaatgtaattttcatagtctttacattttaactgtcattgtttattactgttttgggctatactctctacaatttcagcagcattttaaagagacaatgtgtctatgtacaatgaaaaaacaaaatggcttgcaacatcagaaatacagtttaactgtacaatattaaagagaatccgtggtacgtataacctttttctgcaacatgaacaacttacatgtaagtatcagcattatgaatgtgacaataaagaaaaagtccttacaggagtgaaatacagcatcctgaaaaatattggtttctaccctacgaggcagttagaaaacgttcacattttaacaaatctgtacaaaccacaagaaatttgcttatgggaccatcttgctgataagaactttctagaaatgtagaataaccatgaacaaattaaaaatctagtatctatgtgttctacagccctagaacccaataaactgatttaaaaactcaattatgtccaacatggatcacttttacatcttgattgataatgactgtctgctttttaatatctatgatgtacagtcaacttgcaccttctaggtcatttaattttttagcaaagaagcaacatcatttagcagcaattagagtgccttcaagaagacttaaaaaaatacaatatccaattagaaaagccatattttaaacatttgtacaagaataagctgctgaaacttagtaattgaaatatgacatctgtacaacaatttacaatagagctagaagggaatttatcattatcctgcatagaactggtctgca

SEQ ID NO: 163840 - DNA, 882 bp, Homo Sapiens
  misc_feature (360)..(697): n is a, c, g, or t
ccctaagcaacattcacccaacagttatgttattgtgcccacagggtggacttcataacaacacagcaaattcaaccacagatctattagattctcacccatctcaaaactatcacatcaaagaagcaaggagacatattactggtgaggaagccaaattcaaattcttttaaaaaatcactcagctttagatcagtaaaattatcaacaaaaatgctccccacaaagtctaccgggtttttcaaaaaataaagttaaaaagagagaaagagaaactcaggctgggtgcggttttaactaataattagggtattactctatcattctctatcattcaaattctccaggtactgacctggnnnnnnnnnnnnnnnnnnnnnnnnnnnnnnnnnnnnnnnnnnnnnnnnnnnnnnnnnnnnnnnnnnnnnnnnnnnnnnnnnnnnnnnnnnnnnnnnnnnnnnnnnnnnnnnnnnnnnnnnnnnnnnnnnnnnnnnnnnnnnnnnnnnnnnnnnnnnnnnnnnnnnnnnnnnnnnnnnnnnnnnnnnnnnnnnnnnnnnnnnnnnnnnnnnnnnnnnnnnnnnnnnnnnnnnnnnnnnnnnnnnnnnnnnnnnnnnnnnnnnnnnnnnnnnnnnnnnnnnnnnnnnnnnnnnnnnnnnnnnnnnnnnnnnnnnnnnnnnnnnnnnnnnnnnnnnnnnnnaaattatgattcgatgtacatgtcaaaaattaaattatttcatgcattacgtcctactgaatttgtgtttcaaatgaaataatcattttaggattcctacacttattttataaaagtgaaaaataaatcaaatgatctaactactttccaagcaaattttgggatgaaagctattctaggaaggc

SEQ ID NO: 163841 - DNA, 408 bp, Homo Sapiens
  misc_feature (378)..(378): n is a, c, g, or t
atgaggcactacacctggtcagaccttgtttttaaattatgattcgatgtacatgtcaaaaattaaattatttcatgcattacgtcctactgaatttgtgtttcaaatgaaataatcaattttagggattcctacacttattttataaaagtgaaaattaaatcaaatgatctaactatttccaagcaaattttgggatgaaagctattctaggaaggcttgcccttgattcttgctacatgtacttgttcagccactcaattaaattccttctggcctcgtcaatgtagggcttgtctgcaggtgagcaatcttctctcttccgatgcacgaacccatgagtctgcccagaaaatgttttaatttgatattcaactntgcagtgttctttcaacttctgagtcagca

SEQ ID NO: 163842 - DNA, 1430 bp, Homo Sapiens
  misc_feature (795)..(814): n is a, c, g, or t
ggggcgcactgcgccgccggctggggtgctgggggcggggcaggggcaggtgtagcctctgtgcctcgttgtcccctggcgctacccggacatctctcagggtgccggcaccatgaagatctggacttcggagcacgtctttgaccacccgtgggaaactgttacaacagctgcaatgcagaaatacccaaaccctatgaacccaagtgtggttggagttgatgtgttggacagacatatagatccctctggaaagttgcacagccacagacttctcagcacagagtggggactgccttccattgtgaagtctcttattggtgcagcaagaacgaaaacatatgtgcaagaacattctgtagttgatcctgtagagaaaacaatggaacttaaatctactaatatttcatttacaaacatggtttcagtagatgagagacttatatacaaaccacatcctcaggatccagaaaaaactgttttgacacaagaagccataattaccgtgaaaggagttagcctcagcagttaccttgaaggactgatggcaagtacgatatcctcaaatgctagtaaaggccgagaagcaatggaatgggtaatacataaattaaatgctgagattgaagaactgacagcctcagcaagaggaaccataaggactccaatggcagcagcagcgtttgcagagaagtgatcgtgacagttggtagacaacatcgggtactccaggtctctccaaactgactatatatttatttgttattttaaaaatacaactatattttgggtagnnnnnnnnnnnnnnnnnnnngataagttggtgtaaggctatgtgacttgatcaaaacagatgcagggcctctaaataaaagggatcatctgaaattaatgttgtttgaaattactatctgattttgagggttccagtatttctgtgaaaattcaacaagaactccttggaaactggtattgatattcagtctccttaaggtagatttttcaagcttttcatacattggaactccacctgactttggaccaaccccagaacagagcagagccacctcctatagacgcccattgccctgctgctgtacacttcagcagcttgcacaagggagctcacttaaaaggagaaattgtgtagttttaaaatatattttgtgtaaaataccttactatgctataaaccaccattaaaaaccagtgttttgatttggtacttaaatatttttggagtgaaaattatcactaaagtaacatgactccaacaaaagtatggtttcattataaaagagtactgtattgatttgcccaagttttgtaacttagtaaaggtattaacttccttggatttgtactttgtgatttagtatgctgtatcgtgggctggttatgttaactgaaaaaaataaagtcattacctg

SEQ ID NO: 163843 - DNA, 232 bp, Homo Sapiens
ggggacgtcatacaggaggagggagctaatccagtaacatacattcaaagattaaatgcagatatgcacagatgtatttggacactgttcattaatattataacaccttcctctcaaagacaggcattcttaagcgttagtcacgatataccagaatttgctattcacattaaaaccaccttttaaactttataacagtaaccgattattatagttttaagaaacaaaacag

SEQ ID NO: 163844 - DNA, 617 bp, Homo Sapiens
  misc_feature (367)..(367): n is a, c, g, or t
  misc_feature (462)..(462): n is a, c, g, or t
  misc_feature (492)..(492): n is a, c, g, or t
  misc_feature (494)..(494): n is a, c, g, or t
  misc_feature (515)..(515): n is a, c, g, or t
  misc_feature (520)..(520): n is a, c, g, or t
  misc_feature (531)..(531): n is a, c, g, or t
  misc_feature (536)..(536): n is a, c, g, or t
  misc_feature (538)..(538): n is a, c, g, or t
  misc_feature (559)..(559): n is a, c, g, or t
  misc_feature (601)..(601): n is a, c, g, or t
ccttccacatctcatttctcagacaaaacatactcaaattcaaacagcagttagttttaattaacatacagaagtaattttagactttcagatttctatgctgactagaacactttgcaggctgaagctgacattattaccaaatacttcatttaagtacatactctgaagtgtcaggcttccagtatatatagcaacgctctgagagacaaactgggctcatatgacggggttgcattttattttcttaacaggtctttaaattgggcagttctgaaattctgtttggtcagttctagatggtacgtcatgtgaatgcaaccaagcactgtagttgaaattgtgttatgccctactcatatgttgncttaggtactacgcataatgttaataagctgagatgttaaagaatttgaaggtctaaaatataaaagatggaatatacccatattaatcctatgntaaagaagctctggaaataaaaggccttantnccttacacatgccaattttgnaaganaatattttacnccgtntnttttaaatggttggggggggngggcctggggtagttacttcccccatccaacaaaaggtggcnaaaatttttaatttac

SEQ ID NO: 163845 - DNA, 1022 bp, Homo Sapiens
tgcagctagtgttgccactgggtcaaggcagccaaatatggcaccaaaaataagcatcttgccaatcttgacagtcacaggtaaagctgcaaggtgttggcccatacggagtcaagtttaggctcacttaagtcacaagctccaatttttcggagcaaattcattgcattgctgatcacttggagctgaggaggatctaaggctttggagaggaaatcttcaggagaaccaagattacatttcataatatgaaggcataattcctccaaaggtacacgtaagatttcaggaacagaataatccataaagccttcaaatctttctcttgtgtacattcagaaacagaagccatctctgacccgcccagctcttccctggcgctgcaaagcactggctttactgacaaacgtctccaccaaagaactcatctgactgctttcatggtacttattttcttttgttcttccagtatcaattacaaatacaacatcaggaatagtgatacccgtctctgcaatattggttgctaaaacaatcttcctgactcctggagggggaagtgtgaatgctgcagcttgatcttgggttgaaagaatagaatgcagagctatcactttatatcgttcagaataaaatcttctatcatttgatagaagatcatacaactgctgaatatgagcaagtcctggtaaaaagatcaatactgctccttcaatatttctgaattggggacttttatctaagtatgcaagaagttccaaatgagatccaggttgattttatgaggattcatgtatagaatagcatgctgagtgcggctgctgtacttttggtaaaatggatttaaatcagcatgtgctccagtctgaactgggatgtattcctgatatttttttattcccctgctttgcttgtaacattaatggttacttcttcttcctcttccagaaatttctgacaatattctgagtccggacgcgtgggtcgacgatatcccgaggattccgaccgtaccagcctgc

SEQ ID NO: 163846 - DNA, 900 bp, Homo Sapiens
gaacagctaggcacgggactacccgagtcagctgcacaggaaatcagagccacctcaaatatcgggcatgctctgatacagcagtggcagtgccctataactttcagatgattatctccatgtgctatgttaaccaaaataggcaaattatttacgaaaccatttttttctgtaaagcaaaataaatatatacaattcaagattcttttctcttctaaaaaggtacagatagtgtgagctgaacatcagtaggaaaattatttcagaatctggatgtataataaataaacattattgtatatcatgttttcaaagttctaagagaccgggaagccacaaaacatagagttagatgggtaaaaaatgattgtgaaaagtactgggaaatatgattgtatgaaatttgaaaaaaagatttcacaatccctaaattgatctcaaatcttggagggacatgaagcattatagaaccatgtctctgttttgcaaccaaaaagttattccattttaagtatcctgtacatttctgtttgcttctgtaaacttgcaaaagaagtggtgagagattgcctgatgtgtggggacttgactgagcagacaacagggatgtttctttttctcggcgggtttcagtggccttcgtcactactcgatgagcaggcccagtcatagatgaccaagggaatgctgaccaaggagaacaacacccccaggcccaagaaaagggcagcccaaattctttgagttcctttatctccatcctggtctgtgatttttaaataaagagatgaaggaagaatgaaaataagcatgttagcagatgtaactcctacgactccaaaaatatccttcatggagggtatgaagataccaacaagttgataacaaccaagagtgtcg

SEQ ID NO: 163847 - DNA, 979 bp, Homo Sapiens
  misc_feature (131)..(131): n is a, c, g, or t
tgccaaagcgtagtacccaactggtaaagcagctgcgcaccgagcggccgtcggggcccggcggcgagatgggcgtgtgcgagaagcaccgcgagcccctgaagctgtactgcgaggaggaccagatgccnatctgcgtggtgtgcgaccgctcccgcgagcaccgcggccacagcgtgctgccgctcgaggaggcggtggagggcttcaaggagcaaatccagaaccagctcgaccatttaaaaagagtgaaagatttaaagaagagacgtcgggcccacggggaacaggcacgagctgaactcgtgagcctaacccagatggagagggagaagattgtttgggacgtttgagcagctgtatcactccttaaaggagcatgagtatcgcctcctggcccgccttgaggagctaaacttggccaatcaacaatagcatcaatggtgccatcacccagttctcttgcaacatctcccacctcagcagcctgatcgctcagctagaagagaagcagcagcagcccaccagggagctcctgcaggacattggggacacattgagcagggctgaaagaatcaggattcctgaaccttggatcacacctccagatttgcaagagaaaatccacatttttgcccaaaaatgtctattcttgacggagagtctaaagcagttcacagaaaaaatgcagtcagatatggagaaaatccaagaattaagagaggctcagttatactcagtggacgtgactctggacccagacacggcctaccccagcctgatcctctctgataatctgcggcaagtgcggtacagttacctccaacaggacctgcctgacaaccccgagaggttcaatctgtttccctgtgtcttgggctctccatgcttcatcgccgggagacattattgggaggtagaggtgggagataaagccaagtggaccataggtgtctgtgaagactcagattgccgagct

SEQ ID NO: 163848 - DNA, 550 bp, Homo Sapiens
ggcgtgcggatatcggtacagtgttgtgagaaaggaactaagcgtttggtggtttagcccaaatgactggactaagttctgtaacaatgaaccaaaacagatggaactgggttctacacattcaacaacagctgtttgaaaactgaaaccttggtcctgttttctctaatgaaaaggcaagacttttcctagaggctgcactaggtctaagtacttttatttctaaaaacatctgccaaataaaaccaaccaaaactcattattttcaccatttaccaagagctagctctattaaatttatatcaacaagttaatctgtctctatatagggaaggtttccgcaaactaaaatctaaacctaacttttgtagacagggattatggtaggaatttggtattacaactaaaccagccagctaaggagtgaacctaagaaaaaatatattacatatccttatggacagaatcacagttagatgctgcactaaaaccctaaatggtatatctctcagcccacgtaaaatttcagctcaagaagttcacaaataga

SEQ ID NO: 163849 - DNA, 630 bp, Homo Sapiens
  misc_feature (616)..(616): n is a, c, g, or t
agatatcaggcttacacatgatagtttatttttttctctcacataaccatccaaatataagtactctgaggctaccacggtagccttcagtagttctgccttctccaaggaagtagtcctcatctttaaggtccaaaataatttaccaccatgtgtgccacgtcccatcccaactagtgagatggagggaaaagggaaggagaaggcataccctttcttttaagggcacagcctggcaactgcacacatcaatcacatgaccaagcctagctgtaaggaaagctacaaaatctaatcttcattttcagtggtcatatgccaacagaaaatttagaggttctttacataaagaaaggagacaatggatactagaggaccactagtggtttacacaactagttgaacagtagaagagtgaacacttcttcaagatgctctcaaggcttactctctcaattctctgctcaaatgtcaccttattagtgagttcttccctaactgcccaacagaaaatagcaactctctccccaacatccttatcctctttacttgcattacttctctccacagcacttattaccacttcatataaatacttatttatttcctatttccnctgactagagtggc

SEQ ID NO: 163850 - DNA, 915 bp, Homo Sapiens
gatcttgttcataacacgatacttgatgctccaggtactggtaaaatactgaaaacagtggccatgtcctcccaagcagaagagctaacatagatttagcagtatcaatatcaaggcttctctgatctttatcccttgcaaaatcaaaggcatatctgtagatattcttaaatgacgaaatatcattcaactgtgagcgcaaaaagtcaaatttgttttgtaacttttctgtgccagtcacactgtaaggaaggtcatacccttgaaccattctgtcctaggtaaaaaatcccacgcttacagactccaatttccacgctaaaactaacatagataatatgttcaggttcaacaccaatgtcttcacaaaatttttccattccttctggccctacaacttcatcaggacctgcatattcataaaaccaagccaggcacttcttgcttgaaaaatgttcctctccacttattagtctagcagggggttgggatctgcaatagctggagattttacactttttgaggcctccgtcttccgctactgctgctgccaccccaggggattttctcttcttcttcaccggcatcttccgccctccccggcagggtgggcaggggagccggggaagggggtccctgtccgctggaagcccctcagcgctggcacccagttcccagagacagcagcaagcggaggagcagagtcgccagcccgcaccggcgcggcccagcccggccgccgcccgctcccaggtatcctcgtcgtctttctctgaccgggacagggctggctcctcgccggtggacactgcggttccttctcaccgggaggagataacgcggacagcgcggcagctccaccagtcacagcaagcaagaggctcagcctaacccggaggccccctggctcccttg

SEQ ID NO: 163851 - DNA, 644 bp, Homo Sapiens
gttacaaggctacgtcctccaggaagtgcagctcattactaccactcccacgtcaactagaagcctgtgttcggtacacatcatagcgaagctcttgatgagctgagcctcaagtaccggtgtaaaagagctcccatctgatctgcagtcattacagaaaaagcaaatattccctcaacatcagaacaatgctcaagtctttcaagccacgtctgagcagtcaaaggcaaattagaattaacaagctgagccaataaatgaatgggtaaaagggatgctagaaattcaactgaagaaaaaaagcaagtcaagtacgtattcagcattaaagatgaatctcagaagtcatggttcaatgttgacactgtgaggataacaactagagacagcttcatcttactaaagaatttatggtcaagtatatttggacctattatcctcggcaagccaagatgcaaacattttttagctatatttctttagtatacccactgctgtaattttatattaggatactaacttgaaacatggctgcagcctctacctcttcgagaacatccccccgagtataccagatttagatatccaatactgtgtcgtgtatacttcactgttttgtttctcttaactcgtaacccattctc

SEQ ID NO: 163852 - DNA, 520 bp, Homo Sapiens
tttgaagagtataaggtttacacaatcattctcataatgtgacgcaagccagcaaggccaaaaatgctagagaaaataacgggatctcttccttgtaaacttgtacagtatgtggtgactttttcaaaatacagctttttgtacatgatttagagacaaattttgtacatgaaaccccagatagactataaataattctaaacaaacaagtaggtagatatgtatgtaattgcttttaaatcatttaaatgcctttgtttttggactgtgcaaaggttggaagtgggtttgcatttctaaaatggtgacttttattctgcaagagttcttagtaacttcttgagtgtggtagacttgggaacttgtaaatttttggcttgtaatgttatcctgtggtaggatttgggcaggtacacacactgccctattttatttggagtctaagttaaatgttttctgaaaagagatacttgcactgaactctttccactgcgaatcaagatgtggtaatataaaaggt

SEQ ID NO: 163853 - DNA, 398 bp, Homo Sapiens
gatttccccatcttatctcatgccacaataaattacaaagtaactgaagacaggttacgcagctttgtacagcttcaagcatccattaatgtgcagggtaggttctttctttctagagttaactgtcaaagcacaacaatgctcagtaactgttttcatgacccgccaggatgtacaaatggctatttgctgtggggttatcagttggcctactttccaaaaccacgaccctgtcagatccaagcagcctgaaaattcttgtgctatctgaaatttcttgtgttacctcattagatctaaaacttctaccttgcattccatgtttccagaaagctagcacactgtcttgtaggcacactattgattcaatctggaatcaaaggtgagttctgaaacat

SEQ ID NO: 163854 - DNA, 700 bp, Homo Sapiens
tgcgtaatcgtgacatcaggtcggatggctaaagcgattctggtataaaaagttacaagtgtgaagggctccatgccattgtgtgtcagatagagatggagtaccgttattaaagtggcaaatgacaatgctccagagcatgcgttgcgacctggtttcttatccactttggcccttgcaacagaccaaggaagcaaacttggactttccaaaaataaaagtatcatctgttactataacacctaccaggtggttcaatttaatcgtttacctttggtggtgagtttcatagccagcagcagtgccaatacaggactaattgtcagcctagaaaaggaacttgctccattgtttgaagaactgagacaagttgtggaagtttcttaatctgacagtggttccagtgtgtaccttatcttcattataacaacacaatatcaatccagcaatctttagactacaataatacttttatccatgtgctcaagaaagggcccctttttccaacttatactaaagagctagcatatagatgtaatttatagatagatcagttgctatattttctggtgtagggtctttcttatttagtgagatctagggataccacagaaatggttcagtctatcacagctcccatggagttagtctggtcaccagatatggatgagagattctattcgtggatcagatctcactg

SEQ ID NO: 163855 - DNA, 844 bp, Homo Sapiens
  misc_feature (410)..(418): n is a, c, g, or t
ctgggaggggaggcccctcctgttagcccagagggaaagaaagaactggggcgatccgggacctggtggccttagtctttcaggtggaacggtgtgcgacatgggaaagaaaaccaagcggacagctgacagttcttcttcagaggatgaggaggagtatgttgtggagaaggtgctagacaggcgcgtggttaagggacaagtggaatatctactgaagtggaaaggcttttctgaggagcacaatacttgggaacctgagaaaaacttggattgccctgagctaatttctgaatttatgaaaaagtataagaagatgaaggagggtgaaaataataaacccagggagaagtcagaaagtaacaagaggaaatccaatttctcaaacagtgccgatgacatcaaatctnnnnnnnnngagagagcagagcaatgatatcgctcggggctttgagagaggactggaaccagaaaagatcattggggcaacagattcctgtggtgatttaatgttcctaatgaaatggaaagacacagatgaagctgacctggttcttgcaaaagaagctaatgtgaaatgtccacgaattgtgatagcattttatgaagagagactgacatggcatgcatatcctgaggatgcggaaaacaaagagaaagaaacagcaaagagctaaaggaggggatggtctctgtcatttctctttgtacataatacattcacctccctgcctcctctcctttctacccacccctttctatcctaaacacatccataaaaaatgtgcttatcactgtgctccacaggagaaatgtgtattgttctcttgtacataactgatgt

SEQ ID NO: 163856 - DNA, 654 bp, Homo Sapiens
gcagaagacggcggcggtggtggcttgtggtgcggcctcaccatacaggaacagggcagacgttagcgtgagtgatcactctcaatcccggggacccggtggccttagtctttcaggtggaacggtgtgcgacatgggaaagaaaaccaagcggacagctgacagttcttcttcagaggatgaggaggagtatgttgtggagaaggtgctagacaggcgcgtggttaagggacaagtggaatatctactgaagtggaaaggcttttctgaggagcacaatacttgggaacctgagaaaaacttggattgccctgagctaatttctgaatttatgaaaaagtataagaagatgaaggagggtgaaaatgatcaatgtcctctaagacaatcctcacccagacacaggcaagggagagcgaagaggttcgttagagaaatcaagtaatgccgaactttatggaattgagaactgactttgcaaagctgaattctttgtgcttccaatgtcctcattagaatccctttgaagtacatcagagtataattttcaagagtacaagaacaaagcttcatactagccattggctcaaatggcccatccagcagaaacaagagtatctgaatgctctgctcctcaagccataacgtgcgcag

SEQ ID NO: 163857 - DNA, 469 bp, Homo Sapiens
  misc_feature (406)..(406): n is a, c, g, or t
gggttttggcgggcggttggcgttgcgcagaaggcggcggcggtggtggcttgtggtgcggcctcaccatacaggaacagggcagacgttagcgtgagtgatcactctcaatcccggggacctggtggccttagtctttcaggtggaacggtgtgcgacatgggaaagaaaaccaagcggacagctgacagttcttcttcagaggatgacggaggagtatgtggtggagaaggtgctagacaggcgcgtggttaagggacaagtggaatatctactgaagtggaaaggcttttctgaggagcacaatacttgggaacctgagaaaaacttggattgccctgagctaatttctgaatttatgaaaaagtataagaagatgaaggagggtgaaaataataaacccagngagaagtcagaaagtaacaagaggaaatccaatttctcaaacagtgccgatgacatcaaatct

SEQ ID NO: 163858 - DNA, 467 bp, Homo Sapiens
tgatgcgtacagaacaggttgctttacaaggaaacaagaggaaaggcaataaaggattcttccatataaagattctgatatgcattattggattttcgtttacaaaatacaaaactgtaatattagaagcaaagggaataacagcaaagaaaaaaacaataaaacagaaggccaaggataaggaactgtccgatgcagatgaactgcatacatagtatatatgtatgggctgagttataataaaaatacttatcgtcaattctcatatagatttagaaacaacaatttccaatcaagcacgactggacccaacattttctcagtcttcaattacatgacaaattacagctacacagcagtcacttctggtcagcagtatcatgataaatgcttgacaagatataatttttctccttgttcacttgtaaaaatgggtgcctttttgtaatgttctacaagttcttcca

SEQ ID NO: 163859 - DNA, 535 bp, Homo Sapiens
cgttagagaatttgtacattagagaatttgtgctagagcaactcttcaaatttagtgaaactgggaaaacccattagtagagttcaagcttcagtattcatctcaaagagaaaccttgggaacatgatgaatgtgaggaaagttcctttccaacttgagatgtataaaactagagctgaaaagaagctgagaaatcaccttgtctggtgattttctgcctggtggggccaattgtacaacgacacttgcgcatggcctccttcaagcatgttactgacggggcatgggtgtcaggcatgggtgtcagaggatggaaggctgtatgaaaggtagacagctaccctaatagatcgagcgaccagtcgtattttagagctaataaaactgatgttcagaaagtgacaagccttggccaatagtcctaactgggccgggcacctgtcctatggttcacagctgtagttatggagattgaatagactggatctttgcagtacaacaccttaggcattttttatctgtagcacagttacct

SEQ ID NO: 163860 - DNA, 1508 bp, Homo Sapiens
  misc_feature (1148)..(1195): n is a, c, g, or t
cgactctagaggatctctacatagatgtgtaatctggaagcaaatggtatcatgtgttcttttgagaactaatacattcaaaccagtgcaattacaagcatgagaaatagaatgtccttaataaaaatgcttgtttcatctgcaaaggatcaggaaacttacctttgaattgaaggtaacatattttggcgtacacgtgtcagcatttgttgaattagcacttattgttgaatttagctctggaacaatgcagggaatttgaaatttcttgtaaataaccacaattaggaaaaaaaccatacagctcaaggaaaatccactagtatagccaagataccctaagttcttcaagagacacagagggagaattatgccaaaggtaactatcaccaccagaacgcggacatccacgtaccaggctgaaaatgtctcttcctttcccattagaaactttatggcagagggtagttcattttttacgatgaagaggtagctcagcattgctccagtgttctgtagagaggtggctccaaagattacgaacttccctgtggtgccaaagacttgttcccccagcttttcatacaccatgcagcctgtttcttttgaacagatcaataggaggtttattgaatatatatgacagcaatgtcactgaagtcaaaagtaccagaaaaagtaggattccagtgtttgccagggcaaaggcgagtcccaaaatcccactgcccataatggcgttgcttaggttaaaaacagacatgcctaaggaggttgtacctggaatatactcatcacacttctttttttccaaatggctgtttgtgagacttcttctactttcacgatcagaaataaacttgctatttatctgaccattttctacttcggtgaaatcattggagtcattgctaatgttatcatcctcgggcactgtcatgttttgcaactcagttaattcgagtccacttttgaaatgcatcatgattagaaagtgtctgtagtttgaaaattagtccaaatttctcctgttctgagtgtatttagaagtagataccaaaatggaagcttgacacccctgttagctcagcaagcagagacgatcactctatatatatcgttgtatggccttccagggtttttctatnnnnnnnnnnnnnnnnnnnnnnnnnnnnnnnnnnnnnnnnnnnnnnnnccggaaataaagggaaaggtggcaaaaggcgatgtggaggtgtccgcccttccggggtttttaccctcggcagtttgatgtcctttgtgtcaaggtctggctgcggaggccgggaaaatgtggcccccgtcagtaagggtcgggcagggagcttggcgtggcctggtggatttcggaggaagtgaagggcggagttcctggcgccttcttgcgagtggtgtggcgccccagtccgggctcgctggtctcctcctttcgggcgattgatcagaactcccctcacaaaaaacacaatcaaatctgtcgcgggctc

SEQ ID NO: 163861 - DNA, 906 bp, Homo Sapiens
  misc_feature (680)..(696): n is a, c, g, or t
catgtagctgggactactctgtaactcgggagaacacagtgtgcagggagagagatgtctctgagggtcactacaaagaatgaccctcattgtccctcactcaggccatgtgcacatgcgatgctgctgagtgtgctggggtgggtggtggccacgtggctcccccagagcacttcctaactggcaagctgggagacccattactggtgaactgtgtggaaattagaactgtatcttttacataatcttggcatattacatttcataataaaaacatacatttagttgcatgctacatcactattgattttataattaatttcttaagcttcaaccatgttttataccttatttcgttacatcatatatttgtaatgtgtacatatagaaatcttttgctttaaatgtctttttttcaaatgtagaatgttctaaacttgaaacggcaattgaatgtagtatgatgaaaatgtgaatgttttgctgctttcatgaccaaagatacagggctagtggacatttagaataataattaaagctagagtcttgtatgtcttttctttgaaggagttctaaccttgtaaatcgagaatgacttcagagaattttgattaagaaaacattaaaatcttaaccggcacaaacactccaatttttttcactgtgaagccgcaagcaannnnnnnnnnnnnnnnncaaaagcctgccttctgaatttatttcttgtttactcatttcagagagggtagtaaagaagatctatttctggtagtcatatcgcttgaaaggtattggtaaatgtgttttcagtcgtgaccatgtggaaagtgaacagtgttggcaaacattaccgagaaaatcatgcttttcaagatgcccttgctttgggatatccttcctagggag

SEQ ID NO: 163862 - DNA, 477 bp, Homo Sapiens
ggtggcgttcagaggatcccaccaggattatgtggttcaggctgagtgtcggacaaagtgagggtgttctagcatctgtcagtggcacaaacgtgaagatgcagatcggtgcggctaagaacggaagatgggcaacggattgtaggtgtgatcattccggcaaattgtgtgtctcctcttgtaaatctcctatcaacttcagaccagtctcaacagcttgcggtccaacagaaacagctatggcaacagcatcaccctcagagcatcaccaacttgagacaacgcatgaagaacagacaggttccaacatggatggatctgaaatgctgttgaagcatactcatttgcacaaaaatcagggacagtttccaaagaataatatatttcttttcagtcgtgctcctctagtttaatttcttttgagagtacaggaccaacctggaatagatagccaagctgaaaccctctgtgctgatt

SEQ ID NO: 163863 - DNA, 1088 bp, Homo Sapiens
  misc_feature (876)..(876): n is a, c, g, or t
ggcctgggtggcgaattcggcacgaggaaagaacatataaaaaggatgaagaagcatgctggcagactcgctggagggaaggcagcagggctacagtctacatctggtgaaagagctttgctggcttgttcttggcatgattgcctctctcactttctcagactggatggatgtgtggcattcagcagcagaatggggaagatgatatttataaatgaagaactagtgaatggatactgaacagaaatatatagggtgtaccattctgtaatgccctgtttatacaccaaaggcaggtttgtgttgacagaacatatttggggttgtcatgcaacagcagtagtactttgggagaaggggaatgagggggtggaggtggagttggtagaaggaggactttcaagttccagttcttaaatactagaccgcaaggaacagtttggtctcctttagtgaagaaatcggatgctcattttctgttctacatccaccttctccaaaaccttaacaaattctgtgaaagatatggcactgtccccatcctgatcagcctcctgaatggtcctgtctgcgatgctgcccagctgctcatctgagatatttaccccgaccatcatgcgtagcacctgtaacagctcatcacgggagatcttttcatctttatccaaatcatatagtcgaaaagcaaagtgcagtttgttgcttcggctgttgagtggttcgggtccattcacatcttttgctcttttcattatccctcaatgggggcggaaaatgagcccaaagttcgccatggaatccacgggaaattttaccctgggtccctctcccctcctggaaaagaaaggcattggatggatcccgggccccccccangggggtttgaatgggcaagttcctgggaatccctcctgggaaaacctttcccgggcttgaaaagttcccacttcctcctcctttttggcccaggcctgggtggaaacccggtcttgtataaaggcccagagggattttgtactgtggggggaaaaagccgcgggccccccctttctttgagattctcccccaaagattcttttcgttccgcc

SEQ ID NO: 163864 - DNA, 945 bp, Homo Sapiens
  misc_feature (616)..(616): n is a, c, g, or t
aagaaatataaaaaggatgaagaagcatgctggcagactcgctggagggaaggcagcagggctacagtctacatctggtgaaagagctttgctggcttgttcttggcatgattgcctctctcactttctcagactggatggatgtgtggcattcagcagcagaatggggaagatgatatttataaatgaagaactagtgaatggatactgaacagaaatatatagggtgtaccattctgtaatgccctgtttatacaccaaaggcaggtttgtgttgacagaacatatttggggttgtcatgcaacagcagtagtactttgggagaaggggaatgagggggtggaggtggagttggtagaaggaggactttcaagttccagttcttaaatactagaccgcaaggaacagtttggtctcctttagtgaagaaatcggatgctcattttctgttctacatccaccttctccaaaaccttaacaaattctgtgaaagatatggcactgtccccatcctgatcagcctcctgaatggtcctgtctgcgatgctgcccagctgctcatctgagatatttactccgaccatcatgcgtagcacctgtaacagctcatcacgnggagatcttttcatctttatccaaatcatatagtcgaaaagcaaagtgcagtttgttgcttcggctggtgaatgggtccggtccattcacatctttgctcttttcattatccctcaatggggcggaaatgagccaaagttcgcatgaatccacggaaagttaccctgggtcctctcccccctggaaaagaaagcatttgattgatccccggccccccagtggggttggatggcaaagttctgggaatccctctgggaaatcctccccggctgaaaagtcccccttcctctccctttggtccgggctgggtgaacccggcttggaaaaag

SEQ ID NO: 163865 - DNA, 880 bp, Homo Sapiens
aagacatataaaaaggatgaagaagcatgctggcagactcgctggagggaaggcagcagggctacagtctacatctggtgaaagagctttgctggcttgttcttggcatgattgcctctctcactttctcagactggatggatgtgtggcattcagcagcagaatggggaagatgatatttataaatgaagaactagtgaatggatactgaacagaaatatatagggtgtaccattctgtaatgccctgtttatacaccaaaggcaggtttgtgttgacagaacatatttggggttgtcatgcaacagcagtagtactttgggagaaggggaatgagggggtggaggtggagttggtagaaggaggactttcaagttccagttcttaaatactagaccgcaaggaacagtttggtctcctttagtgaagaaatcggatgctcattttctgttctacatccaccttctccaaaaccttaacaaattctgtgaaagatatggcactgtccccatcctgatcagcctcctgaatggtcctgtctgcgatgctgcccagctgctcatctgagatatttactccgaccatcatgcgtagcacctgtaacagctcatcacgggagatcttttcatctttatccaaatcatatagtcgaaaagcaaagtgcagtttgttgcttcggctgttgagtggttcgggtccattcaccatctttgctcttttcattatcctcaatggggcggaaatgagccaaagttcgcatgaatccacggcaagtttacctggtccctctcccccgggaaagaaggaattgatgatccggtccccccagggggtcggatggccaggttccggaaacccccctggaaaacctctcccggcg

SEQ ID NO: 163866 - DNA, 555 bp, Homo Sapiens
gatgcactctgtgcaccagagtttaaagtacctgaaatccaaatgaactgtatgactaactctggggaaaaaccatacacacagaatacatcaagttatctttcaaaagaaagtccagccataattccattatatccatggcaactatcacccgttaatgctaatgttagtgtataaaaatgtattcatcatatacagagagattatcaagtactggtcaataaagtgtacagctgaccctgagaataaattttggcttgcttaaaagattaagtaatacaaaataaaatgaaaatgaaagatgcctattctcgtacttgggaagaaatgtctttaaaatgctgactaatgtataacctaatatatttaaagacacccccaaacactgtaattatattgatatgtttccagaaataatctgaaaaagtgtacaaaaaaagtaaatgttaaaggcaaggcattatgtgatacacagcatataaatctgattttcaagatagtgtctaaatacactgataaaactatgtgattggttatcaattggttgtaaagaga

SEQ ID NO: 163867 - DNA, 871 bp, Homo Sapiens
acccacgcgtcgctggttgaatccggaagtgaccctagagaaacgagttgtggctgaggaccccggcggcagacgcaggttcgggaccatgagctggattccttttaagattgggcagcccaagaaacagattgtgcccaaaacagtggagagagactttgaaagggagtatggaaaacttcagcagctggaagagcagacccggaggctgcagaaagacatgaagaagagcaccgacgcagacctggccatgtcaaaatctgccgtgaagatatccttggacttactctccaatcccctctgtgagcaagaccaggaccttctgaacatggtgacggccctggacactggccatgaagcggatggatgccgttcaactcaggaagaaggtgaaccatgatccagaagactgtgatcgatgccctgtaaagaaagttcggcagcgtcttcccgagcctcaacatggctgtgaagaggcgggaacaggccttgcaggactacaggaggctgcaggccaaggtggagaagtatgaggaaaaggagaagacggggccagtgctggccaagctccaccaggcacgagaggagctgcggcctgtgcgggaggactttgaagccaagaacaggcagctgctggaggagatgccgcgcttctacggcagccgcctcgactacttccagcccagctttgagtccctcatccgagctcaggtggtgtactactcggaaatgcacaagatctttggagacctgtcccatcagcttgaccagccaggcaactccgatgagcagggggagcggcagaacgatgccaaatcagtgagctcgggccctctccattgtggccgatgactgaatcccgtacatctgg

SEQ ID NO: 163868 - DNA, 561 bp, Homo Sapiens
  misc_feature (143)..(152): n is a, c, g, or t
atccgtacaagcagaagctggagaaagcatgcggggcttgggaaaaacaatagttatggcaaaagtctatcgaaacagcaagcactgacaagcagcacattctcaagagcacacaggattaagtcgtcatcattctgggaagnnnnnnnnnncattaatgaagaggccaataatatgaagggaatcatggatcagttttctttcgctcccgtggggtgggatttcacttacaagaaaatggaagctggcaagacccggttttctctgcaatttatttaaaacctggcacgcattgggatacctggtgatttccaagaactacgtgaagattaagcttggcttactgatacatggcatgtattcttttcagtctttggggttggatttggttggatttccctctgcagcacagcgtctctgtaaaggtttttatgctttcaccagccatgtcttaaatacattaagacaacacattgggtgttcacacttcttcagtaatgtctgaacttgaaagccacagaggggcataaaacaatgtgtgtcttctttgagagcagtgca

SEQ ID NO: 163869 - DNA, 1101 bp, Homo Sapiens
agcgccaggcccggcgctcctcaagatggctgccgacagtgagcccgaatccgaggtatttgagatcacggacttcaccactgcctcggaatgggaaaggtttatttccaaagttgaagaagtcttgaatgactggaaactgattggaaactctttgggagagccactcgaaaagggtatatttacttctggcacatgggaagagaaatcagatgaaatttcctttgctgacttcaagttctcagtcactcatcattatcttgtacaagagtccactgataaagaaggaaaggatgagttattagaggatgttgttccacaatctatgcaagatttgctgggtatgaataatgactttcctccaagagcacattgcctggtaagatggtatgggctacgtgagttcgtggtgattgcccctgctgcacacagtgacgctgttctcagcgaatctaagtgcaaccttcttctgagttctgtttctattgccttgggaaacactggctgtcaggtgccactctttgtgcaaattcaccacaaatggcgaagaatgtatgtaggagaatgtcaaggtcctggtgtacgaactgatttcgaaatggttcatcttagaaaagtgccaaatcagtacactcacttatcaggtctgcggatatcttcaaatcaaagatggatgtcctttaactccattgcctccagttagtattgctattcgatttacctatgtacttcaagattggcagcagtattttaggcctcagcaacctccagacatagatgcccttgtaggaggagaagttggaggcttggagtttggcaagttaccatttggtgcctgcgaagatcctattagtgaactccatttagctactacatggcctcatctgaccgaagggatcattgtggataatgatgtttattctgatttggatcctattcaagctccacatgggtctgttagagttcgaaaagctgagaatcctcagtgtttgctaggtgattttgtcactgaattttttaaaattggccgtcgaaaggagtcaactgatgagattcttggacgatctgcatttgaggaagaaggcaaagaaactgctgata

SEQ ID NO: 163870 - DNA, 1816 bp, Homo Sapiens
ggggcgcctgcgcgcttgtggagctggtggcggcgctccgcaggggctcggctgttttccgcgcggcaggcgcggccatggcgcagctgggaaagctgctcaaggagcagaagtacgaccggcagctgaggttgtggggtgatcatgggcaagaggctttagaatctgctcatgtttgcctaataaatgcaacagccacaggaactgaaattcttaaaaacttggtactaccaggtattggttcgtttacaattattgatggaaatcaggtcagcggagaagatgctggaaacaatttcttccttcaaagaagcagtatcggcaagaaccgagctgaagctgccatggaattcttacaagaattaaatagcgatgtctctggaagttttgtggaagagagtccagaaaaccttctagacaatgatccctcatttttctgtaggtttactgttgtagttgcaactcagcttcctgaaagcacttcactacgcttagcagatgtcctctggaattcccagattcctcttttgatctgtaggacatatggactagttggttatatgaggatcattataaaagaacatccagtaatagaatctcatccagataatgcattagaggatctacgactagataagccatttcctgaactgagagaacattttcagtcctatgatttggatcatatggaaaaaaaggaccacagtcatactccatggattgtgatcatagctaaatatttagcacagtggtatagtgaaacaaatggacgaatacctaaaacgtataaagaaaaagaggacttcagagatttgattagacaaggaattctaaaaaatgaaaatggggctccagaagatgaagagaattttgaagaagctattaaaaatgtgaacacagcactaaatacaactcagatcccaagcagtattgaagatatatttaatgatgatcgctgcataaatatcaccaaacagactccatcattttggattttagctcgtgccttaaaggaatttgtggccaaagagggtcaaggaaatttacctgttcgaggcacaattcctgatatgattgcagattcaggcaaatatataaaactgcaaaacgtttaccgtgaaaaagcaaagaaagatgctgccgctgtgggtaatcatgttgccaaattgctgcagtccattggccaggcaccagagtccatttcagagaaagaattaaaattactctgcagcaattctgcatttcttcgagtggtaagatgtcgatccttagctgaagaatatggttggatacaattaacaaggatgaaattatttctagcatggacaatccagataatgaaatagtgttgtacttaatgttacgggctgttgatagatttcataaacaacagggtagatatccaggagtatctaactatcaagttgaagaagatataggaaagttgaagtcttgtctcactggcttccttcaggaatatggtttatctgtaatggtgaaagatgattatgtccacgaattttgccgatatggagctgctgagccacataccattgctgcattcttggggggagctgctgctcaagaggtcatcaaaataatcaccaaacaatttgtaatttttaataatacttacatttacagtggcatgtcacaaacttcagcaactttccagttgtagagtaagcaagcaccttaagtagtgtgttaatgattgaaactgtaattgccttcgggttgtgctttagtctgtaaaattctaaaggagagctgctaaattgttttcttaataaacatttttctcatttgtcaaaaa

SEQ ID NO: 163871 - DNA, 465 bp, Homo Sapiens
gcaatcccataaaaaggatatgcagcatctctgcacaccacattgcaggaagaaaaacaaatggaccatatcttcattagagaatagccaaaatcacttgaaaaggttattagtgacaattctaaataccagagatacatgtaggaaagaaaatgtttttcctcagggaatggaaatgttttgtgggacattccttcacagttggcatgactgtttgggggactgactaaatgctttatcacacatctgcatttacaaggtcttcactgttaatcacagaaaacatttttgttccttccagattgctcttgcttctgtagacaattatatgctaattattattcaacataacagtgagagcaaaagtgacatactgccaacacaccgcatttaaggagccaaaagaaatatgctgccagctaaatgcttacacacaaaaagttagacttttaagtgtgttactgc

SEQ ID NO: 163872 - DNA, 504 bp, Homo Sapiens
gtgtgaatggctcttcttaactgatttctgcctgggcaccgcacccccagccaagtctgaacctgagcaataccaggcacagagaggtgtctacttgtaaactccaacacttgacaaaaaacaaaactgaagctgtgattggtttaggcagcaagtggccaggtgcaacttgttggtatttattttagttttccccaacagtactgagatcacttgcacttttcctcatttcttaagaaaatccagtttgcttgccatgacttgtttagcgttaggtttacaaagcttgttgttgaatggtgaatatttgtccaaaggagtttgacaaaatagaaactgcttggtccctgttctgcctgctaggtcataaggatgaaggccatgtggctggggtacttatgtcaagtccagaatggggcagtgtccctctcctacctctctgcggagacgcaattgaaggtcaagtagactcagtgtagggcaagcagctgtcatgcttgcaaa

SEQ ID NO: 163873 - DNA, 983 bp, Homo Sapiens
ggattccaaatcgaaaccaaaccttccatcagaatcacgctccagatcaaagtcagcttcaaaaacccgatctcggtccaagtctagatccaggtctgcttccagatcgccctcccgatctagatctaggtcccactcaaggtcctaactggctatggccacagctggaactacccgagaagtcttttgtacatgtttggtagccgtagcacaagtgattggagtagaacatgtcactgctgtacatttttaactcccctaatggtgtgtctataattgttaaatctaagtgcttcctctcagtaaagcctcctggcaccaggccttcctgctcgactgaaaaaaattttctctttgaaaatccccttttactcatggcccacagtagaatatccaaaacgccttggctttcaggcctggcctttcctacagggagctcagtaacctggacggctctaaggctggaatgaccacataggtaagtatggtgagttcaaccatttttgctcttgaattgatgcccttccatgtatgccatttagtgaaagtgctaagtcttaagtttcctaccactttggtttcatatttcggacttaacaaagttgtgaatagcacagtcgaggaaaattgatacctgcagtaacccataggaaataaactgtagagttctatattctggtatcgtgattatatggttagatattagaaaacgaaaagacacagaatttcgtataatgttatgttggccccggtcttgcaaagtatagtgaccccgtgtttaccattaaatttgaattaacagcacctactgataggcgttggaacgacaacacaacagagcagaacagacgcgagcacaagcacgcagcgccaacaacaaaacaagcgcgccaccgaccacacagaggaacgacaccacccggggggctcccaacggaagaggcggcgaccccggagaagaagggacaaaaaaggagcgacaa

SEQ ID NO: 163874 - DNA, 644 bp, Homo Sapiens
  misc_feature (571)..(571): n is a, c, g, or t
ggaggcagtggtatcaacgcagagtggtcattaggcgggcagcagcaagaagaagaagaaggaagacactgaccgctcccagtccagatctccatcccgctccgtgtcaaaggagcgggaacatgccaagtctgaatccagccagagggaaggtcgaggagagagtgagaatgctggcaccaatcaggagacccggtccaggtcgagatccaattccaaatcgaaaccaaaccttccatcagaatcacgctccagatcaaagtcagcttcaaaaacccgatctcggtccaagtctagatccaggtctgcttccagatcgccctcccgatctagatctaggtcccactcaaggtcctaactggctatggccacagctggaactacccgagaagtcttttgtacatgtttggtagccgtagcacaagtgattggagtagaacatgtcactgctgtacatttttaactcccctaatggtgtgtctataattgttaaatctaagtgcttcctctcagtaaagcctcctggcaccagggccttcctgcttcgactgagaaaaatttttctctttgnaaaatccccttttacttcatgggcccacagtaggaatattccaaaacggccttgggttttcagggctgggctt

SEQ ID NO: 163875 - DNA, 695 bp, Homo Sapiens
gatctaggtcccactcaaggtcctaactggctatggccacagctggaactaaccgagaagtcttttgtacatgtttggtagccgtagcacaagtgattggagtagaacatgtcactgctgtacatttttaactcccctaatggtgtgtctataattgttaaatctaagtgcttcctctcagtaaagcctcctggcaccaggccttcctgctcgactgaaaaaaattttctctttgaaaatccccttttactcatggcccacagtagaatatccaaaacgccttggctttcaggcctggcctttcctacagggagctcagtaacctggacggctctaaggctggaatgaccacataggtaggtatggtgagttcaaccatttttgctcttgaattgatgcccttcgatgtatgccatttagtgaaagtgctaagtcttaagtttcctaccactttggtttcatatttttggacttaacaaagttgtgaatagcacagtcgaggaaaattgatacctgcagtaacccataggaaataaactgtagagttccatattctggtattgtgattatattgttttatacttaaaaacgacaagacaaagaatttgattaattttatttttccccgtcttgcaaagtatagtgacccgctggtttccagttaaacttgaattaacgctattttgtgcttgacc

SEQ ID NO: 163876 - DNA, 532 bp, Homo Sapiens
  misc_feature (63)..(80): n is a, c, g, or t
tgcataatagataattgagaagatagggtggcatggctcacaacagtaatgatggcttcatannnnnnnnnnnnnnnnnnaatatatttatcttgggcaaattctgtctgtctcggaatgtgtaccatttataactggcttctttccaagtaggttctcaggtggcatattcggaagacggctggaatgacagaattcttgtatcagagtaggtaagaagggagcaacctctcaagggctattatgtcatgctttttaagatcgtatgcggttcctatatacaaggaagcttccctgtggtagattcgtcataaatgccaaagatatttggtaatgtgagtgtagaaaaagtagtatgagggttggcaaatactgttttcgtcttggcagctctaatatctgcattgttcagaaaggattctgaggctaaggcaaagctctgtgggaaaaagggactggaccaaaaaaaactggatggtggcacacaagaagaggaaatgatgagatgtgtactttctatctctggttaggt

SEQ ID NO: 163877 - DNA, 551 bp, Homo Sapiens
tcgtttcacactgatatagggctgcaaggtgttgatatttcagacttatgtcatctatgaggagcaagatctagagcatgtaattgtacatgggtcatggggaaggggtggcaagagagttagaattgcgaataatgtggtcaggagccttcaagagtctttgagtcagcaacattatgaaagatgtggttcaggacattctagtaaattttggagtctcctgagaagaaacttagaattctagactcctgaagcagggagagactttcagagagaacctagtccagcacagcatgtttacccaggacaggaaacctctatgctccatgccaacacacaggcatccaggtctgcaaagtgtcttttaaaaggggacatattatgcaacccattctgtttctgaaaagttctgtgcttggaactgaggctcagctgaaatcactgtcgctcttctatccttgggtcctcattttaccttctggacctatttgtatctacttgaaatctaacacctctcctacctaacagtcctgagggtgctcattttaaga

SEQ ID NO: 163878 - DNA, 1019 bp, Homo Sapiens
  misc_feature (95)..(362): n is a, c, g, or t
ggatgtttggaactctgaaggatttagacaaggttttgaaaaggataatcatgggttagaaggaagtgtttgaaagtcactttgaaagttagttnnnnnnnnnnnnnnnnnnnnnnnnnnnnnnnnnnnnnnnnnnnnnnnnnnnnnnnnnnnnnnnnnnnnnnnnnnnnnnnnnnnnnnnnnnnnnnnnnnnnnnnnnnnnnnnnnnnnnnnnnnnnnnnnnnnnnnnnnnnnnnnnnnnnnnnnnnnnnnnnnnnnnnnnnnnnnnnnnnnnnnnnnnnnnnnnnnnnnnnnnnnnnnnnnnnnnnnnnnnnnnnnnnnnnnnnnnnnnnnnnnnnnnnnnnnnnnnnnnnnnnnnnnnnaaaaaaatatatatatattgaaaaccaaagtaggcaaaattttgacagggaaggaagtaactgcaaaacactaggctttagtaggtacttatataaaatctagtccagttctctcatttaaaaaaatgaagacactgaaatacagacttaaatagctcagatagctaattaggaaatttcaagttggccaataatagcattctctctgacatttaaaaataatttctattcaaaatacatgcataattgattttacacctcattactggtggataatttatgtgatgtggattgctggtgtccagcatgacccataaacaggtcagaagaatgatggaatgttttagaataaactcctgcttatagtatactacacagttcaaaagatgtttaaaatgcttttgtatttactgccatgtaattgaaatatatagattattgtaacctttcaacctgaaaatcaagcagtatgagagtttagttatttgtatgtgtcactagtgtctaatgaagcttttaaaatctacaatttcttctttaaaaatatttattaatgtgaatggaatataacaattcagcttaattccccaaccttattctgtgtgtagacacttgtattccacaattttgaatggctgtgtttacctctagataaac

SEQ ID NO: 163879 - DNA, 765 bp, Homo Sapiens
tgtgctgcggtcgttctagaggtccctagccacctgagcctccaagtgctgggattacaagggcgagcaccgtgctggcccaaaactaactttcaaagtgactttcaaacacttccttctaacccatgattatcctttgtcaaaaccttgtctaaatccttcagagttccaaacatttccactgaacccatacttcatgagtttaaaacaaccaaaacagttcactttgttggcaaaggccatctctacccaagtaagattatttactcgttattcaatttagtaccgacacctccatccataacctacactattgtccactaaacactccctacctgtgtaaattccgtatcaagggtaaaaccttataagatttttcagacaactggcatttaagtgacttgtttataaattttaaaataaaccatgttctttgcagtatcctgccaggcaacacatcaaatatttcaaaaggcagccatacatttgctttaatgcttgctaaaacagcttaaggtctaatataattttaaaatagtcaaacaaatttgttttcactcttcatttcacaactatagagcagagaataagcccaataatggccacttttactaactcatcaccatattcataaaactttcctctgcaattcattctacttcacatatcaatgcacttggtaagaaaataacaaaatgacaagcagtaaaatctaattcatgccagaacaccgtcgaagggatcctctggagatcgactaggcgg

SEQ ID NO: 163880 - DNA, 754 bp, Homo Sapiens
  misc_feature (151)..(418): n is a, c, g, or t
ggcaacaaagtgaactgttttggttgttttaaactcatgaagtatgggttcagtggaaatgtttggaactctgaaggatttagacaaggttttgaaaaggataatcatgggttagaaggaagtgtttgaaagtcactttgaaagttagttnnnnnnnnnnnnnnnnnnnnnnnnnnnnnnnnnnnnnnnnnnnnnnnnnnnnnnnnnnnnnnnnnnnnnnnnnnnnnnnnnnnnnnnnnnnnnnnnnnnnnnnnnnnnnnnnnnnnnnnnnnnnnnnnnnnnnnnnnnnnnnnnnnnnnnnnnnnnnnnnnnnnnnnnnnnnnnnnnnnnnnnnnnnnnnnnnnnnnnnnnnnnnnnnnnnnnnnnnnnnnnnnnnnnnnnnnnnnnnnnnnnnnnnnnnnnnnnnnnnnnnnnnnnnaaaaaaatatatatatattgaaaatcaaaggaggcaaaattttgacagggaaggaagtaactgcaaaacactaggctttagtaggtacttatataaaatctagtccagttctctcatttaaaaaaatgaagacactgaagtacagacttaaatagctcagatagctaattagggaaatttcaagttggccaataatagcattctctctgacatttaaaaataatttctattccaaatacctgccataatttgattttacaccctcattactggtgggataatttatggggatgtgggattgctgggtggtccagcagggaccccataaaacggggc

SEQ ID NO: 163881 - DNA, 730 bp, Homo Sapiens
tttaggacagaatcaaagaataaagatcggaagagatcctactactcttccttctatgttatggtttaggtttctatggtccctatcatttcagcaagtggaacagcagcaagtttttcagtgcatatgctgcacaagaacaaaatataaatctgtatggcaccaaaaatcaaagtgaaaaccaaaccaaaaacccaaacaccctatgtaactatcggaggcatatacgtggtataaatgactgtagctgtgatacacacatggctacttgtcacatcactttccataattatttactgcaaaatgattgagaggcttttggtgcaggcagccgttaacctcctgcttcctttgttacctctggattactttgcagtaaatggcaggtcttttaagagatttaagcttcagttttctcaaaacaaaacaattatcctgtcttatctgaagatgcagggttgtgggcaaaagaggctggttataataatgccctcatatcgagtggtctgtaaacggctgcacacttcaggcactgtagttgctgaagatgctttgttaaatgtgaccttgactggctttacaggggtgtagaatgtaatctacacaaggtgactttgcatctatcttgctcttgaggtggatgaaattgagaagctggagtgtgtaagccatgcacataagtattcttcactgtacattttgttttcatttctcacccattatgtaccgt

SEQ ID NO: 163882 - DNA, 1159 bp, Homo Sapiens
tcgattcttcgatgacgaatggaaaaagtcatgcaggaatgggaaaatcactgacagatcaagatgtaaattcactggctgctcagcattttgaatcccagcaagacctagaaaataaatggtcgaatgaattaaaacaatcaactgccatccaaaaacaagagtatcaagaatgggtaataaaacttcaccaagacctaaaaaaccccaacaacagctcccttagatgaggaaattaaagttcagccaagtcagttcagagaatctgtagaagcaattggaaggatttatgaggaacagagaaagttagaagaaagttttaccattcacttaggagcccagttgaagaccatgcataatttgagatcgctgagagcagatatgctggacttctgtaagcataaaagaaatcatcgaagaggtgtgaaacttcatcggctccaaacagctctgtcactttattctacatctctctgtggcctggttttactagtagataatcgaattaattcatatagtggtattaaaagagattttgccacagtttgccaagaatgcactgacttccatttcccccgaatggaagagcaattagaagtggtccaacaggtggtactttatgctagaacccagcgcaggagtaaatggaaagaatcacttgattctggaaaccaaaatggaggaaatgatggataagactaagtatgctgagaggaactagttaaatgtttgacctggggaattttatattacacggcattctaatctcccagaaatccatgttgctttccatctctgtgtggatgaccatgtgaaatcgggaaacatcactgctcgtggtcctgccattatgggactccgaaatatactcaaagtttgctgtacccatgacatcacaacaataagcattcctctcttgctggtacatgatatgtcagaggaaatgactatacctctggtgcttaatggagagcaggaactagtgttcaacgtgtggcaatagatttcatgatggaaatggctatcatgggatcgaggaattatctaggacagtgcaatttctagtaccacagagtatttctgaagaaatgttttatcaacttagtacatgcttccccagatcttccgagtatacagcactcactctgacatccaagca

SEQ ID NO: 163883 - DNA, 264 bp, Homo Sapiens
ggtgatctagaggtccccgttatccgtacacatttgagaaaaaggcacctcagttctcatattgctctcaagaaatgcacaagacttttgggaacttcattgattttgtagcacttggccaaaaacacattctgtgcaatcatccactaaaggaaaacaaaaagcaggcaactgagagaagagacccaggagggcaatgcaaagtcagttgagtgatggcctctcccttctcatgtaccagtattctactgtacggataacgcc

SEQ ID NO: 163884 - DNA, 898 bp, Homo Sapiens
  misc_feature (782)..(855): n is a, c, g, or t
ttatacagagagattagcatattttgttctggatcagtaaatcaagtcagcttggatcattcaccttaacttttcctttacagccatttccactagtttccattaagtagtgttctataaactttgatccaaagcagaatcaatgtcttttccatctcgtgacttaaagttctgtgactgtgatgcatgtgagtgttccgacttcatctgttcctcttaactacggtgtttcccttaccatggcattcataggatgaaatgaatgactgcccagaatgagaatttgtccagattattcagataaacatcataaagcagaatacattataaataagtagaatatgaataaatagaataataaaattccaaaatactcaatgggaaatgactagtaatataggctttcaagagttggtaccttttagctatatttgcagattctctgggattttaaggaactgagaaaacagcaaagttgactaaattttatatttcttgtcctctaaatattttgataatttctggattgatgcagtgatgtttttgttccttccgtatttataaatgaaacacctttttttagtgtttctaaaccctaaaatctacttggtttgaaatcaagttggttggaaacactggtttgaactttttattttgaaagcatgtttggttggatttgaaaaattttccattggaaggaaaagttttttcaattccggtggggggatccaggttttggaattccgggaaaatggaagcccaccggccaccccctaaaatannnnnnnnnnnnnnnnnnnnnnnnnnnnnnnnnnnnnnnnnnnnnnnnnnnnnnnnnnnnnnnnnnnnnnnnnnaacatctttgggggccccccgccaaaaaacccccatttttttt

SEQ ID NO: 163885 - DNA, 562 bp, Homo Sapiens
cgtaccgttctctctgaggccctagcctcttggcatccctcttggttaccgatagcttaaattagctatagagaagattctcggcttttcacttaaaagaagtgtatactatttttaaaagggcctttttgttttctcttttaatcttcttaagaggagctaaatagcagtcctgagctgaggtttacctgaaaacttgcaaaagttcaggtaagaaaatataggcagagtccgaagaaagtgaactctgatcttaaaactagtaaaaccaaataggagaaacgaagtgatgagaagactgtgtctcttagcaaaatggctaaaagaacaaaagaaaaggaacagcatgcaggtagccaggcttgattccaatgcacctactgaattggcttcaagactgagataaaattaatgtgtgaaatgaatttaagcattttgaagaggtattttatgaggtcattgctacttttgcatgtgatatggactgctaaattaaactgcacgacagaaaatctgagaaaacatatcgttattcagcacgcttgtacggtatgccggtccg

SEQ ID NO: 163886 - DNA, 567 bp, Homo Sapiens
gtacagccgtagcgaacgtggtggagctgtggcaggcagaagaaggggaactcctgctgcccactcacggtgattctgaagagggtctggaggagccttctcaagaacagagcttctcggacaaactatttagtggaaaaggcttacattttcagccatcagttttagattttggaatacagttcctgggacatcctgtagcaaagattctccatgcttacaaccctagtagggacagcgaggtcgtggtgaattcagtgtttgcagctgctggacatttccatgtaccgccagttccctgcagggtaattccagcaatggggaaaacttccttcagaattattttcttacctactgaagaaggaagcattgaaagttccttatttattaatacctcttcgtatggagtcctttcctatcatgtatctggaattggcactcgcagaatctctacagaagggtctgcaaagcagctaccaaatgcttattttctgcttccaaaggtccagagcattcagctgtctcaaatgcaggcagaaaccactaatactagcctcttgcaggtgc

SEQ ID NO: 163887 - DNA, 664 bp, Homo Sapiens
  misc_feature (476)..(476): n is a, c, g, or t
  misc_feature (478)..(479): n is a, c, g, or t
  misc_feature (508)..(508): n is a, c, g, or t
  misc_feature (511)..(511): n is a, c, g, or t
  misc_feature (517)..(517): n is a, c, g, or t
  misc_feature (549)..(550): n is a, c, g, or t
  misc_feature (555)..(555): n is a, c, g, or t
  misc_feature (580)..(581): n is a, c, g, or t
  misc_feature (584)..(584): n is a, c, g, or t
  misc_feature (596)..(596): n is a, c, g, or t
  misc_feature (607)..(607): n is a, c, g, or t
  misc_feature (620)..(620): n is a, c, g, or t
  misc_feature (636)..(636): n is a, c, g, or t
ttgttgtgcttgaagagaccccatgggatgccaccagtcacattgacaacatggaaaacgaacggattccctttgatttaatggataccgtccctgcagagcagctatacgaggcccacttagagaagctgaggaacgaaagggaaaagagttgagatgcgaagggcgtttaaagaaaacctggagacttctcctttcataactcccggaaagccttgggaagaggcccgtagttttattatgaatgaggatttctaccagtggctggaggaatctgtatacatggatatttatggcaaacaccaaaagcaaattatagataaagcaaaggaagaatttaaggagttgctttgggaatattcagaattgttttatgaactggagctggatgctaagcccagcaaggagagatgggggtggtattcagggatgtctgggagaggaacagccgatttaaagcattacaaaagctcagngnnagcgtgatgcccttattctgaaccatcanttntggggnaccacccacaagggagactgccccagtgccanntttgngtggacctaaatggacctggatagnnctnggttcccgggcngttgccggatnggaaaattcactnttgccctacatgtganaactgggtaatgggcaaacgctccccaa

SEQ ID NO: 163888 - DNA, 656 bp, Homo Sapiens
  misc_feature (518)..(540): n is a, c, g, or t
attcttctgtcagtgtatgcctccatgtctgttattgggtatgcaaaaaattttacttaagtagattaaaatttaacctctagcatgaaaacccagcaccaacactgaaggactccattcaggttgaagtagcctcaaacagtaatttactttttgataataggctgttgtttttcttaaataagcttaaaacaattctatctgaaattggtagcatgggttcacttggctacaactgagcaaaatagatgcaactttcttttaatggggtgctgcctctttaggactgactgtactatccactgacactggtttggcagttggtactgctgaacatttttatacatgctaccatgaagctatatatgttagtattgaagaagctaacgggtatactatcatttttgatgtgtgggctgattataatttcctgtatttcctgtacattgggatgaaactactttagcaaagtccacagatcagaaaccagacggtagtttttgaagttgaaaccagcnnnnnnnnnnnnnnnnnnnnnnncgattttaatattttctgcctctttcccaaattacccttcccacttgctcgacaaatctatgtcaagcagtttgtttttcatgttttaactttacctacctgtcagactgtaccgg

SEQ ID NO: 163889 - DNA, 905 bp, Homo Sapiens
tcggaggtgctctagaggtcccgcgttatccgtaccatggaaacaacagtcagtgaccaggcagaagatgcagcagctggaacagatgctcactgcgctggaccagatgcggagaagcatcgtgagtgagcgggcggggcttttgtcagcgatggagtacgtgcagaaaactctcacggacgaggagctggctgactggaagaggcggcaacagatggcctgcatcggaggcccgcccaacatctgcctagatcggctagaaaactggataacgtcattagcagaatctcaacttcagacccgtcaacaaattaagaaactggaggagttgcagcaaaaagtttcctacaaaggggaccccattgtacagcaccggccgatgctggaggagagaatcgtggagctgtttagaaacttaatgaaaagtgcctttgtggtggagcggcagccctgcatgcccatgcatcctgaccggcccctcgtcatcaagaccggcgtccagttcactactaaagtcaggttgctggtcaaattccctgagttgaattatcagcttaaaattaaagtgtgcattgacaaagactctggggacgttgcagctctcagaggatcccggaaatttaacattctgggcacaaacacaaaagtgatgaacatggaagaatccaacaacggcagcctctctgcagaattcaaacacttgaccctgagggagcagagatgtgggaatgggggccgagccaattgtgatgcttccctgattgtgactgaggagctgcacctgatcacctttgagaccgaggtgtatcaccaaggcctcaagattgacctagagacccactcccttgccagttgtggtgatctccaacatctggcagatgccaaatgcctgggctaaatccggt

SEQ ID NO: 163890 - DNA, 1081 bp, Homo Sapiens
tgtggtgtctagaggatcccggttatccgtacagaaaggaccagcaggtggctgggataagactgcttgcataaaagctggctgagatctatatggttgaagtgaggagctgaacaattcctgagcctgggaaacagcaaggccagcccccaaactcagttgggcttgatgctgcccttgcagtggtgcataaatagggattggaatctgctgaactgaagttggctgagagagacctggttggaaaccctgttgttgagccaaggatggcggagccaatcgtgcatgttgggtattgaataaatgacttgtgtccatatagaaggctgggatttgagctgctgcagactgagacacataaacttgcggattctgtggctgctgggcaataagggaaggcatacagcttaactgtgaaaaatgacttgcagaaggcaggctgcttgtctgtaactgctgaggtttcactttacaaatatttggagggtccgatgtggttgtagattttgtgctcaaagaagaggtagtgtatgtaccagctcctgatagtgatgctgtaggagtgactgaagcaacaggaatctggggcatggatgcacttgagaacgaattgtaattagcagtgcttggtccactggcactactgctgactccagttgcaattggaggtgctgtggaagttactggagaccccttttcccttacatttggagaattctcccatgctttgcgtgcagactccatcttgaaggtgaggctgaaagtagtgggaggaactgaagttaggctggagctctgttgtatagtctccctcttagggaggggaagggtgttgggcaggggcacattattaaccaaagtatcctccatctttgtattattagtagccacggtgttaggcaaagaagaagagggtgtagtatagtctgttacagactcctttgcattagtaccatattctgcagatgataccgagatcattgttcctatttcagtagacatttctgagactgctttagtctcctttgtcgtgacaggatctgtgcttctgactgtagctgggcttggtttctcttgtcct

SEQ ID NO: 163891 - DNA, 1147 bp, Homo Sapiens
cggtaccatgcagcttggctcgccatccttggctcagcaacaggtttccaaccaggtctctctcagccaacttcagttcagcagattccaatccctatttatgcaccactgcaagggcagcatcaagcccaactgagtttgggggctggccctgctgtttcccaggctcaggaattgttcagctcctcacttcaaccatatagatctcagccagcttttatgcaaagcagtttatcccagccatctgtggtcctttctggtgctgctattcacaactttccaactgtccaacaccaagaacttgccaaggcacaatccggtcttgcctttcagcaaacatcaaatactcagcccattcctatattgtatgaacatcaactggggcaggcatcaggactaggaggttcccagctgattgacacacatcttctccaggccagagcaaatcttacccaggcctcaaatctttattctggacaagtacaacagcctggtcagacaaatttttataacactgcccagtcaccaagtgctctccagcaggttacagtacctttaccagcatcccagctttccttgcctaattttggatctacagggcaacctctaattgctttgcctcagactcttcagcccccattacagcataccactccccaagcacaggctcagagtctgagtcgtcctgcacaagtaagccagcctttcagaggattaattcctgctggaacacagcatagcatgattgcaaccacaggaaaaatgtctgaaatggaactaaaagcctttggaagtggcattgatataaaaccaggcacacctccaatcgctggtagaagcaccacaccaacatctagtcccttccgggctacttctacaagtccgaacagccagtccagcaaaatgaacagcattgtctaccagaagcagttccagtcagcccctgccactgtgagaatgacacaaccatttcctacacagtttgcaccccaggcaaagcagagagcagaggttcttcagtccacgcaacggttcttctctgaacagcaacagagcaaacagataggaggaggcaaagcccagaaagtggacagtgattcaagtaaacctcctgaaacactgaccgaccctcctggggtctgtcagg

SEQ ID NO: 163892 - DNA, 627 bp, Homo Sapiens
ccggtaccaggtaatggtggcctgtggtgagttttatggtgactgggggcatgtcttattcaaaaacaaaaacataaaacacagaaacctttcttcagcataccaaggcaagcagccatttcatgactcacttaacacatggcagtgtaccagtttacagatgatttttcccttttggcgtgacatggcagttctaacccccagagaattccttatttgtaaatgggaagtttctactatgccttacagagcttaaattcagaagttagtgcctcatatctgaaacaaagggaaataacacacccattcaaaagtaaataaatctcctagaagctttggtttttaacatttccatataaagagctctgttgaatgtcatgaatagactggaaaacaaaattttaagaacctgcatatgttgtttactagcagatgacaactacaaaaggaatctgaagaacacgtaaaacttgtattttttggcttgcacggggatatcaactaccaggcctttttcaaaaaggtatttcagctaaggggccaatacactttttggtactccagactatcttgattgtcaaggtgtccgacctgtatttttaaattttatactgccacatgattgta

SEQ ID NO: 163893 - DNA, 1293 bp, Homo Sapiens
  misc_feature (200)..(235): n is a, c, g, or t
  misc_feature (988)..(1003): n is a, c, g, or t
  misc_feature (1064)..(1086): n is a, c, g, or t
agacagagtactgattggaggggatgaaactccagagggggggagagctgtgcaaggcccatgtgtgctgtatatgagcactgggttcccagagaaaagatcctcaccactaatacttggtcttcagagctttccaaactggcagcaaatgcttttcttgcccagagaataagcagcattaactccataagtgctctgtnnnnnnnnnnnnnnnnnnnnnnnnnnnnnnnnnnnncagcgattggaatggaccagagaattggaaacaagatatctaaaagccagtgtagggtattggtgggagctgctctccaaaaggatgttctgaatttggtgtatctctgtgaggctctgaatttgccagaagtagctcgttattggcagcaggtcatagacatgaatgactaccagaggaggaggttgcttcccggatcatagatagtctgtttaatacagtaactgataagaagatagctatttggggatttgcattcaaaaaggacactggtgatacaagagaatcttctagtatatatattagcaaatatttgatggatgaaggtgcacatctacatatatatgatccaaaagtacctagggaacaaatagttgtggatctttctcatccaggtgtttcagaggatgaccaagtgtcccggctcgtgaccatttccaaggatccatatgaagcatgtgatggtgcccatgctgttgttatttgcactgagtgggacatgtttaaggaatgggattatgaacgcattcataaaaaaatgctaaagccagcctttatcttcgatggacggcgtgtcctggatgggctccacaatgaactacaaaccatgggcttccagatggaaacaatgggcaaaaaggtgtcttcaaagagaattccatatgctccttctggtgaaattccgaagtttagtcttcaagatccacctaacaagaaacctaaagtgtagagattgccatttttatttgggannnnnnnnnnnnnnnnggaccttccaggaaaccaaattcctatccggtatttaaagggaaaatggaaccacagtggnnnnnnnnnnnnnnnnnnnnnnnggaacaaaaagtcttccctggttggccccccacgttggggaattgccaatggggtggcaaatttcctgggtcttcatgtgggaaagcactttttggcttttcccacaggggtttccacgccccaccatttttctcccctttgggaggtttaaacgccctctttccccaaaaggtaaacaatttggtgggagcaatttatacggaggc

SEQ ID NO: 163894 - DNA, 406 bp, Homo Sapiens
aaaaataaatttcaagctaaaacacctgaaatataatccctccattcaaacgttatctggtccctcttaaagtcggtctgccccctgaggacacatacaaaggcttaagctacattcactaatcaataagaacttatcataagcagatgagacagatggaacttcagcaccctgtttatttgaaaattttccatactgactcagcttcatgatatgttcagcccctcaaagattaatgcctctcctagccattgattctagaatgtcaaggaaaccagttcctagtacatacagtgactgtgtagccaacttaatagtcaacattattacattaagaatattcaagatgtatgtaagcctcccaacaaaaagttctagttgtgctttgtacaactgagtgaactat

SEQ ID NO: 163895 - DNA, 1452 bp, Homo Sapiens
  misc_feature (195)..(213): n is a, c, g, or t
  misc_feature (690)..(723): n is a, c, g, or t
gttcactttctacacaacgtgtggtcatatgataaataagtgatttataaacaagcagtgatattttgctagggctttcaaggttaaccggttttctagcctcatggaatactgttgaacctatagcgttgtcttgattcttttgtgttctctgccttgtaattttctgttactgctatatctacgtgtaaatcnnnnnnnnnnnnnnnnnnnggttaattctgccacatttaatgttggtgagagagtgatctatcctaatgacattttactgtttaaaaaagtttcctagccatgaagccctgctactgatttagacaaggtattatggtcattactttgtacccctatccttccaagcacttctggtacttcagtcgtttttactgatccaccaacacctaaagaggctatgctacagtctctagctaaatggaagacacattcatccttctccctctgactgctttgatcatcatttattgcatctcataactaattttctaaagtttggattgggacttttcaggtcctttttggagggcaaaggaagtgccagcttctctggggaacttgtttttaaatccaaagacttgaaccacattccctgcacatgaacatgtttgcttttatcccttctctcattgtctccttcccatcttagtaccattgtagttataaacatctgcnnnnnnnnnnnnnnnnnnnnnnnnnnnnnnnnnnaaacattcaagaactgctgacgtactgtggatgtagagtataaaacttgaaaaatgcagatgttgaaggaataataggtatcttgtgctttaatactttatggcaggattgtactataagcaaatgaattaaacagctatgtaaatcataaagaaaaactaaaaatgaaccaaagtgaaaggataacttccaggcagtatctttctattgtaacctgttatttaaggaaatactagtgatttcttctaaataggatgtaaaacttctttcaaattactcttcctcagtcctgcctgccaagaactcaagtgtaactgtgataaaataacctttcccaggtatattggcaggtatgtgtgtaatctcagaatacacaggtgacatagatatgatatgacaactggtaatggtggattcatttacattgtttacacttctatgaccaggccttaagggaaggtcagttttttaaaaaaccaagtagtgtcttcctacctatctccagatacatgtcaaaaaaagaaaggtgtttgtgcttccgttttgtttctgctcagtaatatagtcaagcaagtttgttccaagtgacccattgagctgtgtatgcatttttgtttatttcaataaaatatatttgtattatttgtccttcatactatccatccataccacactatcttctgtatcaggtagtctaatagaaatatacctgttttgttctgaaaaaaa

SEQ ID NO: 163896 - DNA, 691 bp, Homo Sapiens
gcgtctgaggatcccgcgtgatccgtaccacttctgaggagagctccgtaagaggttggaggcaaatgggaggagcctcctaagttaaatgtgtatccagacctatggcttaaaaacaaagttcctagtgcagatgatacacactgtggagaaatcaaagtctttaaaaagcagtatgcaaacgagaacatctcttcacaagaaagaaacatttaaaatacacatcttcgtttcatggtagacaccggcagctattcttcatccacggatggaagctttccacatttctctggaaggctggcacttaatattttatggctttggtttccaaattcagagggagaggcaggttcatctgtttcataatcttcaaagccttcctggaatggtgctggggcagattcctctgcaacaagcgtctcatactcctcagcggcaaaccggtcccagtctgagggctcaggcccatcgttctcaacatccttctggaccgcaaagggatctctctgttcatggtctaagtatttctccagattaaagaaagtgtcatagaagatgtgagccattctgcacctcttcagatctcttagagttattttgccatcaacagctggcttcactagctcaagcatctggcacagtaaatcatggaatgcaagggctcaattcccatggcttctcatccgttcac

SEQ ID NO: 163897 - DNA, 686 bp, Homo Sapiens
tgtttccccataaatttattgcctgagaacttagttcagcctttgctaatgccaaaatgctctggctttgtattttctttacagcatagatagaaaaatgcacatttttccacactcagctttcccctagcatggacaagattttcagccatttttgccacatatacatttttaaggaaaaaagatttttctctgtaagaaagttctggttatgctgttttacaaggtgacttgtcaggagttgagacttccctgccggattctattttgaaagtaaatggtcttccctccttgttccgattctgcgtttccatcgtcagacaactttggagtattagaaaccactgtatatatgtggaaagccaggtcagccagacctgttagaattggtgtgcactcacctgagagatctggcaggttggatatatttatgtgtatttctccacagtgcttgctttgccctgttggtaaggattttaaataaccatgctcaaaagagctgttctaatctgcgttttgcatgttaagtgttaatatcaaacattctttacgtgctcgaggtattgcttttaacattctactttgccagtttcttcattagattaattgacatgtattatttaaatgaccagtgatgctttgtgcaattatgaatgttgaagattaaagtacatagttactaaaaa

SEQ ID NO: 163898 - DNA, 1120 bp, Homo Sapiens
  misc_feature (935)..(935): n is a, c, g, or t
agtaagcaggatatactcagtgatggaagacactgggaaagtcttttaatagaacaagaacgatcttaatttaagaatattatcctggtttaacaacagtgccctgtttacaacggactgagccctatctcatctgcagccgaggaataaaggattctgattagaaagagggttgcctacagattagtaagcaattccttggatcttatgcacagaacttgtaccattggaatctgttttatgcttaaatcaaagtgcttggatcaaatgcataacctgccatatctttacatatttgtgggtagcaattggtattaaagaaatcacaagtgcaaataaaaagtcatttatcattggtttaactaaactgtcatggtttagtttacaatttttaaaaagttcttaaaatactgaaaatgcagttgacacttgtgtatggcttatgaagttatttttgatagtcttacattacttgaattgttcaaagtacagtatattttaaattaagaaaagtgaactatatgtatttgttttatacatttaaggcttagactcataaataatgctattgtttatgatttgaaaactttcaggcaaaatccaatttacatttttcccttccctagcaattacttttttccagcttcaactcttcttagttactaatactttgttgactttaaaaatgaaatcattcacaaacttttggtatatgatggagaatgaaaaactagagtcagacagctttaattgacattgtcaacacctccagttatcaggaatacatttttttactgccttaacctgtagtgcgtagaatatgcatcaatttcttgaaggagattcatgtttttataagaattttcatgtaattattgcaattgtggtcaaataaggaacgtttcctgcttgaaattatattgatttaaatgatngtgtgagatgttttcaccatttttcaggcaactgtggtaattctattggtaattaaactgggcagggtatccttttgtaactataaattagtggcatggctccagccatggtacactggtaaaataggcctttttaccaaaacgtggttttgtaacaagggacccataaatttaacattccaccc

SEQ ID NO: 163899 - DNA, 273 bp, Homo Sapiens
tctgcgacacgggttaagcaggatcctctagtagatctgagtcaggctcagcttaacgatatttggaggtcagcacggtgctcacgtgtcgacggaacttgtacagggaggcatgcaccgcagtggtgaatacacgtcgaccaggctccatgttagcgagattgggaggtcagcacggtgctcacgtgtcgacggaacttgtccagggaggcatgcaccgcagtggtgaatacacgtcgagctggaggcatcatgggatgctcgggtactgga

SEQ ID NO: 163900 - DNA, 381 bp, Homo Sapiens
ctcctccagtacccgagcatgcttgcctgcctgcgggtcgacgtgtattcacccactgcggtgcatgcctccctggacaagttccgtcgacacgtgagcaaccgtgctgacctccaaatatccgttaatgctggagcctggtcgacgtgtattcaccactgcggtgcatgcctccctggacaagttccgtcgacacgtgagcaccgtgctgacctccaaatatcgttaagctggagcctggtcgacgtgtattcaccactgcggtgcatgcctccctgtacaagttccgtcgacacgtgagcaccgtgctgacctccaaatatcgttaagctggagcctggtcgacatctagagatcctccagtacccgagtcgaataaac

SEQ ID NO: 163901 - DNA, 285 bp, Homo Sapiens
tcgggtactggaggatccttctatgagttgtccaggctccagcttaacgatatttggaggtcagcacggtgctcacgtgtcgacggaacttgtacagggaggcatgcaccgcacgtggtgaatacacgtcgaccttcagccatgcatccatgcttaacgatatttggaggtcagcacggtgctcacgtgtcgacggaacttgtacagggaggcatgcaccgcagtggtgaatacacgtcgacccgcagccaggcatgcatgcttggctcctgtcgggatcctcta

SEQ ID NO: 163902 - DNA, 666 bp, Homo Sapiens
ataatgcataaacacattggagtagtgttgagacagcggataaataaacctgcatgtattctttgaatgatggccttttttcactgtaagacactcctttaaataagtgcctatctttaacttgttaagactatttggaaaaatgcagtgtctcagctgtccccagtgaaaattaagtgggattcaactaagatctgttactaagatgtcagaataactaataattttattaggaaaaaatcatgttttaaatttcaaaatgacacttatttgtcaagtaatatgatcttggaaaattttaaagacaaataatcctacttataaactacttttttataattgttttcagcaaaaaaagtttacagtcttaaggaaaatattcaggtctatcatatggtttgacagattttttaaaagttatttttggtaaggtcttcttttagaaaaaaattaatctcaagggttttttgtaccactataatctctaatacttactcagaattactgtgtatttacttaatttcttattatgtgccttattatgtgcttaagatacaataggttagagtttaatctaaatatcttgaaagctatattgtaggcttggtaagcatattgttttttctttctctattttggtaacggatctaaaatctttttcctgcc

SEQ ID NO: 163903 - DNA, 718 bp, Homo Sapiens
atcttcaccgttcacacgccatgttatcgatatgcacttggatgctcttactatggagaataggcaattttaaagaaggcgaaatagaggaccttacttgtcataataaagatatgctagggaacattacaggttctgaagatgatacaagaatagatatgcaatatcctgctcagcataaaggtcaagagttatattcacagcaagatgaggagcagccacagggatgggtgtcatgggcctggtcctttgtgcctgcaattgtgagttatgacgatggcgaggaagactttgttgggaacgatcctgcatcaaccatgcatcaacaaaaatcacagactttgaaggatcctattgtttctataggattttattgcacaaaggcaacggtgactttcaaactcacagaaatgcaagttgagagtagttattacagtccacagaaagtaaaatctaaagaagtattgtgttgggaacaagaaggaactacagttgaggcccttatgatgggagaacctttctttgattgccagattgggtttgttggttgcagagccatgtgccttaaaggaattatgggtgttaaagattttgaagagaatatgaatagaagtgaaactgaagcctgtttcttcatttgtggtgacaatttgagtacgaaaggtttcacataccttacaaattcattgctttgattaccgagtcccagtaataatgt

SEQ ID NO: 163904 - DNA, 1187 bp, Homo Sapiens
  misc_feature (104)..(117): n is a, c, g, or t
ttaattcctgcccgtcctgctcctgcacctcctttatatagttccctcacttgatttttttaaccttctttttgcaaatgtcttcagggaactgagctaatacnnnnnnnnnnnnnncctggatgttttcttgaaaagcctttctgtagcaactatgaatgaaaacaaaacaccacaaaacagacttcactaacacagaaaaacagaaactgagtgtgagagttgtgaaatacaaggaaatgcagtaaagccagggaatttacaataacatttccgtttccatcattgaataagtcttattcagtcatcggtgaggttaatgcactaatcatggattttttgaacatgttattgcagtgattctcaaattaactgtattggtgtaagatctttgtcattaagtgtttaagtgttattctgaattttctaccttagttatcattaatgtagttcctcattgaacatgtgataatctaatacctgtgaaaacagactaatcagctgccaataatatctaatattattcatcatgcacgaattaataatcatcatactctagaatcttgtctgtcactcactacatgaataagcaaatattgtcttcaaaagaatgcacaagaaccacaattaagatgtcatattattttgaaagtacaaaatatactaaaagagtgtgtgtgtattcacgcagttactcgcttccatttttatgacctttcaactataggtaataactcttagagaaattaatttaatattagaatttctattatgaatcatgtgaaagcatgacattcgttcacaatagcactattttaaataaattataagctttaaggtacgaagtatttaatagatctaatcaaatatgttgattcatggctataataaagcaggagcaattataaaatcttcaatcaattgaacttttacaaaaccacttgagaatttcatgagcactttaaaatctgaactttcaaagcttgctattaaatcatttagaatgtttacatttactaaggtgtgctgggtcatgtaaaatattagacactaatattttcatagaaattaggctggagaaagaaggaacgaaatggttttcttaaatacctacaaaaaagttactgtggtatctatgagttatcatcttagctgtgttaaaaatgaatttttactatggcagatag

SEQ ID NO: 163905 - DNA, 270 bp, Homo Sapiens
aagaagatgcagttcaaaatactgccagttttccaagaaattttgtaaagttgaacatggccatctactcttgccttaaaacttttctcaccacacccaccttcccacatgcatgatatccaaggtcgacagacctggattagaatccactctcaagcttctcatgcagtgcgtattgtattttctgcataagaaagggctgcctctagaacacagtaagtgtatttgcccagtagtgacatgcctacatatagcaagtggtccggcctg

SEQ ID NO: 163906 - DNA, 290 bp, Homo Sapiens
taaaaataatctcatagaaagtctgtaaaatattcagctatgacactcagtactgctaaagataataaaaatagaaaaaatttctttcctttcagaaactctttaaacagagtcactaaaaatagaatgaaacatattgtgaatgtttttgatgacagtcgtgactaggtattctgcattgttagaattatccaattagcaaaacaaattatcccaaaatagcatcaaccttcagactgtaatttataaataaagtatctactctttcaacatataacatttttgtttat

SEQ ID NO: 163907 - DNA, 308 bp, Homo Sapiens
cttacatacgtgaagaattaggtagctgttctggctgctctactttgatgatataataagtggcctgaaaatcgctggagcaggaggttaagatcttggcaacattagagaatagttaggtgtacattttcacaagttggagcacagtgaatgatcaaggtggaatagtaatagggtagtcatgactagcagcaactcacttagttctaaggtgaggaatatttctctttgtgcataatttcacagactgtatcattccccagggtgatgtgaaagcaactacattctctggtaggctcattaccttt

SEQ ID NO: 163908 - DNA, 639 bp, Homo Sapiens
cgaagcttcgcaccatagatgtgacatgaacaatatcaaaattatcctccagccatctgtcctcagaatcgtgagatgtaattgttgtaggctctagctagcaagcatgattagttcactacgaggaacgtgtccttgtatcctatatccaacaaaagagaatctagttttgtcaatgggataatgactgctcatgggcaggttaaggaacaaaaccaactgtcttccattcactaggcagctttcttcctgtggggtaatcgaatattctgctctctcacctctgcctcccagtgtccatctgcaaccaccctgaaccacatttgagtctgttatccacagttctgagtgaaaagggaatgagttttaggaacagccttccaaaaattgcattttatgctgctggaatatcactgaccataaaggtaaatcgaaatttaccctgctaaagttagtactacaagtgtggttgaagtttgccaccataatgatcacaggtttatattcaacaagtcatacggtgatgtatccattattggcaaatgagatatcctttaagaggacttaattcattaggatttcaatacttctgttttgactcaaaatctgctcgtatcgaaagttctagacacaagaaga

SEQ ID NO: 163909 - DNA, 584 bp, Homo Sapiens
gtattgacttggttgtcgcattcacgagcagtacgaactacacagaggagtaatttttaatgtttaaggatttactatgtgctgtacttaagatgtgtcctaaatgtgagtgtttagcctctcccgggctcagaataggtttccgctccagtgtgataccactttgctgccactcgctatccttggtttaggggcattgttaggtacctcaccaaacattagggcaaatgtccctctcactcaggacctccattggctggtcttcctctctgggatgctcttggaggcctgggctagcctgttcttcccaaactgcagctgtgaagctcaaagacggagtaagcttgtgaaagggacagtgagatggtgatcagtgtgctgtgtcaggacgagccttcttttaaaacagcatccatttcttcttcacacttcttgcatttgatggccatgccagaatgagtacggtaatcagaactgatgcctttaaagcgactcagggacctcctccttctggttgcttcctgtgcagatgagcgcttaaagggcagaaattggtctcctccccttttgtaatgttagagata

SEQ ID NO: 163910 - DNA, 692 bp, Homo Sapiens
cttgaaacagaaagaactggtcttggtctatcagtacctcttcctgaatctggtacccatctgccttctccagttcattctaaacactgctgggactagggtttttccatcaggagcaaatggaatccaggccttcccagaagtagaccatactgccttgaacttgtccatatgtacaaactgatcaccagctttctccatacatttttaatgcagacctgtaattgagttcagaagcctccaaggaaacagaaaggatcccctttctccagtttgtgctggaagaggagctgatcagagacatcaaataagagaaagatgggttgctagaggatggtagaactggaagcaaggcagctacctttttgcaaaaggaaatggtgttaggcccctcttccagaagataagacagactcatagagattaaatgatcactatggtccttcttctgttaaatggagccaaagacgcctatgttgttctgaagtcttgtaatgtttaacttctgagaacttagattagtggtgtgatgatagagtctgtataacgcattgaaaagggtatcaggcttagttatttatccaataaatatttattgtatgcagggtattcctattttaactcctgtgacaacacaaagcatagcgatttccatagttctaactgttcagggtctgctcctcctgtacgga

SEQ ID NO: 163911 - DNA, 593 bp, Homo Sapiens
taacaagtacacactggaagtgcttacactttcattaaaagcatctggtcaaatgtaaagtttatacttttgaagctttataaaattggttttgcaggtttttggggaatgtgatgtcaacaagtacgtgcattcaaccgaatatctactgattttacttttccttcttagtaacaacattcgtcattttatatgagatggcaacacaccaagctaaaagtctacattgtcctagcctacctttagctacactattttgacagcaagataaaaaagcagaaatgctgtatttctttgaggaagtatccttaacaggatggtagatagctgggaagcctttatcttaatccctctccccctcccacttagaatatgaatgtgatggctcaagctccagcagccacactggaccaggaggcatcctagagaatgaaagccaccagctaaagaaaaaggagttaggaaaacagaagagtcctggatcccttatggctgtggagcaacaatagctagcctatactatctttggaattttccttttctgtacttcacagcggagtgagaaagaataaagtgaaacttctgtactgatt

SEQ ID NO: 163912 - DNA, 708 bp, Homo Sapiens
  misc_feature (52)..(98): n is a, c, g, or t
acgtagcccacctgcacactgggaaagatatttatatatatatatatacatnnnnnnnnnnnnnnnnnnnnnnnnnnnnnnnnnnnnnnnnnnnnnnnttaagcaaaataagatttgtccatgttataatccagtctcacagtcaagtcacccaccccagccttttgaagtcatttggcagctaatgctaaaaagtaacaggaactatgagagttgcatagaattgatcagaaacatgaataagaaacattacaaacgatgccacggaaatacaaagggtcattagagactattatgaacaactatatgccaaccaattggaaaacctgaaagaaatggataaattcctggacacatacaacctaccaaaattgaaccaagaagaaattaaaaatctgaacagataaatattgagtaatgagattgaatcagtaataaaaagtctcccatcaaagaaaagcccaggaccacatgacttcactgctaaattctgccaaaatgttaaagaaccagtaccaattcttctcaaactcttccagaaaaataagaagggaattattctgaactcattctacaaggcaagcattaccatgataccaaaaccagacaaagacataactaaaaactataagccaatatccctgatgaacacagatgctaaaaaatccgtacacatactagaagctaaagagatcactgtaccgatat

SEQ ID NO: 163913 - DNA, 465 bp, Homo Sapiens
  misc_feature (169)..(197): n is a, c, g, or t
tcaaggcgtcagtgtaacatccgtacatatgaaagtatcacagtgtaatgaatacatccaccacacccacaggtttcctccctgtcttcctccagctcctggacccacacaaccaaaaagaagggatactttcaacaaatgatactgaaacaaccgtaaatccacatgnnnnnnnnnnnnnnnnnnnnnnnnnnnnnccctgaacccttacctcataccatacacaaagattgattgattacaggctgaaagataaaaattaaaactacaaattgcctagaataaaacaggagaaaactatccatgatcttgattaggcgaagatttcttaggacacaaaaagtgtaagcataagaagctggacttcaacaagatgaagctctgttcctcaaaatagtattaagaaaatcaaacagataagccataaatttggagaaactattcaaatatatatccaacaaagga

SEQ ID NO: 163914 - DNA, 708 bp, Homo Sapiens
  misc_feature (70)..(70): n is a, c, g, or t
tgattcagcggccatgctcaccgatcttctccggcccttcagctcccaagatggtattgtgggggtggtnatggagggtactcctccaggtacacatcaagcacatgtggagcctctggatttggttcttctgggttattctggagatttgggctgttgtctgggactccctcaggctcataatcaaggcctggagaaggagctggcatgtcactgttctctgtactggcattccccacatcctctggggacaatgattcaggaaccagagagaccacgtggcctttaagtgctctcactttttttggcttagcttcctgattctcagctatttcttttagccttttaagtttctcctgctcagcaacttgttgctgttgtcgctgatcttgttgtttcaaaaactttaagcgctgttccttagttgccagcaattgttgctgggcttcaatctgttgctgctggcgagatgccatttcctgaagttcagcaagagtcagatccatcctaggactattaacaccgttctcctttcttcgatattcaccaggaacttgtacaccatttctttttaaacttggatcctgagatcttggtccactcgacaatgtccccgccatggggggcgttcatgacgaaggaagatagcgaacttcgttcctctgacttccaaatcgttgaagaacatcaaacattgtacggataatg

SEQ ID NO: 163915 - DNA, 1136 bp, Homo Sapiens
  misc_feature (817)..(817): n is a, c, g, or t
  misc_feature (876)..(876): n is a, c, g, or t
  misc_feature (974)..(974): n is a, c, g, or t
  misc_feature (1007)..(1007): n is a, c, g, or t
aacaaggaccacgggaggaggtgtaggagagaagcgccgcgaacagcgatcgcccagcaccaagtccgcttccaggctttcggtttctttgcctccatcttgggtgcgccttcccggcgtctaggggagcgaaggctgaggtggcagcggcaggagagtccggccgcgacaggacgaactcccccactggaaagggattctgaaagaaatgaagtcagccctcagaaatgaagttgactgcctgctgcctttctgttgactggcccggagctgtactgcaagacccttgtgagcttccctagtctaagagtaggatgtctgctgaagtcatccatcaggttgaagaagcacttgatacagatgagaaggagatgctgctctttttgtgccgggatgttgctatagatgtggttccacctaatgtcagggaccttctggatattttacgggaaagaggtaagctgtctgtcggggacttggctgaactgctctacagagtgaggcgatttgacctgctcaaacgtatcttgaagatggacagaaaagctgtggagacccacctgctcaggaaccctcaccttgtttcggactatagagtgctgatggcagagattggtgaggatttggataaatctgatgtgtcctcattaattttcctcatgaaggattacatgggcccgaggcaagataagcaaggagaagagtttcttggacccttgtgggtgagttggagaaactaaatctggcttgccccagatcaactggatttattagaaaaatgcctaaagaacatccacagaatagacctgaagacaanaatccagaagtacaagcagtctgttcaaggagcagggacaagttacaggaatgttctcncagcagcaatccaaaagagtctcaaggatccttcaaataacttcaggatgataacaccctatgcccattgtcctgatctgaaaattcttggaaattgntcccatgtgataacatggaactgcctctacttnatcattctgaatggataaatcgtttcattttctaatggggtataatgtggtttagccctttcttggtgctggatgtttagatgcttttccatcttttggtactactaataatgctataaataaatatcc

SEQ ID NO: 163916 - DNA, 512 bp, Homo Sapiens
tcagtcttgtcagttgacacccactgtatttctccacttgtttcttgccactctccactcttatcatgctgagtggtgggagcatctttgatcaactcatctgttttactttctgctagctgggctgcccgctctcgctcaaggaatagctgcactaaagcctggacagcatgaacttgtccacctagccttaaactatcatccccttctccactacagatggaagaatcaaaaggcactggtgtggttacaagtgttccttccgactcccctgatgatattgctgccctcagagacttgaagaaaaagcaagccgtacgagcaaaatatggaattagagatgacatggtcttgccatttgagccggtgccagtcattgaaatcccaggttttggaaatctttctgctgtaaccatttgtgatgagttgaaaattcagagccagaatgaccgggaaatacttgcagatagcaaaggtagaagatatatataaaaggattttatgaggtatta

SEQ ID NO: 163917 - DNA, 569 bp, Homo Sapiens
tcttggtgcctctactctcagacctgagaccatgtttggccagacaaattgttgggttcgtcctgatatgaagtacattggatttgagacgctgaatggtgatatattcatctgtactcaaaaagcagccaggaatatgtcataccagggctttaccaatgacaatggcgtggtgcctgttgttaaggaattaatgggggaggaaattcttggtgcatcactttctgcacctttaacatcatacaaggtgatctatgttctcccaatgctaactattaaggaggataaaggcactggtgtggttacaagtgctccttccgactcccctgatgatattgctgccctcagagacttgaagaaaaagcaagccttacgagcaaaatatggaattagagatgacatggtcttgccatttgaaccggtgccagtcattgaaatcccaggtcttggaaatctttctgctgtaaccatttgtgatgagttgaaaattcagagccagaatgaccgggaaaaacttgcagaagcaaaggagaagatatatctaaaaggattttatgagggtatcatgt

SEQ ID NO: 163918 - DNA, 1497 bp, Homo Sapiens
  misc_feature (48)..(48): n is a, c, g, or t
  misc_feature (700)..(700): n is a, c, g, or t
  misc_feature (712)..(712): n is a, c, g, or t
  misc_feature (1184)..(1197): n is a, c, g, or t
ggcgtttcggagaaaagaaagtcttttttctgatgccccccaataaanggggacagtctttggggcgtgttacaaaaaagaagggggggcgtgttgcgccccacctttccaacacaacacgttctatattttgtataaacaccgttatttcggcccgggtctcccataaatatcaccccccataatttgggattaaaagccatttctctggaacagggagagggtcgccaagatatgttgtaaaggtttcccaccataatttttctaaaaaaaggtggatgcgccctacctttagcttcgggaacctcggccaaggaaatgtgaaaaggggaggttcccaaccgtccactttgtggccgaaaaaataaatgttgcgttgggtgtttttaaagcctagttcttataaaaaggtcttacattaaaaatcaaggtttgataaacaaagcataacagattaaaaattcccaaattgcatttcttagtaaataaaaatgaagtgcaataaccaaatattgctctaatgaaaggttccagactagcctcaactaaacagttattggtcttctatggcactttttttctggtcccaaataacccatgccattaatccttacccattaccatgttactcaaattttatttgattacatagaacaaaaacaaataaaaattaatggtctggataaacaaaattaataanacctctatcatncaaatatttgttacagtaactaggaacaaagaaaggcagttggtggtaaaacactattacactgatacacatagaaaccctttaaagactctggaagtgttgagttcacatttaatgttacctgtagaaacagccctttatttgaacacctttacacactggcaggcctcaaggacccatccctttgctctataactctccacagcaattctctatcactgtgccagtttcacaaagcttgctttggtttcctagctccaagtgtactgtttccttttacgtttaccaaggcaatgcaaggccaaacaaaaatcaaagaggctttcctaaaccttcgtaacattttgtgttacaggcaacacaatcttaaaactggccatttttgtttcatttgctgcttaaaataaaaattataaattagatttaaatgggagcactaattataaaacagattgcaagtaccaccatttgnnnnnnnnnnnnnntcagtggatttccataacacagaaaatgcatggacatgcatctacagtagagttaaaaatttcctgtgactaaaaaattaaaaactgaatcaccagtagcaaatgtatagtcaatggctatgacaagaacagatcctgccgagctcataaatgcaattattgtcttttttgctttataaaaaagacattacatattttattgcattattctcctaataaaaacatactaccacgtagctctccccatccccattctttgcttccagatttttatagaaaataactgttttagtctgcctt

SEQ ID NO: 163919 - DNA, 918 bp, Homo Sapiens
atgtcagagaatcccgaaaatacaggcagacagccagtcatggagcaggaacagcagtgcaattgtaagaatgactacccacattcaccaaaatttcactgtaattcagcctggcacaggttttgatcatcagcatacacacaaatagccccaagccacaaagccaatccacttaggggaacaataatagtaataagaataaagacagtaatattaaaaatgacaagagtagaatcttggcacatgctgtgttcttcatcctttgtcacaggtgaaatgcacatctgaacagagacaggcatgggaaggagacccaaaagcgacatggcaaaccaccgggcaggggactcgctctttgttgcttcccaaacacttagacgccagcagcatgggttggtgtgctgggctggttaaggccgatggtggagcagagccaacctgcaaaatccacttcctcagcatcagatctcttgataaaagcatgaaccatgagttgcttcaaatctgctctctctgcggggttttttattaagcatttattcacaaaatcttgaaattccagactgaacactccactgggcagttttggaggaggctcgttgactatgtaatccaacaactcaaaaattgccatgggaggtcggctgtccattccgtatgagctaaggggcctcccgggggtccttggcctgggtggggtctcagccgcatctccttccacctggcacccaaacatcagctccagctccttggcatctggaggagggatgggatacctcccaaccgccatctctaccagagacagtcccatgctccagatgtctgactgcacagagtaatgagtccctggagtctttctggcgacatgtaggaccttgtgcccacgaaggagttggccatggagtcgatgagctgccc

SEQ ID NO: 163920 - DNA, 509 bp, Homo Sapiens
atccgtaccatacaaaaatgtatccaaagtttctattgctaccaaagtgttctaaattaaaacaagttacagaaagcccctcattgtaaacaaaagattacaagttataaaatcaaagtacacacaggccagagtcatttatacaatgcaatgcattctgctcccaagccaagttgaatttttatgtgcctgtataaaaatgcgtatcaatatacctttgcaaatgtatttttcattataaagcaaatgaatacactttctacaataaataatccgctgggaggcacacctgcggggtttgaggtgggcgggacgacgggagcggggacacacccaccggcggtcacgggcagcggagtgtttttggtgatctgcaaatgatgtacacagcataactttattctcccctctttccacaaagtaccattcaaaataatgtcattttctttcttaaaatacacattgtcattgtaaatttacatcccgtcttattaaataagtgtcggatt

SEQ ID NO: 163921 - DNA, 975 bp, Homo Sapiens
  misc_feature (743)..(753): n is a, c, g, or t
ggcccccaacagttcctaatgactatatgaccagtcctgctaggcttggaagtcagcatagtccaggcagtcagcatctttaaatcagagaccaaggacacacagtggaagtagtggaggaagtggaagtcgagaaaacagtggtagcagtagtattggcattcccattgctgtgcctacaccttcgccacccactattggaccagccccgggctcagctcctggttcccagtatggcacaatgaccaggcagatatctcgacacaactctactacttcttcgacatcttctggtggatacagacgaactccctctgtgactgctcaattttctgctcagcctcatgttaatggaggtccactttattctcaaaattcaattgctgatagtccaactccaccgccaccacctccaccagatgacattcccatgtttgatgactctccacctcccccaccaccaccaccagtggattatgaagatgaggaggctgcagtagttcagtataatgatccatatgcagatggggatcctgcttgggcccccaagaattatattgagaaagttgttgcaatatatgattatacaaaagacaaggatgatgagctgtcatttatggagggtgcaatcatttatgttataaagaagaatgatgatggctggtatgaaggagtctgcaatcgagtgactggtctgttccctgggaactatgttgaatcaatcatgcactatactgattaannnnnnnnnnnctttggaagtagattcttattactcagtcatacggggggactattatggttaacagaactgtcttaatatgttttaaaatgtgcccatattttcagaacatgctgttttatgggtaaatggaatgtctacctgtaagcataaatctttgaggcagtttatgtatggctgaatagcaatttatacaagaagctgtcataactgatgatgctatgactactcta

SEQ ID NO: 163922 - DNA, 596 bp, Homo Sapiens
aggggggagggtgttaggtgtaagctggctagtattggacgtggtagagccatttctcattccatgaagtttctatttgagacttttttagtcatagcttcactgagatcatgttatcactgtatttgcttttatgtcatgtctaggcaggcctccttacctgagaattaatatgaccacgtttatcctgttcctaggatgccaaaatctgatgattcatttgaatggggaagaaaaaccaaattaagtgacacataaactttgtaattaatgtaaccattgactcactgacattctatattttacaccattgtcttggtgttagattgtcttggacataaactgctcctcacctaaatcttagactactacttgggacccagtagtgtgttacaggtatctgtaggttgctagtttgatgcatttttctattttcctgacagttaaatttaatcttaatatgattgacagttaaaagtgcaggttgtggagccaacattcagggtttgaatcccattttcccacaagtgcaggctcggtaactgaacttactgagaagattaaattatatagtgcatggtgaagtgcgtgtaccg

SEQ ID NO: 163923 - DNA, 646 bp, Homo Sapiens
aataccgtaccaggatatgtacatgggtattcattgccatattatttgtagtggcaggaagttggtgacagcctgtgtgttccacatatcagtctgaatgtagataagtaaaatttgtgagtgctcatactagcttttctagtgctaccatatcaaactgccacacactgggagcttgaaacaacagaaatttattctcttacacttctgtttaaaatcaaagtagcagcagcaccatgattctttgagaatctgggtagaatctttccttgcctatttgtagattatggtagtagctgttaatccttggtattccttggtttgcagctgcatcacttcagtctctgcctcttgtcacatagcattctccctctgtgtttgtcttcacattggcactttcctctttttatgaggacactagtcctattgaattaggccccaccctaaagacctcccttaacttgcattttcaaagaccctatttccaaatatggccacgttcacaggtatcagggattaggacataataccattttaagaggcacaattcagcccacacacagagactatgtagcaatcagaagcaactctttagatttatgggtagtacagagcagaaaacttaagaagcagaatgagatggtac

SEQ ID NO: 163924 - DNA, 319 bp, Homo Sapiens
aggctgaccagaggacccggctatacattatcttaaactgtgctgtttcctaagatcaagtaacagccaagtcagtgtaattttatgaaacctgtaatggccacatttgttgtgtctccgatgtatttctataattgcattaacaggaaaaaacttaatccaatataccagtgactttgagtcttaaatgttgcaagcaaaggataaaaattcaagggaattttgtcagatatggttactttcacattttcagttgttacttgattgtctccaaagccgtatatgtatcagacatataaatgtagtaaaaacaagtttc

SEQ ID NO: 163925 - DNA, 506 bp, Homo Sapiens
agcggatattcgtacatagtaggtactcagtaaaccgaatgaacgaatggatggatgaatgaatgaattagtgaatatataaataaactgtaggaggaaagaattacccccattcattttatggacaggggaaacaaaggctaagagactagaattcaaactctggcctgattccattgacattaatattttagacactggaagacaaagggctcggcaattttagtgagagtttggactgcatctgccttggacccagccaaggacgttaaacatgacaggcagacccattaagaaaacctaccctctaaagtgaccataaataaggtgccgccatttcgtggtggtggagtccacagatcttttctaagaggaacagtgagaagaggaagtggaccatggcgatggggaggggcagagatcttggaagtcaccatggttttcagttgaaaggatttgcctagcttccccaaggagcacaacaaataacttctaggtttctttta

SEQ ID NO: 163926 - DNA, 192 bp, Homo Sapiens
aaaaacaataaaagaaacagaaaggcaacatgtgtctgtaggtaaagatgaaggcattgcctataaaccggaacaatataaagatggcactgactggagagcactcatttgtacattcataagtgctcatgatatccttgtgagcacttgtctctcctttggccctccatgcacatgattctcatgagaagg

SEQ ID NO: 163927 - DNA, 462 bp, Homo Sapiens
gtgattgtcattggcaccccagtagattattatagaacatcagtatgctttaactagagtgagggcagctaacaccctgttctccatttggaacctgtgacctcagtccgtctagaacatgtgaattttctggtggttactttagaatggaggcccttttaaataaatattgcagtggatggtattgcatgtggaccattgtcacctaagaaatgactttagattgagagagatttttgcaaatataaagtacatgaataggcctatttattattcattcatttctttaatagttgtttatcatttcctcaaccaccattaagttagtgcttagagtactgttctaagctttgaggactgaaagtaaggtatttgagggtggtctaaaggagaagattatacgagttacagattattagagtatgaaaaatgctacaaaagtacgggagaaacgctatgtac

SEQ ID NO: 163928 - DNA, 381 bp, Homo Sapiens
acatcagtccagcaacttccgtagttcagcatagccacttacgagaatcaaattctagccttcagcttcagcaccatgataccacccatgaagcagctacttacggttccatgaggccttacagagaaagtcctttattagcaagggcaagaaggactgagagctttcacagttatagggacttccagactattaatttgaacagaaatgtagaaagagctgtccctgaaaatggtaacttgggtccaatacaagctgaagtgaaaggggcaacaggggaatgtaatatatctgagagaaagtctcctggagtagaaataaaaagtttgagagaattggatagtggtatagagtggtatagggtggtatagggtggtatag

SEQ ID NO: 163929 - DNA, 500 bp, Homo Sapiens
ataacggcggacatctccatcagcccagaagacatcaaattttcagaagacaatctttcctaggacttgtaaaacaaaatgtacaaaatatattagtttactaactctacttttgtcatacactggcaacctctttaacatccagaaagactagatgttgtcaattaggactcgtctgtcctttatgtacactatatacacagataagtaaaacaaaatgcacagacataatgattcatcttgcctcgctgtaaacaggatggcatagagctctctgcacctccccctcctctctcctcccctgaaccactgcacaaacacaatgagtattactcaacaggtgattttgcagtggttcaggggagtacagagtcctgggagagtgtatactggtggccacagcttattctaagtggtctgataaagtccttgaagtgatttcaaagtgagacccaaagaaggagttagcagaagatcttgttcagggccaaaggataaaa

SEQ ID NO: 163930 - DNA, 737 bp, Homo Sapiens
  misc_feature (647)..(656): n is a, c, g, or t
taaagctttaacttggtctgatttacagctcagtctgtaattgacatcagattggtttcagttatctgttacaagcgaaagcaactgatttgtgttagaaatatgatgaatgttttagaaggaataggttttaattgaaatgtttatgtctggtgtatgtatattaatcaatcctatttgccaagcctgagccttgaaagggaggacttgggttctcctcctaccaaattatttttggatttaggaatttagattatcgaagcaagaatgctttgaggaattttcggatgacatttgatagggaaggatcaggtgatgagtgtcgtttctgaaacaccttttccctttccctttccccttcagtagacgttatgaatggtttgagaggatttgtgagtgtgatcatccttacaataggattgcggtttagcggtaatggtacacatgccatgccagtacgtgggaccttagtttacctcgaaaggtttgaactagaagtttgttgacggtggaataggttttagtctcatctttctggttaagggaagtttgaattctcacttctgggatgttgagaagccatctttcaaaatttgaatacttttgttacaggttttagagtttatttccatgtttgttatttgggnnnnnnnnnngactgttaaaaatgagggatatttcaaccagtcaatgaatagacacagagcgaaattcagtgcaacacgataaggatcctc

SEQ ID NO: 163931 - DNA, 2320 bp, Homo Sapiens
  misc_feature (493)..(493): n is a, c, g, or t
  misc_feature (2072)..(2080): n is a, c, g, or t
  misc_feature (2131)..(2131): n is a, c, g, or t
  misc_feature (2133)..(2133): n is a, c, g, or t
  misc_feature (2142)..(2142): n is a, c, g, or t
  misc_feature (2151)..(2152): n is a, c, g, or t
gggttgaagatcaatggaaaagtggctgaaagaccacaacatatgttgatgagagtatctgttgggatccacaaagaagacattgatgcagcaattgaaacatataatcttctttctgagaggtggtttactcatgcttcgcccactctcttcaatgctggtaccaaccgcccacaactttctagctgttttcttctgagtatgaaagatgacagcattgaaggcatttatgacactctaaagcaatgtgcattgatttctaagtctgctggaggaattggtgttgctgtgagttgtattcgggctactggcagctacattgctgggactaatggcaattccaatggccttgtaccgatgctgagagtatataacaacacagctcgatatgtggatcaaggtgggaacaagcgtcctggggcatttgctatttacctggagccttggcatttagacatctttgaattccttgatttaaagaagaacacagganaggaagagcagcgtgccagagatcttttctttgctctttggattccggatctcttcatgaaacgagtggagactaatcaggactggtctttgatgtgtccaaatgagtgtcctggtctggatgaggtttggggagaggaatttgagaaactatatgcaagttatgagaaacaaggtcgtgtccgcaaagttgtaaaagctcagcagctttggtatgccatcattgagtctcagacggaaacaggcaccccgtatatgctctacaaagattcctgtaatcgaaagagcaaccagcagaacctgggaaccatcaaatgcagcaacctgtgcacagaaatagtggagtacaccagcaaagatgaggttgctgtttgtaatttggcttccctggccctgaatatgtatgtcacatcagaacacacatacgactttaagaagttggctgaagtcactaaagtcgttgtccgaaacttgaataaaattattgatataaactactatcctgtaccagaggcatgcctatcaaataaacgccatcgccccattggaattggggtacaaggtctggcagatgcttttatcctgatgagatacccttttgagagtgcagaagcccagttactgaataagcagatctttgaaactatttattatggtgctctggaagccagctgtgaccttgccaaggagcagggcccatacgaaacctatgagggctctccagttagcaaaggaattcttcagtatgatatgtggaatgttactcctacagacctatgggactggaaggttctcaaggagaagattgcaaagtatggtataagaaacagtttacttattgccccgatgcctacagcttccactgctcagatcctggggaataatgagtccattgaaccttacaccagcaacatctatactcgcagagtcttgtcaggagaatttcagattgtaaatcctcacttattgaaagatcttaccgagcggggcctatggcatgaagagatgaaaaaccagattattgcatgcaatggctctattcagagcataccagaaattcctgatgacctgaagcaactttataaaactgtgtgggaaatctctcagaaaactgttctcaagatggcagctgagagaggtgctttcattgatcaaagccaatctttgaacatccacattgctgagcctaactatggcaaactcactagtatgcacttctacggctggaagcagggtttgaagactgggatgtattatttaaggacaagaccagcagctaatccaatccagttcactctaaataaggagaagctaaaagataaagaaaaggtatcaaaagaggaagaagagaaggagaggaacacagcagccatggtgtgctctttggagaatagagatgaatgtctgatgtgtggatcctgaggaaagacttggaagagaccagcatgtcttcagtagccaaactacttcttgagcatagataggtatagtgggtttgcttgaggtggtaaggctttgctggaccctgttgcaggcaaaaggagtaattgatttaaagtactgttaatgatgttaatgannnnnnnnnaaactcctatattgggaattttcacccaaataatgccttttgaacaaccancnacccccacnttacccacnnattccttggtccggcccgcccctcggcgccctgcgagaaaactttttcctagcacccaatttcggttttgggcccgcccgcgggggcccccccgttagggccaaaggttggaaaccctgggggttctatataggcttgcgcctttctccctataggggacacacctcc

SEQ ID NO: 163932 - DNA, 544 bp, Homo Sapiens
gagtgtcagccctctataaattggagagtgactatgagatccttgaaagatttcctggtgcctatcttaaaggcaagaagtacaggcccctgtttgactatttcctgaagtgtaaagagaatggcgctttcactgtgctagttgacaactatgtgaaggaagaagaaggcacaggggttgtccaccaagctccttacttcggtgctgaggactatcgggtctgtatggactttaacactattcggaaagactcactccctgtttgccctgtggatgcttcaggctgcttcacaacggaggtgacagatttcgcaggacagtatgtgaaggatgctgacaaaagtatcatcaggactttgaaggaacaaggccgacttctggttgccaccaccttcactcacagctacccttttggctggagatcagacactcctctaatttacaaagcagtgcccagctggtttgtgcgagtggagaacatggtggaccagctcctaaggaacaatgacctgtgctactgggtcccagagttggtccgagcgga

SEQ ID NO: 163933 - DNA, 572 bp, Homo Sapiens
tgtgagaaaagtgaatcagaaaattggaagctgtacacagcaagacgttgagttacatgttcagaagatttatgtgatcagtttggctgaaccccgtctgcccctgcagctggatgatgctgttcggcctgaggcagaaggagaagaggaaggaagagctactgttaaccaggatacaagattagacaacagagtcattgatcttaggacatcaactagtcaggcagtcttccgtctccagtctggcatctgccatctcttccgagaaactttaattaacaaaggtttggtggaaatccaaactcctaaaattatttcagctgccagtgaaggaggagccaatgtttttactgtgtcatattttaaaaataatgcatacctggctcagtccccacagctatataagcaaatgtgcatttgtgctgattttgagaaggttttctctatgggaccagtattcagagcggaagactctaatacccatagacatctaactgagtttgttggtttggacattgaaatggcttttaattaccattaccacgaagttatggaagaaatggctgacacca

SEQ ID NO: 163934 - DNA, 836 bp, Homo Sapiens
ggggccttacggaagcctgcgagggagggtggtgtccactgcccagttccgtgtcccgatgcccagcgccagcgccagccgcaagagtcaggagaagccgcgggagatcatggacgcggcggaagattatgctaaagagagatatggaatatcttcaatgatacaatcacaagaaaaaccagatcgagttttggttcgggttagagacttgacaatacaaaaagctgatgaagttgtttgggtacgtgcaagagttcatacaagcagagctaaagggaaacagtgcttcttagtcctacgtcagcagcagtttaatgtccaggctcttgtggcggtgggagaccatgcaagcaagcagatggttaaatttgctgccaacatcaacaaagagagcattgtggatgtagaaggtgttgtgagaaaagtgaatcagaaaattggaagctgtacacagcaagacgttgagttacatgttcagaagatttatgtgatcagtttggctgaaccccgtctgcccctgcagctggatgatgctgttcggcctgaggcagaaagagaagaggaaggaagagctactgttaaccaggatacaagattagacaacagagtcattgatcttaggacatcaactagtcaggcagtcttccgtctccagtctggcatctgccatctcttccgagaaactttaattaaacaaaggtttttgtggaaatccaaacctccctaaaattatttcccctgcccgtggaaggagggagccaaggttttttactggggccatatttttaaaaataatgccataccttggcctccagtcccacccagcttaaataaat

SEQ ID NO: 163935 - DNA, 946 bp, Homo Sapiens
gcgtaatccgtacatacgtaccattctctgtgtctgtgaatgtcttcacacagtagccagtatgcacatcccacatttttatagttttatcccttgaggcagacactatatgatctccattgggcatgatggctactgaagaaacattgtggtcatggccgtgcatggttctgatgcattcaaagccctgaaaatcccatagtttaatggtcatatctgcagaacaggaagccagaagcttgccgctgtggtcgaatgaaatgtcctgtacagagtctgtatgtcctttaagagttcgttcaaaatctccagtctcataatcccacaccttaattgtagcatcctctgaagcagagaccataacactgaacacaggatggaaaatgactcgagtgactggactcctatgaccactcaatgcatatttttctggcggacggggaatccatacattgtgggtctcgtttctgaccaagaggtacacctgacgtaaattcttcttttgcttcatttagctttgattctaattccataaccttcttaagtaatctaataacagatgtccattttttttccaaaagaccagcatactttttatctaattcttcattcacatctaattcagcttcctttttaaaaactgaatatgcctcttcatagccatttgaacgaagataatctgctatagctcgatttagttcatctcgttgtctctgggacagcaccatcttggctgtaatgtcaagcttatctgatatagtggtatgtccctcctttgggaaatcaaaaagctttttgatccgtggacttataatttaaatatgccactaagtgtcttccacacaggggaaaatgattctttcacaaatgaatccaactagtaaccagaagatattcaacaagtaagattcattccaccggagcgctgcaccgccgcctccgcccc

SEQ ID NO: 163936 - DNA, 640 bp, Homo Sapiens
atgcacccattccgacttctctggcagtcggccgaataaaatttcactttcacagttctttttgccagtgccaggataaaaagcaaaattttaaattggaaaatgtctagcactttacacagtggaatgaaagaatacgaaattcaaaaacattattaaaagtccatatgccgcagcagcacgcgccatgatgagagctccccttccgaggcgcttctggagcagcttcctcaacctgtccgggagacgggctcagaagagcagggcccccatgctgccaacctcgctttgctccttaacgaagatctcaaagtactggtagatgattgtgactgcgagcaggatcccggttccagacccaatggcgcctaggaagtcagccaggaccgagagggccccgatgcacagcccaccaaaggccgcggctgtggggatgtaccggttgagttcatggaccatggaggtctctcggtggcctctcatcaccatctgctgctccttcagctgctttgcaacatctttggcagaggaacctgagacctcaatccacgtttcggagaagaatgcacaggagcccagcatgaacactatgtatacaactgcatggaccgggtcttctaacacggagccaaaagattcg

SEQ ID NO: 163937 - DNA, 1504 bp, Homo Sapiens
tgtggtccctgggtgcagtgtctgtttgcgtggctggcggaggctctgccatggtctccggagtgtgccccctgcgccggctttggcggtggacgcggtggctttcgccagggcgtaccgttgtgccacgtgttctagagtggggtctcccccgacaggcgtgcagcgcaccgcccaggcccccttcttagggattcagcggcatccgtgcgggtgggcatccctgggtccccacccattgtcgagaagccagggctcgaaacctcgaggctccttcaggatcttagcacccgactctggcttgcccttgctgctgggcagtgcctgtcctaagaggggactccgctaaaggccagagagagagtgctcatctccaggacctaggccacctgtcagcacaaacagaacttattccagacataaacatgagtcttcttatttcaaacactggagcaactgatcaccaccaccacagcccatgcaccccgaacctgacttcactaccaaccttgagcctgtgctgtcctctctctgctgacgacactggtgacgcagaaaggaagtcggtggtgtctgctcacttgcgtgcagtcctaagcacagtaagaaaattctgaacacagctgggtgatcttcagcccagaaggtgtaggggcttgtgagcactaagtcagtttctgtccatgtctgatagctaccacaatgtctccccttgctagggcagctgcgaggagacgtgtccagtgatgactggcagaatctggacaaacggacatcactgcaagggtctgtccacctagcttggccaggctcagcttggcagagctgatgacccaagtggactaaacacggagctagcagaaacaggcagactctaagcccaaccagaagagtcagctagaagagccaataggtgcacagacaaatccacagatggccaggagtgtcttctgggaaagccatccctctcttttggaagaagttctgtccttaaaaaaatcacttttaaaataagggaaaacaatggtgtcttagagagaaacagtcctaagccagatattcccacgcctgattgtgaaggagacatgccagcaaggtcccacgtctccgggaaatacatgatctgctcccagcttcacaccctactgccaaaatgaaacgtagacatttcagtgtttgtgcttccaaccagagtgagaaattccctttgtggggaaacaggtgagacggctgcagccgcatacagcactgagaaggtgcaaaggttaaaacaaaagttacatggacacttggggacaatcctataccattcccacttctctggcagtcggctgaataaaatttcactttcacagttctttttgccagtgccaggataaaaagcaaaattttaaattggaaaatgtctagcactttacacactggaatgaaagaatacgaaattcaaaaacattattaaaagtccatatccgcagcagcaccaccagacatcccttccagcaac

SEQ ID NO: 163938 - DNA, 1209 bp, Homo Sapiens
cggaccggacttctggtgtgttggaatttgctgctaatcaccatcagctctttgttgctggcttaattgtcctacttttggatgaactcctgcaaaaaggatatggcctggctctggtatttctctcttcattgcaactaacatctgtgaaaccatcgtatggaaggcattcagccccactactgtcaacactggccgaggaatggaatttgaaggtgctatcatcgcacttttccatctgctggccacacgcacagacaaggtccgagcccttcgggaggcgttctaccgccagaatcttcccaacctcatgaatctcatcgccaccatctttgtctttgcagtggtcatctatttccagggcttccgagtggacctgccaatcaagtcggcccgctaccgtggccagtacaacacctatcccatcaagctcttctatacgtccaacatccccatcatcctgcagtctgccctggtgtccaacctttatgtcatctcccaaatgctctcagctcgcttcagtggcaacttgctggtcagcctgctgggcacctggtcggacacgtcttctgggggcccagcacgtgcttatccagttggtggcctttgctattacctgtcccctccagaatcttttggctccgtgttagaagacccggtccatgcagttgtatacatagtgttcatgctgggctcctgtgcattcttctccaaaacgtggattgaggtctcaggttcctctgccaaagatgttgcaaagcagctgaaggagcagcagatggtgatgagaggccaccgagagacctccatggtccatgaactcaaccggtacatccccacagccgcggcctttggtgggctgtgcatcggggccctctcggtcctggctgacttcctaggcgccattgggtctggaaccgggatcctgctcgcagtcacaatcatctaccagtactctgagatcttcgtttaaagagcaaagccgaggtgggcagcatgggggcccagctcttctgagcccgtctcccggaaaggttgaggaactgctcccgaaacgcctcggaaaggggagctctcatcatggcgcgtgctgctgcggcatatgggatttttaataaggtttttgaaattccgaattctttcatcccacgggggaaaagtggcaaaaatttttccaaatttaaaattttgctttttaaaccgggcaca

SEQ ID NO: 163939 - DNA, 918 bp, Homo Sapiens
ctgtttgtgctgacaggtggcctaggtcctggagatgagcaccctctctctggcctttagggagtcccctcttaggacaggcactgcccagcagcaagggcagcagagttgggtgctaagatcctgaggagctcgaggtttcgagcttggctaaaagcgaaattccccaggcaggatccaaggatgttttgcaggatgccctgatcctaagaagggggcctggggggtgcgtgcagcccgtcgggggagacccccactctgacagtgggcacacggcagcctgcaaagcacagggccaccgccacagcccggcagaggggcacactctggagaccttgctggcagtgctagccaggaaacagagtgaccaagggacaagaagggacttgcctaaagccacccagcaactcagcagcagaaccaagatgggccccaggctcctccatatggcccagggcttaccaccctatcacacgtggccttgtctagacccagtcctgagcaggggagaggctcttgagacctgatgccctcctacccacatggttctcccactgccctgtctgctctgctgctacagaggggcagggcctcccccagcccacgcttaggaatgcttggcctctggcaggcaggcagctgtacccaagctggtgggcagggggctggaaggcaccaggcctcaggaggagccccatagtcccgcctgcagcctgtaaccatcggctgggccctgcaaggcccacactcacgccctgtgggtgatggtcacggtgggtgggtgggggctgaccccagcttccaggggactgtcactgtggacgccaaaatggcataactgagataaggtgaataagtgacaaataaagccagctttgtttacaaggtacacaaagagcaacaacaacacaacaaaag

SEQ ID NO: 163940 - DNA, 348 bp, Homo Sapiens
tataacataacttggttcccaatgacactgcatggaatccactgcatcaattgggatgcattttatcatgctgcatggaatccactgcattcaaacacactgcatggaatccactgcattcaatcgagacccattggaccacgctgcatggaatccactgcattcaatcgggatccatttagccacgctgcatggaatgcactgcgttcaatcgggatgcattttaccatgctgcatggaatccactgcattcagtgatgctgcatggaatgcactaccttcaatcgggatgctttgggccatgctgcataaaatccactgcatttaatcgggatgcattgggccacg

SEQ ID NO: 163941 - DNA, 3050 bp, Homo Sapiens
gttatatccaaaacaccacaggcgcactaaacttcattaatgatccattactgatcccgacccattatccaactcttgatcaaacatttttatatgattagcatgcatcatagccttcatagtaaaaatacctctatacggactccatctttgactgccaaaagcccatgtagaagcccctattgcaggttcaatagtacttgcagccgtactgctaaaactcggaggctatggcataatgcgaatcactactattctaaacccactaacaaactacatagcctatccattcctcatgctttccatatgaggcataatcataaccagctctatctgcttacgtcaaaccgacctaaaatccttaatcgcttattcatcagtaagtcatatagcacttgtaatcgtagcaatcataattcaaaccccctgaagcttcataggagccacagctctcataattgcccacggactaacatcctccatactattctgcctagccaacactaactatgaacgagtacacagccgaaccataatcctagcccgaggactgcaaacactcctaccactcatagcaacatgatgactaatagcaagcctcacaaacctagccctacccccatccatcaatctaatcggagaattatttatcattacagcatcattttcatgatccaacatcacaattattctcataggaataaacataataattacagctctctactctctctacatactaattattacacaacgaggaaaatacacccaccacattaacaacatcaaaccctcattcacacgagaaaacgccctcatagccctacatattctaccactactactactgaccttaaaccctaaaataatcctaggacccctttactgtagatatagtttaataaaaaccctagattgtgaatctagtaatagaaaattaaatattcttatctaccgaaaaagtttgcaagaactgctaactcatgcttccacacttaaaaatgtggctttttcaacttttaaaggatagcagttatccgttggtcttaggaaccaaaaaattggtgcaactccaaataaaagtaataaacccattcgcctcactcacattaaccacactgactattctaaccatcccaattataatatccaactcaaacatctacaaaactaacctttaccctaactacgtaaaaaccaccgtatcctacgccttcactctcagcctagtccccttactaatatttatacacacaggccaagaaataatcatttcaaactgacattgaataaccctacagaccgtagaactctctcttagctttaaaatagactatttctcagtaatattcattcccgtagcactattcgtcacatgatcaattatagaattctccatatgatacatacactcagaccccttcatcaaccgattctttaaatacctactactattcttaatcactataataatcctcgtaaccgccaacaacctcttccaactctttatcggatgagaaggcgtaggaatcatatcattcctgctaatcggatgatgacacggacgaacagacgccaacacagctgcactacaagcaatcctatacaaccgcatcggagacattggatttgtcctatccatagcatgattcttaacccactcaaacgcatgagattttcaacaaatctttatactaaacaatgaatgcccaaacataccattaatcggcctactcctagctgcagcaggaaaatcagctcaattcggactacatccctgattgccctcagcaatagaaggcccaactcccgtatcagcattactacactccagtacaatagtagtagcaggggtatttctactcatccgcttctaccccttaatagaaactaacaaactagttcaaactataacactatgcctaggagctatcaccaccttatttacagcactatgtgcaatcacacaaaatgatatcaaaaaaatcgtagccttctcaacttcaagccaactaggcttgataatagtgacaatcggcatcaaccaaccccacctagcatttcttcacatctgcatgcacgctttcttcaaagcaatactattcatatgctccggatccattatccacagcctcaatgacgaacaagacatccgaaaaataggcggactgtataaagcaataccattcacaacaacagcactaattattggaagcctggcattaacaggaatgccttatctcacaggattctactcaaaagaccttatcattgaagcagtaaatatatcctacacaaacgcctgagccctactaataacattaattgccacatccctaaccgctgcctacagcactcgaattatcttctttgcattcctagggcaaccacgtttcccacccctagtcctaattaatgaaaataaccccctactaattaactctattaaacgccttttaatcggaagcattttcgctggctttatcatctccaacaacatcccaccaataacagtaccaaacacaacaatacccctttacataaaaataacagccctaatcgtaaccatcataggattcatactagccctagagctaaacaacacaacctactacctgaaatttaaatacccatcacaaacatacaaattttccaacatactaggatattatccctccatcatacaccgcctaccaacataccacaacctatctataagccaaaaatccgcatcatcattactagacttaatttgactagaaactattctaccaaaaataacctctttcatccaaataaaaatatcaatcatagtatcaaatcaaaaaggcctaatcaaactatactttctctccttcctaatcactattataatcagcataacactatttaattaccacgagtaatctctataataacaacaactccaataagcaatgatcaaccagtaacaataactaatcaagtaccataactatataaagcagcaatccccatagcttcctcactaaaaaaccctgaatcacccgtatcataaattactcgatccc

SEQ ID NO: 163942 - DNA, 724 bp, Homo Sapiens
cgccgtacagaaaagggaaagcaatacagtggcagattatgaccttgtagatcacagttgaaagcaggtagtatttggggagttagtacagattaaaactatggaggagcagttacgtaagcaccgactgtgcagggtgaggaccagtaagctatttggattatgtgttttcggtccccttctattaggctgtgatgggctcaggtaatggatactcctgaggcgaggaggattgaggtgtttagtaggggtacttctagggggtttagtgggtgaattcccgttggtggtcagcaacctcctaattcgggtgttggtgctaggcttgagtggtagaaagctcaaaagaatccagtgaagaacagaacctcggaaataataaataaaattataccgtatcgtaagcctttttggacaactgatgtgtggtggccttggaaagtgctttctcgaataatgtctcgtcaccattggtatattgtcaaagtattggttaatagtcctagagatagtaagagtatagagttaaagtggaatcatataattaggcctgatgttattaaaagggctgatagggctccggtaagtagtcatgggttacattaaattatgtgttctgcatgtgttccgtcgttacatctacacgctgatatgatcgtgtcagctctgcgacattttctctgaatctgaagcgttgctctgagcttctaacaaatctggttcc

SEQ ID NO: 163943 - DNA, 528 bp, Homo Sapiens
gtcacaggatataaagaagatcaaagcctcattcagacagagaaaacgcactcatagccctacataactaccactactactactgaccgttaaaccctaaaataatcctaggacccctttactgtagatatagtttaataaaaaccctagatagtgaatctagtaatagaaaattaaatattcttatctaccgaaaaagtttgcaagaactgctaactcatgcttccggaaccaagttatgttataccggtataacataacttggtacctcttgcctcccttgtcaaagattaattcaccataggtgtttgggtttatttctgcattctctattctattccattgctctgtctgtctgctttggtaccagtatcacgctgtcttgatgactgtggctttggaatattgcctgaagtctgagagagttatgcctcctgcttagttgttgttccttatcaattgctttggcaattctgggtcttttgtggttccatatgaatattggattgttgtatagggaacaagtat

SEQ ID NO: 163944 - DNA, 937 bp, Homo Sapiens
cgtccgtcgaccgctactggccgtagcattcctcaccctagtagaacgaaaagtactaggttatatgcaactacgaaaaggacccaacgttgtaggcccctacggcctactccaacccatcgccgatgccctaaaactattcaccaaagaacccctacgaccagccacatcctcaatctgcatgttcattattgcaccaatcctagccttatccctagcactaacaatatgagttccactaccaataccctaccctctaatcaacataaatctaggagtactattcatgctagccatgtcaagcctagcagtctactctatcctatgatcaggatgagcatccaactcaaaatacgcactcatcggggccctacgagcagtagcccaaacaatctcatatgaagtaacactagcaatcatcctactatcagtactcctaataaacggatcatatactctatcaaccctaatcacaacacaagagcacatttgaataatctttacatcctgacccctagccataatatgatttatctcaaccctagcagaaaccaaccgagccccgttcgaccttacagaaggagagtcagaacttgtatcaggctttaacgtagaatatgcagccggacctttcgccatattcttcatagcagaatatgccaacatcatcataataaatgcattcacagcaattctcttcctaggagcatcccacgacccacacacatcagaactatatacaatcaacttcgtactaaaaacactcgcattaacaatcaccttcaccgccaccgaactaatcctattctatatcctattcgaagcaacactagtacccacactaattatcatcacacgctgaggaaaccaaacagaacgactcaatgcaggactttatttcctattctacaccctagcaggatcatttcagggcctg

SEQ ID NO: 163945 - DNA, 2697 bp, Homo Sapiens
cagtactcctaataaacggatcatatactctatcacccctaatcacaacacaagagcacatttgaataatctttacatcctgacccctagccataatatgatttatctcaaccctagcagaaaccaaccgagccccgttcgaccttacagaaggagagtcagaacttgtatcaggctttaacgtagaatatgcagccggacctttcgccatattcttcatagcagaatatgccaacatcatcataataaatgcattcacagcaattctcttcctaggagcattccacgacccacacacatcagaactatatacaatcaacttcgtactaaaaacactcgcattaacaatcaccttcctatgaatccgagcatcatacccacgattccgatatgaccaactaatacatttactatgaaaaagcttcctgcccctaacactagctctatgtatatgacacatctcactccctattataacagcaagtattcccccacaatcatagaaatatgtctgataaaagagttactttgatagagtaaaaaatagaggttcaaaccctcttatttctagaacaataggactcgaacctaaacctgagaattcaaaattctccgtgctaccaaaatacaccacattctacagtaaggtcagctaagctaagctatcgggcccataccccgaaaatgttggttcatacccttcccatactaataaatcccattatctacactacccttatcataacagtaatatccggaaccatactagtaataatcagctcacactgactactcatctgaatcggattcgaaataaacctattagcaataatcccagtattaataaaaaattttaacccacgagccacagaagcagccacaaaatatttcctaacacaagccacagcctccatgatactaataatagccatcatcatcaacctcctatattctggccaatggaccattacaaaaatatttaacccagtagcaataacaataataaccctggccctagccataaaactaggactctcacctttccacttctgagtcccagaagtaacccaaggcatttcactacaagcaggcctactattactaacatgacaaaaactagccccattatcagtactatgccaaatctcacaatcaatcaacccaaacctaatactaactatagccatattatcaattttaatcggagggtgaggaggactaaaccaaacccaacttcgaaaaatcatagcatactcatcaatcgcacacataggatgaatgacagcagtattaccatataacacaaccataacaatcttaaacctactaatttacatcacaacaacactagcaatattcatactattaatccacagctcagcaaccacaactttatccctatcccatacatgaaacaagatacccatcatcacaagcctaataatagtaaccctactctcaataggaggcctgcctccactatcaggatttataccaaaatgaataatcattcaagaaataacaaaaaatgaaagcatcatcatgccaacactcatagcaataacagcactgctaaacctctatttctacatacgactagcctactcctcctcactgactatgttcccatccaccaataacataaaaataaaatgacaattcgaacacacaaaacaaataaaactacttcccacaataattgtattatcgacactaatcctacctataacaccagccctctcgtccctaaactaggaatttaggttaacacagaccaagagccttcaaagctctaagtaagtacaaagtacttaactcctgaaaacctaaggactgcaggacttatcctacatcaattgaatgcaaatcaaacactttaattaagctaaatcctcactagattggtgggattacatacccacgaaacttttagttaacagctaaacaccctaatcaactggcttcaatctacttctcccgccgcaggaaaaaaaaggcgggagaagtcccggcagaattgaagctgcttctttgaatttgcaattcaacatgacattcaccacggaactggcaaaaagagggcttaacctctgtctttagatttacagtctaatgcttactcagccattttacctatgttcgtaaatcgttgactatactcaacaaaccacaaagacatcggcaccctgtacctactatttggtgcctgagcaggaatagtgggcactgccttgagcctactaattcgcgctgaactaggtcagcccggaaccctacttggcgatgatcaaatctataatgtaattgttacagctcatgcctttgtaataatcttctttatagtaatacccattatgattgggggttttggtaactgactcgtaccgctaataatcggagctcccgatatggcctttccacgtataaacaacataagtttctgactacttccaccatccttcctattacttctggcatcctcaatagtagaagccggagcgggtactggatgaactgtatacccacctttagctggaaacttagcccatgcaggggcttcagttgatttaacaattttctccctacaccttgcaggtgtatcatcaatcctaggggctattaatttcattaccacaattattaacataaaaccccccgcaatgtctcaataccaaacacccatgccgtaccgtgcat

SEQ ID NO: 163946 - DNA, 1723 bp, Homo Sapiens
tcggagttacgaaactgcttgattggaagtcaattgtactacttaatactaaaagagtaggatcctcatcaatagatagatacgtaaaggaatagtcaaactacatctacgaagtgtcagtatcaggctgcggcttcaaagccgaagtggtggttggatgtgaagtggaattttagttgtcgtagtaagcacactgctaggaaagtagatccgatgattacgtgcaacccgtgaaatcctgtagccacaaagaaagtggatccatacactccgtcggagattgtgaatggtgcttcgtaatattctgaggcttggaggagggtgaagtatacgcctagtgcaatggtgatggatagtgcttggattatgtgttttcggtccccttctattaggctgtgatgggctcaggtaatggatactcctgaggcgaggaggattgaggtgtttagtaggggtacttctagggggtttagtgggtgaattcctgttggtggtcagcaacctcctaattcgggtgttggtgctaggcttgagtggtagaaagctcaaaagaatccagtgaagaacagaacctcggaaataataaataaaattataccgtatcgtaagcctttttggacgactgatgtgtggtggccttggaaagtgctttctcgaataatgtctcgtcaccattggtatattgtcaaagtattggttaatagtcctagagatagtaagagtatagagttaaagtggaatcatataattaggcctgatgttattaaaagggctgatagggctccggtaagtggtcatgggcttgggtttactatgtggtatgcatgtgtttggtgggtcattatgtattgtcgtgtaggtataagcttactagcagtgtaaacacataagcttggatcagagctactgcaaattcaagaatagttaatagaatgaggatagtaaatgtgataaaagctgttatagtgttgatgttgagtagtgctaatgtggcccctccaattagatgaattaataggtgccctgctgtaatgttggctgtcagtcgtacggctagggctactggttgaataaataggctaatagtttcaataattacgagcataggaattaatagggcgggtgttccttgtggtagaaagtgggctagtgatgttttggttttatagcggaatcctgtgaatacggttgctgatcatagggggattgctatacccaggtttattgatagttgtgtggtgggtgtgaatgagtgtggtagtaggcctaggatgtttgttgagccgatgaatataattagagatataagtattagtgatcaggtttggcctttttggttgtgaatagctattatttgtttggatgttagttggattaatcattgttggatcgagattgtgcggttattaatgagtcgtttgggtgttgggaatagtaagcttgggaatataataattaaggtgacaataggtagtcctattatcgtgggggcaataaaagaggcaaatagattttcgttcattttatttctcaaggggtgctatgtttttgagttttgagttcaattgattctgggcttgctgggtatgagtagtttgagatttttagttggaataaaataaataatgttataattattgatgtaattgtaatgaatcatgtggatgtatctagttgtggcatccattgaggggagattagggctccgatctctaacttaaag

SEQ ID NO: 163947 - DNA, 1224 bp, Homo Sapiens
  misc_feature (1041)..(1152): n is a, c, g, or t
tctgtcgtcctgtcacctccgtccatcctcgatgcgtacacgctgcatataagcaggtaaattattagctcattcaaaccccccttaccccccattaaacttatgctctacacaccctataacgccttgccaaaccccaaaaacaaagcagagtgtacaaatacaataagcctaacttacactaaacaacatttaacaacacaaaccaccatatcttataaaacacttacttaaatacgtgctacgaaagcaggcacctacccccctagatttttacgccaatctaccacaaataagtttaaaattacaacacaataacctcccaaaatataagcacctatttaagcatacgcccacaatctgaatatagcttatagttaatgtagcttaaattatcaaagcaaggcactgaaaatgcctagatgggcctcacagccccataaacacacaggtttggtcctggcctttctattaattcttaataaaattacacatgcaagtatccgcgccccggtgagaatgccctccagatcttaaagatcaaaaggagcaggtatcaagcacacctataacggtagctcataacgccttgctcaaccacacccccacgggaaacagcagtgataaaaattaagccatgaacgaaagtttgactaagttatattaattagagttggtaaatctcgtgccagccaccgcggtcatacgattaacccaaattaatagatccacggcgtaaagagtgtttaagaaaaaaaaccacaatagagttaaattataactaagctgtaaaaagccctagttaaaataaaataacccacgaaagtgactctaataatcctgacacacgatagctaggacccaaactgggattagataccccactatgcctagccctaaacccaaatagttacataacaaaactattcgccagagtactactcgcaactgcctaaaactcaaaggacttggcggtgcttcacatccacctagaggagcctgttctataatcgataaaccccgatagaccttaccaacccnnnnnnnnnnnnnnnnnnnnnnnnnnnnnnnnnnnnnnnnnnnnnnnnnnnnnnnnnnnnnnnnnnnnnnnnnnnnnnnnnnnnnnnnnnnnnnnnnnnnnnnnnnnnnnnnaatacgtgttttgaaacaatgtggccatgaagaggatggaagtagtgtgtctgttgtccccgagtattgcgt

SEQ ID NO: 163948 - DNA, 666 bp, Homo Sapiens
gtcctgggtggtgcagctgtcctggtggtgctgctttagttgctcgagatgctctaatatgttcttccttgtgatgatccccaagacaatcccattgtgagttacaaggcactgcctcagtcccagctttcggagaatatccaccacgatctccattggggtgtggtctgtcactgtaaaagggctcatgtcaagaatgcttcgaagcttcaatggccgaggactttctgctggaagagatggggtgtgctgtgcaaaacacacccgagaactgccaacgataccttcttgttttttcctggcactttctattgcaattgtcaggtctcttctgagggcaaatcccactaatctctgagattcttttgacattatgacaggaaatccattgtagctggtttcattaatcatgttttctatatcatccactgtcatattgtcctgtgtcaggacagctaagggaggatcattccttcgaggtctcataacgtcagcagccagggtggtatgagtgaattcttcttttgcatccaagaaagggtatccatttaatcggatgtgtgcttcataaatgccttccctgccaaaggcatctccaacccatttactggtcatgactgcagccataaggggaacatctattccaagcctccagtaagctcaaaa

SEQ ID NO: 163949 - DNA, 615 bp, Homo Sapiens
caggccccgaacaatgatgtagtccgaattgagctgattttcctgctgcagctaggagtaggccgattaatggtatgtttgggcattcattgtttagtataaagatttgttgaagatctcatgcgtttgagtgggttaggaatcatgctatggataggacaaatccaatgtctccgatgcggttgtataggattgcttgtagtgcagctgtgttggcgtctgttcgaccgtgtcatcatccaattagcaggaatgatataattcctacgccttctcatccgataaatagttggaagaggttgttggcggttacgaggattattatagtgattaagaatagtagtaggtatttaaagaatcggttgatgaaggggtctgagtgtatgtatcatatggagaacggggcctgattgttcggggcctgcaggccccgaacaatattccacctgtgacggggacccgaccaccaagctagcaaaggtgtcacctctctccccatggaattgccacctggcaggtccagcttcgcctctggagccttcatctttctcctggtacctaaacattcaggtcaccccaactgttccctctcccaacctaaatggttttccaagt

SEQ ID NO: 163950 - DNA, 314 bp, Homo Sapiens
cgaggtgatctagaggatcccatgcaccattccgaccctacccccatccatcaatctaatcggagaattatttatcatcacagcatcattttcatgatccaacatcacaattattctcataggaataaacataataattacagccctctactctctctacatactaattactacacaacgaggaaaatacacccaccacattaacaacatcaaaccctcattcacacgagaaaacgccctcatagccctacatattctaccactactactactgacctaaaccctcggaatggtgcatgggatcctctagacta

SEQ ID NO: 163951 - DNA, 588 bp, Homo Sapiens
ttgttctcgggggtgatctcctcgggtcttgggcaccttcttggcatccgcttttggttttccaggcttcatgatgggggtttcactcaccgagatcccagaatcactgtcaccagttccagggccactggtggtgatggacacgacatggttggtggtttcgatggactgttccaagacagtttgattattgcgtttaattaacttcagcttgaagttggcctccccgggatggaacttggagttgtggtcggatcagtaatggataattaagaagtttagtgagcctgtggtatttaggatataaactagtgctaccagcagtgtgtagggatcctgctagggtatagaataggaaataaagtcctgcattgagtcgttctgtttggtttcctcagcgtgtgatgataattagtgtgggtactattgttgcttcgaataggatatagaataggattagttcggtggcggtgaaggttataattaggaatagttgtagtaagattagtatggtaatatatagtttttttcgggttgtggtttcttttgataaggtaagattggctagctattagtataagggggagg

SEQ ID NO: 163952 - DNA, 833 bp, Homo Sapiens
gggggggacaaagccgggaagaggaaaagctcggacctaccctgtggtcccgggtttctgcagagtctacttcagaagcggaggcactgggagtccggtttgggattgccaggctgtggttgtgagtctgagcttgtgagcggctgtggcgccccaactcttcgccagcatatcatcccggcaggcgataaactacattcagttgagtctgcaagactgggaggaactggggtgataagaaatctattcactgtcaaggtttattgaagtcaaaatgtccaaaaaaatcagtggcggttctgtggtagagatgcaaggagatgaaatgacacgaatcatttgggaattgattaaagagaaactcatttttccctacgtggaattggatctacatagctatgatttaggcatagagaatcgtgatgccaccaacgaccaagtcaccaaggatgctgcagaagctataaagaagcataatgttggcgtcaaatgtgccactatcactcctgatgagaagagggttgaggagttcaagttgaaacaaatgtggaaatcaccaaatggcaccatacgaaatattctgggtggcacggtcttcagagaagccattatctgcaaaaatatcccccggcttgtgagtggatgggtaaaacctatcatcataggtcgtcatgcttatggggatcaatacagagcaactgattttgttgttcctgggcctggaaaagtagagataacctacacaccaagtgacggaacccaaaaggtgacatacctggtacataactttgaaagaagggggtggtgttgccaatggggattgttaatcaaga

SEQ ID NO: 163953 - DNA, 539 bp, Homo Sapiens
gggccgtgatacccggacagaaaacagcagtcttgtatctggtgacagctcggggtcaggacgggatcaggcgctgatgacagagacagattcacctgtgagaatgacgggtcaactcttaggtggtagattgatggaagttaaccttatatcagcaggaactttgtcaccaacagcaatttctacaatatcaccaggaactatgtctttagctttaatccgctgcacactctttctgtcctgtcgatacactctgcccatttcaggctcatattccttaagggcttcgatggcattttcagcatttctttcctgccatacacccacaattgcatgggctactaatatgagtaaaattacaaaaggttctacaaaggctgtaattgtttcttcaccttcttcaaaccaagccaaaacaaaagatatacatgctgccagtaataaaatcctaactagcaagtcttcaaactgctcaatcacaagttccagcaaggtttttccttcttcagccggtaactcgttggagccccatctctcct

SEQ ID NO: 163954 - DNA, 1353 bp, Homo Sapiens
gggtccggcgagcgggcaagcgggaaccaggtggccacccggtgtcggtttcattttcctttggaatttctgctttacagacagaacaatggcagcccgagtacttataattggcagtggaggaagggaacatacgctggcctggaaacttgcacagtctcatcatgtcaaacaagtgttggttgccccaggaaacgcaggcactgcctgctctgaaaagatttcaaataccgccatctcaatcagtgaccacactgcccttgctcaattctgcaaagagaagaaaattgaatttgtagttgttggaccagaagcacctctggctgctgggattgttgggaacctgaggtctgcaggagtgcaatgctttggcccaacagcagaagcggctcagttagagtccagcaaaaggtttgccaaagagtttatggacagacatggaatcccaaccgcacaatggaaggctttcaccaaacctgaagaagcctgcagcttcattttgagtgcagacttcccctgctttggttgtgaacgccagtgggcttgcagctggaaaagggggtgattgttgcaaagagcaaagaagaggcctgcaaagctgtacaagagatcatgcaggagaaagcctttggggcagctggagaaacaattgtcattgaagaacttcttgacggaaaaaagggggccggcctgtgttttcactgatggcaagactgtggcccccatgcccccagcacaggaccataagcgattactggagggagatggtggccctaacacagggggaatgggagcctattgtccagcccctcaggtttctaatgatctattactaaaaattaaagatactgttcttcagaggacagtggatggcatgcagcaagagggtactccatatacaggtattctctatgctggaataatgctgaccaagaatggcccaaaagttctagagtttaattgccgttttggtgatccagagtgccaagtaatcctcccacttcttaaaagtgatctttatgaagtgattcagtccaccttagatggactgctctgcacatctctgcctgtttggctagaaaaccacaccgccctaactgttgtcatggcaagtaaaggttatcctggagactacaccaagggtgtagagataacagggtttcctgaggctcaagctctaggactggaggtgttccatgcaggcactgccctcaaaaatggcaaagtagtaactcatgggggtagagttcttgcagtcacagccatccgggaaaatctcatatcagcccttgaggaagccaagaaaggactagctgctataaagtttgagggagcaatttataggaaagacat

SEQ ID NO: 163955 - DNA, 1207 bp, Homo Sapiens
  misc_feature (490)..(490): n is a, c, g, or t
  misc_feature (604)..(604): n is a, c, g, or t
ctgggacatagaaaaaggataattactggtgaggactaatagtggtgaaggaatgaggagtgagtagttatgatcatacataggtggagaaggctgtgtggaaaagagggtcccctctcggagctaagaccctcaggggaggccatgcctgatggcatccctgcaagggaatcagggaagaacacctccacctactacctccctccgacccccagctcccagctctccggctcccccactgacccaacatccaaaagggcaagaaaccttgatgacttggcctttacaagtccagcccccgggcatggagcaaggaagagggatgggcagcgggtctggaggggtgagccgggagagctttaacccagtcatcgtccggcttagtctcagaaccaggtgtacattgtacagtagtcgactattcagagtctttcgaggagactgatgaaacagtttatgaatgataaacatggggtacagggttttgganacgggtgcttaagcataaactataaaatgagaagaataaggtactttattcttctgtggcagggaacccaaaacttgggtttacgttgcagggcaacacctgtgatgaacaaancacatggtagcgatagcccattcatgaaaaagcccattcatgaaaaactaacagctattcttttcacagggatagtcaaaaaatgagttgaagggaaaaaagtatctccagttggagccaaaacagccatctctagtttgaaaatacactcaacaaatgttggtgattagagataacaggaaccgggcaagggaggaatttttacatacgttcaagcttttcactttgcagccacactctgattttatcaaaattcttatccatccaaccgatgttttcttcaatggtttcaattgtctgttggacacaacggagctgagaaccattttctttcaaagagctgaagaatccttttacctcttcaagccgtgttcttgtggagaattgatttgttgtacccattaccatgtgggctatggaagatgagccaagttcaaacttttgtacaagtttgttccagtttttcctcagaaattgccaggccagtgggtatcctactgggttcctgccaatgagtgtaagaatttgtggaaactcctgagtttttattttatctcccttaaagctttccgatatcccggaactccgggccggtaccagcct

SEQ ID NO: 163956 - DNA, 273 bp, Homo Sapiens
gtgggcacccaccctgttgtcatatacttgaaaaatgcaagttttagcaatgttaaggttctactttaaacttactaaacttaagaagttaaaagttggagagacctaggtagccttgcagatgacgctaaacattggttatacaagttgatgtgatggtaacgtagggaaaaccaactgcacagtgcttcctttaaacacatacttatttcataaagttctgttttctcgagagcttattttgtttatctcaccttatgatactcaaaagtg

SEQ ID NO: 163957 - DNA, 1126 bp, Homo Sapiens
cctattaaattgaggctagagctggagatgtaattggtttttgagaaacattagtataaagcttgcccttgttgtgtggaagaagccattttgtactgctttaaagttagactaatattctcagcacgggtgtatggggacctcattacctatttttttcatcatttaccctaggtaagaactttgatcactgcttactaggtaaagaatgtttgtactgttccaaaacccaggcttctttattcctttaccactatccatgtgagcattgacaaatcatggcttagaggtgctcactgactcgctaagacgactttggccctgttgatgactggtgctgtgctccagccttatcagttaggggacccaaggtttgtttgggacctgggtacaggtaaaagccagacttggcagggacccctctttctaggctgaaccttgagtccccctgctttttggcagacccaatggatcactgtcttgcagctagttcttcatgtggggcctcttaggccagtgccggaggaggcatgctcctctttctatgccacagaacaaacactactctagcagagcctttcttgcactttaaagtgagattaatttagctgtaatttggttaaaaacttcctaagagagaaaattaagtctactgatttggtataggtaaatggacattaaacttttttaaagtaaaggagatggtagataccgttagattatagtcttgaggttcatgtgaagccagtggtgttaacttactttgatttccttgttcaggtcagggcctggaacgcctgtgcggggaggtcactcaattcaaaattttctgtatgaaagcatttttcaccaaaatgagcctcatccctttatgcaacacataaccttactgagggagggaaatacggaagccacctttttatttctcttcactgtgtacaagttcacttgttgtcttgaacactgtctcaaatacctgctttttgttttggatagtaccttgtctgtataagaagctggcctttccatagagaggccctggagtctaaaattatgagaacaattaatttatttgtgtcttctattatgatctcgttttgacaataaaaatccttactactttctc

SEQ ID NO: 163958 - DNA, 822 bp, Homo Sapiens
acaggttgaaattttgattttatttcaaaatgataaataaaccgaggcatagttctgaccaggtactatgtctgcagggcttttgaaattaaagaaacagtccaggagggctccagtcagacccagaatgacaccagccacacttgtgactggcagagataacctctttgatcttcagcaattttaaaagttcttcatcctaatttctgagtatcataaaaagtaaaaagtactttcattttatttttcctttgaaaatgtttttagtggcaaacaggactacttggtttccttacttcatttttataagcatagtagttatatggcaatttacttaaaattagagagggaaaccccagagacctgagtggcactgcccatccactgaaggcccacataaataggtactcatgttcatgttatcacgtctacaaatagcaataaaatgatgtccgtaaatcggaagtacagcagtagcagttcatacatatctgatatgctttcacaccaggattcagtaaacaacaataaatataatttcccctcttcaaaacaaaaaatggatttatacggaaaaagggttaatttacttggggtttatcagcacaccatttttaatgtgcttggaaagaattaaaaaccatgaaactgtattcactgaataccggtccatagttatatttttttcttttaacgtggcttaaatacatacatcatgactttctattaaaatccttaaatctatggggatgcgtggtagataagactatattaaaaatctttcctcattaacaatttcattaaattaaaaaaagatctgac

SEQ ID NO: 163959 - DNA, 458 bp, Homo Sapiens
aagccctgcggtagctagcactgaagactatttttctattggtataacccgtccacctgaaggggagagggaaatcaaattaatttttctcgttagacataaggaaatttaaggaaaaacagctttaagaacagttactcagcgtagatgtgtgttcacacaaagtgctctgcattcagtgttcattgtgaattgggagagtgagtctttctgtagggtagaaagaagcctcctacccagcaaaccagtagacccaaaagttgaaaaaaactgatgacagacaacaagcatgaagatggcatatttgatgtcacttgggttctttttcccagaaggcttatacagtgactcagtcgggaagctttccagcttccagcccttgaatgtgaagtgtcattggcatgtctggcagtagtctctcattcactcctcaataaacaacattgaatacaaaggag

SEQ ID NO: 163960 - DNA, 720 bp, Homo Sapiens
  misc_feature (156)..(168): n is a, c, g, or t
aataatgagttatcataagggtatgaggtatacattatggagatgatgtcaggtcagaatattggagttatacatctatttctgagttgaatactcagctcccacgagaaagaaagtagttttaaggtccagcttcttagtctacttgaagcaaannnnnnnnnnnnnatatttctgaatataaatatactcttatatgggctaaaaagaccccatgaataaatagcaggttcagtagttgaggagtggagtttagtaggtttgttttcagtataaattagataacatgtggaggtcacagcatttgggaaattgagtgtccccaagtgagctttgtttataaactttcaaaatgtcggaagtggacaggtttgttaaatcttgtctgccagcacccttttcttcctttgttccttttcctctctgtgttattgcctgcggcagccagtccttcatactagatagagttcagataaagcaaacgtttggcaaaaacatactgtttgacctcctccccctctgcttatgaaggggtagcatgattctgtgttttaaagcagtgatgtttcagctgtgaaatgcactcgctgtaagctctaggctgagtgcatggaaactgttacgcttctcattttatgtgatctcctaattggtatgtagcaaaaattttctaaaactgttttgtggcttgttttgtaataaaaccatgtgaaatactcc

SEQ ID NO: 163961 - DNA, 493 bp, Homo Sapiens
ttcacatatgtacattcacagggcttctctccagtatgaattctctgctgcctagtaagtagacaccgttggctaaaggctttctcgcaatggtcacatttatagggttgcctccagtgtgtgtcctctcgtgtttactaagggttgagcgatcattgaaggctttcccacaatcaatgcattcgtagggcttttctccaggatatgtcctctgatgttcaatgagtcacaaccgctggcttaatacacgtcacactgatagctcttcccaccgacatgcgtcctctggtgcatgatgaggggagacctctggatgaaagctttcccacaatgactgcactcctaaggtttctctccagtatgtgtccgccgatgcactacaagttgagatcgctgccggaaggatttcccacagtcactacattcatagggtttctctccagaatgaattctgtgatgggaaagaaggttagagctccctgaaaaggctttc

SEQ ID NO: 163962 - DNA, 1431 bp, Homo Sapiens
  misc_feature (1287)..(1287): n is a, c, g, or t
  misc_feature (1290)..(1290): n is a, c, g, or t
ggtacacagaatcctatgaggatggttgtgaggattatcctactctatcagaatatgttcaggattttttgaatcatcttacagagcagcctggcagttttgaaactgaaattgaacagtttgcagagaccctgaatggttgtgttacaacagatgatgctgtgcaagaacttggggaaactcatctatcaacaggccacatctatcccaaatttctcttatatgggagctcgcctgtgtaattacctgtcccatcatctgacaattagcccacagagtggcaacttccgccaattgctacttcaaagatgtcggactgaatatgaagttaaagatcaagctgcaaaaggggatgaagttactcgaaaacgatttcatgcatttgtactctttctgggagaactttatcttaacctggagatcaagggaacaaatggacaggttacaagagcagatattcttcaggttggtcttcgagaattgctgaatgccctgttttctaatcctatggatgacaatttaatttgtgcagtaaaattgttaaagttgacaggatcagttttggaagatgcttggaaggaaaaaggaaagatggatatggaagaaattattcagagaattgaaaacgttgtcctagatgcaaactgcagtagagatgtaaaacagatgctcttgaagcttgtagaactccggtcaagtaactggggcagagtccatgcaacttcaacatatagagaagcaacaccagaaaatgatcctaactactttatgaatgaaccaacattttatacatctgatggtgttcctttcactgcagctgatccagattaccaagagaaataccaagaattacttgaaagagaggacttttttccagattatgaagaaaatggaacagatttatccggggctggtgatccatacttggatgatattgatgatgagatggacccagagatagaagaagcttatgaaaagttttgtttggaatcagagcgtaagcgaaaacagtaaagttaaatttcagcatatcagttttataaagcagtttaggtatggtgatttagcagaacacaagagagcaagaaaatgtgtcacatctataccaaattaaggatgttgagttatgttactaatgtatgcaactttaattttggtttaacactatctgccaaaataaactttattccctataacttaaaatgtgtatatatatataatagtttattatgtacagttaattctactgttttgggctgcaataaaattcgattttgaaacccgccnccnactcacaccacagagattaaacaaaaatggtcgggccgccttccgccccctcagaaaactttttctagaacccattcccgttttgggccggccgcgggtccccacgtttggggctaaatggtgaacccttggggccctatc

SEQ ID NO: 163963 - DNA, 757 bp, Homo Sapiens
taagcaacacatgctgcgtatgacggatggtatgtaagcgatctttgttatcagcacggacataacgccgtaaggcctggagaatgcgatgaggccgtggcgggtcagactgcaaggcagccaggtagttctccagagccatccgacggcggtcattcagcatagcttccactcgggccaggtgggtctccaccagctgctgcttctcactggctgcttccttctctaaagctttaaccatggcttggaagtgctgaatcagagtctgcctctctgctttggggaggttcttagcttgaagctctgcctcttcccattccttctttaccctgtccattccggttgcggtgccgaatctccagctgctccttagccttctggaagcgagcatgctcattatcatctgcagaggtctcgaaatacacatcaacatcattggttggcagaggagtgggaggaatcatcgctttacacacagccatacaataatcctcagactcaaaatggttcctgttgccaccgcagccaccatatataaagcgcacgcactttcccttggagaggtcgaagtaccaacgaggcatcacggcccggcagggccccgtcatcgcctcctgggagcagacagctttgacatcatgagtaatttccttgtctgacatggtccgtcgctgccgggttcagtaggattctcctcagttgtagtcatctcctttgaaggtgtcatagtagtaatctcgtcccccacctattccga

SEQ ID NO: 163964 - DNA, 579 bp, Homo Sapiens
  misc_feature (447)..(447): n is a, c, g, or t
  misc_feature (522)..(522): n is a, c, g, or t
agtgtactggtaagggaggaagaaggggaggagtggtggaggaccgagattactactatgacaccttcaaaggagatgactacaatgaggagaatcctactgaacccggcagcgacgtgaccatgtcagacaaggaaattactcatgatgtcaaagttcctccaactccactgccaaccaatgatgttgatgtgtatttcgagacctctgcagatgataatgagcatgctcgcttccagaaggctaaggagcagctggagattcggcaccgaaaccgaatggacagggtaaagaaggaatgggaagaggcagagcttcaagctaagaacctccccaaagcagagaggcagactctgattcagcacttccaagccatggttaaagctttagagaaggaagcagccagtgagaagcagcagctggtggagacccacctggcccgagtgnaagctatgctgaatgaccggcgtcggatggctctggagaactacctggctgccttgaagtctgacccgccacggnctcatcgcattctccagggcttacggggttatgtccgtgctgagaacaaagatcggt

SEQ ID NO: 163965 - DNA, 763 bp, Homo Sapiens
ttttagatgcttctgggtcgcggtgtgctaagcgaggagtccgagtgtgtgagcttgagagccgcgcgctagagcgacccggcgagggatggcggccaccgggaccgcggccgccgcagccacgggcaggctcctgcttctgctgctggtggggctcacggcgcctgccttggcgctggccggctacatcgaggctcttgcagccaatgccggaacaggatttgctgttgctgagcctcaaatcgcaatgttttgtgggaagttaaatatgcatgtgaacattcagactgggaaatgggaacctgatccaacaggcaccaagagctgctttgaaacaaaagaagaagttcttcagtactgtcaggagatgtatccagagctacagatcacaaatgtgatggaggcaaaccagcgggttagtattgacaactggtgccggagggacaaaaagcaatgcaagagtcgctttgttacacctttcaagtgtctcgtgggtgaatttgtaagtgatgtcctgctagttccagaaaagtgccagtttttccacaaagagcggatggaggtgtgtgagaatcaccagcactggcacacggtagtcaaagaggcatgtctgactcagggaatgaccttatatagctacggcatgctgctcccatgtggggtagaccagttccatggcactgaatatgtgtgctgccctcagacaaagattattggatctgtgtcaaaagaagaggaagaggacgatgacgacgaagaggag

SEQ ID NO: 163966 - DNA, 1631 bp, Homo Sapiens
ctgtacattttcaaggaattcttgagaggttcttggagagattctgggagccaaacactccattgggatcctagctgttttagagaacaacttgtaatggagccttcatctcttgagctgccggctgacacagtgcagcgcattgcggctgaactcaaatgccacccaacggatgagagggtggctctccacctagatgaggaagataagctgaggcacttcagggagtgcttttatattcccaaaatacaggatctgcctccagttgatttatcattagtgaataaagatgaaaatgccatctatttcttgggaaattctcttggccttcaaccaaaaatggttaaaacatatcttgaagaagaactagataagtgggccaaaatagcagcctatggtcatgaagtggggaagcgtcctcggattacaggagatgagagtattgtaggccttatgaaggacattgtaggagccaatgagaaagaaatagccctaatgaatgctttgactgtaaatttacatcttctaatgttatcattttttaagcctacgccaaaacgatataaaattcttctagaagccaaagccttcccttctgatcattatgctattgagtcacaactacaacttcacggacttaacattgaagaaagtatgcggatgataaagccaagagagggggaagaaaccttaagaatagaggatatccttgaagtaattgagaaggaaggagactcaattgcagtgatcctgttcagtggggtgcatttttacactggacagcactttaatattcctgccatcacaaaagctggacaagcgaagggttgttatgttggctttgatctagcacatgcagttggaaatgttgaactctacttacatgactggggagttgattttgcctgctggtgttcctacaagtatttaaatgcaggagcaggaggaattgctggtgccttcattcatgaaaagcatgcccatacgaataaacctgcattagtgggatggtttggccatgaactcagcaccagatttaagatggataacaaactgcagttaatccctggggtctgtggattccgaatttcaaatcctcccatttggttggccggttccttggcatgctagtttagagatcttttaagcaagcgaccaataaaggcattgcggaaaaaatctgttttgctaactggctatctggaatacctgatcaagcataactatggcaaagataaagcagcaaccaagaaaccagttgtgaacataattactccgtctcatgtagaggagcgggggtgccagctaacaataacattttctgttcccaacgaagatgttttccaagaactagaaaaaagaggagtggtttgtgacaagcggaatccaaatggcattcgagtggctccagttcctctctataattctttccatgatgtttataaatttaccaatctgctcacttctatacttgactctgcagaaacaaaaaattagcagtgttttctagaacaacttaagcaaattatactgaaagctgctgtggttatttcagtattattcgatttttaattattgaaagtatgtcaccatctgaccacatgtaactaacaataaataatataccttac

SEQ ID NO: 163967 - DNA, 1472 bp, Homo Sapiens
aacacaggcatatcaaagtctagtcgaaagaaatacatagaaaaacaagatagaataatcaaaataatatgcaagggaagttctcaatgctatcagatactaaaatattgtctccttctagaaaaatataagactggaataacagattgtatttcctgcaatgctgtaattactgcaaatttatcagcaaagaggtaaacagcaatgcaatattaccttaagcttgaatacataagggaacaataaagaaacctgattagacctgaactaattaaaagtcacaccagtaattttcaggccagctctggtctccaggtagaattccaggacaggttagtatcactgggtccattcccaacaggctggataggagagtctggagtaattataaggataccaccttcttctatcctgggctgcccgactggcattgggcttcacattccaagaatacctcctgtgtgaatagtcctctccagggggaccaggaggagggagatggtgtctctggtaaacatgtggattctctgaaaattttctgactgattgttgcaaactttgggtctgggtgtggaaatgtcgaggagctgagtgaccctggatctgatgtagattatacctaggtccttgtttaacaggcttattgtggactggttgcatgagatgtgctgagtcttcaaaatcacttgacctgggtacactggaattccaattctttctgataggaccattctgaaggtcttcaatgtagttttgtctttctaagcaatgtccccggcacctattgaataattcaattgcatcatctggcctcacgccttctacatcaatcaaatatctgcaaatgaggtagccagtcctgtttaaaccatgggtacagtggacaccaataagtttatcattatctttattttctttcaaaaacccattaacagcgtgtttgaatttaaaaatagtctcatcatcaggcacttgatgtccaactgtaaaaatttttaagtaaggaacagtttctggcaaatcctctggtttataatagcgttgagtatatgttaaatcaataatcagtccaagttcttcattttgttctcggattttgttaaaaagatccaaaggggaaaagcattcttctggagcaagtttcttttcaaaactcttttgcaaaggaactttgaaagcaatgaaacgagtcccaggcatccgctgtccaactgggagatagtctttccacctttcggggatgtggtttccgcccttcttcttggctgaggagcgtcctgaaaagtcgcgtctccggccccagccactgcggggatgatgccactggctcatgtgggtcccaagaagccgcccacccaatgccaagccggccaaaagcgccagtccggcgccctcaatgccaggataagaccctaaacaggaaaagactcggcagccacctacgccgcgctccagcgtctcgctattgcccc

SEQ ID NO: 163968 - DNA, 1945 bp, Homo Sapiens
ctggttatgttaattccatgctgcaggaatacgcaaaaaatccatctgtcaactggaaacacaaagatgcagccatctacctagtgacatctttggcatcaaaagcccaaacacagaagcatggaattacacaagcaaatgaacttgtaaacctaactgagttctttgtgaatcacatcctccctgatttaaaatcagctaatgtgaatgaatttcctgtccttaaagctgacggtatcaaatatattatgatttttagaaatcaagtgccaaaagaacatctttaagtctcgattcctctcttgattaatcatcttcaagctgaaagtattgttgttcatacttacgcagctcatgctcttgaacggctctttactatgcgagggcctaacaatgccactctctttacagctgcagaaatcgcaccgtttgttgagattctgctaacaaaccttttcaaagctctcacacttcctggctcttcagaaaatgaatatattatgaaagctatcatgagaagtttttctctcctacaagaagccataatcccctacatccctactctcatcactcagcttacacagaagctattagctgttagtaagaacccaagcaaacctcactttaatcactacatgtttgaagcaatatgtttatccataagaataacttgcaaagctaaccctgctgctgttgtaaattttgaggaggctttgtttttggtgtttactgaaatcttacaaaatgatgtgcaagaatttattccatacgtctttcaagtgatgtctttgcttctggaaacacacaaaaatgacatcccgtcttcctatatggccttatttcctcatctccttcagccagtgctttgggaaagaacaggaaatattcctgctctagtgaggcttcttcaagcattcttagaacgcggttcaaacacaatagcaagtgctgcagctgacaaaattcctgggttactaggtgtctttcagaagctgattgcatccaaagcaaatgaccaccaaggtttttatcttctaaacagtataatagagcacatgcctcctgaatcagttgaccaatataggaaacaaatcttcattctgctattccagagacttcagaattccaaaacaaccaagtttatcaagagttttttagtctttattaatttgtattgcataaaatatggggcactagcactacaagaaatatttgatggtatacaaccaaaaatgtttggaatggttttggaaaaaattattattcctgaaattcagaaggtatctggaaatgtagagaaaaagatctgtgcggttggcataaccaaattactaacagaatgtcccccaatgatggacactgagtataccaaactgtggactccattattacagtctttgattggtctttttgagttacccgaagatgataccattcctgatgaggaacattttattgacatagaagatacaccaggatatcagactgccttctcacagttggcatttgctgggaaaaaagagcatgatcctgtaggtcaaatggtgaataaccccaaaattcacctggcacagtcacttcacaagttgtctaccgcctgtccaggaagggttccatcaatggtgagcaccagcctgaatgcagaagcgctccagtatctccaagggtaccttcaggcagccagtgtgacactgctttaaactgcatttttctaatgggctaaacccagatggtttcctaggaaatcacaggcttctgagcacagctgcattaaaacaaaggaagttttccttttgaacttgtcacgaattccatcttgtaaaggatattaaatgttgctttaacctgaaccttgagcaaattagttggtttgtgtgatcatacagttatgtgggtggcttctagtttgcacttcacagggacagtattaatagtcaggtgtatg

SEQ ID NO: 163969 - DNA, 208 bp, Homo Sapiens
taaaccattcaaatatccacaaaacactaaaagaacagatgtgagcaacttatttaagttctacatttagtagctgatggacacataaggctttcaagaagacactcttctcttcacaacatattaaataagtcctagcacaactgactgcttccaaaactaccacccaagcgtgccaccactcttgggtggatatttgaatggttta

SEQ ID NO: 163970 - DNA, 797 bp, Homo Sapiens
  misc_feature (97)..(143): n is a, c, g, or t
gggcccgtcaggacgtgcgaaaagcgacggcgcagcacggtgcggcgcagctcctgctcgcctttcccttcgctgggcgagaggtgtctatggggcnnnnnnnnnnnnnnnnnnnnnnnnnnnnnnnnnnnnnnnnnnnnnnnagtgctgtctctatggcgaggaggaggaggaggagcgcgagctcagcgacacaagtacataaataaaggataaaatattttatgaaacaaatcttcaatcaagtataacattttgatgcttggcatctagactcccttgtgccctcactatgccagcggcaactgtagatcatagccaaagaatttgtgaagtttgggcttgcaacttggatgaagagatgaagaaaattcgtcaagttatccgaaaatataattacgttgctatggacaccgagtttccaggtgtggttgcaagacccattggagaattcaggagcaatgctgactatcaataccaactattgcggtgtaatgtagacttgttaaagataattcagctaggactgacatttatgaatgagcaaggagaataccctcccagaaacttcaactttggcagttttaattttaaaatttaattttgaacggaggacatggtatgcccaggtactctatagaagctacttaacaaacatcctggtaatcccagttttaaaaaaacattgagggagggaagagaaattggaaaacccaggtaactttgccggaaactttcctttatggaccttcctggggagggggtcccttcttgtggaaaggggggtcaaaaaaggc

SEQ ID NO: 163971 - DNA, 178 bp, Homo Sapiens
agtttctgattctttaatgtgaagaaaatacttaggtttttacaaagaaagcttagtgccaaattcctaatctttataattttccccaattttttagttatatttctaccacatttcacagaaatatttatcaatctctcccatatgttctttagtttccttatgatactcatatcgt

SEQ ID NO: 163972 - DNA, 710 bp, Homo Sapiens
ctgtgtgaattctctggtgctgtgtcgagctgagccatcactgaaagctttcccacatttactgcattcatagggcttctctctcactggatttcttccatgaataacttccatggaatggttgaagccttttccacaggcatcactgtcaccagttctcttatctgcataacttttaggatagctgggtaaggcggggtcacaatccagaccactaacatttgagtcaggtgcatggaaaccatttgttgccagaactctctgagacggtggaaggtctgagcctgcaatcaaatgctccccaaaaccaggatattcacaaattgcttcctgagtccctggtttctccagagttaaagctgattgcctcaagtgtccctcctggttctcacagtcccaaccatcacctaaactggacaagcagggaacttcccttgtgaatctttccacttctacatcacagggtacttctctctcaggaaaattccgagtcgtcattttcaatctcatatcccaaactgcaaaaagaagaaaaatgcagacttaggtatatgaagctttatctgtaagagaaacagacaatgatgatgggctaggtgtaaagatgtgtattcttctttacttgttttctcttttaaattcaaatttatacaaggaagaggtaaaatcgtagccaaggaatgatccagacagattcaaaagagccatca

SEQ ID NO: 163973 - DNA, 548 bp, Homo Sapiens
cccaaaacagcagctatccaagtgttcggtccagtgaagtagacgtataccagacagggctatctgtagaactagagcattctggttgcaaataaaaaacatccatcctctgattaagattctgtggacttttagacaagtagcattcaaacattttcacaggacatcaggaaggattggctgtgttttcaatttgttcaaatactggctcatcatcttcatgttttctttttccagtagtaattttatcttcattatctgttccacacaaggaagacacttggtatcgaagacacgctttgttttccatcgttaaaggatttttttccaatgcctaaacacagtgccaaaggaaagtcttaagtgttgttccactgttttcaggccaaaatacttagtgttaaagtagaacagtgtattcagaagagctactggagagtgtgatcctagttgttttatcctccagagatagtcttcttcaactcgagagaatattgacccatctggaagtatgcttggatagctgctgtacggggatcctcaggcga

SEQ ID NO: 163974 - DNA, 788 bp, Homo Sapiens
gacccagagacacagtccagcatgcctgatgtaccatatgaaccagatttggatatcgaaatagattttcccagagctgctgaggagcttgatatggaaaatgaatttttattaccacctgtttttggcgaagaatatgaggaacagcccagacctcgatctaaaaaaaagggagccaagagaaaggctgtatcaggataccagtctcatgatgatagtactgacaattcagaatgcagctttcctttcaaatatacgtatggcgtaaatgcatggaaacactgggtcaaaactaggcaacttgatgaagatcttctggtattagatgagttaaaatcttctaaatcagtaaagttaaaagaggatctactctctcacaccacagctgagcttaactatgggttagctcacttttgtcaatgagatccgacggccaaatggagagaattatgcacctgacagcatctattacctttgccttggaatacaggagtatttgtgtggaagtaatcgaaaagacaacatatttattgatcctggataccaaacatttgagcaagaattgaataaaatactgcgaagctggcaaccaagcatacttccagatgggtcaatattctctcgagttgaagaagactatctctggaggataaaacaactaggatcacactctccagtagctcttctgaatacactgttctactttaacactaagtattttggcctgaaaacagtggaacaacacttaagactttcctttggcactgtgtttagcattggaccgaaaa

SEQ ID NO: 163975 - DNA, 1439 bp, Homo Sapiens
  misc_feature (996)..(1006): n is a, c, g, or t
acctgctgcagatccagaggaatgtcactctcttccccgaggaggtgatcgccaccatcttttcctccgcctggtgggtccctccctgctgcgggacagcagctgctgttgttggcctactgtacccctgtatcgacagtcacctcggagaaccccacaaatttaagagagaatgggccagtgtcatgcgctgcatagcagtttttgttggcattaaccacgccagtgctaaattggattttgccaataatgtccagctgtccttgactttagcagccctatctttgggcctttggtggacatttgatcgttccagaagtggccttgggctggggatcaccatagcttttctagctacgctgatcacgcagtttctcgtgtataatggtgtctatcagtatacatccccagatttcctctatattcgttcttggctcccttgtatatttttctcaggaggcgtcacggtggggaacataggacgacagttagctatgggtgttcctgaaaagccccatagtgattgagtcttcaaaaccaccgattctgagagcaaggaagattttggaagaaaatctgactgtggattatgacaaagattatctttgttcttaagtaatctatttagatcgggctgactgtacaaatgactcctggaaaaaactcttaacctagtctagaatagggaggtggagaatgatgacttaccctgaagtcttcccttgactgcccgcactggcgcctgtctgtgccctggagcattctgcccaggctacgtgggttcaggcaggtggcagcttcccaagtattcgatttcattcatgtgattaaaacaagttgccatatttcaaagccttgaactaagactcaattaccaacccgcagttttgtgtcagtgcccaaaggaggtaggttgatggtgcttaacaaacatgaagtatggtgtaataggaataatatttatccaaaagatttttaaaaatagggctgtgtttnnnnnnnnnnncaaaacaagaaaagcagcagtgattatagagaggtcacactctaagtggggtcgcggcgtggccacgcttcacggtcacgctcgtccgtcctgcagtggcgtgtttacatggtcacacgtgtgtgtatcaccagggggtcaacggcttgtcattcctcccggggccagttcgtgtagacaatcttactgagcaaaaggcaatgaaaagtctgggtacccacacggcgatatatgggaattttcacctcagtttatgaagtctatttcggaaatccatagtcatctaagaatgaataccggtctgccatgtatctcaatcttagtgagccaaaattgtccgtccgtcactaacacaatagagatgactgtctctcgccacagccctatggaatctgcaatctgtgattgccttgtaaaaaggagagtgatatgg

SEQ ID NO: 163976 - DNA, 1180 bp, Homo Sapiens
ggggcgccggtggcgggactctggggaaaatggctgcgtcttcgagtggtgagaaggagaaggagcggctgggaggcggtttgggagtggcgggtggtaacagcacacgagagcggctgctgtctgcgcttgaggacttggaggtcctgtctagggaacttatagaaatgctggcaatttcaagaaaccaaaagttgttacaggctggagaggaaaaccaggtcctggagttgttaattcaccgagatggggaatttcaagaactaatgaaattggcacttaatcagggaaaaattcatcatgaaatgcaagttttagaaaaagaagtagagaagagagacagtgatattcagcagctacaaaaacagctaaaggaagcagaacaaatactggcaacagctgtttaccaagcgaaggagaaactcaagtcaatagaaaaagcaagaaaaggtgctatctcctctgaagaaataattaagtatgcacataggatcagtgcaagtaatgctgtatgtgctccactgacctgggttccaggggacccccggagaccctacccaactgatttagagatgagaagtgggttactgggtcagatgaacaatccttccactaatggcgtgaatggccatttaccaggagatgcacttgcagcaggaagattgccagatgtccttgctccacagtatccatggcagtcaaatgacatgtcgatgaatatgttaccaccaaatcatagtagtgactttttgttggaacctcctgggcataataaagaaaatgaagatgatgtagagattatgtcaacggactcctcaagcagtagtagtgagtctgattgaaaaaccttaaaagacaatatacagaattgaatactgtagaattctgtttctttaacagtagcagggaaatgtaaactacaggtgacaaaaaatacccaggtaaacactggctttggtagaattgtgcagtcattaaaagtcaaaattttttgactttctttttaaagccaaagaccatagttttagttttaagccactaggtagatatttaggggaatagtcaaaatttactgttgaaaaagcagttgctatgtgctttcttaccctgttctgttccagttttgctggatttgtacatagccattctagaaatagagttgagtaatccgtgaggggta

SEQ ID NO: 163977 - DNA, 163 bp, Homo Sapiens
tccacctcaaaaaataaaatcaagataacctcttgaatgtaatagctcatagcactttaatttggcaagccatttttcctgttttattataaatctatattagatgtttgaatatggtttgaaatatttcactaccgtgctgaaaaaggttggttgatagcag

SEQ ID NO: 163978 - DNA, 359 bp, Homo Sapiens
  misc_feature (169)..(228): n is a, c, g, or t
aagcactcccaagctggctatcaacccaccctttttccagcacgggtagtgaaatatttcaaacccatattcaaacatcctaatatagatttataataaaacaggaaaaatggcttgccaaattaaagtgctatgagctattacattcaagaggttatcttgattttannnnnnnnnnnnnnnnnnnnnnnnnnnnnnnnnnnnnnnnnnnnnnnnnnnnnnnnnnnnctgggtgacagagcaagactccatcacaaaaataaataaataaacaaacaaacaaacacagcactaattggatactgtaattcagtataataagctagtaactcatatcttgcaaataatctccagtttaa

SEQ ID NO: 163979 - DNA, 772 bp, Homo Sapiens
  misc_feature (540)..(562): n is a, c, g, or t
cagaggatcccccaagtactcgagactcctatagttctgttgtgatgctttcttcaacatttatattatttcttaccattttatcatcactccaagcttgctaaacaaagaatctctctgttaagtgaagttttacattaaggaaatactccactagcacactgaacaaacctacagaactgtcctagtttatatttacaaaacacaagaagtctgtccagccattttggttttgttgttacactgtccatactgagatcagcagagagctaagtaatacacaagattacgcttcggcagtgcaaaggatggcatcaaccaaacttcattaaacagaccaacaagtacaaacatggtgagcaaagttcaactcaggtaatagtgattaaaaacaaaacatgtagtgggtcacaaccagactggttttcactgtgcaactttcctcagggaataatacccattcacagaaagaaaggaatatgcatccaagcctttgttcataaagaaaatgcccttcaaacaaattcatcataaggcttnnnnnnnnnnnnnnnnnnnnnnnggatgaagcagtttggcccagagaaaagcttaaatataatgtgtatacatacttatagatatgttgccatttaaaccatggatatagacatttgacaattaaatgaattggctcagtaaagtgaaaaagtgttttctataaatatgtagttattgctgatatgctacacattatgcttgacatggagtctcgagtactggggatcctcta

SEQ ID NO: 163980 - DNA, 685 bp, Homo Sapiens
gggcatttcgtcttagccacgcagaagtcgcgtgtctagtttgtttcgacgccggaccgcgtaagagacgatgatgttgggcacggaaggtggagagggattcgtggtgaaggtccggggcttgccctggtcttgctcggccgatgaagtgcagaggtttttttctgactgcaaaattcaaaatggggctcaaggtattcgtttcatctacaccagagaaggcagaccaagtggcgaggcttttgttgaacttgaatcagaagatgaagtcaaattggccctgaaaaaagacagagaaactatgggacacagatatgttgaagtattcaagtcaaacaacgttgaaatggattgggtgttgaagcatactggtccaaatagtcctgacacggccaatgatggctttgtacggcttagaggacttccctttggatgtagcaaggaagaaattgttcagttcttctcagggttggaaatcgtgccaaatgggataacattgccggtggacttccaggggaggagtacgggggaggccttcgtgcaggttggcttcacaggagatagctgagaaggccttaaagaaacacaaggaaaagaatagggcacagggtacatttgagattcttcaaggagtagcccgaggctggaagttcgaaaccccactatggatccccccctcgaaagc

SEQ ID NO: 163981 - DNA, 741 bp, Homo Sapiens
tgctacttgacgttttaaagacccaaaacttgcagtagtaaaaatacatactgaaaatatttaaaaacttaaatttcactgagcaaaagtaggtaacagaggagacacagattcagtgcaggattttatatacaataaaacctaaaactaaactccaccaaaatgaaattgtaatagtcaatgcctggctagaaatctccctttgcacagtgaaaaggtcacattacaagaataaaataatagcaagaatgcagtctacacactttagatgttcaggaaaacaacagtttccaagcaccacatgaacacttaattaactggagataatgttaaagcaaggtctctacaattttccattaggttgtgcttcaaatagtctataataaggacttgaattaattacattttattgcactataaattggctgttgtcattatacccaaatgtaacaaataaggcagactttaatttctctgtagacctccttggatagaagataagtaatataaaaatatgtaaaaattgaaaaatttgtgtacttgttcatagagtctctctgtaaatgtgcatttgaccaaagagattccatccaaataatgagagaaaaacccccacaaatagcatcttctgctttaaaaaattcttggtttgtaattttttttaaaagtcataaagccactggctttcagagacttattagaacacactcatctcttcatgcatgctcctgcttatctcct

SEQ ID NO: 163982 - DNA, 411 bp, Homo Sapiens
cttgcttccaaggctgactagcaagagagagtataaatgcccagtcttcttgccacgtgttcttctctcaaggaaaaatgtaaaccaaagctctgagaataccatgattcccaatctttccagcgtgtgtaaaaccaatgtgaacagtcatccaggctgtcatgcagggctttccgaagcactgagtccttggaatagctgaactacacagttattccaagcaccacatgaacacttaattaactggagataatgttaaagcaaggtctctacaattttccattaggttgtgcttcaaatagtctataataaggacttgaattaattacattttattgcactataaattggctgtagtcattaaacccaagtgtaacaaagaaggcagagtttaagttcactggagacctc

SEQ ID NO: 163983 - DNA, 872 bp, Homo Sapiens
attcgctacacacattgggaacaacacttgctgtgcaggctgttccaacagcacactctattgtacaagccacaaggacttctttacccacagtgggcccatcagagactctatatgtccatcaagctaatcgaggtcctatacatgatgaaaattccaatttctgcatttagtacttcgtctgctgcagaacagaacagcaataccaccccaagaattgaaaaccagacaaacaaaacaatagatgcttctgtcagtaagaaagcagctgatagcacatcacagggtggaaaagccactggcagtcattcaagatggagtcattgatctcacaatggatgatgaagagagtggagcttcacaagaccccaaaaaactaaatcacactcctgtatcaaccatgagttcttctcagcctgtgtcacgaccattgcaacccatacaaccagcaccgcctcttcaaccatctggggtgccaacaagtggaccgtctcagaccaccatacacttactacctacagctccaactaccgtgaatgtaacacatcgtccagtaactcaggtgaccacaagactccctgtaccaagagctcctgcaaaccaccaggtggtttatacaactcttcctgcaccaccagctcaggctcccttgcgaggaactgttatgcaggctcctgctgttcggcaggtcaatccccaaaatagtgttacagttcgagtgcctcaaacaaccacatatgttgtaaacaatggactaaccctgggatcaacaggacctcagctcacagtgcatcaccgaccaccacaagtgcatactgagcccccaacgccccgtgcacccagtcttgaacattctactaattttaaaagac

SEQ ID NO: 163984 - DNA, 457 bp, Homo Sapiens
gggaaggcacgatccgatctcggtcgttcatctttaaatagatctttcttgccaaggaatgctctggcccaggagcaaggtggaatgtttccctgacgctgtgatctgcagcaggcttcaaatgaaaaccgactaaggattttctttcaaaaacaaatcagaagcagatgctgattgggacccatataccacgttgctgactcacgttgctgcccttccatgatgttgccatctcctcgaaaacactgaagcaatcaccattctgatagaaagtgcttaaaccaccactcataggtctgctcactcttagaacacacaatggaagaggaagggtttttgttttcactcattgtggtccccaagcctattgacactagttgcctagagtcccactgtgagtcatggtcagcctgtctgacatctaggttgtgctattaaccaagaaggaaacagatag

SEQ ID NO: 163985 - DNA, 469 bp, Homo Sapiens
agaatatacaggaaagaagcattgtatataagcctatgtatttcagtaatgctgctacagggggatacaaaatcaggtgccagctggagggatagattaagacacattagtggaaatctagtcactgccaaaggagaaatatatttaggatatacaataaataattcaaatgcttaaaataattgaatgaacggaagagtagacttgaccaaatttacattcgttgttcaggaagagattcccagtatgctgaggggttcgtggtaagctattcctctgacgagacacagcagcgctgggcctactgcacagccgttcattacaatattgttacaagtacaatcagacatgcatttataaagagaatataaaaatatgtacaatagctcattttcaatgtgtgtaagttgccgaaagacaccaatgaaagtgtgcaaaattcatttgtcaaaaatcagaaaaagccttc

SEQ ID NO: 163986 - DNA, 758 bp, Homo Sapiens
gagatgaaaggctgcagaaatgtttattgaatacagtgccaggtttataaataaaacgtatttacaatttccatagagttggtcccccatcagagaggtggttaaatctccaaacagtttatctcaagatttacagaaacgtccaagtacatctccttttcaaatagccatggtgaagggcaacttcagtaacaaaagaactaccaccatctttgctacagaagtgtttaataaacatcataatagatttggagaaagaacacacactccacccatgccactaccttcttactccaagggatacagacagcaaagaatttctgtctcctacaggacaacttcaggggattaaaaaaacagtaactgccagctggagggatagattaagacacattagtggaaatctagtcactgccaaaggagaaatatatttaggatatacaataaataattcaaatgcttaaaataattgaatgaacggaagagtagacttgaccaaatttacattcgttgttcaggaagagattcccagtatgctgaggggttcgtggtaagctattcctctgacgagacacagcagcgctgggcctactgcacagccgttcattacaatattgttacaagtacaatcagacatgcatttataaagagaatataaaaatatgtacaatagctcattttcaatgtgtgtaagtcgccgaaagacaccaatgaaagtgtgcaaaaattcatttgtcaaaaaatcagaaaaagccttc

SEQ ID NO: 163987 - DNA, 983 bp, Homo Sapiens
  misc_feature (605)..(606): n is a, c, g, or t
  misc_feature (608)..(608): n is a, c, g, or t
  misc_feature (611)..(670): n is a, c, g, or t
ccctactgctgctacactagaccctgagactgacctgcaggacgaaaccatgaagagcctgatccttcttgccatcctggccgccttagcggtagtaactttgtgttatgaatcacatgaaagcatggaatcttatgaacttaatcccttcattaacaggagaaatgcaaataccttcatatcccctcagcagagatggagagctaaagtccaagagaggatccgagaacgctctaagcctgtccacgagctcaatagggaagcctgtgatgactacagactttgcgaacgctacgccatggtttatggatacaatgctgcctataatcgctacttcaggaagcgccgaggggccaaatgagactgagggaagaaaaaaaatctctttttttctggaggctggcacctgattttgtatccccctgtagcagcattactgaaatacataggcttatatacaatgcttctttcctgtatattctcttgtctggctgcacccctttttcccgcccccagattgataagtaatgaaagtgcactgcagtgagggtcaaaggagagtcaacatatgtgattgttccataataaacttctggtgtgctccnncnaannnnnnnnnnnnnnnnnnnnnnnnnnnnnnnnnnnnnnnnnnnnnnnnnnnnnnnnnnnngggtttttttgcccggcgcggaaaaaaagaggacccaaattgggccctggcccatgtctgttcccttgactcaccctttttttgaacaaagtgggaaaaactggcccggccctcccataaaggggggccgtattataattctcaaaaaaccgccgggttaaccctgcctttaaatgacattcgggtttggcgaaaaccggggaatttttcccccctctctagaggaggggggccttttttttgtgggaaacgaaagagagttcctcttttagagaacgcccttcctcttttctggcggagaaaatcccgccct

SEQ ID NO: 163988 - DNA, 1018 bp, Homo Sapiens
  misc_feature (649)..(653): n is a, c, g, or t
  misc_feature (655)..(663): n is a, c, g, or t
  misc_feature (665)..(667): n is a, c, g, or t
  misc_feature (670)..(671): n is a, c, g, or t
gggacagccttccactaacatcccataggagcctctctccctactgctgctacacaagaccctgagactgacctgcaggacgaaaccatgaagagcctgatccttcttgccatcctggccgccttagcggtagtaactttgtgttatgaatcacatgaaagcatggaatcttatgaacttaatcccttcattaacaggagaaatgcaaataccttcatatcccctcagcagagatggagagctaaagtccaagagaggatccgagaacgctctaagcctgtccacgagctcaatagggaagcctgtgatgactacagactttgcgaacgctacgccatggtttatggatacaatgctgcctataatcgctacttcaggaagcgccgagggaccaaatgagactgagggaagaaaaaaaatctctttttttctggaggctggcacctgattttgtatccccctgtagcagcattactgaaatacataggcttatatacaatgcttctttcctgtatattctcttgtctggctgcacccctttttcccgcccccagattgataagtaatgaaagtgcactgcagtgagggtcaaaggagagtcaacatatgtgattgttccataataaacttctggtgtgatactttcaannnnncnnnnnnnnnannnaannaaaaaattgtccggccgccctccgcccctcgaagaaggctttcctaaaaccatttcgttttgggcgccgcggggcccagttagggtaaagtgaaacatgggtcaatagcctgttttccctaagggaaatccctgggccaatgaactaagggccttgggatttcctcccccaaattaaaaaaaccgcccccgggcggccaaacccggaggcgtgttcttgaaaccaaaattcccaaaatgggaagtttcttggaagggtccaatataactggggaatcctaattcaaaacagggggaagtccccaaaggccgaaaggccttccgaataattcaaaaaatttaaagggg

SEQ ID NO: 163989 - DNA, 727 bp, Homo Sapiens
ctcactacagcagctatccaggatatacatctagagactaaaagtaaatgctctatagtgaagaagtaataattaaaaaatgctactaatatagaaaatttataatcagaaaaataaatattcagggagctcaccagaagaataaagtgctctgccagttattaaaggattactgctggtgaattaaatatggcattccccaagggaaatagagagattcttctggattatgttcaatatttatttcacaggattaactgttttaggaacagatataaagcttcgccacggaagagatggacaaagcacaaagacaacatgataccttaggaagcaacactaccctttcaggcataaaatttggagaaatgcaacattatgcttcatgaataatatgtagaaagaaggtctgatgaaaatgacatccttaatgtaagataactttataagaaatctgggtcaaataaaattctttgaagaaaacatccaaatgtcattgacttatcaaatactatcttggcatataacctatgaaggcaaaactaaacaaacaaaaagctcacaccaaacaaaaccatcaacttattttgtattctataacatacgagactgtaaagatgtgacagtgtacattatatgacaatgcacattagccagcaagtcttttataggtggtttcagcagcaacgataaataatgcagatattcagcttcagcactttatttc

SEQ ID NO: 163990 - DNA, 589 bp, Homo Sapiens
gcagctatccaagggcactaggagggtcacaggcaaaatccccagactcagtcggaaaccggtgacccgttttttagcagcttctgaatatccccagaagtataggtgacggccatatatgtacaccagacccagacaagtagcaaaaactgggttgaaataccacccagccatccacaatgtaattatgaatataggataaaactccacacagttttgtagtgcccgaaatactctctcaaactctggtgacccagtgactgctgggggcgtaacttggtattttaatcttgcctttccaactggcaaagcaaaataacttggctgacaggccgagagaatagagacagcagccagcaggatcgagttcccggccatctttctcacggaactatttgtagagcgcacgggaagataaatggcgcttcttgactttgaatgctgaccttccttatcgggtaaacaaagttggggaccgggtggggggaaaaggctgattcaagcggctgaatgacctttgctctggaacagaagtcaggatgccaggcaggtctggggctgccgtcacagatctttatggggcgtactc

SEQ ID NO: 163991 - DNA, 483 bp, Homo Sapiens
  misc_feature (456)..(456): n is a, c, g, or t
gtacgaaatcctgcccagctgctcaggaatcgtgctggagcgaaccacggtcccggggattttcgagtcccttcgaatcacccagctgtacacgatcttgcccatgtccaggttcacacgcaaactaatggggatgatgttggaaaacaagaggaggaagcggatgatctgcaggtaccaacggcctgcaaagtgctgaagggcaaccatgaccagcgagaccaccaccagggcaccaaagaggatcttggtgaggcagttcacttccaagtcgaacaggccgatcttacttcggggatttgaggtattcatgacactccggagttctctgccagtgtaaagaacaacacccacaacagtacctgatgcgaccacagtgccagcccacagcgtgttctctatgctcaggctctcgctgatcggggggtcgctgtcttctcgggtaaaagttcccancgaagttgtgaatgtcaatatttggct

SEQ ID NO: 163992 - DNA, 658 bp, Homo Sapiens
  misc_feature (97)..(97): n is a, c, g, or t
acatccagtatacagttattgtaaatagccagacccagtactatgcccatcagagtaaactgaccctcagtttccaaagaagatggattaaaccaanaccattttgtagattcatcgtatgtgaacataccgatatctggattgaagatttcctccacaaccagctgaaaaaattctttggaaacacctccctcatcaactccttgttctccttcaaattccacatacaactgcttcttcaagtctgcaagattttccatagcgatcatctctagccggacaagtgcatcatctatgatatggtcacgtctaactttgagtctcaaatatggattcaactgctgtccttgaactaagctgtagagaacagtgattcttcgttcactgtacatgcgaattctattgtcataatataatcccaaattctttgtgacagcattcaatataaagggacatgtcataaaagagaatttgttctctgtttctactttgaaaaaagtataatctttatccatttctagaacctcattcagtggttcattaataaactcttcaaaagggataagtggttttcgacaatccagggttttaacaccaagttcagtttccagggggtccactcgagacctttcttgtttcttcttcttctcccaaaagt

SEQ ID NO: 163993 - DNA, 818 bp, Homo Sapiens
  misc_feature (101)..(101): n is a, c, g, or t
  misc_feature (106)..(106): n is a, c, g, or t
  misc_feature (108)..(108): n is a, c, g, or t
ttaaaattaatctctattttagtgggcccatgtttagtctttcaccatcctttaaactgctgtgaatttttttgtcatgacttgaaagcaaggatagaganacacncnagagatatgtggggtttttttaccattccagagcttgtgagcataatcatatttgctttatatttatagtcatgaactcctaagttggcagctacaaccaagaaccaaaaaatggtgcgttctgcttcttgtaattcatctctgctaataaattataagaagcaaggaaaattagggaaaatattttatttggatggtttctataaacaagggactataattcttgtacattatttttcatctttgctgtttctttgagcagtctaatgtgccacacaattatctaaggtatttgttttctataagaattgttttaaaagtattcttgttaccagagtagttgtattatatttcaaaacgtaagatgatttttaaaagcctgagtactgacctaagatggaattgtatgaactctgctctggagggaggggaggatgtccgtggaagttgtaagacttttatttttttgtgccatcaaatataggtaaaaataattgtgcaattctgctgtttaaacaggaactattggcctccttggccctaaatggaagggccgatattttaagttgattattttattgtaaattaatccaacctagttctttttaatttggttgaatgttttttcttgttaaatgatgtttaaaaaataaaaactggaagttcttggcttgatttaaaaaaaagagagattctggttgagctactcc

SEQ ID NO: 163994 - DNA, 652 bp, Homo Sapiens
ccgaagcgtatagtatgtataatgctatgatgcaccgtaaatagccaccgtacccagccggggcaagatagcgagacctctctcttaagaaataaaacctcaaatttcctatgttaaaacatagaattatgtaataattttaaacatttaaaagatcaaattcttaatattctgccacctgctatttttatcaacacatatttagaaatctttcattggtgtatatacagctacctcacttcttttgccagctgtatagcattccactgtacaaatatattacgattcatttaaccagtccttctataaagaatgcttttactaactcatgcaacatataattacactgagtgcctattagagcaggtcccgttctgggcattagagatacacaagtgaacaaagcaaagtccttgacctgatggagcttacattccagtggggggaagtcagacaaaagtccatcatagtacgtcagctggtgtagactaaggagaaaaacaacgcagggcctaggagctcagtaacaggtgggatgggtggggagaagttgctattttatagtgtggccagggtaggcctctctaatagggtaaatataagcagaaaccagagggaactgagagagcaggcatgtgatattgggtgagaa

SEQ ID NO: 163995 - DNA, 765 bp, Homo Sapiens
cagaggatcccacgtacagcagctatccaagggaaacacacagattataatcgtgttattcaacagtcattttttcaataggatggtatcatctgtcttctggagtgttgccaaaataggaggcaaagagctagaatgaataacccttatcaaatccaggatgatgaaacgaagttagctctgaagaggaagactgtgttccaaagatacagcctaagctcaacatgcaaggcagccgttcatgaagctgaggctcacagcccctttttctgcagagtggccaagaggcggctccttccagcaaggcactgtgcttcaggtggagagcccctgggtcctaggagaggtgctgggaccacaggtgcctgctaatggtccaggtctttggagtggctgctgtagttgcttggaatagctgggaaggaacaggattctatgaaggagacagtatagccagaggaggcagggtgggcaaaaaatagaaggtgatatctgtgaagccaaaggaaggatgaatgtcaaggaggaagtcatcagtgattttgaaggatgcagaaaggtcagggtagatagatggagaacagaaaagtgccttttggatgtagccaccaagaaatggttagtaaccttggagagaacagttggtacgagttagagcagcagcagatgcggagtgagagaaatggacctgataggggagcctgaatagcgtgtgaaggaacggacgtcgagtaggctggaactaccgtttcaggaccgggctaa

SEQ ID NO: 163996 - DNA, 589 bp, Homo Sapiens
aattctgtgttgttttatcacatgcaaatttgtgtaactactacctcttcaagtaaaatgcagaactgctcccccaccaaacagatctctctggtgagacctctgtgtagccatacccactctctccccatccacaactaatgtgtctccatcgctatcattttgaggaggctgagttttaaatccacttccgaccccctcagcagtgtgaccttggataagtcatttgtccttttctggatgttgatcttctcagctaaagtaagacaaggttggctcacatcaacattcctcttgaatttccacaggctgatatgatctgaaaatgctacagagattatgagaaagaaaatggggttttatggtgaaataaactagggaaatgatgctttccataaatacataatgcttctttaccgtgaattctcagccctttaatacactaaggtgaactgtgaatcttctagtgtgggaggtatacgcagcattttccaaatttatctgaacacacgaatgctccccccacccttaaaaaaatcctctagaaaaaaaatcacttggaatagctgcctgatagctgctgtagttg

SEQ ID NO: 163997 - DNA, 121 bp, Homo Sapiens
acaacaaaaatactaacacatcttaatatcatgaaaattaagtagattttaaaatcacagcacataattgtatgtgtgttacattattttaacatgcattttatggtaataatcaccagtt

SEQ ID NO: 163998 - DNA, 721 bp, Homo Sapiens
gaggacctcacacagcagctatccaagatccagatgctgtcatgttggtgtatggttagggaacacgtcctagttcatgaatgctttttctctgtgccctcacttggcagaaggggtgaaggagatctggggtctgttgtataagagcactaagcactaatcccattcattagggcttcgctctcatgaccaactacctgtaaaaatcccccctcctaataccgtcacatctgtgattggctttcagcatataaatttgggggaagacaaacattcagaccacagcagatgtttattatttcctttcctctgcttgcttggggtttaagtcactcttcttttatctagttgcttaaggtagaagtcaaagtcattgatttaagactcttctaatgtagacattcagcagtgctaaaaattggtattcaagtacagctgtagctgcattccacaaattctggttgatgaatttttattcagttcagaatattttctattttctatttctattttcattacctgttggacccagggttatttagatgtgtgttacttagtttccaaatatttgtgtatttcccagagttattttggttatcggtctttaatctgattgatttgtggtcagggcacatacttggtatgacttaaatccctctgactcaatcattaattgagagttgtgtatgggctaaatatgtctatttggtagtgtccgggg

SEQ ID NO: 163999 - DNA, 533 bp, Homo Sapiens
gcgctctcgaggatttcaactacagcagcatccaaggaacgagtgcaccaggagatttctctcagctccaggcatcacctgctccctcgagaggctacactttgtacctcaggcagtcctgtgggagaaaatgacccaggagctgatattcattaggcactctagcagacatagtcatggtgggtatcatggtttattcccagacagtactgaaacccaggaccaggaaaaatctgaagggtagccgaggacacatcaccccataaagtttccaaggggaaactgtgaccccccaaaattctgataagatctctgtgcctatggaagataaaaggaaaagaggcgcagagattttttacaatagtgtccagggattactctttgctttcttcttactgaaaatttttacaaacggaaaacaaatcttttaaaaagtaccatccaatgatttctcaaaaaatgattaattaaaatatagtatcaaaaatgtacactagggccgggcgcggtggctgacgcctgtaatcccaaca

SEQ ID NO: 164000 - DNA, 756 bp, Homo Sapiens
gaagtgaaggaccccgacggcaaggtggtgctgtcccggcagtacggctcggaggcccgcttcacgttcacctcccacacgcccggtgaccatcaaatctgtctgcactccaattctaccaggatggctctcttcgctggtggcaaactgcgtgtgcatctcgacatccaggttggggagcatgccaacaactaccctgagattgctgcaaaagataagctgacggagctacagctccgcgcccgccagttgcttgatcaggtggaacagattcagaaggagcaggattaccaaaggtatcgtgaagagcgcttccgactgacgagcgagagcaccaaccagagggtcctatggtggtccattgctcagactgtcatcctcatcctcactggcatctggcagatgcgtcacctcaagagcttctttgaggccaagaagctggtgtagtgtcctctttgtatgacccttcctttttacctcatttatttggtactttccccacacagtcctttatccacctggatttttagggaaaaaaatgaaaaagaataagtcacattggttccatggccacaaaccattcagatcagccacttgctgaccctggttcttaaggacacatgacattagtccaatctttcaaaatcttgtcttagggcttgtgaggaatcagaactaacccaggactcagtcctgcttcttttgcctcgagtgattttcctctgtttttcactaaataagcaaatgaaaactctc

SEQ ID NO: 164001 - DNA, 1394 bp, Homo Sapiens
ccccttttctccttttatgggcccccttggggaaccccccaagggaaaacccccgggaaaataaaagaaatttgttttgggaggtttttttggcacgccccttttgtggcccccccatttaataggggggcccccaaaggggaaccccagggctgggggctttaagagtgggttaaggatgttggggggtaagcctccccaagcccgaaatccctttcggggaaaaattattttgcctttaggagttggggttttcaaaaggagggcggattttcccccctaggagaaatcgggccaacgaatagagacatttttgggtgtcataactagagtgggccaggggtgctgctaaatatcctgtaatgcacaaaataggaaacaggttttccttacaaagaacacttcagcccaaaatgtcaaaggcatctcggttgtgaaaccttgttctagagcctctccctgctcccgtgctgtgaggatcttaagactcctaaactcacagatgattgttttcaacctatttatctcaccatcctcaatgatcagaagtccaccttgagatggacttactcctagttctgccgcattctgggtttctttccagacccctcttcctcctctcacctgggccagcagggaggttggcagagggcaggaaagatgccccaaaacttaaatggaatgtcatcaggtgaagagctacctcttaccttaactcttattcggtgggaaacaaggttcctaatagggatagagttaagggcggaggaacagcaggatgaggataattaagagaacctgaattaaatttttaatattttaaaaaaggaaagttgctgggaagctggtaaacagaaacagaagattagaggcctaactagaaagagacactggtgttagcagagagatattgaggggctgtaagcctaaggtttgaaatctaaagatagagtggaaaagggagtaggcacccccaccagcccctgcttgacatctgctttagttcattccagcaggaaggaggagaagggcagggaggtagggagcttctcagcataagccagcttcagctttgataatctcacccacctaccccatttaaggagttccaggtttaagagtttaaaaacaaggtggcacccagaccatcattcaggagacagaaactcattccaggttcctagagaactcctatctcagacctgagggtttccagggcttcagctgagctcctctggctaaccagtagtcacttgatcagtcctgctgccttgaccccatctccaggaggggctatggccagagggagtagagggagtccagcccccaagccttgtgaggcactgttaggcagatagtgaaaagaggggtctcttagatcactgtttacggca

SEQ ID NO: 164002 - DNA, 475 bp, Homo Sapiens
  misc_feature (180)..(180): n is a, c, g, or t
  misc_feature (337)..(337): n is a, c, g, or t
  misc_feature (343)..(343): n is a, c, g, or t
  misc_feature (360)..(360): n is a, c, g, or t
  misc_feature (373)..(373): n is a, c, g, or t
  misc_feature (407)..(407): n is a, c, g, or t
  misc_feature (461)..(461): n is a, c, g, or t
ataggccatggagcaattctaggggcttatagctccaataatggaatgggtctgccatcttgaaacccccattctgtttccagcccagaagaaatgctgcccctaccagatccctccttgaaccagtgatctaaggacccctcttttccctatctgcctaacagtgcctcacaaggcttnggggctggactccctctactccctctggccatagcccctcctggagatggggtcaaggcagcaggactgatcaagtgactactggttagccagaggagctcagctgaagccctgggaaaccctcaggtctgagatagggagttctctagggaacctnggaatnaagttcctgtcttcctnaatgatgggtctngggtgccacctgttttttaaactttttaaacctngggaacttcctttaaattgggggttagggttgggtgaagatttattcaaaaggntgaagcttggcttt

SEQ ID NO: 164003 - DNA, 596 bp, Homo Sapiens
ggtccagatacgcaggagaggagaaagaaacaaagggggagaaagagactgattataggagagatcaagaaataagagaaggaaggtgacttgcttgcccaactttggctctgtggtcctatgagccaaaatgcatacttagtgacatgtatcccacaggaaaagggaaaaaaggggtaagctgagagaggtcaagccatggtgttaaggtctttcctgtacaaagacagtctcttgaggacaaaggcctgcctcttgcaatgtaatatcatagtccagatgagataatttccttcgaggaaagttggtgagaagttcaaaacgttcatttgggtatcctttagactgcacgtgcttcaccaaagctagcagtttagcttgctctggaagagtgatctgttccctttttccatctggataccgcaacatcagctgtgcttttggtccatttacatctatcccctccactactccatctgctttttcaggtggcatctccagtatctctgaatccacagctggcaatccttggtggtttgtggctgttccaggatcagttctgactggtggctcagtcagcgtcctgcttatctcct

SEQ ID NO: 164004 - DNA, 711 bp, Homo Sapiens
aggagataagcaggactattggcatttagaagactttaccattatttcagtgctaggcattattgattaggtcttggctccactgtttacctcttgctatgtattttctcccggtaaaaatgaattgaaccatttcaactattttctatatttggagaaagtgtgtgccctgtgttttataattttcttacccataagacatcacattatccctttgtaagctacttatctccaaaaaacttcagaaatagaaaactacatttgggcaggaataattgaaaacaccagaaggttgaagtttaattggaaacccagaatatacatacttggctgttttcttccctcaaatattttactatttgttttatttggagttaaaataagagtatcatccatatggtccatcctaattcacagaattaaatgagcttaaatagaaaattcagtattttatgataatcacttcgtttttagtttttaaaatttagattattctataatttaccgtgtttgagtattttctcatttttttcataaccatacctgattatactgtgtaacaaatattttctatggcagttttctttccagtacttattagaactcagtatttggaaataatttcagcttaattgaccataagaactgtggccaaaaagaacagtttttcggagaggcagatgacattatacctgattttagaaaatctca

SEQ ID NO: 164005 - DNA, 955 bp, Homo Sapiens
  misc_feature (64)..(64): n is a, c, g, or t
  misc_feature (107)..(107): n is a, c, g, or t
  misc_feature (113)..(113): n is a, c, g, or t
  misc_feature (138)..(138): n is a, c, g, or t
tgggatgggaatccacttccccccagggttgaactttttccacctggggagtcctggggaatanccggacgtgatttcttccttttataggtccaaatgatgtgacnccagtncctgcagttctgggagatcaaccanccatccgcgtcagggtgcagtccacagaaaactgtccctggaagtttgccgctgccaggaacgtgctcagatgggacctgtgatggctgcaacttccacttcctgtgggagagcgcggctgcttgcccgctctgctcagtggctgactaccatgctatcgtcagcagctgtgtggctgggatccagaagactacttacgtgtggcgagaacccaagctatgctctggtggcatttctctgcctgagcagagagtcaccatctgcaaaaccatagatttctggctgaaagtgggcatctctgcaggcacctgtactgccatcctgctcaccgtcttgacctgctacttttggaaaaagaatcaaaaactagagtacaagtactccaagctggtgatgaatgctactctcaaggactgtgacctgccagcagctgacagctgcgccatcatggaaggcgaggatgtagaggacgacctcatctttaccagcaagaagtcactctttgggaagatcaaatcatttacctccaagaggactcctgatggatttgactcagtgccgctgaagacatcctcaggaggcccagacatggacctgtgagaggcactgcctgcctcacctgcctcctcaccttgcatagcacctttgcaacgtgcggcgatttgggtgccagcatcctgcaacacccactgctggaaatctcttcattgtggccttatcagatgtttgaatttcagatctttttttatagagtacccaaaccctcctttctgcttgcctcaaacctggcaatgaagagaaacggggtaacgagctc

SEQ ID NO: 164006 - DNA, 1036 bp, Homo Sapiens
aaggggggcaaacggctacaagccgggggtttccttcacagccctgttcaggccttgctgatcgacttaattggggtgacaaccagatatggcttctgatgggaattcactccccaaggttgaaacttttccacctggaagtccttgggaataccggaacgtgatcttcttttataggtcccaatgatgtgacccagtcctgcagttctgggagatcaaccacccatccggcgtcaggtgcagtccacagaaaactgtccctggaagtttgctgctgccaggaacgtgctcagatgggacctgtgatggctgcaacttccacttcctgtgggagagcgcggctgcttgcccgctctgctcagtggctgactaccatgctatcgtcagcagctgtgtggctgggatccagaagactacttacgtgtggcgagaacccaagctatgctctggtggcatttctctgcctgagcagagagtcaccatctgcaaaaccatagatttctggctgaaagtgggcatctctgcaggcacctgtactgccatcctgctcaccgtcttgacctgctacttttggaaaaagaatcaaaaactagagtacaagtactccaagctggtgatgaatgctactctcaaggactgtgacctgccagcagctgacagctgcgccatcatggaaggcgaggatgtagaggacgacctcatctttaccagcaagaagtcactctttgggaagatcaaatcatttacctccaagaggactcctgatggatttgactcagtgccgctgaagacatcctcaggaggcccagacatggacctgtgagaggcactgcctgcctcacctgcctcctcaccttgcatagcacctttgcaagcctgcggcgatttgggtgccagcatcctgcaacacccactgctggaaatctcttcattgtggccttatcagatgtttgaatttcagatctttttttatagagtacccaaaccctcctttctgcttgcctcaaacctgccaaatatacccacactttgttgt

SEQ ID NO: 164007 - DNA, 1023 bp, Homo Sapiens
  misc_feature (32)..(32): n is a, c, g, or t
  misc_feature (86)..(86): n is a, c, g, or t
  misc_feature (180)..(180): n is a, c, g, or t
  misc_feature (865)..(875): n is a, c, g, or t
  misc_feature (879)..(979): n is a, c, g, or t
ttaaaaaattccccttccataccctacatacnaaactagactttgtaggtccttaaattccccactaaagaatgtgtccctgtacntggaaacccggacttttcgaaagcctgagacctgacaattccagactcttgcaaatggcaaagcaaaggggtgggaatggacagtttttgtagnaccacacagagacagcaggacgtgggtcggtaacagctgaaaaacctcacccaatagtttgtatgtgaaacagtcatggaaatgtcaagaaagcaaggaaaccaagtctgttcatttgaggtgcacaagatgtggattgtgtgtgttactgctggtgagtcacaaagcagagaaggaagataagtaatctgtgcccactgttacattaaataattcccattgttgaaatgccctttttggagaaaaccttaaccaattaataaagagcctaagttgggaaaacacaatctgaactgccaataaattctcatcaatgcttttccatcacattctacagtacatgtgttatggagatctaaagttcagaagaagccaaaagatggtattatgtttgaacaaaagatatggggtaaggccagctagttatgtaggcccctcaacccccaaaaaagaggtggccactgtcagcagttagcaccagggagagaccattaaactaagattaaaaaattaagtggtcataaaggcatcctagcataaaaatttttctcttggttttctctagtagaagatggtaatttctcattctggctttatttgccttgccagaatcaagggccctctgagctatcccatgatgcccatgaggctatgtagagcacaggcagggattaataatttctcnnnnnnnnnnnggannnnnnnnnnnnnnnnnnnnnnnnnnnnnnnnnnnnnnnnnnnnnnnnnnnnnnnnnnnnnnnnnnnnnnnnnnnnnnnnnnnnnnnnnnnnnnnnnnnnntgccttcatttgctgtttacttctatgtcctgcttttcggtccg

SEQ ID NO: 164008 - DNA, 897 bp, Homo Sapiens
gttctaatgctgttcacagcttttcaagtgtatttaaaaaattcccttcatacctacatacaactagactttgtaggtcttaattcccgactaaaagaatgtgtcctgtcagtggaaccaggacttttcgaagctgagacctgacaattccagactcttgcaaatggcaaagcaaaggggtgggaatggacagtttttgtaggaccacacagagacagcaggacgtgggtcggtaacagctgaaaaacctcacccaatagtttgtatgtgaaacagtcatggaaatgtcaagaaagcaaggaaaccaagtctgttcatttgaggtgcacaagatgtggattgtgtgtgttactgctggtgagtcacaaagcagagaaggaagataagtaatctgtgcccactgttacattaaataattcccattgttgaaatgccctttttggagaaaaccttaaccaattaataaagagcctaagttgggaaaacacaatctgaactgccaataaattctcatcaatgcttttccatcacattctacagtacatgtgttatggagatctaaagttcagaagaagcaaaaagatggtattatgtttgaacaaaagatatggggtaaggccagctagttatgtaggcccctcaacccccaaaaaagaggtggccactgtcagcagttagcaccagggagagaccattaaactaagattaaaaaattaagtggtcataaaggcatcctagcataaaaatttttctcttggttttctctagtagaagatggtaatttctcattctggctttatttgccttgccagaagtcaagggccctctgagctatccatgcgacgcgtggtccgacgcgtgggtcgacgatatcccgggaatccggaccgacagcct

SEQ ID NO: 164009 - DNA, 1212 bp, Homo Sapiens
ggcagagtgagaggagctattaattcaacagtcaaaaggtgataagacaccaaatgtgtgactttacctgcctactagtgccaggtaatctaccaaaaaagtaaagtatgtacctgggggatgtaagcccatgcttacatcaaacctgaaaaaagaaaagcctatggaagtaggccatatcctgcccaacttgcttctttccccattcctcctggttacttcacaagggttcttcattgctgaggtcccaatgtccccatctcccaatgggcagtaccagataagcaggacctcgctgctgcctcctccttcagcagcaaccacattacaatttggatgttatggaaaagcaattccatttgcctgtagagaaaatggcccccagaatgctggtccttagaactctgagctgagttcattcaagtcgggctctgtttcttctggctcctcatctgaggcaggaagtatctccaggcagagtgagaggagctattaagtcaacagtcaaaaggtgaaaagacaccaaatttgtgactttacctgcctactagtgccaggttatcccacaataagtaaaagtatgtacctgggggatgtaagcccatgcttacatcaaaccggaaaaaagaaaagcctatggaagtaggccatatcctgcccaacttgcttctttccccattcctcctgcttatctcctcaggagataagcagggaatactggaagagagagaaagtggtcctttctatagctaataaagttgacattgattcaagttcatgcttggggaaaggacagggctactaacaattataatgctgggagcaatggaatttgctcatgggtatgtggtaggttcaattttaattatcccagttaattcttagaactgctctgtgaagtatctcccgcttggtgcttaagttctaaaagatcctgtgccaaaaccaagaatgaaaacccaagcattctttcttgcccatcgatctttctctcatcaggccacttcttgggttgatagtggtgagtgtagccgctgccactttcagaatacccaccatgggccccagtcactgtgtggcgtggagaagagatggttctctctgtgtcatagctgaacaagcccagcccagagaggtttctgccctaggagctctcgatggtggaattgggatgcgatcccacatcctgcttatctcctgggtaccgagctc

SEQ ID NO: 164010 - DNA, 822 bp, Homo Sapiens
gagatacttcctgcctcagatgaggagccagaagaaacagagcccgacttgaatgaactcagctcagagttctaaggaccagcattctgggggccattttctctacaggcaaatggaattgcttttccataacatccaaattgtaatgtggttgctgctgaaggaggaggcagcagcgaggtcctgcggtacccatggggtgatgctacttctgcatgcatctacagggcatctgacacctaacatgagacgtggcatgtgagatgagacttggcatgtgagacatagggtcactagagacccttctgggtcagaggagagagactgaattggactaaacccgtcctctgttcccagcacgtttctcatatagccctcagtcactgagggagtcccccgcaggattggagaggcacattcccttgggacagaggctacaggttggagctttttttcccctgtcccccaaccccatccccacctccacttcagaacatggcaccccacccaactggccaagtgttaagtgatgtgcttattgagagcaactccgggtgtcttttaaaatgtaaagaaaaggtgacagtttaaggaaaaatatatatagaataccagaaatgccgtttacccggaaaatttttttctccccatttgttttgtttttactcaatgacaccatttttaattttatttcctgatagcaaaagggaaaaaaacacccatccctcaaaaaagcccaagtccccctccccctgttgccggtgaattgtttgtctttcctaaaggttgaaaattgtggaataaaacttgaatgacgctgtc

SEQ ID NO: 164011 - DNA, 546 bp, Homo Sapiens
  misc_feature (67)..(119): n is a, c, g, or t
  misc_feature (143)..(153): n is a, c, g, or t
  misc_feature (304)..(336): n is a, c, g, or t
tgaactctagaaggagatccccaatgcggggggactgagaacacggagaaatcccttcaaacccggnnnnnnnnnnnnnnnnnnnnnnnnnnnnnnnnnnnnnnnnnnnnnnnnnnnnnggacagagcgagactccatttccnnnnnnnnnnnggaatcggacgaagaaccacaggatgttgaagacaactgtctgaagtatttgtgagggacagcgatgtggccctctgtgttaagaataacgtgtcctgctttggcagagagaagaaaatagccactgcccgctttcaaggcaagatcgacnnnnnnnnnnnnnnnnnnnnnnnnnnnnnnnnncctggccatgaggacaaaaattactgagtggcccttaaagagggaagtttgttttcagctgttctcttttgcccgtaggtgggagggtggggattgctgcgtcctagctagaggaatggctttgcttgaatgtgtagtgcacacgcacgggtgtttctgtgtgctagtgcttcttgctgctgcttcctgctatttccggtaccgagctga

SEQ ID NO: 164012 - DNA, 1242 bp, Homo Sapiens
  misc_feature (1146)..(1146): n is a, c, g, or t
  misc_feature (1213)..(1213): n is a, c, g, or t
ttctgcttgctggtgctgaagaccaagggtcccccttgttacctgcccaaacttgtgactgcatccctctggagtctacccagagacagagaatgtgtctttatgtgggagtggtgactctgaaagacagagagggctcctgtggctgccaggagggcttgactcagaccccctgcagctcaagcatgtctgcaggacaccctggtcccctctccactggcatccagacatctgctttgggtcatccacatctgtgggtgggccgtgggtagagggacccacaggcgtggacagggcatctctctccatcaagcaaagcagcatgggggcctgcccgtaacgggaggcggacgtggccccgctgggcctctgagtgccagcgcagtctgctgggacatgcacatatcaggggttgtttgcaggatcctcagccatgttcaagtgaagtaagcctgagccagtgcgtggactggtgccacgggagtgccttgtccactgtccccctgtgtccaccagctattctcctggcgccggaactgcctctggtcttgatagcattaagccccgatggcgccggtggcgcggtgggcatggttcttcactgagagccggctctccttttctcaaagtgtgtaaatagtttatttataggggtaagaatgttctcacaccatttcacttcctcttcctctcctccagcattctcctctgagcagccttagatagtgtccatggctggagccgaccctttgagtccccttgagtgtcttaagaaccagcccacaacagcctctctttctcctccacatactgcagcctccctccatgcatcccacatacaagcactcccccactccccagcgtggcctcactgtcttctggtcttggtgctactgaaattgtcacccagaatttgaatcctgaccctccccactgcaagcccagggagccccagcccaagatggccagcctgaaactgttggccagggctcctcttgtggccatgtacccagggctggctggcctgccatttgcctctccccggagacagccgttcttctggcaaccacaccccgtgcctagccacaaccccagggtggcagctgcttcagaagctccagggcatttttgttttctggtgaccgnccctaatggggatattcggtgattcattgggtccacctttctgttaggggtttttttgggggttgtnttgggaatgaagttttaagtattgaatta

SEQ ID NO: 164013 - DNA, 622 bp, Homo Sapiens
acaccagtcccagaagagcctctctttctcctccacatactgcagcctccctccatgcatcccacatacaagcactcccccactccccagcgtggcctcactgtcttctggtcttggtgctactgaaattgtcacccagaatttgaatcctgaccctccccactgcaagcccagggagccccagcccaagatggccagcctgaaactgttggccagggctcctcttgtggccatgtacccagggctggctggcctgccatttgcctctccccggagacagccgttcttctgcaaccacaccccgtgcctagccacaaccccaggctgcagctgctcagaagctccaggcattttgtttctggtgaccgcccctaatgggatatcggtgatcactggtccacccttcctgtcagggctcttctggggctgctcttggaaatgaagtcttaagtactgaataactcccctggggatagctggggcatttgtctagctgggctactttctaacactttgccatagctcagaccacttctcatcgttcagggatggactgcaaccttaatttacttgccggagtgtacattctagtgtggtgtatactggtggctgttgatgatga

SEQ ID NO: 164014 - DNA, 952 bp, Homo Sapiens
agtgtcaaaactgacggtggcatggaagcgcttgccatgtttcaagatatccagagtcaggagaacttccgggctctcccgtttctcctggatgcggtataacgcacgttccaagtttagccaaaaactaatttcctgtaaggcagttcctgatgcaggatctcgatccagtttggtcactttctgaatttctcggatccagcggttaactccagattgtaactgattaagaaatgttgggtcttcaaccttatcaccaaagtctgtaacttttggcttttctccacgctcataacactgttttgcaacatttgtgatcattggatgaatcggcaggctgatctccggaatttcaatattttgctgcaagtgaaggagtcccatttcgagttctgcaatcttcttttcaactgaaggagccattttatcaccatccctgtctgccttgccagactctctaatgtaggacttaaaaaaaggagccactgcattgctaatgaaagaatgcaaagtttcgtagggcgagtcttcactgagtgtaaggacccggagctgagaagacacgggtttatctgcatcaatcacgggagtacgtttaatgaatgccaagctattggatttaaccccataatgaatgtctatgttgatgttataggaaatgaattctttttcttcttctccttcatcaccgacgtcctctttgagcgtggagcgctccaccagcaccgtgtggacctgcgggtccgaaaggaacttgcgcatctgctccagggcgctcttctcctccagcaccgcctccagcacggccggagcctcgccgcagtcctccagcagcagcggcaccagcttgcgcaggtgcttctgcagcacagacacgtccaccacattctgcacgaccgacacttccaatccggccgagcggtcctcgccgcggccgcccccgggctcagac

SEQ ID NO: 164015 - DNA, 2355 bp, Homo Sapiens
  misc_feature (50)..(50): n is a, c, g, or t
  misc_feature (115)..(115): n is a, c, g, or t
  misc_feature (596)..(605): n is a, c, g, or t
  misc_feature (663)..(806): n is a, c, g, or t
  misc_feature (874)..(874): n is a, c, g, or t
  misc_feature (887)..(911): n is a, c, g, or t
gggtcttatacgtgtgcatgctcgcgcgattggtgcgtgcgcgttgtgtnttcgtcccacctaaggctccttgtcgtcgtgaggagagaggtgtacgcatgtcatcatcgacagngaggcgccgaggcagcaagcggtgttgagatgatttggcggctcagactctcccgaccgagccccctattttgtctagagagttatcagatcattggtgcggcgggcgcgggtgtggtgttcacgtcgggtttcatctcgggagcccccgtgggtggagggcccgtgtcgcgggtggttgtgtcgtggcgtgcacccgttggcgatggcggtcgctggggatcagatctcgcccgctgttgttcttgttttttctcctctcgaactgggtggagggtgctcggtctgctcctcgagcgcctcgtgtatttttttaggctggggggcgtagataatccccggtagagtggggtccgcccggggcgtgttgtttccgggcaggagaatcgggtgcgggctcctctagccgcgtcttgcttctcgggcgggggggcgcgccccccgagtgatgcatgtttttcgagctttcctccgcgggcgcnnnnnnnnnnccccgccccctttttctcttgttggtcgcggtcctttattggccgctctttctgctannnnnnnnnnnnnnnnnnnnnnnnnnnnnnnnnnnnnnnnnnnnnnnnnnnnnnnnnnnnnnnnnnnnnnnnnnnnnnnnnnnnnnnnnnnnnnnnnnnnnnnnnnnnnnnnnnnnnnnnnnnnnnnnnnnnnnnnnnnnnnnnctcttttaatggtaaaaactttatttactatttataaatacattgcaagacaaacttctcaaaacatnacttttccccccnnnnnnnnnnnnnnnnnnnnnnnnnctaataggtaggcagaatgtcttgagacccctctgttttcaaggagagctctatgcagcgtgtgtccacaccgaggtctgcagcagggcagagtctccctgagcctgactttgccagaccttcttgggtttggcctccgggagagcagcccagtctctgggcgtgagctcctttcctcagtcatggccacagttgtatcatatagcatctctaacatttcatctaggattatctagtatagatcttactatatttggggctatgttgtatacaatgttaacaagaacatatcttctctgcatatatgtgtgaattataaagaaaagcatgagaatgactctaagttcaacaaacatgggtgaatctctatgtgctcccagtgtcctggatgggctccccagcaagccattcctccttcctgttctgatattactattcttttttacattgtgctaaggaggacaaaagatgagagatgaaaataaagctttgcctttaaagagcttatcctcagaaataagcttcgtcttgagttgttgaactacaaaacactattttctgcagtcatccgaagaattgtgccattacttgtgatgcctctgaatgtggaggctgactctccctgtctctctgtccctcctaccccacggggccgcagcaaaagccatcctgggccttcgactgggccatgtcttcaggaagattcctgaagaggagggcccgaaatacctgcctttataggttcccagagtgccctagaacattcttagatacatattttttaaacaagtaggactccaccggatgttctccaatagtccccaagcagtacaggtcacttgaagacataaacattcttcttggttgagggatccacgcccttgtttcagaaatgacaccacagaaggctgtgagctccaggagcatgcgttgggatgtccggatgaccggggtttaaaggttttcctattctcgataaagcctgtgcgcactgtacggggagtgggggtgaagcgtgttctctacataggcaacacagccgcctaagtcacaaagtcagtggtcggccgcttcgaccaacatgtggtgagcattccacgggcgcatgaagtctgggtgctgtgctcgagtctctgaatattttgataggaagcgacaagaaaattcaaactgctctttgctgactactggaaagtgaaaagatgctcaagtttaccattcaaagaaaccataggcatttcaaaaacctctttctaaactttggtttaaaaaaaatcagttcaccacaaacagaaatataaatcgaggctgtagccagctgctggtcatgtccttggcagtcttttgtgcaaataaggcatatttgagctccacattaaccttgcggcaggcgtctacttgctctgcatcctgctatctcctcgagatcctctagaacagcata

SEQ ID NO: 164016 - DNA, 419 bp, Homo Sapiens
  misc_feature (155)..(290): n is a, c, g, or t
aggagataagcaggacagggtgtcaagaacagcatttttaccaagttgatataaaaatgaaacaggatccaggcatgggtctttacactgatagttacagtaagttttaaaatctgagcagcaatttgaatcacttcttgaaaaacacacaaaannnnnnnnnnnnnnnnnnnnnnnnnnnnnnnnnnnnnnnnnnnnnnnnnnnnnnnnnnnnnnnnnnnnnnnnnnnnnnnnnnnnnnnnnnnnnnnnnnnnnnnnnnnnnnnnnnnnnnnnnnnnnnnnnnnnnnnngaaaaggatctgtgggagcttttattcccatggctgccttcctcaagtcaacctctttccccggaaatggcatcatctccggactgttgtttctccttcttccttctcctgctatctctggaccgagcc

SEQ ID NO: 164017 - DNA, 979 bp, Homo Sapiens
ggattgtggaccagtactttccacaagaaagtcacacaaccacagtgctcttcatagttcaaattcacattcttctaatccaagcaataacccaagcaaaacttcagatgcaccttatgattctgcagatgactggtctgagcatattagctcttctgggaaaaagtactactacaattgtcgaacagaagtttcacaatgggaaaaaccaaaagagtggcttgaaagagaacagagacaaaaagaagcaaacaagatggcagtcaacagcttcccaaaagatagggattacagaagagaggtgatgcaagcaacagccactagtgggtttgccagtggaatggaagacaagcattccagtgatgccagtagtttgctcccacagaatattttgtctcaaacaagcagacacaatgacagagactacagactgccaagagcagagactcacagtagttctacgccagtacagcaccccatcaaaccagtggttcatccaactgctaccccaagcactgttccttctagtccatttacgctacagtctgatcaccagccaaagaaatcatttgatgctaatggagcatctactttatcaaaactgcctacacccacatcttctgtccctgcacagaaaacagaaagaaaagaatctacatcaggagacaaacccgtatcacattcttgcacaactccttccacgtcttctgcctctggactgaaccccacatctgcacctccaacatctgcttcagcggtacctgtttctcctgttccacagtcgccaatacctcccgtacttcaggacccaaatcttcttagacaattgcttcctgctttgcaagacacgctgcagcttaataattctaatgtggacatatctaaaataaatgaaggtaaatcttcataacagttttgtaaaaatttatttgcattgtgcaaagttatgtaagtagtaaaatccgcagtttaggaatgg

SEQ ID NO: 164018 - DNA, 411 bp, Homo Sapiens
aggatcgcctgatttggattctgaagatgggaggtattggcgactgtggaacaggagaaacagggaccgctgaagcagatgttggaggtgcagatgtggggttcagtccagaggcagaagacgtggaaggagttgtgcaagaatgtgatacgggtttgtctcctgatgtagattttccactggcaaacccactagtggctgttgcttgcatcacctctcttctgtaatccctatcttttgggaagctgttgactgccatcttgtttgcttctttttgtctctgttctctttcaagccactcttttggtttttcccattgtgaaacttctgttcgacaattgtagtagtactttttcccagaagagctaatatgctcagaccagtcatcttcagatcaaatcaggaccgagc

SEQ ID NO: 164019 - DNA, 792 bp, Homo Sapiens
cacatttcggtcgggcacagaaaccagaaagaaaagaatctacatcaggagacaaacccgtatcacattcttggcacaactccttccacgtcttctgcctctggactgaaccccacatctgcactggaagctgaataagagtccccaaaactcaaacttcctagggatgccacccctttagtagctcacacctcccccctccaagagctaagaaacaaaggagaatgtacttttgtagcttagataagcaatgaatcagtaaaggactgatctacttgctccaccacccctcccttaataataacatttactgttatttcctgggcctaagactctatgttccagaactgtcacagctccccatgtcacactcactagcttgtgatctttgtcaaataactgaaatcttttaagcctctagtttcttcctttgtaaaacagagataaaatgttgtggtttttaagtgagataatccaagtaaagcacctaacatggagtagtgaatgaacatcggttgctactaaaagtggacatcctactgcatccttaatgccactaggcatttccatacaatctggggaccaaaacattcaatcatataaatgaatgaggttaattaaaaacactactgtaatctgcttgtatgatcacaaaccaccacaaaagaaaagatcgtgaagattacactgtaaacggactctcaaatgatcaggaggtgggtcactttcggcaacttgctccctccacccaacttcaaaacagggagctcgagcctgcctgtattttgagga

SEQ ID NO: 164020 - DNA, 975 bp, Homo Sapiens
  misc_feature (28)..(28): n is a, c, g, or t
  misc_feature (53)..(53): n is a, c, g, or t
  misc_feature (57)..(57): n is a, c, g, or t
  misc_feature (68)..(68): n is a, c, g, or t
  misc_feature (74)..(75): n is a, c, g, or t
  misc_feature (94)..(94): n is a, c, g, or t
  misc_feature (132)..(132): n is a, c, g, or t
  misc_feature (163)..(163): n is a, c, g, or t
  misc_feature (171)..(171): n is a, c, g, or t
  misc_feature (229)..(229): n is a, c, g, or t
aaggacagactccagccaattctgcganggtatggggattcttgccaaattcnccanctgggctcacntttccnntaggtctgcccgggtgacncaatcccactgggtgcagccccacccccgctcaaaccncacatctggacagacacatggcaaatatganactgaagnccggctgggctggagcacatctggttgttgttgggttggagtcgtcttgcaggtgtcncaaggtggtcaggcctcacccacggtggccaggttgagaccgtgttttttagatgattcaggttactccagggcaaagcatgatcctgatgacacccggcggaaaagcaggctggagcctcggaagagctggccctgcacactcaggtacttccagcagtgaatccaggatttgaacactggggagtaaggggggagcccagcttgcagcccgcagttgttcacagccatgaggtcgccaactagcaggaaggggtaggtcagcatgctcactgcaatcccccatcacgaacttggtatagctccggatggccagggcctggctgaactgggaacctggattcttggtcgtatcccagcccccctggggtgtcactcacgctgtcatccaccaggtaggcattgatgaagtgggcccagcaggttacagcccccacaagaaaaaccacatcgcccaagggaggtgaggcgattacatccaagcggaagaatcccatgcagccccttccttctttgaacaatcttccccaaattggagctcaagaaacaccactgatacttggcctcccgtcccacaaactggaccatgcagcgcattgagatgacatgcagggggtgggccaacatgcgggacacacactgcatcatcatctcgtaggaggtctccttcacaactttcttcagggaagtcttcatatcatccttgttggaaacctgctcaatctcatctggagggaaaaccttctt

SEQ ID NO: 164021 - DNA, 1189 bp, Homo Sapiens
  misc_feature (20)..(20): n is a, c, g, or t
  misc_feature (61)..(61): n is a, c, g, or t
  misc_feature (72)..(72): n is a, c, g, or t
  misc_feature (105)..(105): n is a, c, g, or t
  misc_feature (500)..(539): n is a, c, g, or t
  misc_feature (640)..(687): n is a, c, g, or t
  misc_feature (1085)..(1085): n is a, c, g, or t
acccgaaatttctaagcctncttgtgaaaaggccaaaaaatgcttatggggcccaggttgnatgggaaaggnaatggggtaagaccccaccccgtctacccctcnagtcagcccagcgcccatcctgcagctcagctgggagcatcattctcctgctttgtacatagggtgtggtcccctggcacgtggccaccatcatgtctaggcctatgctaggaggcaaatggccaggctctgcctgtgtttttctcaacactacttttctgatatgagggcagcacctgcctctgaatgggaaatcatgcaactactcagaatgtgtcctcctcatctaatgctcatctgtttaatggtgatgcctcgcgtacaggatctggttacctgtgcagttgtgaatacccagaggttgggcagatcagtgtctctagtcctacccagttttaaagttcatggtaagatttgacctcatctcccgcaaataaatgtattggtgatttggnnnnnnnnnnnnnnnnnnnnnnnnnnnnnnnnnnnnnnnnccccactgaaaccctctccccctaacaccacacattccacccacacccctcaactggtaacactacgctccataccgagaaaaaagaaaatttggccgcgnnnnnnnnnnnnnnnnnnnnnnnnnnnnnnnnnnnnnnnnnnnnnnnngggcgcccgggcgccccccagaagagaaaagagaaaacatggggcccaacgcctttctcccctaaagaaaaaaacccgggggcacagagaaacaagggggcttggggattctcccaccccaaataaaaaaacaccccccggcgggggaacaccaagggggtgttttagaacaaacacccccaaaaggggggttctcgcgggcgctctatctcggggcatccctacacaccggggaagtcccacagcggaacgctcctaatataaaaataaaacccccccgcccctgtgacactttattttaaaaaaatggggttgaaatttttataaacgattcttgcccgcaattgggagacccccctccaacaccggctttgaggaactctataattcccacgggnggcaacaacaccccttgtggccctctgaggaataataaatttccccctctggggaaaaacgcgggcgcaaaaaaagatttttcttcttatgggccccactctat

SEQ ID NO: 164022 - DNA, 1666 bp, Homo Sapiens
tctgagtaagtgccatgattcccaattcagaggcaagtgctgccctcaaatcagaaaagtagtgttgagaaaaacacaggcagaccctggccattttgcctcctagcatagccctagacatgatggtggccacgtgccaggggaaccacaccctatgtacaaagcaggagaatgatgctcccagctgagctgcaggatgggcgctgggctgactggaggggtagacggggtggggtctgaccccattagcctttccccatccaacctgggcccccataagccattctctggccctctgcacaagacagactcagcaaatctgcgaggtatggggattctgccaactccccacctcgcctcaccttccctaggtctgccgggtgacccaatccactgggtgcagccccacccccgctcaaccccacatctggacagacacatggcaaatatggaactgaagcccggctgggctggagcacatctggttgttgttgggttggagtcgtcttgcaggtgtcccaaggtggtcaggcctcacccacggtggccaggttgagaccgtgttttttagatgattcaggttactccagggcaaagcatgatcctgatgacacccggcggaaaagcaggctggagcctcggaagagctggccctgcacactcaggtacttccagcagtgaatccaggatttgaacactggggagtaaggggggagcccagcttgcagcccgcagttgttcacagccatgaggtcgccaactagcaggaaggggtaggtcagcatgctcactgcaatccccatcacgaacttggtatagctccggatggccagggcctggctgaagctgtcatccaccaggtaggcattgatgaagtgggccagcaggttacagccccacaagaaaaccacatcgcccaggaggtgagggattaatccaacgaagaatcccagcagcccttcctctttgaaaatcttcccaatggagctcagcacaccactgtacttggcctcccgtcccacaaactggaccatgcagcgcattgagatgacatgcaggggctgggccaacatgcgggacacacactgcatcatcatctcgtaggaggtctccttcacaactttcttcagggaagtcttcatatcatccttgttggaaacctgctcaatctcatctggagggaaaaccttcttcatgctaccccgagtcacagtagagagggcgttggacatcagccggggactcaggcctcggaacagccctatcttaccatccacttgcacgatgtacttggcgtaggtgaagaagctcggcagatagaggaccttcctccccagcacattggtcccaagggtggggggcatcggctcatgacccacctggatgagcagcttcacgtagagcaggggatggctgagcgccgtcacgcccgcgcccagtgccacgaaaagagcctcagtggtcggggcgttgtccccagaccccaggccccctgacccgccatccatcctgcgggccgagggctgagccgcaggccgagggtggcgaggatgtgcgcggtgcgcgggcggtggatcgcgagctcgagcctcgacccccgccgccgctccgccgcgagctccggctccagctccggctcccgccatccccgcggcaccgccgcgag

SEQ ID NO: 164023 - DNA, 1243 bp, Homo Sapiens
  misc_feature (1048)..(1126): n is a, c, g, or t
tcctggtggtgctgctccacacctgcgtcccagcctcttggggcctgcggtgcatgcagcgtaagaccaacggggattgccgtgtggaagagtgcgcctgggacaggacctctgcaggaccacgatcgtgcgcttgtgggaagaaggagaagagctggagctggtggtagaaaagctgtacccactcagagaagaccaacaggaccctgagctatcggactggcttgaagatcaccagccttaccgaggttgtgtgtgggttagacttgtgcaaccagggcaactctggccgggctgtcacctattcccgaagccgttacctcgaatgcatttcctgtggctcatcagacatgagctgtgagaggggccggcaccagagcctgcagtgccgcagccctgaagaacagtgcctggatgtggtgacccactggatccaggaaggtgaagaagggcgtccaaaggatgaccgccacctccgtggctgtggctaccttcccggctgcccgggctccaatggtttccacaacaacgacaccttccacttcctgaaatgctgcaacaccaccaaatgcaacgagggcccaatcctggagcttgaaaatctgccgcagaatggccgccagtgttacagctgcaaggggaacagcacccatggatgctcctctgaagagactttcctcattgactgccgaggccccatgaatcaatgtctggtagccaccggcactcacgaaccgaaaaaccaaagctatatggtaagaggctgtgcaaccgcctcaatgtgccaacatgcccacctgggtgacgccttcagcatgaaccacattgatgtctcctgctgtactaaaagtggctgtaaccacccagacctggatgtccagtaccgcagtggggctgctcctcagcctgaccctgcccatctcagcctcaccatcaccctgctaatgactgccagactgtggggaggcactctcctctggacctaaacctgaaatccccctctctgccctggctggatccgggggacccctttgcccttccctcggcnnnnnnnnnnnnnnnnnnnnnnnnnnnnnnnnnnnnnnnnnnnnnnnnnnnnnnnnnnnnnnnnnnnnnnnnnnnnnnnacagctatctcacaaagttgtgtgaagcagaagagaaaagctggaggaaggccgtgggccaatgggagagctcttgttattattaatattgttgcagctgttgtaactggggggatc

SEQ ID NO: 164024 - DNA, 1015 bp, Homo Sapiens
caggtaacccacctgcatggcaatataatggcatcggccatgcggttatcatgtaaacaaaggtcaacagcactctcaaaattgcccgtcagcaaagcctgagtaattaaaccatcaatgtccccactgacagagatattaaatgttcctccagatgagggtagaaattcagattcttctttttcctctttaatgtgcttctttcctagatcttcttttctgtatcctagaagttcaaggtattttccacgagaatcatcctcaaagtttaccttcaaaaaggaccacacatttttctcaaattcagtctgagaagcatcaattttttttgggcaataatggataaatccttgtgactgcacagcctgctgaaggtggtctgatcggctgaggaactccttttctgttacaacctgactaatgaacacatggtgctgctgctgctgctcagctccctgatgagaaggcattctgacattctcaaacgtaaccagtttgcctccaaatgaaaaagaagcaccaacaggccttcgaatccacttgggcggcttcttcagaggcagcactatactatgctgagcagtctgctgtggaatttgtaacggaggaaggggctgtcctgtgccaaagggatcaagattcccaaaagatgatgaaagcttgtcaacttgtttctgtcttaaaccatctgtgcttcctcccatgatagaataaacactgatacgcccatcaaacgaagcagctgataagacagcaggatttcggggacaccactgaatatcgaagcaccactgtgtgttggtgggaagttcatataacacctctcctgtgtttggattggagcagagaatcttagcatcttttccacagctcagtaacaattcaggatctgccatgctccaagcaattgccaaaatccccctggcatggttttccagacacgaagtggagaggaagcaaatcgaagatcccacatctggatcactggtaaccgtcatcctcggaggcaaggacc

SEQ ID NO: 164025 - DNA, 409 bp, Homo Sapiens
caggacacagatggtattaagacagaaacagttgacaagcttacatcatctattatgggaatcttgatcccttatggcacaggacagccccttcctccgttacaaattccacagcagactgctcagcatagtatagtgctgcctctgaagaagccgcccaagtggattcgaaggcctgtaggtgcttctttttcattcggaggcaaactggttacgtttgagaatgtcagaatgccttctcatcagggagcttaacgaccgaaagcaacggacttgccctcgggacagggcagctgccccaccccaagggagcacctttgggagagcaaagttctgtttccacatcgggatgcctgtggggcctctgcctcctgatcacgccactacggacacttaggatgcctgaggc

SEQ ID NO: 164026 - DNA, 1250 bp, Homo Sapiens
ggcagagtgatggggaggagagccctgctgctgaagagcagctcttgggagagcacattaaagaggaaaaagaagaatctgaatttctaccctcatctggaggaacatttaatatctctgtcagtggggacattgatggtttaattactcaggctttgctgacgggcaattttgagagtgctgttgacctttgtttacatgataaccgcatggccgatgccattatattggccatagcaggtggacaagaactcttggctcgaacccagaaaaaatacttcgcaaaatcccaaagcaaaattaccaggctcatcactgcagtggtgatgaagaactggaaagagattgttgagtcttgtgatcttaaaaattggagagaggctttagctgcagtattgacttatgcaaagccggatgaattttcagccctttgtgatcttttgggaaccaggcttgaaaatgaaggagatagcctcctgcagactcaagcatgtctctgctatatttgtgcagggaatgtagagaaattagttgcatgttggactaaagctcaagatggaagccaccctttgtcacttcaggatctgattgagaaagttgtcatcctgcgaaaagctgtgcaactcactcaagccatggacactagtactgtaggagttctcttggctgcgaagatgagtcagtatgccaatttgttggcagctcagggcagtattgctgcagccttggcttttcttcctgacaacaccaaccagccaaatatcatgcagcttcgtgacagactttgtagagcacaaggagagcctgtagcaggacatgaatcacctaaaattccgtacgagaaacagcagctccccaagggcaggcctggaccagttgctggccaccaccagatgccaagagttcaaactcaacaatattatccccatggagaaaatcctccacctccgggtttcataatgcatggaaatgttaatccaaatgctgctggtcagcttcccacatctccaggtcatatgcacacccaggtaccaccttatccacagccacagccttatcaaccagcccagccgtatcccttcggaacaggggggtcagcaatgtatcgacctcagcagcctgttgctcctcctacttcaaacgcttaccctaacaccccctacatatcttcctgcttcttccctatactgggcagtctcagctgtacgcagcacagcaccaggcctctccacctcctccaagcttgcatg

SEQ ID NO: 164027 - DNA, 1654 bp, Homo Sapiens
  misc_feature (1397)..(1406): n is a, c, g, or t
gggagtgaccggaggcggcggcggcgagcggttccttgtgggctagaagaatcctgcaaaaatgtctctctatccatctctcgaagacttgaaggtagacaaagtaattcaggctcaaactgctttttctgcaaaccctgccaatccagcaatttgtcagaagcttctgctcctatccctcacgatggaaatctctatcccagactgtatccagagctctctcaatacatggggctgagtttaaatgaagaagaaatacgtgcaaatgtggccgtggtttctggtgcaccacttcaggggcagttggtagcaagaccttccagtataaactatatggtggctcctgtaactggtaatgatgttggaattcgtagagcagaaattaagcaagggattcgtgaagtcattttgtgtaaggatcaagatggaaaaattggactcaggcttaaatcaatagataatggtatatttgttcagctagtccaggctaattctccagcctcattggttggtctgagatttggggaccaagtacttcagatcaatggtgaaaactgtgcaggatggagctctgataaagcgcacaaggtgctcaaacaggcttttggagagaagattaccatgaccattcgtgacaggccctttgaacggacgattaccatgcataaggatagcactggacatgttggttttatctttaaaaatggaaaaataacatccatagtgaaagatagctctgcagccagaaatggtcttctcacggaacataacatctgtgaaatcaatggacagaatgtcattggattgaaggactctcaaattgcagacatactgtcaacatctgggactgtagttactattacaatcatgcctgcttttatctttgaacatattattaagcggatggcaccaagcattatgaaaagcctaatggaccacaccattcctgaggtttaaaattcacggcaccatggaaatgtagctgaacgtctccagtttccttctttggcaacttctgtattatgcacgtgaagccttcccggagccagcgagcatatgctgcatgaggacctttctatcttacattatggctgggaatcttactctttcatctgataccttgttcagatttcaaaatagttgtagccttatcctggttttacagatgtgaaactttcaagagatttactgactttcctagaatagtttctctactggaaacctgatgcttttataagccattgtgattaggatgactgttacaggcttagctttgtgtgaaaaccagtcacctttctcctaggtaatgagtagtgctgttcatattactttagttctatagcatacttgcatctttaacatgctatcatagtacatttagaatgattgcctttgannnnnnnnnnaaattctgtgtgtgtgtgtgtaaaatgccaattaagaacactggtttcattccagtgtaagcattaaacagtgtatgtaggtttcaagagatgtgatgattcttaaattttaactaccttcacttaatatgcttgaactgtcgccttaactatgttaagcatctagactaaaagccaaaatataattatggctgctttctaaaaacccaaaatgtagttctctattaacctgaaatgtacactagcca

SEQ ID NO: 164028 - DNA, 1497 bp, Homo Sapiens
  misc_feature (637)..(646): n is a, c, g, or t
  misc_feature (653)..(667): n is a, c, g, or t
  misc_feature (1318)..(1322): n is a, c, g, or t
  misc_feature (1324)..(1327): n is a, c, g, or t
  misc_feature (1330)..(1343): n is a, c, g, or t
taacagtgcgataaaagcaggcggtacggtcggaatcccgggatatcgtcgacccacgcgtccggacatactgtcaacatctgggactgtagttactattacaatcatgcctgcttttatctttgaacatattattaagcggatggcaccaagcattatgaaaagcctaatggaccacaccattcctgaggtttaaaattcacggcaccatggaaatgtagctgaacgtctccagtttccttctttggcaacttctgtattatgcacgtgaagccttcccggagccagcgagcatatgctgcatgaggacctttctatcttacattatggctgggaatcttactctttcatctgataccttgttcagatttcaaaatagttgtagccttatcctggttttacagatgtgaaactttcaagagatttactgactttcctagaatagtttctctactggaaacctgatgcttttataagccattgtgattaggatgactgttacaggcttagctttgtgtgaaaaccagtcacctttctcctaggtaatgagtagtgctgttcatattactttagtttctatagcatacttgcatctttaacatgctatcatagtacatttagaatgattgcctttgannnnnnnnnnaaattcnnnnnnnnnnnnnnnaaaatgccaattaagaacactggtttcattccatgtaagcattaaacagtgtatgtaggtttcaagagattgtgatgattcttaaattttaactaccttcacttaatatgcttgaactgtcgccttaactatgttaagcatctagactaaaagccaaaatataattatggctgcctttctaaaaacccaaaatgtagttctctattaacctgaaatgtacactagcccagaacagtttaatggtacttactgagctatagcatagctgcttagttgtttttgagattttttagtcaacacataatggaaacttctttcttctaaaagttgccagtgccacttttaagaagtgaatcactatatgtgatgtaaaagttattacactaaacaggataaacttttgactccccttttgttcatttgtggattaagtggtataatacttaattttggcatttgactcttaagattatgtaacctagctactttgggatggtcttagaatatttttctgataacttgttccttttcctgactcctccttgcaaacaaaatgatagttgacactttatcctgatttttttcttctttttggtttatgtctattctaattaaatatgtataaataaagttacattttagtctggcccnnnnncnnnntcnnnnnnnnnnnnnnaacatgtccggccggcctcggcccctccaaaaacctttctaaaccattcctttgggcccgcgggccccagaagggaaggggaccatggtccataacttgttttcctaaggaaaatcccgggccatcgactatagggcttgggatttcccccccc

SEQ ID NO: 164029 - DNA, 1061 bp, Homo Sapiens
  misc_feature (674)..(715): n is a, c, g, or t
  misc_feature (877)..(913): n is a, c, g, or t
cagaggggaccacctcattccgagtgcaccccatgaagtttattcctcattccaaagacaacccaccgacgttggaaggaaactacagtaaacccctcaaggagtttttggaggcctgtttgaataaggagccgagctttagacccactgctaaggagttattgaagcacaagtttatactacgcaatgcaaagaaaacttcctacttgaccgagctcatcgacaggtacaagagatggaaggccgagcagagccatgacgactcgagctccgaggattccgacgcggaaacagatggccaagcctcggggggcagtgattctggggactggatcttcacaatccgagaaaaagatcccaagaatctcgagaatggagctcttcagccatcggacttggacagaaataagatgaaagacatcccaaagaggcctttctctcagtgtttatctacaattatttctcctctgtttgcagagttgaaggagaagagccaggcgtgcggagggaacttggggtccattgaagagctgcgaggggccatctacctagcggaggaggcgtgccctggcatctccgacaccatggtggcccagctcgtgcagcggctccagagatactctctaagtggtggaggaacttcatcccactgaaattcctttggcatttggggnnnnnnnnnnnnnnnnnnnnnnnnnnnnnnnnnnnnnnnnnnaaaagtcaacgagagccttcgctgactccaccgaagaggtgcgccactgggagccaccccagcgccaggcgcccgtccagggacacacacagtcttcactgtgctgcagccagatgaagtctctcagatgggtggggagggtcagctccttccagcgatcannnnnnnnnnnnnnnnnnnnnnnnnnnnnnnnnnnnnaccatagtgcacatatttccagaaaagtggctttttaaaccaaaacccaacccctggaaatgaataatttgggggattatggttaggggcaacttaaggacttgaaaaccccccagggaatcctgggttttaaggttggataactccc

SEQ ID NO: 164030 - DNA, 822 bp, Homo Sapiens
gaaatacgcggagataagcaggaagaaatcaaacgtgtggaagggttggggagaggagatgcctagaagggattttcctgtattctcttagtggtgggggtaagaccgaggacccaagtcctcactcatcacgtcctccccagtgatgcaaggatggagctggggtaaaaccagggagaatcaggaccctcacgtcgctgcgtttattaagcatcagggtcagagctgggcaggagaggaggggaggcaaggtctaggtgagagacgttctggaaccagccagtggggtggtaggtcgggaggtagatgtcacatgtcagggtcacttggcctgaatggttttttggatccagttcgtgtatctgcagacgttggtgtagactcctggcttctcctttgatccacaggggatgttaccccatgacacaaggcctcggaggtggtctccacataccagcggacccccagaatcaccctggcaggaatccttcccgtacttctcatccccagcacacaacatgttctgggtgatctggccagggtaggcatgctcacactcctcacgggacaccaggtggatgtatgcacactggatggtgtcagggaaatcaccatctgctgtcttgccccagcccaggatgtggcagctggtggtgttggctgagcagtccctctccaggggaaggggctggatgagttcagagagtttggctgggcgtgccaggcgcaacagcatgatgtcctggtcatggctggcggcatcatagtcagggtggatcacagcccggacaacagactctgctccagctattactggaccga

SEQ ID NO: 164031 - DNA, 383 bp, Homo Sapiens
  misc_feature (354)..(354): n is a, c, g, or t
  misc_feature (373)..(373): n is a, c, g, or t
ggtgaccctgacatgtgacatctacctcccgacctaccaccccactggctggttccagaacgtctctcacctagaccttgcctcccctcctctcctgcccagctctgaccctgatgcttaataaacgcagcgacgtgagggtcctgattctccctggttttaccccagctccatccttgcatcactggggaggacgtgatgagtgaggacttgggtcctcggtcttacccccaccactaagagaatacaggaaaatcccttctagggcatctcctctccccaacccttccacacgtttgatttcttcctgcagaggcccagccacgtgtctgggaatcccagctccgtggcttnattgttcggtgttcccttngggatgtaac

SEQ ID NO: 164032 - DNA, 1102 bp, Homo Sapiens
ccccggagccaggagatgctggagagccaggacttccaggccgaacaggaaccctaggattacctggcccaccaggaccaatggggcgctccaggagacagaggcttcactggaaaagacggtgcaatgggacccaggggcccaccagggccgccgggaagcccaggctccccaggagtcacaggaccaagtgggaagccaggaaaacctggagatcatggcagaccaggtccatctgggttgaaaggagaaaaaggtgataggggagacattgcttcccagaacatgatgcgagcagttgcaagacaagtctgtgaacaattgataagtggtcagatgaacagattcaatcagatgctgaatcagattccaaatgattaccagtccagtcgcaaccagccaggcccgccgggtccaccgggacctcctggtagcgcaggagccagaggagaacctgggcctggggggcggccaggcttcccgggcacaccagggatgcagggaccccctggggaacgaggtttgccaggagagaaaggtgaaaggggtactggatcttcaggacctcgggggctgcctggccccccaggtccacaaggagaatccagaacaggtccaccagggtccacaggttcaagaggtccccctggccccccaggccggcatgacaggctacggacgacctcggcagatcatcagttagagcggagagggctagccctgagcccggccctcccccagctccttggctgcagccatcccgcttagcctgcctcacccacacccgtgtggtaccttcagccctggccaagctttgaggctctgtcactgagcaatggtaactgcacctgggcagctcctccctgtgcccccagcctcagcccaacttcttacccgaaagcatcactgccttggcccctccctcccggctgcccccatcacctctactgtctcctccctgggctaagcaggggagaagcgggctgggggtagcctggatgtgggccaagtccactgtcctccttggcgcaaaagcccattgaagaagaaccagcccagcctgccccctatcttgtcctggaatatttttggggttggaact

SEQ ID NO: 164033 - DNA, 563 bp, Homo Sapiens
  misc_feature (27)..(28): n is a, c, g, or t
  misc_feature (46)..(46): n is a, c, g, or t
  misc_feature (510)..(510): n is a, c, g, or t
gcagcgtcgactctagaggatcctctnnaggatccccgacggatangcggatctgcccgagaacccaccctccatggtcttcaagcagatggagcaggtggctcagttcctgaaggcggctgaggactatggggtcatcaagactgacatgttccagactgttgacctctttgaaggcaaagacatggcagcagtgcagaggaccctgatggctttgggcagcttggcagtgaccaagaatgatgggcactaccgtggagatcccaactggtttatgaagaaagcgcaggagcataagagggaattcacagagagccagctgcaggagggaaagcatgtcattggccttcagatgggcagcaacagaggggcctccaggccggcatgacaggctacggacgacctcgcagatccgctatccgtcacggatagcggatctgcgcatgactggaggcttattatctataatacaaggggaggtgctatctccgagtctccgagatgactcgnaggacgcagtgatgcttcgtcaatgtatcatgccgacagtgccaccctaccaa

SEQ ID NO: 164034 - DNA, 667 bp, Homo Sapiens
  misc_feature (35)..(35): n is a, c, g, or t
gcctctttgaaggcaaagacatggcagcagtgcangaggaccctgatggctttgggcagcttggcagtgaccaagaatgatgggcactaccgtggagatcccaactggtttatgaagaaagcgcaggagcataagagggaattcacagagagccagctgcaggagggaaagcatgtcattggccttcagatgggcagcaacagaggggcctcccaggcgggcatgacaggctacggacgacctcggcagatcatcagttagagcggagagggctagccctgagcccggccctcccccagctccttggctgcagccatcccgcttagcctgcctcacccacacccgtgtggtaccttcagccctggccaagctttgaggctctgtcactgagcaatggtaactgcacctgggcagctcctccctgtgcccccagcctcagcccaacttcttacccgaaagcatcactgccttggcccctccctcccggctgcccccatcacctctactgtctcctccctgggctaagcaggggagaagcgggctgggggtagcctggatgtgggccaagtccactgtcctccttggcggcaaaagcccattgaagaagaaccagcccagcctgccccctatcttgtcctggaatatttttggggttggaactcaaaaa

SEQ ID NO: 164035 - DNA, 700 bp, Homo Sapiens
caaaccctctccggctcctaaactgaaggatctgcccaaggtcgtccgtagcctgtcaatgcccgcctgggaggcccctctgttgctgcccaatctgaaaggccaaatgaacatgctttcccatccctgaaagctggctctctgtgaaattccctcttatgctcctgcgctttcttcataaaccagttgggatctcccacggtagtgcccatcattcttggtcactgccaagctgcccaaagccatcagggtcctctgcactgctgccatgtctttgccttcaaagaggtcaacagtctggaacatgtcagtcttgatgaccccatagtcctcagccgccttcaggaactgagccacctgctccatctgcttgaagaccatggagggtgggttctcgggcaccttcaccggcttggagccatcagggtacaggctgttcaccagcttgctcagaatcacgccattcttcagccagacctggaagcccaaagcgcccacggtctgggcgccccacatcagggccacactgcactatgatccactccaccagccgctcctccagctcctcgtcatacttcttctcgattttggactgcacttcgcggctcatgccataggaaggacccttgttggccatgtctggggaaagaaggcttcctcagggctcgcaggaaggagtgaagacttgtgtctgggttcc

SEQ ID NO: 164036 - DNA, 1310 bp, Homo Sapiens
gggcccgcggaggaaagatactggggagtgggagccgcggggttcagagcgatgattcccccacaggaggcatccgctcgacggcgggagattgaggacaagctgaagcaggaggaggagactctgtccttcatccgagacagcctggagaagagcgaccagctcactaagaacatggtgtctatcttatcatcctttgagagccgccttatgaagctggagaactccatcatccctgtgcacaagcagacggagaatctgcagcggctgcaggagaatgttgagaagacgctgtcctgcctggaccatgtcatcagctactaccatgtggccagtgacactgagaagatcatcagagagggccccacaggtaggctggaagagtacctgggaagcatggccaagattcagaaggcagtggagtatttccaggacaacagcccagacagcccggaactcaacaaagtgaaactgctctttgagcgcgggaaggaggccctggagtccgaatttcgcagcctgatgacgcggcacagtaaggtcgtctcgcccgtgctcatcttggatctgatcagtggtgacgatgatctggaggcccaggaggacgtgaccctggagcacctgcccgagagcgtgctccaggatgtcattcgcatctcccgctggctggtggaatatggccgcaaccaagatttcattgaacgtctactaccagatacgctccagccagctggaccgctccatcaaaggactgaaggagcatttccataagagcagttcttcctctggggttccctactcccctgctatccccaacaagaggaaagacacacctaccaagaagccagtcaagcggccagggagagatgacatgctggacgtggagaccgatgcctacatccactgcgtcagtgccttcgtcaagctggcgcagagcgagtaccagctgctggccgacatcatccccgagcaccaccagaagaagaccttcgactccctgatacaggatgccctggatgggctgatgcttgaaggggagaacatcgtgtctgctgcccggaaggccattgtgcgacacgacttctccacggtgctcaccgtcttccccatcctgcttatctcgaggagataagcaggattcagagtttgagaagccccagtgtgcatcagacccagcacgttgaaatgtacccactacaaagaaaagaaactttttatctgaggaaggcgagccccctttaaatgatcaggcctagagaggcactggaatgagacaggtgtcacatttcactggccccactggagaaaga

SEQ ID NO: 164037 - DNA, 1034 bp, Homo Sapiens
gctgaccagaggatcgcaattagcaaaatgggcatttccacccttaactagttacttacaggcagatgtctttctactatactaagattttctatatccattttccctaatctttagagtttaatgagaaaccatttattctacaaagaaatacagcatatatggccacagtctaaatacgcttataactggacaattatgtcacttaaaaaaaagatcttgcactgttacatcattactctatggtaattcaataggtgctgggatctgccctcaccaaaaagcatggcactcaactgcccagggtgaatactaacactgcacaaagagaagcagtaacagcaaagtctccatagaactctttctatttatttaactgtgtatgagcatttagttaatgctccaaattgaaaatggtgcaataaaagcaactttcaatatataaacagacaggaagctgcgatgccagtggccacttggcgctgcaagtagggaaaataaagcagtttgcatgagtgaagcatggattggggagaggagaaaagggaggcacaggaggcagatttcagacagacagtgacacaaaactgttgtactgctggatgtttcgtttgaggatgtctgagcatgggccaagaacacgttcaaatctaggtcggtccagcttaacgcacttcaaggggccacgagcaacaactgtggcagcacgaggacgattcatcagtagtgcaatttcaccaaaataatcagaaggccccaatcttcccacttcaacaaactcttcattttctgaccgacgttgtagcacagcagctgacccctctaaaataatgaagaactcatcccctggttctccctgcaccacaatcttctgcccatcttcaaactgcactggttccaatgcatcagctaccgtaagacgttcccacttgtccagagactctaaaatagagactttactaaggaattcctcatacatcttccgctttctcagggattcagaagatggtaccggctcgattcgtaatactgta

SEQ ID NO: 164038 - DNA, 1058 bp, Homo Sapiens
ctggcaatagcaggaaagtaggtacataaaaaggttgcacccataaacttctgtgccaaagctatctgtaaaagatacttttagcttgccatttattaaagtttgctatgtattctatccaatagtcagtgcacgtggggaataccaaagaaacagaagatagatccgtattttttaaggagatttatactagagccctaaaagcttaatgaaaacaaagggataagcttgtatctagttctgtgtgccattgctgctcaatatagctttatgtaagcatggcaagtgtttagttctaccttcagcattcaaggcaaaaggagttgctgacattgtcctcccccaaagagttaccagcctatcctatgggcaagattggaacaccaagctccccggggcatataagaacatttacaaagggtactccaactaaacatttttaaatcgcaaacgcaatctttattgggtttatataagttaagtcatatttataaaacttccatggtattttactttccagagaatcttattaggaattatttggcaaaataaattattattaatctggttttgaacattttttaattatcggtagtaagtctctgcttagtgatataataactacgtagaattgtcattacacaagcaatcatgttggagaaataaaaataacactgaagcatattatcttactggaaataaaatttcttccccaaattttaaccacctctcactctacgttgagtaagtagaacattgtttagattttttaaataagtggaaaatatggaaactttaatgttgaattaagaatattaaaatctaattttcatatgctagaaattggcttctgcttaaatgtttctaatttcatcccaataaagtttaagtactctaaaattgttagggtctctttggtccagcaggtggggcaattcagaaatcactatgacctccttcctccatgaataatggtgattacaactgtttccaaaagattcatgattcatgtcccagatgtctcctcagtacaaatataccagatgctgctttatcta

SEQ ID NO: 164039 - DNA, 612 bp, Homo Sapiens
  misc_feature (70)..(87): n is a, c, g, or t
aatggaagacaatcaccgaatgacagttgtaaaggacgggaagacaagcaggaaatgacatgattagtgnnnnnnnnnnnnnnnnnngaaaccaggtggctgctgagagcatgtatatgagagaagcattagagaagatacagggagatgaggaggtcgtcatagtccatgtgagagatgatgatggcttgcagttaggcagaggcaatggcaacgacaatggcaaaatacagttgaaggagaaaagtaactaagataggagatggctaaggctatctttgacttatccaaatggctaatggggaagacggagtggtgttaaagagtaactgttttccacaccccttgaaattcagttcaggccattacagatctgtcctgcatgctcctgtattaatttactatggcagcagtaacaaataatcacaaacttgatagcttgaaacaataaatttaattcccatagttctggaggccaggaagtccaatatcagttttatcggtatctgtagggccatgctcctgctcgaagaggctctggggaagaatctgttctttggctcctccagcttctggtggctgcagcattctttgctgcggtcctccctccat

SEQ ID NO: 164040 - DNA, 674 bp, Homo Sapiens
tgagccaatgcatgcttgtggttaagatcatggactttgtgttttgagaaaggcctggtcttaaatcccagttgtcctattacccctctaagtgacttcgggtaagttacttaatctctgtaacccagccttatctctgaaatctggacaatcaatgtacctacctcacagagttgtcgtgatgatttgcatgagataatttgagtatttagaactgtggctggaacatattggttcttaaaagagataaattattttattgatgttaaaagaatatagatgatgttccacagtaagtaaataaaatcagcatctaaaacaaacttgaattgtgatgatcaagaaaaaaaatgtttaccttgcaaagaaatacagatctgcccactgtcatgagacagtggcttcccattagctctgttttagatcatttctaaatttactagattgtaaaatcttattatgaaagcctagacagggtgatgtatgtggagttctgtttataattaacaccttatagaatgtaatgtttttaaccaatgaatttttaaacaaaagaaaaagggattttcaactaataaaagtccctccctcacctcagaggtcaccttctcagggcgacctgcctggtgatgctatccagcattgcagtccccacccccgacctggcgtgcccc

SEQ ID NO: 164041 - DNA, 561 bp, Homo Sapiens
ttccgtctcaaaaaaaaggccccatgatcacttctcagaagtaagcaacattatacttcaatgaccacagtgtgatccatatgccacaccagctgtcaatgtcacctaaagaccaaagtgacaaacccgcgtcactactggaccacgcctgtcaggtatctccagagattagttactatcacatgattgttttgttttgttttggattgggacagaagataaaacacaactattttaggttttagattttttatttgtaaaaacccacccagcacattaactctagagctgggatacaactgtacttacctaagaaagatttaatagttagagaaagttagtttaaatccattttagttagatgatgtggaaaatcggagtgtcaacttctttttttcttccaccttcttctaactgcacctttaaaaaaattcgtttataatagaatgtacccaaagtcatacactgaatttattataattgtactgtcatataacctctttcaaggccgagacaggatgcattccatttgtataatttaccccaacaaagcagaacaaa

SEQ ID NO: 164042 - DNA, 691 bp, Homo Sapiens
tgatggatccgaatatttagatggattgcagaccaggaattagagaccgtttgtgactcaaggaacttgatggatctgtttagagccctacatgaatttgccaagggcagtgatttttatgaaattcaagaagcaaacgacttcgatacagctagaatatgttgcagtcttcctatttcaaacttgattttaatatttttaccaagaagtttaactgacaactctgcaaaattttcattcagtatcattaaacctgagttaaatgtttgcttagcttatcctcttagatgttcttctgttgaacaggcaggttgcccttaacagtaacttgctacttaaattaccttttattagttagtcaagctgcaaaaatatcattagtgtggcgtctttattttggctttatccatatgaagtattcattattttcattctttttgagaattcataaatgtcttaaagcttcagtaagaattgttgggaggtttgacatcaagtaacgccttcctgtgtagcagtataaccctaatttagaactcttgttttcctatttcagtcctcatatttgatcatagaaaagcacttttgtgattctataggagtcaaaaaatcagccaagagtaggtaagtcagtcagcacagaaatcagaaagtgagattttctccaaaaaatctttttaaaagacctgct

SEQ ID NO: 164043 - DNA, 604 bp, Homo Sapiens
  misc_feature (155)..(164): n is a, c, g, or t
ttcaatttcacacacacacaagctcaagaaagagctaagaccactacacacatctccacagcaccacaggcacatctcaaaagggtctgtccagtagttccagccaagggaagggtgatggcctaagccaccagctccagctttcttttctatcnnnnnnnnnnggagctggagtttggctcttgttgccaggctcctgagcagctgggaccacaggcatgcaccaccatgcctggctaactctgtattcccagtagggtttctccatgtgggtcaggctgatcctgaactcctgacctcaggtgatccggctgcctcagcctctgggataataggcgtgagcaattgcgcccagcctccagttttcttttctttagagcagcggttttaaatccttgttggcttcaagttctctgaaaatttactatgctctccacaacaagagctcccattttccacagacacagtcaatgtcagtcagcttgtattcaggaggacagggcagagggatcccagtggcacttcccatgggaagacagaagagagtgggccccagagatggaagaccccaggtatgtgagggctgggggatcctctaaaaacg

SEQ ID NO: 164044 - DNA, 577 bp, Homo Sapiens
  misc_feature (106)..(128): n is a, c, g, or t
  misc_feature (454)..(454): n is a, c, g, or t
atcccccagccctacatacctccacagcacacaggcacatctcaaaagggtctgtccagtagttccagccaagggaagggtgatggctaagccaccagctccagcnnnnnnnnnnnnnnnnnnnnnnnggagcgggagtttggctcttgtggccaggctcctgagcagttgggaccacaggcatgcaccaccatgcttggttaactctgtattcccagtagggtttctccatgtgggtcaggctgatcctgaactcttgacctcaggtgatccggctgcctcagcctcggggataataggcgtgagcaaatgcgcccaagcctccagtttactttccttaagaagcagcggtttaaaatccttgggcctccaaagtcctctgaaaattaactaggctctccacaaaaggagctcccattttccacagacacgagcaaggtcgagcagctggtantcaggaggccggggcagagggctcccagggcccttcccatggacgacagaagagagggcccaagagatgaaggcccaggtatgtgaggggtggggcccgagccgaatcgaacatggcaagtgt

SEQ ID NO: 164045 - DNA, 1156 bp, Homo Sapiens
tgttctagaggatctcaggagatagcaggatagttttgggtaagttgcacagttcataatctaaaagttaaaatgcaaccttatatgctggagagtaaactgccagtaacagtacatttagaaacattgcattctgaaaaagtctcctggggtttatgtgggagtgttacaatttccagaatgactggtctagataatcaacatgtgtgtccggattttaactttaagaagttagatgggaagataaagcaatatatgaagcaatctgtgaatagttacataataacctgcacataacaggtagtaagttcaacataactttataaaatgttgtatggaaatataatctcaaattctaggagttaatgatctccaataaaatattcatgtccataaatatgaaaaaaggaaaagctcattgaaatatttttccattttaaatgactttcaggaggcacttacaaagactagaaatttcagtgtaacagctacagcctaccaattccacttggctgtagaagtcaaatttgaaaataatttaaataaaaatacttgccaatgttttgtgataattcccactgaagcccacacttacttgagtgttcctttctctctttaaatattttcacattcagaaccaatgcacattttctggaacaagtggatacatgtaaagaagctatactaaacttttataaaaaggacattatatccttgtatccctcctatatcctactcaattagttctatagattagtaaattttctaaagttattaaaagcagaagttttgaagatggattcaaaggattgatgagactgaaattctttgttaattcccccaaatctgctatggaatcaatttagggaaaggtctctgttcccaaagctatcttaactttttccgtaaaatttactttacccttagttctgccatgtaagtaatgttaggagtgaagtgaaatgattttaagattcatgatggaagataccggattgagttttgtctagaattagtaattatttctccagccaccatcagcatagatatgtctacatatctcatatttgcctaacttccccaatccttaaggtatgtggtttggctctatataccaatgaaaattgtgcccgagtatagtgactgaacttttatg

SEQ ID NO: 164046 - DNA, 695 bp, Homo Sapiens
tgttctcattctgcaaatggtgaagctctctattgtcctgaccccacagttcctgtccaatgaccagggccagctcaccaaggagctgcagcagaatgtaaagtcagtgacatgcccatgcgagtacctgaggaaggttatcaatactctggctgaccatcatcatcgtgggactgactttggtggaagtccttggttacatgtcattattgcgtttccgacaagttataaagttgtcattaccctctggatagtttacctttgggtgtctctcctgaagactatcttctggtctcgaaatggacatgatggatccacggatgtacagcagagagcctggaggtccaaccgccgtagacaggaagggctgaggtccatttgtatgcacacaaagaaaagagtttcttcctttcgaggaaataaaattgtcctgaaaagacgtcattactctacggagacatgtggaaacaaaagttagagctaaaatccgtaagaggaaggtgacaacgaaaatcaaccatcatgacaaaatcaatggaaagaggaagaccgccagaaaacagtaagatgtgccttgacacaaatactgttgtatgaaccatgtgccaatcaaagtagacaactgtaaagtccttgagaatattttctacaatatttgtggcaaattcagtgggttcaatattgagttgtccttt

SEQ ID NO: 164047 - DNA, 964 bp, Homo Sapiens
  misc_feature (860)..(860): n is a, c, g, or t
  misc_feature (874)..(874): n is a, c, g, or t
  misc_feature (900)..(900): n is a, c, g, or t
  misc_feature (905)..(905): n is a, c, g, or t
  misc_feature (923)..(923): n is a, c, g, or t
  misc_feature (930)..(930): n is a, c, g, or t
  misc_feature (942)..(942): n is a, c, g, or t
cctctcagcaggcctttgctggacagatgaagagtgacttgtttctggatgatgataagagtgaccttgaggaaccctgggagctcagaaaggaaggagcacccagaagcagggacagggagctggttggggagaaccagaaatcaggttatcaatactctggctgaccatcgtcatcgtgggactgactttggtggaagtccttggttacttatcattactgtgtttctgagaagttataaatttgccatctccctctgcacaagttacctttgtgtgtctttcctgaagactatcttcccgtctcaaaatggacatgatggatccacggatgtacagcagagagccaggaggtccaactgccgtagacaggaaggaattaaaattgtcctggaagacatctttactttatggagacaggtggaaaccaaagttcgagctaaaatccgtaagatgaaggtgacaacaaaagtcaaccgtcatgacaaaatcaatggaaagaggaagaccgccaaagaacatctgaggaaactaagcatgaaagaacgtgagcacggagaaaaggagaggcaggtgtcagaggcagaggaaaatgggaaattggatatgaaagaaatacacacctacatggaaatgtttcaacgtgcgcaagcgttgcggcggcgggcagaggactactacagatgcaaaatcaccccttctgcaagaaagcctctttgcaaccgggtcagaatggcggcagtggagcatcgtcattcttcaggattgccctactggccctacctcacagctgaaactttaaaaaacaggatgggccaccagccacctcctccaactcaacaacattctataactgatanctccctgagccttnaagacacctgtcggagtgtgctgctnctatncccctttccaccctcagncgggtgnttattttcaagncatctccgagtgttttggttca

SEQ ID NO: 164048 - DNA, 506 bp, Homo Sapiens
  misc_feature (35)..(35): n is a, c, g, or t
  misc_feature (37)..(37): n is a, c, g, or t
  misc_feature (51)..(51): n is a, c, g, or t
  misc_feature (56)..(56): n is a, c, g, or t
ccggtttccaccctcagccgatgatattctcaagncncctcccttagctantcagnaggtgaggcagaaaaaccacggcaaacccaagaggcagaggcgggctgagatggaaccacctcccgaacccaagaggcggagggtcggtgacgtggaaccgtcacgcaaacccaagaggcggagggccgctgacgtggaaccatcatcacccgaacccaagaggcggagggtcggtgatgtggaaccgtcacgcaaacccaagaggcggagggccgctgacgtggaaccatcatcacccgaacccaagaggcggagggtcggtgacgtgaaccgtcacgcaaacccaagaggcggagggccgctgacgtggaaccatcattacccgaacccaagaggcggaggttgagctgagaagaggccagtgcactcaagcctgagcaataagaacaaaaccgagggttgctgtatcacaatacctcatgcttcacataaccgagcgagggaccgct

SEQ ID NO: 164049 - DNA, 201 bp, Homo Sapiens
cgggaagatagtcttcaggaagacacacaaaggtaagttgtgcagagggagatggcaaatttataacttctcagaaacacagtaatgataagtaaccaaggacttccaccaaagtcagtcccacgatgacgatggtcagccagagtattgataacccaaaggtaagttgtgcagagggagatggcaaatttataacttctc

SEQ ID NO: 164050 - DNA, 900 bp, Homo Sapiens
cgaaccctcggaaagcacacccatgagaacaaagagctctggagagttttggattcctgaagagctgcaggggaactgggagagggttttctgacagaacaatcttacctcaagaagtcagttaggcatggctgtaatatttcttttcactcccaggtaataccaaattgtaagtgcactaggacataaagaatacttttgtccatggaaaaatgaggtgggaattctaaacaaagcaagttttaaaactgtgtttcacttcaagtgtacaagtcccatcgcgtgtaatcataggactcggcagcttttgaaggtacagaggccacacaagaaccagcttagctgagcatcatttaaggccctcatttggaattgtccctgtgggtaataagttacattcactcttcactaatttacagtcagggcccatttgctattacaaatacggaacctctgacacttagaatattagatgggggccccactgggtggggatgaaggtgtttttgcgcaacacagttaccaacagggatgggactgtgatgcttgtaggcagccttcctctctgccatctccctctgcagggcttgagcacacagccgtagggagaaaaatgtatccatgtcctgacctggcagactatgtccaaaagcaaggaaaacaagcaaacttacccagttgcaaagagcctttcttgcagaaggggggattttgcatttgtggtagtcctctgctcgccgccgcaactcttgcgcacgttgaaacattttcctatggattacaatcactttcatcagataaagcaccactttcaggatgattttaaataatctgccatgtttctgttatcctcacaactgtacccttacacaatctatctctacctagaaaacgtatttc

SEQ ID NO: 164051 - DNA, 869 bp, Homo Sapiens
tttcctaggtgtctctcctgaagactatcttctggtctcgaaatggacatgatggatccacggatgtacagcagagagcctggaggtccaaccgccgtagacaggaaggtatggctctgttggaatccgcatagtgtggaaatgagtttgccctggaaagggaaagaacagcttcttgccctcaggtttctcaccttctcctctcctcactctcaccaagggctgaggtccatttgtatgcacacaaagaaaagagtttcttcctttcgaggaaataaaattggcctgaaagacgtcattactctacggagacatgtggaaacaaaagttagagctaaaatccgtaagaggaaggtgacaacgaaaatcaaccatcatgacaaaatcaatggaaagaggaagaccgccagaaaacagtaagatgtgccttgacacaaatactgttgtatgaaccatgtgccaatcaaagtagacaactgtaaagtccttgagaatattttctacaatatttgtggcaaattcagtgggttcaaaattgagtttgtcctttctgcttcattagtttaagctgtataattcctttcccttcctacattcttgttttcattttttcggaggaagaggagttgctagtactggcatcggttttcctttctctttttacctgttttttcacccgggaagggccctttcttttgttaccccacgctgatttgcagggcgcacattttggcccccttgcttttaggttcaaaccaatcttccgcgggagacttccaaggaccctggattcacggggcccacccaccacccccgctttattttgtgtttttcaccagaaagggggtttcccctggtggccaaggttg

SEQ ID NO: 164052 - DNA, 745 bp, Homo Sapiens
  misc_feature (435)..(435): n is a, c, g, or t
  misc_feature (482)..(482): n is a, c, g, or t
tcaatgcagcggactcgtcagatgataatatcaagacacctgccctccaccctcagcggatgatctcaagacaccttccgagcgtcagctcactccccttccaccctcagctccaccctcagcagatgataatgtcaagatacctgctgagcgtctgcggattccgcttccaccatcagccgatgataatctcaagacaccttccgagcgtcagctcactccccttccaccctcagctccaccctcagcagatgataatatcaagacacctgccgagcgtctgcgggggccgcttccaccctcagcggatgataatctcaagacaccttccgagcgtcagctcactccccttccaccctcagctccaccctcagcagatgataatatcaagacacctgccgagcgtctgcggggagcgtctgcgggggccgcttnccaaccctcagcggatgataatctcaagacaccttccgagcgtcagnctcactcccccttccaccctcagcttccaccctcagcagatgatacatatcaagacacctgccgagcgtctgcgggggccgcctttccaccctcagcgggatgattaatctcaaagacacctttccgagcggtcagcttcactccccctttccaacctttaagtttccacccctcgggcagaaaggataataacccagaaaacccctggtttaaacccttctggcggggggggccccttttccccccctttagaggggaaggg

SEQ ID NO: 164053 - DNA, 1740 bp, Homo Sapiens
agcatgtaaagtcagtgacatgcccatgcgagtacctgaggaaggttgatggacggatggctacatggatgtgatggagatggtttactatcgggaccttccgcaccctgctgatgttttgttgcttaggatatgaatggctgagcggaggctgtaaaacctggcactctgcttgggtatgaggttcttcctgccatcctgccatcatttgttttttatgttttgtcgccataagtgaccttgaggaaccctgggagctcaggaaggaaggagcgcccagaagcagggacagggagctggttggggaggaccagaaatcaggttatcaatactctggctgaccatcatcatcgtgggactgactttggtggaagtccttggttacatgtcattattgcgtttccgacaagttataaagtagtcattaccctctggatagtttaccttatgagtgtctctcctgaagactatcttctggtctcgaaatggacatgatggatccacggatgtacagcagagagcctggaggtccaaccgccgtagacaggaagggctgaggtccatttgtatgcacacaaagaaaagagtttcttcctttcgaggaaataaaattggcctgaaagacgtcattactctacggagacatgtggaaacaaaagttagagctaaaatccgtaagaggaaggtgacaacgaaaatcaaccatcatgacaaaatcaatggaaagaggaagaccgccagaaaacagaaaatgtttcaacgtgcgcaagagttgcggcggcgagcagaggactaccacaaatgcaaaatccccccttctgcaagaaaggctctttgcaactgggtcagaatggcggcagcggagcatcgtcattcttcaggattgccctactggccctacctcacagctgaaactttaaaaaacaggatgggccaccagccacctcctccaactcaacaacattctataactgataactccctgagcctcaagacacctcccgagtgtctgctcactccccttccaccctcagcggatgataatctcaagacacctcccgagtgtgtgctcactccccttccaccctcagcggatgataatctcaagacacctcccgagtgtctgctcactccccttccaccctcagcggatgataatctcaagacacctcccgagtgtctgctcactccccttccaccctcagctctaccctcagctccaccctcagcggatgataatctcaagacacgtgccgagtgtctgctccatccccttccaccctcagcggatgataatctcaagacaccttccgagcgtcagctcactccccttccaccctcagctccaccctcagcggatgataatatcaagacacctcccgagcgtctgcgggggccgcttccaccctcagcggatgataatctcaagacaccttccgagcgtcagctcactccccttccaccctcagctccaccctcagcagatgataatatcaagacacctgccgagcgtctgcgggggccgcttccaccctcagcggatgataatctcaagacaccttccgagcgtcagctcactccccttccaccctcagctccaccctcagcagatgataatatcaagacacctgccgagcgtctgcgggggccgcttccaccctcagcggatgataatctcaagacaccttccgagcgtcagctcactgcccttccaccctcagcagatgattatatcaatac

SEQ ID NO: 164054 - DNA, 908 bp, Homo Sapiens
  misc_feature (670)..(670): n is a, c, g, or t
  misc_feature (678)..(678): n is a, c, g, or t
  misc_feature (752)..(752): n is a, c, g, or t
cacatccagagggccacctgctgcgttctcctcatctgtctcttcctgggcgccaacgccgtgtggtacggggctgttggagactctgcctacagcacggggcgtgtgtccaggctgaacccgctgagcgtcgacacagtcgctgttggcctggtgtccagcgtggttgtctatcccgtctacctggccatcctctttctcttccggatgtcccggagcaaggtggctgggagcccgagccccacacccgccgggcagcaggtgctggacgtcgacagctgcctggactcatccgtgctggacagctccttcctcacgttctcaggcctccacgctgaggtgagggctctactgggggtcctgccgccttggcgcagcttggactcaagaccctgtgcacctctcagcaggcctttgctggacagatgaagagtgacttgtttctggatgattctaagaggttgatggacggatggctacatggatgtgatggagatggtttactatcaggaccttccgcatcctgctgatgttttgttgcttaggatatgaatggctgagcggaggctgtaaaacctggcactctgcttgggtatgaggttcttcctgccatcctgccatcatttgttttttatgttttgtcgccaaaagtgaccttgaggaaccctgngagctcangaaggaaggagcgcccagaagcagggacagggagctgggttggggaaggaccagaaatcaggttatcaatactnctggctgaccatccgtcatcgtggggactgacttttggtgggaagtcccttggtttactttatcatttactgtggttttctgaagaaagttattaaattttggcccatcttcccctcttgcacaaaggttacccttttggtggggggcctttttcc

SEQ ID NO: 164055 - DNA, 867 bp, Homo Sapiens
  misc_feature (650)..(707): n is a, c, g, or t
  misc_feature (799)..(799): n is a, c, g, or t
  misc_feature (832)..(832): n is a, c, g, or t
gacaccttccgagcgtcagctcactccccttccaccctcagctccaccctcagcagatgataatatcaagacacctgccgagcgtctgcgggggccgcttccaccctcagcggatgataatctcaagacaccttccgagcgtcagctcactccctttccaccctcagctccaccctcagcagatgataatatcaagacacctgccgagcgtctgcggggagcgtctgcgggggccgcttccaccctcagcggatgataatctcaagacaccttccgagcgtcagctcactccccttccaccctcagctccaccctcagcagatgataatatcaagacacctgccgagcgtctgcgggggccgcttccaccctcagcggatgataatctcaagacaccttccgagcgtcagctcactccccttccaccctcagctccaccctcagcagatgataatatcaagacacctgctgagcgtctgcgggggccgcttccaccctcagcggatgataatctcaagacaccttccgagcgtcagctcactccccttccaccctcagctccaccctcagcagatgataatatcaagacacctgccgagcgtctgcgggggccgcttccaccctcagccgatgataatctcaagacaccnnnnnnnnnnnnnnnnnnnnnnnnnnnnnnnnnnnnnnnnnnnnnnnnnnnnnnnnnngcggctgagatggaaccacctcccgaacccaagaggcggagggtcggtgacgtgggaaccgttcaaggcaaacccaaggagggcggaggggncgttgaacgtgggaacccttcattcacccgaanccaagagggcgggagggttcggtgattttggaatt

SEQ ID NO: 164056 - DNA, 1087 bp, Homo Sapiens
gtgagtctagaggatctcaagtaaggcaggaggatgatgaagatagagaagatgaggaggaagtccccaatgcgcaagtggcaagggatcgaggccgtgttttgaagcttaccaggaacacatagaagagcaaaatctggtagcggcaggttgttacaggacacaactgtagagcgactggatggccgcggcactacagtcctcagcgctgacggcagagcagctcgtcccacatgcgtgtgcggagttgagcgagccagaaaacagtaagatagtctcagaatagggagcggctccaggcagtaactggaccacttacgaaagtgccttgccttgcctgcaatgcactggcctgaggggctacatgaagggatatcccaggtgacggtttcccttgcactaggccgaacctatagtatagaaatattatccattttattaccttgaatatttaatatttttcactgggaggtttgaagcttacaaaatgagaatgtgccatgcatgaagcaaaggattccaggctccagaaaaaatgaatgaactcaccttgacgtcaatgcaattgaatcaccgttgtcattcagcgagcaaccaatgtaggattgcccacagtttttctttttaaaggtggttttcgcccttcctctcccacattatttcttaatctgaacatgaaggctccattagcaacactaaaaattgatcattaacagccccctgtgcatatgagtggatcaaaccggttctgttctttcttgtgttgccatgttactatgcctcaagcccagtttgctttcgccgcagcgatggggccagtctcattcctccccaggagtgaaacttgcttcagctgaaaaggttgggtgcattgtcagtaaaaagggcttatttgtttcattttactttcctgcaaaattttcttcaaagcaacaagtcctaggagcacacaaagcaacccaaaggcttttccctggaaaagctctttcttacctaaagataaaaacaattcacaaactgaaggtagctttttattactccgtggggagcatgtacagagctctgtgtatacacagccatttaggta

SEQ ID NO: 164057 - DNA, 1247 bp, Homo Sapiens
  misc_feature (968)..(969): n is a, c, g, or t
  misc_feature (1045)..(1045): n is a, c, g, or t
  misc_feature (1135)..(1135): n is a, c, g, or t
gggggggtcacgtggtggctgggccggggaaatggcggcttcaggagagagcgggacttcaggcggcggaggcagcaccgaggaagcatttatgaccttctacagtgaggtgaaacaaatagagaagagagactcggttctaacttcgaaaaatcagattgaaagactgacccgtcctggttcctcttacttcaatttgaacccatttgaggttcttcagatagatcctgaagttacagatgaagaaataaaaaagaggtttcggcagttatccatcttggtgcatcctgacaaaaatcaagatgatgctgacagagcacaaaaggcttttgaagctgtggacaaagcttacaagttgctactggatcaggagcaaaagaagagggccctggatgtaattcaggcaggaaaagaatacgtggaacacactgtgaaagagcgaaaaaaacaattaaagaaggaaggaaaacctacaattgtagaggaggatgatcctgagctgttcaaacaagctgtatataaacagacaatgaaactctttgcagagctggaaattaaaaggaaagagagagaagccaaagagatgcatgaaaggaaacgacaaagggaagaagagattgaagctcaagaaaaagccaaacgggaaagagagtggcagaaaaactttgaggaaagtcgagatggtcgtgtggacagctggcgaaacttccaagccaatacgaaggggaagaaagagaagaaaaatcggaccttcctgagaccaccgaaagtaaaaatggagcaacgtgagtgaccgcccaagtcacaggcacagaacctttcccctgctatctcccttcctgcttcgaaggactcattctttcctcccacttccaccccaacatagagtagtatttgctttttagtccattttgttttcaatacgatttaatatcgatcagagtaattcttttgtacattgaaatganngggcttggtttaaaaaaagacctttccctctccctgcccctagaacaaccagtattagaaggtgcccaccattggntgctgcctttctcttcccacaggcctgtaaactcagtggttttgtactttcactgaaatttgtgatgggttagaaacttcgtggaatagnttggtggaaaatcatcccaattaaacatactggcttaaaaacagatggtggctgtggacttcaaagaacaagcctgggaaagggccaccttaggaaagcccctttcctttcg

SEQ ID NO: 164058 - DNA, 1659 bp, Homo Sapiens
  misc_feature (1048)..(1074): n is a, c, g, or t
  misc_feature (1456)..(1456): n is a, c, g, or t
  misc_feature (1458)..(1475): n is a, c, g, or t
cagtagagtataagcaggctggtccggtccggaagtcccgggatatcgtcgaccacgcgtcggagctgttcaaacaagctgtatataacagacaatgaaactctttgcagagctggaaattaaaaggaaagagagagaagccaaagagatgcatgaaaggaaacgacaaagggaagaagagattgaagctcaagaaaaagccaaacgggaaagagagtggcagaaaaactttgaggaaagtcgagatggtcgtgtggacagctggcgaaacttccaagccaatacgaaggggaagaaagagaagaaaaatcggaccttcctgagaccaccgaaagtaaaaatggagcaacgtgagtgaccgcccaaggtcacaggcacagaacctttcccctgctatctcccttcctgcttcgaaggactcattctttcctcccacttccaccccaacatagagtagtatttgctttttagtccattttgttttcaatacgatttaatatcgatcagagtaattcttttgtacattgaaatgaggggcttggtttaaaaaaagacctttccctctccctgcccctagaacaaccagtattagaaggtgccaccattggtgctgccttctcttcccacagcctgtaactcagtgttttgtacttcactgaattgtgatggttagaaacttcgtggatagtttgtggaaatcatccaattaaacatactgcttaaaacagtgttgctgtgacttcagagacaagcctggaaggggcaccttaggaagccccttcgcttcagttgctcgcttctgggtgtgctcccttcgaaggcccagataagacagggaacacttgtgagcacacagagcagcatctgatgccctgtggtgtttggcatgtgccccctgtctactgaccaatcagtgtggcatgaggcccacgccacccaaacctttcactttccaaagagctagccgtcctccacccagtaccatgtcctagcctgtctgcatttgttagtggtaatattctttatgtataataaatttttatactcnnnnnnnnnnnnnnnnnnnnnnnnnnnttccttggtcggccggcctcggccctccgagaaagctttctaaaaccattcggtttgggcgccgcgggccccaagtaggtaaagtggaaacatgggtcaatagctggttttccctaagggaaaatccctggggtccatggaactaagttggccttgggaattcctcccccccaaattaaaaaaaataccgcccccgggggcgcgccaaaacccggaagggggttttcctggaaaaccaaaattccccagaaatgggggaagttttcctttgaaagcgggcccattttaacctgggggatatccttatatccgaacccagggggaaagccccccaaagagccgtaaacgcccttcccatatatatctccaaaatttttaacgngnnnnnnnnnnnnnnnnnngttgggcgcaaactttcatattctgggaaaaagcacaccgtggcgtggggtcaaaataattccccatttttaaaagcccctatttctctcgtgcccgcgacaaccagtggcgtaaaaaaagtcccctttttcacccacaaataaccgggggctaaatttggtgtattaggaaaaacccccctgc

SEQ ID NO: 164059 - DNA, 173 bp, Homo Sapiens
aacattgggtcttagtccttaaaataacttgcaacctgttacctcttcacttactcccaacgccaccacaagaatcctgtgtgttttggttttgtgcatccagtctaaaacgggtctgcttttattcataggcttttgtttcaggggttttgttgtgcattttcctagataaa

SEQ ID NO: 164060 - DNA, 586 bp, Homo Sapiens
  misc_feature (407)..(465): n is a, c, g, or t
gtacagagtgaatgtctggaaacacagctcctgggaattcacatgaggccagtcctacagagagcaagatgcaccccaggatttcttccattttctaatagatgtgggagtgctccattttccccgacagcgaatttcccctgagaaacgatactagaccctgggtttgcccaccttgtaactcttccttatctcctccttttcatccctaattcatcctccctctggcatggaattgacgcccgtgcagtacatttgccaagtggcaccttctttcaatttatgttttattttgctatggtggtgattctttatttgctggttgtcttttctcacacatctttctctctgtctctctctttcctgctctttgtttttctgcccagaaaaacctgacttcgataccnnnnnnnnnnnnnnnnnnnnnnnnnnnnnnnnnnnnnnnnnnnnnnnnnnnnnnnnnnntactcaacgattctttcagctttattaacattttccattgtttcttgcgacttgtgtctcgttctttgtagtattgatgatgaacatttgataatgaatgttcttgtatattcagataaag

SEQ ID NO: 164061 - DNA, 998 bp, Homo Sapiens
gtcgatctagcaggatctcgaggagatagcaggagtcattactacttataacatgatgaagacaaatactgctgtcagaccatactgtttcattgaatttgataacttcattcagaggaccaagcagcgatataataatcccaggtctctttcaacaaagataaatctttctgacatgcagacggaaatcaagctgaggcctccttatcaaatttccatgtgcgaactggggtcagccaatggagtcacatcagcattttctgttgactgtaaaggtgctggtaagatttcttctgctcaccagcgactggaaccagcaactctgtcagggattgtaggatttatccttagtcttttatgtggagctctgaatttaattcgaggctttcatgctatagaaagtctcctgcagagtgatggtgatgattttaattacatcattgcatttttccttggaacagcagcctgcctttaccagtgttatttacttgtctactacaccggctggcggaatgtcaaatcttttttgacttttggcttaatctgtctatgcaacatgtatctctatgaactgcgcaacctctggcagcttttctttcatgtgactgtgggagcatttgttacactacagatctggctaaggcaagcccagggcaaggctcccgattatgatgtctgacaccatccttcagatctattgccttggcttcagggggataaggagggaacatatcataactgccctgtgatgaagaagctgttccccacagaggagaagctctgctttctttctctccaactttccttttttagaatcagcatgatgtgcctgtgagcatggaagagtcctctcagaagaatgttggccatgagactatcattcagaggaggaggggatttctctcttcaaggccataacagtggaagaacagtcatgtgccattggaagtctggccagcagtcctgatccttcctgctatctcctcagggatcctcta

SEQ ID NO: 164062 - DNA, 828 bp, Homo Sapiens
  misc_feature (18)..(18): n is a, c, g, or t
tcccaagatgaacgatantcatcgcttctgtctccgtttgatgctgaaaaacccagaaaatcatgccctatgtgtcttaaatggacacaatgcattgtatctggtagttttaagcatgcgcttggacagtatgtgcaagcctttcgcactcaccctgacgaacctctctatagcttctgtataggcctaacctttattcatatggcatctcagaagtatgtgttacggagacatgctcttattgtacagggcgtgtcctttcttaatcgatacctcagtttacgtgggccctgccaggaatcattctacaatttgggccgtggccttcatcagtgggggctgattcatcgtgcaatccactattatcagaaggccctggagctccctccacttgtggtagagggtatagaacttgaccagttagacttacgaagagatattgcctacaacttgtctctcatctatcagagcagtgggaataccggaatggctcaaacgcttttgtatacctattgttctatataaagcaccgcaactgagaacagagcaatggcagctgctgtgtgaggaccagtgtcttctgtctcagggcttattatttgtaactccaaaatagaaatgacaatttcagaattacctaacaaacagtgtatttatttttaatatgtgataatgatcttgtggtatatatgcaaaattattcctacaaaaatttgtatattggtctgtcattttcctttcacattctatagtgaattgttcccaatgttgaaatggacgtgtaagcctttgagctagcttggagtcgaatacactatttttcactca

SEQ ID NO: 164063 - DNA, 2108 bp, Homo Sapiens
  misc_feature (1614)..(1623): n is a, c, g, or t
gtctccgtttcgttggctcaatgcttgtcctttgtttgccgtgagcgtttgggccgtgtccgtttgcaccctggttctggttcgatggagagacagttgttaggcaatatcctgcgtgcgtaagtctgcctgggtccaggttctatacccctctcccacaaagtggagggagctcccagggcccttcttgatattaggtggatttgcaagatgaatcagccccaactgatgaaggcacggcccaaattgtagaatgattcctggcagggcccacgtaaactgaggtatcgattaagaaaggaaaagccctgtacaataagagcatgtctccgtaacacatacttctgagatgccatatgaataaaggttaggcctatacagaagctatagagaggttcgtcagggtgagtgcgaaaggcttgcacatactgtccaagcgcatgcttaaaactaccagatacaaatgcattgtgtccatttaagacacatagggcatgattttctgggtttttcagcatcaaacggagacagaagcgatgatgtcgtacatcttgggagtgcatggtaacttgattgaaaatgttccagagctggggtttattgacattttccattaccattatcctgatatagttgtatgcctttctgaaatttttgtccagaattgcagcagacagaccaaagtattctagttctttgcgtttttgcctgtcatcataaattgagtaatattccaatgaggaatctacaagcaactcagcctcttgaaatcgggataggtcacataaggagtatatggccttcaacagaagattccaccagtcatcctttgtcaagacgcttgtgagcacagcaaatattgcttttgcatcacaatttgctgactcttggtcattgctgtctgatattttgtctctcgatactttaataagataaagatgcctctctccagacttggaactggatatcaaacaaacttgggctcgattcattgctacctttaaaagcatggctaacatagtaagtaaggtatccacataaccatacattttgccttgtgaaaacaacagagtagaacgatgaagcaataacttcagttcctgctgtgcagcatttgcatcctgtgctaaagtatctggatcatacatgggttccagagcttccagagctttctcaggctggcccagctgctgctgaagggtagaaagtgaaatccttgcatccaaatggagtggggccagatcaaccaccttgccaatagctttcagcagctcgctccatatagcctaaggcctttaaacattctgcatgacgaagccaaactactgcaaggttgtatctttcagagcaaacaagagcactgaggaggggaagtgcagaattatattcaccaacatccagaaaagcttcagcaacatctaggtataggtctcccatatcttcaggattctgttctactagtgttgtcaagagaggattaagtggttcaagaatgttgagatgtacaaggcagaccatcaacttcactgtgatatctataggcacgccatcaggtatagtgcaggtaacattctcaggagctttattctcttctgaggtgccttcttctgaagnnnnnnnnnncccagcacaattccagaaaaatctgtaattatctccaaagcttggttcatacggttggtaagaaatatatagttcagctgctatgttaacatcttccagggagactaggcccgggggtaaggagaaagcttcatcaattatgttaatagcagaagtaacatcatgggcttcatagtaactcttggccatatctctagccagctgcataaaacgttcgccatcagatggagacaaaaggtttaaaatacgcctataaccatccatggccattttatgatcacccatctgttcataaaggcctgatcgctcccacagataacggacaatagaaggttcatatttaagagcttttgtatagcaaaaaatagcctgcttaatattgtcttgttccagagacatttctgccagtctaacccattcttctgtgtcactgggatttaaatgcgcagcaatcaactcaaactgcaatgatttttccatgtccc

SEQ ID NO: 164064 - DNA, 1330 bp, Homo Sapiens
  misc_feature (62)..(72): n is a, c, g, or t
  misc_feature (668)..(688): n is a, c, g, or t
  misc_feature (1140)..(1150): n is a, c, g, or t
gagatccccgagagataagcaggtaagaggtaaaaagtgtaaacccccatacccagatttgnnnnnnnnnnncgatcatagtcttaggagttcatttaaaccataggaacttttcacttatctcatgttagctgtaccagtcagtgattaagtagaactacaagttgtataggctttattgtttattgctggtttatgaccttaataaagtgtaattatgtattaccagcagggtgtttttaactgtgactattgtataaaaacaaatcttgatatccagaagcacatgaagtttgcaactttccaccctgcccatttttgtaaaactgcagtcatcttggaccttttaaaacacaaattttaaactcaaccaagctgtgataagtggaatggttactgtttatactgtggtatgtttttgattacagcagataatgctttcttttccagtcgtctttgagaataaaggaaaaaaaatcttcagatgcaatggttttgtgtagcatcttgtctatcatgttttgtaaatactggagaagctttgaccaatttgacttagagatggaatgtaactttgcttacaaaaattgctattaaactcctgcttaaggtgttctaattttctgtgagcacactaaaagcgaaaaataaatgtgaataaaatggtnnnnnnnnnnnnnnnnnnnnnttattcattccgccctacctcccctttcccaccgcgcccccatcacctacccccttttcatacattattcaaattttgtggccgcctcccgcccccctaaagaaaatttttttaaaacaccttctgtgtttgggggcggggggcccccctccaggggcgacggggaaaccagggcgcttatacgcgggttttcctcccaaagaaaaaacacccgggggtaagagaaaaaaaccaaggcgtttggttgttctcctccccccacaataaacacaaaaacaccccgccggcgcggggtacaacacccacggggttctcttttcaaaacaaaactccccaaaagagagaggtcctcctacggagggggtctcctctctcgggcggctactactccacaccgagagggagtgtcttacaaggcggccggcgtgcaaacaaaaaaataatataaccgnnnnnnnnnnntcggtcgcacctatattcgagcaaagaaaagcgtgggtggtaaagtatattctataaacacaatttcctcgcgcccaccacggtggaatacccactccccataaaacggccggtgggagaagactctcgaacaccgcccgcgcggagaacacacgacacccccgtggccgcgcttcgagg

SEQ ID NO: 164065 - DNA, 879 bp, Homo Sapiens
  misc_feature (48)..(65): n is a, c, g, or t
  misc_feature (275)..(290): n is a, c, g, or t
  misc_feature (357)..(408): n is a, c, g, or t
  misc_feature (660)..(660): n is a, c, g, or t
  misc_feature (780)..(780): n is a, c, g, or t
ggaggtcgaggagagcttaaacaccttcttcctctgccttgtttctcnnnnnnnnnnnnnnnnnncgcatcagtattaatgtttttgcatactttgcatctttattcaaaagtgtaaactttctttgtcaatctatggacatgcccatatatgaaggagatgggtgggtcaaaaagggatatcaaatgaagtgataggggtcacaatggggaaattgaagtggtgcataacattgccaaaatagtgtgccactagaaatggtgtaaaggctgtcnnnnnnnnnnnnnnnnaaagaaaagttattaccatgtattttgtgaggcaggtttacaacactacaagtcttgagttaagaannnnnnnnnnnnnnnnnnnnnnnnnnnnnnnnnnnnnnnnnnnnnnnnnnnncgatcatagtcttaggagttcatttaaaccataggaacttttcacttatctcatgttagctgtaccagtcagtgattaagtacaactacaagttgtataggctttattgtttattgctggtttatgaccttaataaagtgtaattatgtattaccagcagggtgtttttaactgtgactattgtataaaaacaaatcttgatatccagaagcacatgaagtttgcaactttccaccctgcccatttttgtanaactgcagtcatcttggaccttttaaaacacaaattttaaactcaaccaagctgtgataagtggaatggttactgtttatactggtggcatgttttttgattacagcagataatgctttncttttccaaaccgtctttgagaataaagggaaaaaaatcttccaaaatggccaagggttttgggggaaacaatccggggcaaacatggggtttggaaaa

SEQ ID NO: 164066 - DNA, 818 bp, Homo Sapiens
ctagaggatccctagataagcaggagagggaagaattattaaacatggtcaaggagcactctacaaagcctcaggatttcttcaagggatactgctgtgccaggtctcgagggcagaaggatacaagtgtgagacaccagggccaccaagttgatggggttactgagcctctggatcagcaccctctgataggaagcaaggaagcacactacaaaggctgcaatcccagaggctgagacagtcaagagggagtagaagggcctctgctgctctcggaaggttcttatagggcaaataagctattactgtgcctaagagaatggaagagggaggcaaggcaggtgtcatggccttcagaactttctcgaggttcatatttattgacatttgacctagagtccttggcatggggaaggcacagacctgggccacgggtaggaaaatcagcatcctgcttatctcctaggagataagcaggaaaaggtgagcacagctgtctctaggagtgggcaaggtatgtacaatcactgatgaggtatgcatgcacgcaaaggatttaaaactgctcagtctcactacaaaaattgaactgagttaaaaggaaatgctgtggcttccccctactatctggctctggattgagtccacagtcttacttcatcaaatagaaaataaaactgacaaggatctccaaaagtaaatcactatttgtgtaaatgaaacaaaatgcttcattaatcccagttcttggttgtgcctcctggactagaagcattttgtagacaaaagagtgtttcacaaaattgaaatgtaattca

SEQ ID NO: 164067 - DNA, 777 bp, Homo Sapiens
gggacttcctgcgggtgcacaggctgtggtcgtctatctccctgttgttcttcccatcggcgaagatggccctggagacggtgccgaaggacctgcggcatctgcgggcctgtttgctgtgttcgctggtcaagactatagaccagtttgaatatgatggttgtgacaattgtgatgcatatctacaaatgaagggtaaccgagagatggtatatgactgcactagctcttcctttgatggaatcattgcgatgatgagtccagaggacagctgggtctccaagtggcagcgagtcagtaactttaagccaggtgtatatgcggtgtcagtcactggtcgcctgccccaaggaatcgtgcgggagctgaaaagtcgaggagtggcctacaaatccagagacacagctataaagacctagcaagatgcaaggctgccagcatctttgctctccacctcctgcctctgcttatttcttgttctggaactaaatgaacagaacttcaaatacttcctaccctccaattcagactcagctgactgttgagagagcagcacatcattttatcattttatcttctttggactacaggtggggtgggagggatttgggttggtggattaacagatggaattgaggagagagtaggatgctgattttcctacccgtggcccaggtctgtgccttccccatgccaaggactctaggtcaaatgtcaataaatatgaaacctccaggaaagttcttgaaggccatggacacctgcctttgccctcct

SEQ ID NO: 164068 - DNA, 876 bp, Homo Sapiens
  misc_feature (447)..(459): n is a, c, g, or t
attacatagctagaatataatagaaatgggggtacgcattcccaacagaagcagtgtgttattagttttaaaactctgaacagagatcttgcaagatctttcaaaaagaccatcgaattcttcattggctgagaacgacgttttaaaatgtcttaaataaggctttgtttgcattgtttgagttcaaggggccttattattgaatggaattgcacaagcctttctttgtgcaatcaaaccattgttattggtagttctgtaaaggaaactgtggaatcgaattggcagtggagtcataaatctatttactgagtgtggcttccaagaaatgttgcaattcaaaatgcactaagtctgtgatttattggagatttggagattctaaataatatttttaaaaaacttccatgcaacttctggtttaatgtttggcaactccacatgatnnnnnnnnnnnnncagcccaaccgagtttcggaattaagtattcttctagtaagtgattcaaacttgtaatatttgccacaggactgacttatttatttactagctagaagctcttaagttcacttgtttatcagggcatatacagaagggtttgttaaaactcgatgttaactttacaactttctgacctggtgcatgaattctcaagtactgtatttcactgtgttggtgtgtctgatggaaatttcgaggtggtcccacaaaaatattttatgtagtgtgccttcaaagagaaccatttatttctcttcacttatcgtcccacaaagtcacatttggtggtggtcagccaagtcgcatctggtctagttttactcttgtcccaattttaaagagaaatgggaatgagtttgccctggtgagacccat

SEQ ID NO: 164069 - DNA, 611 bp, Homo Sapiens
gataagcaggagaggagataagcagctgggaacgggaatggggtggtaggaatgaggtacgaacaacacttctccatgtatatccttttacaaagctcacactctgaaaaccacgtttcacatactgaaaaaataaaccattaaaatcaaccaggctgtggagagaacgctcaaacagtaaaaaatggaccaagagtacaaatcagtccacagatcagagagggtgggaaagaaaagaacgtcagtaactttgaaaaactgtttcttgactgatatatgaggcaaaacccaaaaagaattgcagaacagtgcaatgtagttaatgtgtttctcctagggtatgaattagctcttctgaaactacatgtatattacactgacacaacaacaaaaaaaacagtaagtaaatacactgcagacaagaggcaggttacccatattggaaaaaataacaaataaggaaaaccacgaaattaatcctgtggtgttaaattagaatcagaagtatcagtacaaaactcatgagtttttaataagcagacacataaatgtatattcattaatacacatacattatttcctgctatctcctcgagatcctctagacacct

SEQ ID NO: 164070 - DNA, 1038 bp, Homo Sapiens
  misc_feature (127)..(163): n is a, c, g, or t
  misc_feature (212)..(253): n is a, c, g, or t
agcagatagcaggacatctggctgcaaaggtgcaccaggctgaggtggaggaatgggagagaaaaggagtaaaggagtagtgtttttagattccaaggcccagtattctgtctctattctcccaggnnnnnnnnnnnnnnnnnnnnnnnnnnnnnnnnnnnnncttaaaccacttaacctttaaaagacgatgatattggagagggtactannnnnnnnnnnnnnnnnnnnnnnnnnnnnnnnnnnnnnnnnnagggagacaggatatctgctacttggtgagtttgtcaatgtaaggaattcccatgacagcttcgacaccagcatggtgccctgctggtactccaggcagaatttcactgagaatcctgggtcccacagcagaaagttggagggtgaccaccgacgcctggagaccagctctggaaccagtttccacatgtaaccacactttacctgactttaacttgataactgttgttatgaaaggatgtaggattcaggtattttatatttagtgagagtaaacccatcattgttagtttcataactgataagcctgaaagattgtcttaaactctattattatttctgtaagaacacagattataggaagtatcagatatttattagacagtataatttattttactcacaaaactaatctcactctgtcctttgggacattactcattatgcttccttccctgtgatatcctttcctccccttttcatatggacaaggtccatgttttatactcctttcgtatatgagcatataataggaatcagtaaaccttactggttcattaattatttaaattacgcaagtgtatggatgggtttcacagctttaaagtctgccctagttttgctcacacctctgccttcctactcactactcctctgctaaatactctccaaaataatctttcaacatgtcacttccttctttcgtgttttccattgcctcctgtatcaaattacatctccgtacctatccttctctgcttatctcctgagatcctctagaacacc

SEQ ID NO: 164071 - DNA, 627 bp, Homo Sapiens
gtgtgttctagaggatctcatatagcaggatcaaggctagtgtagacctttttttcctaagagtaaggacacggaatatcaaagtaacaaagggtgctgccgattattagtttcaatttaatatcaggatagttcttagttttagaaatgtagattttgactgttacagtttgaaaaagggtacctcagcctcttcagtactggttttcgggcacatttcaacagaaatattagattccctttctctttcttaatagtgatcttctaagcaagtttcttggaaaaactatcattctaagggaaatccctgtttataacctattaatatatttctattcctagaagagagtctagcagggattctagtaggaattactgagtgtgtaggaaggcacttgatagaggcatctctgctttccagcacagggattctcagccttctaaagatctagaccagtttccaagctagcttctccacagcccaccactgcctagtgtttgcttgtgtatgctctaatggatttgaggaggataggccttctgacagagtcatgaaagactgaaggcatgtctagggaaataaaacctgactggcccttcagcaggaatgactgcggtgaaacacca

SEQ ID NO: 164072 - DNA, 695 bp, Homo Sapiens
ataacaggcccgcccctagagagctttctatctgcaacagcttcagccgcattcttaaactagtcgtgactatgtaaaagaagtgacaacactataggagatgcaagagcacctcctgtaatcagtaaagcctcttgggaggaggtgacacttaggctgggacctggatgaggaagatgacaggcatcagatgactggtactgtaatgtactgtagtctgtttctgctcacaagtccaacttcatacacgacactcctgccccatgatgttctaatcaagcggaattaccgtctagcaatagctgactacattcccgtgcatatgttgtccctttgcttggaatgcaaacctcccctctatttctgttgtgaatgactcctccagctgaagaatgaactcactgatatgagaaagggctccccaggcactgcaaactgatctttatcacaccatataaacacttcagattttacctactccagtaagtaagcttttagggcaaggactgtgtctgccatcactaatctctgcattctggcacaaagtaaatgctcaaaagatttgctaaatggatataaaggtgcattaatagatgccagctgtacagacattggaagagtcctcccttttccatggttttgcttccatggttcagttatcctggccactatggtctgaaatactaaaggaaatc

SEQ ID NO: 164073 - DNA, 511 bp, Homo Sapiens
ggatgcttagtcaaagactgtaaattgtcttcaagctgagagagaccatgaagagagaggagtggccacctaactaaccttcccagtttttgggagccaaacctagaccagaatgtaggtctaagtgactcccaatccagagctgtctccattaggccaggctctcaccccagctccaaaccaacttctaaaaacttgtccaagagtcctcctcttctttagaattggtaatcttggcaattaaattcagcgtagaaacactctcctgaacataatcagcatgctggttcttccttttctgttgccttgctcttcctaacagctcctcctttcgtctttgcaggctgcttctctgtcacaggaactcagggctcagtgctgtacttcatctccaaagtgtccctaaagcgcccatctgatcccatggctaactactccccaattttctcctggactgaccttactgaatttagatttgtacatccatacctgctgagatcctctagatcac

SEQ ID NO: 164074 - DNA, 958 bp, Homo Sapiens
aagtacagctatgacaagatgaaaaggcagaaacgaaaacggaaaaagaaatatccccagcttcgaaatagacaggatccagactttattgcagagctggaggaactaataagtcgcctaagtgaaattcggatcactcatcgaagtcatcattttatcccccgagatcttctgccaactatctttcgaatcaactttaatagtttctatacacatccttctttccccttagaccctttgcactacattcgaaaacctgacttaaaaaagaaaagagggagaccccctaagatgagggaggcaatgcctgaaatgccttttatgcacagccttagttttcctctttctagtactggattctatccatcttatggtatgccttactctccttcaccccttacagctgctcccataggattaggttactatggaaggtatcctcccactctttatccacctcctccatctccttctttcaccacgccacttccacctccttcctatatgcatgctggtcatttacttctcaatcctgccaaataccataagaaaaagcataagctacttcgacaggaggcctttcttacaaccagcaggactcccctcctttccatgagtacctaccccagtgttcctcctgagatggcctatggttggatggttgagcacaaacacaggcaccgtcacaaacacagagaacaccgttcttctgaacaaccccaggtttctatggacactggctcttcccgatctgtcctggaatctttgaagcgctatagatttggaaaggatgctgttggagagcgatataagcataaggaaaagcaccgttgtcacatgtcctgccctcatctctctccttcaaaaagcttaataaacagagaggaacagtgggtccaccgagagccttcgaatctagtccattggcttgaatagctgctgagatcctctagacacc

SEQ ID NO: 164075 - DNA, 1035 bp, Homo Sapiens
  misc_feature (878)..(878): n is a, c, g, or t
  misc_feature (896)..(896): n is a, c, g, or t
  misc_feature (1003)..(1003): n is a, c, g, or t
  misc_feature (1006)..(1006): n is a, c, g, or t
accaggagatagcaggaagagaagttggttgtcaggatggtgaggaggaaggatctcaagagcaggatcgaatggcatcacagagacaccaagggaggaagaacccttcgagagctccagtgaagaagagtggggtggtgaggaccatcagagcctaaattccatggttgatgttgaagatttgggcaaaattatggatcacgtgaagaaagaaaagagagaaaaggaacagcaggaagagaagtctggttggttcaggaacatggggaggaatgaagatggtgaaagaagagctatgataactcctgctctccgagaagcccttactaaacaaggttatcagttgattgggagccactcgggggtgaagctttgcaggtggacaaagtccatgctccgagggagaggaggttgttacaaacacacattctatggaattgagagccatcgctgcatggaaaccaccccgagcttggcgtgtgctaataaatgtgtcttctgttggcggcaccacaccaaccccgtgggcactgagtggcggtggaagatggaccagcctgaaatgatcttgaaggaagccattgaaaaccatcagaacatgattaagcagtttaaaggagtaccgggcgtcaaagcagaacgctttgaagaaggaatgacggtaaagcactgtgcattgtccctcgtgggagaaccaataatgtacccagagatcaacaggtttttgaagctactccaccagtgtaaaatttccagcttcctggtcacaaacgcacaatttcctgcggaaatcatgaacctcgagccggttactcagctgtattgtcagtgtggatgccagtaccaaagacagcctgaagaaaatcgaccggccactnttcaaggatttctggcanaagattccttgacagtttaaaagccttggcagtcaagcaccaccgaacttgctacagacttgcgcttgtgaaaaccatggaacgtggaccaacttcaggccttaccncanttcgtgtccctgggggaatccttgacttc

SEQ ID NO: 164076 - DNA, 640 bp, Homo Sapiens
  misc_feature (347)..(356): n is a, c, g, or t
gaagaaaaaaggccaaaagtctcaaagtgagtgaacgcaacctttactatatacccataaatttacagtcaagaagatcagagaaccccacacaggatagaatcaaagaaaccaagtccagacacacaataatcaacctacagaaaactaaagataagcaggtgtcttgaaaacagctagagaaaaacaacacattacaaaaatggaaacagtaattggaaagaacatggaatcctcatcagaaaccacaggggacagaagaacatgaaatactatctctaaagtgctagaagacatgtcaacccagaattttacatccagcaaaaatatccttcaggaatgagagnnnnnnnnnnggtactcgcagatgaaggaaaacagtatttatcgctagcagctctgctctaaaagaaatgcaaaaggaggttcctaatgctgaagaaaaatctaccagagggaaacctggagctctggggataaaggagcactgaacatggtaaatggctcggaatacaaaagaccactttccccctcttcagttctttaaaatatgtaagattactgaaacaaagattaaaatcttatctggtagggtttcgaatatatagatgtaatattatcctgctatctcctggtccga

SEQ ID NO: 164077 - DNA, 1098 bp, Homo Sapiens
tgagcggcgtgtatagcaggatatatggaaatctgccaacaactcagcaggaggtacgtcacacaataaaagactagaaaaagaggttaccttagataatcttaggttcagttgggtttatttaccagcaaagctgtcgttcatatcaagcccgttcccttctatgtcttcagttttcagaaatcttacaagtggcatagagtttaaggaagactatgttactaaaatgagacttttcttttttaataccttcccatttagaaaaaaagtgcagctggcttctatatcgcttacctaattttacataaatatactctttgaggctggagcaaatctgattttcaatgtgaaaataaactattaaaagtgttctgggagttatttctacagagaactaacaccagaatcgtctgtatcatcagactcgtctatttctgaaaaatcggattcatcaaatgaatcttcaaccaacaactattcgagaatgatgttaacatcacgcgtaggcatgctatgttttctaggatttgacgtcttcagcgatcaagaattactgtatttggtaaatggaaataccactactaaaaacagaatgctataaatagaatgatgtcttgtttccaaagtggatatactagagcaatgtgaaaatgataaaagcgagatattgtgtggcaacgatttaaaaagatgttcagtagtaaaaccaaagtaccagaataaagtgaccagccattctagtggaaacttgttacccttgttatcactgaatagtggagtggaagccaaagcagtaaaactttttagagaaaacagtgaggtactatttagctataatatcttaaaaatacatttaaaattcacagcacattctgaccacaagaaaaatggaaacactttctgaaaagccaacttttctaaagataaatgtactattactgaacttttagaaaacgtaagaaaacttttagcatctgccaagagaaaatttcataaagttccccccaagagttcctttgctagtaatttacttatacatggttctttgaaatattaatataaaaattgctaaaagttagactagaaaaatcatcctct

SEQ ID NO: 164078 - DNA, 1119 bp, Homo Sapiens
  misc_feature (735)..(788): n is a, c, g, or t
agatagcaggaaatgtagggctgcctcagccagacccggcgtatctgggtcaggactgcttaggtcacaagtgacaggattccactcatactagcctaggtcacaagaggagtttgccggctgatataatcagctggggcttagggatgtgcatgctagaggtcactttccatctcttgctcctcttctctttgcttgctggtttgattctctcagcactttgttccacctggcaggaaacacgggggtgaggcaacttccatgcttcaagcctcatgatgttttcactgaagtgggatagagtatcttcttcgctcagttccatctagaaaaatcccaggaagaactctgataggaccaacttggtacaggcacccttcctgggccagctggccacggtcaggaaggtggggtcagaacgcatgcttggagtgaagatgtggctttcctggggagtggcggggttgctggatgtatataaaatacataacataccattgtagtgccttcgcatgctgtagacctctcctcctagccagaaccttccagccaaggccagctctttttggcttcaaaagacaaaaggaaatgtcccttagctcaaatgtcccaaatactcttcctatacctgtccttaagttttatcctcacggtccaaccctgattctccagacatctgtcctcctcccatctccatgaagctgtttccaggacactcctggccacagtgacttnnnnnnnnnnnnnnnnnnnnnnnnnnnnnnnnnnnnnnnnnnnnnnnnnnnnnncggctgccaagctgggagggacagggagcagatggcaggacaagcagtatgtttctagagcttggaatgtgttaaactgttctttgtgtgtcatcttccaaggagactgtgccttccttgagggcagggaccagtgcatccatcccccactggcagccagatgctggcaaccgtttggtcatgacaatggatggccatggcctctgcagcctctttccaccactcagttcactaggcgtggggatagagtctttcactgccgatctgcacaaatttaaaatctctgtgggaactaggaacctttcttacaggcagggatagagtaacaatt

SEQ ID NO: 164079 - DNA, 819 bp, Homo Sapiens
gccgaccgaaaatagcaggatccaagagggagatcatgagccttcaggtctgaaactgaagaagacacttcctcctctccacacagaatcagatccgctcgccaaaggagggcacctgctgatgaaggccacagacccctgacatagtcctgtacttgtgaaggatgaaaaggcagttgccagcttctgtcttttactgacttcgctttgaaatttactaatgactgaagaacatttgtattggattttaagtcgaattttaaaaaagatttacatgtaagccatataaaaataaagggaactgaaaccaaattggactattataaatttcatcttaaagataatcttttgtttcaccagctttctacttatacacttattccttggcttttgggcttattttcttgcactggtgcagatctggtaaacattaaaggcttgaaaaaccatattttgttagccctaaaatgtacatttttcttcccattttaacttatctgaaattgggatgcatctcattactgtcaaccaggtgatagtcatgtaacgctcctaccgtgtgcatgtgtgaatttacagcttgtcatcgtgtcatccctttaaccaacatgtgttttgttggtatcaaatgtgtcaggtttaatggacattttaaaatgtcttcaaaaagatcacactatgattcagcattgaaacgaaaagttattgtgtatgccagaaaagcactggaaacagagcagcagggcgtacatttgatattagtgaatgcaatacttctcgctggagaaatgagcgctatccatattttcctgctatctc

SEQ ID NO: 164080 - DNA, 336 bp, Homo Sapiens
ctggtaccaggaatagcaggaagggaggaggagaggccgcgctctcaggtgaaattaaaattggaggtcagttcccggatccgattctctcggttcattttcttgagtttcattctgcgattttgaaaccagattttgacttgtctgtctgtaaggttaatggtcctgcttatctccaggcggcgctctcgcgtcaaatacatattgaacagaaattctttctccaattccagcgtctggtgtttagtataggggcacctcttcttccttccgctctttgctgtcagccaatttcctgtggtgttttctgccttatctcctctttcgttcgttata

SEQ ID NO: 164081 - DNA, 1291 bp, Homo Sapiens
  misc_feature (11)..(11): n is a, c, g, or t
ccccagataanccagagaggaaatgagtgacatctacgtcaaagcctggattcctgccaatggagaaaacacacagaaaccagatgtccattacagatctttggatggtgtaagggaattttaactggcgatttgttttcccgtttgactacccttccagccgaacaactctgtatcgttgcgaaaaaagagcatttctggagtattgaccaaacggaatttcgaatcccacccaggctgatcattcagatatgggacaatgacaagttttctctggatgactacttgggtttcctagaacttgacttgcgtcacacgatcattcctgcaaaatcaccagagaaatgcaggttggacatgattccggacctcaaagccatgaacccccttaaagccaagacagcctccctctttgagcagaagtccatgaaaggatggtggccatgctacgcagagaaagatggcgcccgcgtaatggctgggaaagtggagatgacattggaaatcctcaacgagaaggaggccgacgagaggccagccgggaaggggcgggacgaacccaacatgaaccccaagctggacttaccaaatcgaccagaaacctccttcctctggttcaccaacccatgcaagaccatgaagttcatcgtgtggcgccgctttaagtgggtcatcatcggcttgctgttcctgcttatcctgctgctcttcgtggccgtgctcctctactctttgccgaactatttgtcaatgaagattgtaaagccaaatgtgtaacaaaggcaaaggcttaatttccagagtcatccagcaatgagagaatcctgcctctgtagaccaacatccagtgtgattttgtgtctgagaccacaccccagtagcaggttacgccatgtcaccgagccccattgattcccagagggtcttagtcctggaaagtcaggccaacaagcaacgtttgcatcatgttatctcttaagtattaaaagttttattttctaaagtttaaatcatgtttttcaaaatatttttcaaggtggctggttccatttaaaaatcatctttttatatgtgtcttcggttctagacttcagcttttggaaattgctaaatagaattcaaaaatctctgcatcctgaggtgatatacttcatatttgtaatcaactgaaagagctgtgcattataaaatcagttagaatagttagaacaattcttatttatgcccacaaccattgctatattttgtatggatgtcataaaagtctatttaacctctgtaatgaaactaa

SEQ ID NO: 164082 - DNA, 654 bp, Homo Sapiens
  misc_feature (616)..(616): n is a, c, g, or t
accactgcgccttgacttggcccctgaagagcggcttgctcttcacatgctcaggactcaggggctggtccctgagcacgtggaaacaaggactttgcacagcaccttccagcccaacatttcccagggaaaacttcagatgtgggtggatgttttccccaagagtttggggccaccaggccctcctttcaacatcacaccccggaaagccaagaaatactacctgcgtgtgatcatctggaacaccaaggacgttatcttggacgagaaaagcatcacaggagaggaaacgagtgacatctacgtcaaaggctggattcctggcaatgaagaaaacaaacagaaaacagatgtccattacagatctttggatggtgaagggaattttaactggcgatttgttttcccgtttgactaccttccagccgaacaactctgtatcgttgcgaaaaaagagcatttctggagtattgaccaaacggaatttcgaatcccacccaggctgatcattcagatatgggacaatgacaagttttctctgggatgactacttggggtttcctagaacttgacttgcgtcacacgatccattcctggcaaaatcaccagaggaatngcaggtttgggacatgatttccgggaccttcaaaggcc

SEQ ID NO: 164083 - DNA, 1375 bp, Homo Sapiens
ccagaggatcccaatttgagggctgaagacttctcagatcgttcaagttgtaccgaggcaagtcggatgaaaatgaagatccttctgtggttggagagtttaagggctcctttcggatctaccctctgccggatgaccccagcgtgccagcccctcccagacagtttcgggaattacctgacagcgtcccacaggaatgcacggttaggatttacattgttcgaggcttagagctccagccccaggacaacaatggcctgtgtgacccttacataaaaataacactgggcaaaaaagtcattgaagaccgagatcactacattcccaacactctcaacccagtctttggcaggatgtacgaactgagctgctacttacctcaagaaaaagacctgaagatttctgtctatgattatgacacctttacaccgggatgaaaaagtaggagaaacaattattgatctggaaaaccgattcctttcccgctttgggtcccactgcggcataccagaggagtactgtgtttctggagtcaatacctggcgagatcaactgagaccaacacagctgcttcaaaatgtcgccagattcaaaggcttcccacaacccatcctttccgaagatgggagtagaatcagatatggaggacgagactacagcttggatgaatttgaagccaacaaaatcctgcaccagcacctcggggcccctgaagagcggcttgctcttcacatcctcaggactcaggggctggtccctgaggcacgtgggaaacaaggactttgcacagcaccttccagcccaacatttcccaggggaaaactttcagatgtggggtgggatgtttttccccaagagtttggggccaccaggccctcctttcaacatcacaccccggaaagccaagaaatactacctgcgtgtgatcatctggaacaccaaggacgttatcttggacgagaaaagcatcacgaggagaggaaatgagtgacatctacggtcaaaggctggattcctggcaatgaagaaaacaaacagaaaacagatgtccattacagatctttggatggtgaagggaattttaactggcgatttgttttcccgtttgactaccttccagccgaacaactctgtatcgttgcgaaaaaagagcatttctggagtattgaccaaacgggattttcgaatcccacccagggctgatcattcagatatggggaccatgaccagtttttctctggatgaacaactgggggtttcctaaaaacttgacttggcgttcacacgatcatttcctggcaaaatcaccccaagaaaatgcaggttgggaaatgaattcccggaccctcaaagccatggaaccccccctttaaag

SEQ ID NO: 164084 - DNA, 1178 bp, Homo Sapiens
  misc_feature (144)..(144): n is a, c, g, or t
gctgatccgcttagcaggttatggcagcaagtatgtctgcttttgatcctttaaaaaaccaagatgaaatcaataaaaatgttatgtcagcgtttggcttaacagatgatcaggtttcagggccactccagtgctcctgcaganagatcgttcaggaacacccgacagcattgcttcctcctcctcagcagctcacccaccaggcgttcagccacagcagccaccatatacaggagctcagactcaagcaggtcagattgaaggtcagatgtaccaacagtaccagcaacaggccggctatggtgcacagcagccgcaggctccacctcagcagcctcaacagtatggtattcagtattcagcaagctatagtcagcagactggacctcaacaacctcagcagttccagggatatggccagcaaccaacttcccaggcaccagctcctgccttttctggtcagcctcaacaactgcctgctcagccgccacagcagtaccaggcgagcaattatcctgcacaaacttacactgcccaaacttctcagcctactaattatactgtggctcctgcctctcaacctggaatggctccaagccaacctggggcctatcaaccaagaccaggttttacttcacttcctggaagtaccatgacccctcctccaagtgggcctaatccttatgcgcgtaaccgtcctccctttggtcagggctatacccaacctggacctggttatcgataaggaggctcctctacaccaattaatgtagctgctagctattggcctcccaaaagactccagtactattttaatttgtattgaagaagttcagaaatttaaaagcagagcattttttatgatatcattgttggtgttaattgaaagtataatttgctggaacacaaagaccaaaatgaaagttttttcctccctgcttaaaaatgtagcagcttcttagttactttggaacactactcttacatgtataaagtgattgacttgactttctagcttcccttgtccggaggatattaaaatgctagggtgaggtttagccatcttacttggctttttactattaacatgatgtactaaagtagagccctttgagaatacaagatattatgtataaaatgtaacactgatgataggttaataaagatgattgaatcca

SEQ ID NO: 164085 - DNA, 967 bp, Homo Sapiens
tgaccaccgcctccccgcgacgccccagtccagtggcctcgcgtccgcccattcagcggagacctgcggagaggcggcggccgcggcctccgcaagccgtctttctctagagttgtatatatagaacatcctggagtccaccatgaacggacagttggatctaagtgggaagctaatcatcaaagctcaacttggggaggatattcggcgaattcctattcataatgaagatattacttatgatgaattagtgctaatgatgcaacgagttttcagaggaaaacttctgagtaatgatgaagtaacaataaagtataaagatgaagatggagatcttataacaatttttgatagttctgacctttcctttgcaattcagtgcagtaggatactgaaactgacattatttgttaatggccagccaagaccccttgaatcaagtcaggtgaaatatctccgtcgagaactgatagaacttcgaaataaagtgaatcgtttattggatagcttggaaccacctggagaaccaggaccttccaccaatattcctgaaaatgatactgtggatggtagggaagaaaagtctgcttctgattcttctggaaaacagtctactacaggttatggcagcaagtatgactgcttttgatcctttaaaaaacaagatgaaatccataaaaatgttatgtcagcggtttgggcttaacagatgatcaggtttcagggccacccagtgctccctgcagaagatcgttcagggaacaccccgacgcattggcttcctcctcctcagcagctcacccaccaggcgtttcgccacagcagccaccttatacagggagcttaaacttccgcagggtccgaattgaaggtcgaatggaccaacaggacccaccaccagggccgcttatggggcccacgcacccgcaacgcttccccctccgcaagccttccacggatgggtatt

SEQ ID NO: 164086 - DNA, 1012 bp, Homo Sapiens
aaaaagaggagaaacattattgatctggaaaaccgattcctttcccgcttggggtcccactgcggcataccagaggagtactgtgtttctggagtcaatacctggcgagatcaactgagaccaacacagctgcttcaaaatgtcgccagattcaaaggcttcccacaacccatcctttccgaagatgggagtagaatcagatatggaggacgagactacagctgggatgaatttgaagccaacaaaatcctgcaccagcacctcggggcccctgaagagcggcttgctcttcacatcctcaggactcaggggctggtccctgagcacgtgcaaacaaggacgggggggaggaccttccagtccaacattttccagggaaaacttcggatgcgggtggatgttttcccccagagcttggggccaccaggccctcctttcacatcacaccccggaaagccaagagatactacctgggtgcgatcctctgcaacaccagcgcagttatcttgcacgagaaaagcctccccgcacccgaagcgcacgacctctccggcaaggggaggaaccctggcccacgaacacccccccctcccaacgcaggcccgccaccgacggttgggagggcgcgacggaatagccccccggacagccccgttttcccccgtgagtcgccctccccgcggaaggtacctgtccgtccgcgggccccaaaataagcttggcgtgggcggacgtccccatctgtggtattgagaaccccccccatccggcggtccctcaagggccgcccggcccgaccagcgccggttcaggggagcagcccttccggcgcccccaacaccctaacgtccttgtttcccccgcatccccacccgtaacaccccgttctcgcgacgcgagccgcgctgtgggccggtgaatgccccccgccgccgctccataggccgccgcccgttccctgactcgccctatccgccccatgccttatgcacctgaaacgccgcccggccgg

SEQ ID NO: 164087 - DNA, 426 bp, Homo Sapiens
  misc_feature (38)..(38): n is a, c, g, or t
  misc_feature (112)..(112): n is a, c, g, or t
  misc_feature (179)..(179): n is a, c, g, or t
accggagccccccattgaatcccccagagggccctaancccccggaaagtccaggcccaacaagcaacgtttgccatccatgttatccccttaagtattaaaagttttattntcctaaagtttaaatcatgtttttcaaaatatttttcaaggtggctggttccatttaaaaatcatcnttttatatgtgtcttcggttctagacttcagcttttggaaattgctaaatagaattcaaaaatctctgtatcctgaggtgatatacttcatatttgtaatcaactgaaagagctgtgcattataaaatcagttagaatagttagaacaattcttatttatgcccacaaccattgctatattttgtatggatgtcataaaagtctatttaacctctgtaatgaaactaaataaaaatgtttcacccgc

SEQ ID NO: 164088 - DNA, 606 bp, Homo Sapiens
tagcaaaacttgaagaaaaggagagacaggcacgaagcatctcacagctgtcaggatcaggacattaccgactattttttcttaccaaaagagcactgaatttcctaggggaaggtgagccacctttacacctcctgtcctccctcccagcccgtcaagcgatcccatcacccagcctcatcactcagcttcttcctagtacaaaactgccatcggttgtacgtcctgagctgtgggacgtcagctttaaccctagcctgtctcagggcctcgccctccagccccccgccccttagggtgatcgtgggtttcttcccttcctcctgcacaatcgcttcccttcactgaattcccttcaaagccaaagtttcttgagcactttttcttgtgtgcagtcttgtgtgtttgggtgttggtgtttttaaatttgctttctattcccccctgcctctctccatgtcgttacgcagctgagcactggttgggatgcattcgaatgacttcagcaagatcctgctttcctcagcccccgctctgttttatttattgtttaatatttccaatgatccaaatcaaagtgaataaacaaagagctattttattgtt

SEQ ID NO: 164089 - DNA, 1294 bp, Homo Sapiens
tatctgtgtacatgtgccttaaagcatccaggggatataatgctttaaggcgcatgtacacagattttcaggaaccaatgctgagtgctgcacaagagcagtttggtggtaatccatttgcttccttggtgagcaatacatcctctggtgaaggtagtcaaccttcccgtacagaaaatagagatccactacccaatccatgggctccacagacttcccagagttcatcagcttccagcggcactgccagcactgtgggtggcactactggtagtactgccagtggcacttctgggcagagtactactgcgccaaatttggtgcctggagtaggagctagtatgttcaacacaccaggaatgcagagcttgttgcaacaaataactgaaaacccacaacttatgcaaaacatgttgtctgccccctacatgagaagcatgatgcagtcactaagccagaatcctgaccttgctgcacagatgatgctgaataatcccctatttgctggaaatcctcagcttcaagaacaaatgagacaacagctcccaactttcctccaacaaatgcagaatcctgatacactatcagcaatgtcaaaccctagagcaatgcaggccttgttacagattcagcagggtttacagacattagcaacggaagccccgggcctcatcccagggtttactcctggcttgggggcattaggaagcactggaggctcttcgggaactaatggatctaacgccacacctagtgaaaacacaagtcccacagcaggaaccactgaacctggacatcagcagtttattcagcagatgcttcaggctcttgctggagtaaatcctcagctacagaatccagaagtcagatttcagcaacaactggaacaactcagtgcaatgggatttttgaaccgtgaagcaaacttgcaagctctaatagcaacaggaggtgatatcaatgcagctattgaaaggttactgggctcccagccatcatagcagcatttctgtatcttgaaaaaatgtaatttatttttgataacggctcttaaactttaaaatacctgctttatttcattttgactcttggaattctgtgctgttataaacaaacccaatatgatgcattttaaggtggagtacagtaagatgtgtgggtttttctgtatttttcttttctggaacagtgggaattaaggctactgcatgcatcacttctgcatttattgtaattttttaaaaacatcaccttttatagttgggtgaccgatttgaccgctgtctggccgccg

SEQ ID NO: 164090 - DNA, 972 bp, Homo Sapiens
  misc_feature (31)..(31): n is a, c, g, or t
  misc_feature (43)..(43): n is a, c, g, or t
  misc_feature (49)..(49): n is a, c, g, or t
  misc_feature (63)..(63): n is a, c, g, or t
  misc_feature (77)..(77): n is a, c, g, or t
  misc_feature (714)..(714): n is a, c, g, or t
accaactcctctgaacctacagagtccagangccagcgaacanctttgncctaaccccgaaanggagggtcccaganccagggaaaaaccccctttgttccagagccatgcctcctcaaaaccctgaacctgaatgaagacagttaattaatggcccaaccccacaaatgcagcagttgatacagagaaatcccagaaattagtcatatgttgaataatccagatataatgagacaaacgttggaacttgccaggaatccagcaatgatgcaggagatgatgaggaaccaggaccgagctttgagcaacctagaaagcatcccagggggatataatgctttaaggcgcatgtacacagatattcaggaaccaatgctgagtgctgcacaagagcagtttggtggtaatccatttgcttccttggtgagcaatacatcctctggtgaaggtagtcaaccttcccgtacagaaaatagagatccactacccaatccatgggctccacagacttcccagagttcatcagcttccagcggcactgccagcactgtgggtggcactactggtagtactgccagtggcacttctgggcagagtactactgcgccaaatttggtgcctggagtaggagctagtatgttcaacacaccaggaatggcagagcttgttgcaacaaataactgaaaaccacaattatgcaaaacatgtgtctgncccctacatgagaagcatgattgcagtcactaagccagaatcctggacttgtgccagatgatgctgattaatcccctatttggtggaaattctcagttcagaaccaattgagacaacaggtcacaacttttctccaacaaatggcggaatcctgatacactatcagcaatgtcaaaccctaaagcatgcgggccttgttacggattccagcaggtctcaacgaacttagccaacggaaaggccgggcctcatccaagg

SEQ ID NO: 164091 - DNA, 1539 bp, Homo Sapiens
agatagcaggagtcaataggatacgccgacttttaattcaaggacacttttctgaaacacttgccacaatgaaggaaataaggaatgtactctcagagatgtgagaaaagatacatgggtctggaagataattactcaaaatatgcagggaaggaataaaatagaagggtgtttttcttagagaacatcatttgtcatatttatttgatcaagaagttgaagatttatataataaggatctagttggaagcactaagaagaataagacatcagtttgaaaagaggctctatcagaacaacacgaattcgtgcgtaaaattgaagcaagaacaaacatcaaatatatgttgacacttgggtggaagaatggtgaactaattgatgctttatgaaaagttgatagggacagtgctccaaagaaatcagtttacaaatggataactcgttttaagaaggcataaggtaatgttgaagaagaagcccacagtggcagatcatccacatcagtttgtgagaaaaaagttagttcatggcgtaatggaagaaaaccaagcaattaacagcagaaacaacagccaacaccatagacatctcagttggttcaccttacacaatatggactggaaaagttcagcaaactttatacctgataggtaccaaaaccattgcacccagatcagctacagacaagaatagagctttcaatggaaattttaaataaatgggatcaggatcttgaagcctttcattgaaaaattgtaacaggagatgaaacatggctttaccagcgcaatcctgaagacaaaacacaaagcagtggttaccaagataagtagttcagttaaagcacaagaggactggttgagagcaaaggtcatggcaacagcttttgaatgctcaaggcattttgcttgttgactttctgtagggccaaagaatggtaacgtgcttatcatgggagtgttttgagaaacttagccaaagcttcagcagaaaaatccccgagaaagacatgagagttcttcaccacaacaatgttcctgctcatccctctcatcaaacaaggccattttgcaagagttttgatgggaaatcactaggcatccaccctacagtcctggtttggcaccttctgactttttgtttcctaatcttaaaaaaatttttcagggcagtacatttttctcaagttaatgtataaagaaactgcattgatgtagataaattcccagaactctcagttctttagggatggactaaatagctggtatcatcacttacaaaagtgtcttgaatgctatagagctaatgttcaaaaatatagtttatattttttatcttttaaccatttttccacaaactttttgaagtctccttgaatatgtaccatttataaaggggaaaaattctgtgactactcatgttgacttaatgctgacttaattttctgttttgtaaatatatacaaacaagttgatacaaattttgtttatagcccttaaacaaatttgtgaaataaatgcattcagaaacaaaaaa

SEQ ID NO: 164092 - DNA, 1074 bp, Homo Sapiens
agccgatgtgcactggccacaccagggttggggcgccacagctgcgagcccggcccctgctgttctcagcagccacttcccaggctgcctcactttatgccatgactgaccgtaatattgggatattgttatgccatttttatcctgtttagactgttaaaagcaggtttctgtacttaagagtcccccagacctcctgtgaggtgaggctctgttgcagtgtcgtaggctgtgtgtgtctgtaaagaaagaatgcacatatgtagacgattaagtgtatattatagctatatgctgaaaatggcttccatagccatgagaacatcttaaaactatgtgtaaatatattaaggaaagtatagctttgtaatttaaattggagcttttagcttgtttcatggaactatacaacttgtgggtaactcacatgaccaaacaaaccaaagtgcctgtgacggggcgggtggcgtctacccaccctcccttctagcagattcttattttgtttgaatttataaacaaggctggtggctgtctacccaccctcccttctagcagattttgattttgtttcaatttataacttacactttgaaccatgggtttacttataatggagtctgtagcttcacagcatatttcatgtaatcataaagaccagtatattccctcctgctgaatgacatgcgactgtaaagcctctttataaaccatttccaatgttagtatataggattatttgggaagcatatcaatacctttatagacaaatacgaacatgtatgcacacaaaacatttaactatggtatttatggaagacaggtaacaacattaaatctagttgctttcccttagtatcagatttgttgagggtttttttaaaaatcaggtctgttgaaagtcttctgtcataatctataaagcagcagcactcatggaaattgtagcatgccagtaatttttaccaacatcccatacatctgagttctgcagtccagtgtgtagtccgctccatgtgtattttgcttaatggaatgctttatttaagcacttaggcagagtagacacaacga

SEQ ID NO: 164093 - DNA, 676 bp, Homo Sapiens
gtccaggaaaatagcaggactctgaaaacacaacttccagccatttttttagttagtaaaaatcctattaatgtgaaccagccaggaataacagtgttatttctattggatatggtttgggcttctcttgtccaaatctgtgtcggctgccccctgatccttccattatcaagttttgaagggtgttggggaaattatggcagctgctagggagatcagggaaacactgatgtaacctcaaagcctctcaccattcctcttggcttggaaaggctttattttttcatatacatttctagaaatattgctattctaccttagtatttcacatttgtagttcaaacaagcgattgtccatctgttgcctagagctatagtacatgtgtgttatgaatgaaatatgacagcatgttccatacccctgctttagccatctgtgggaaaccagcaaactgaaaaagacacctctgcaaaatgtgcctcaagtccatttcttgggatcgctcgtttggtgcactctcgtgggagacaatcagagaacaacatatacttgtgccttattttcaaagaatctatttacactactatgaatattccactgaagagtcaatgatgtaaatgataaccaccaaatctcaaaaatatactcaccagaagtaaaaagtacaaaaaatac

SEQ ID NO: 164094 - DNA, 1371 bp, Homo Sapiens
gggagtgcgcctttcagcctcacctgcagctgcgcctccttgcacctgcgcctgtgctttttctcccagcactgcggacgcgactcgagggtgacgctcgctccgctcgtcccgctcgtcatggcctacccgggatacggaggagggtttggaaattttagcattcaggtgccaggaatgcagatgggacagccagtgccagaaacaggcccagctatactcctcgatggatactctgggccagcatattcagacacttattcctcagctggtgactccgtgtatacttacttcagtgctgttgctggacaggatggtgaagtggatgctgaagaacttcagagatgttcgacacagtctggaattaatggaacttactctcccttcagtttggaaacctgcagaattatgattgccatgttggatagagatcacacaggaaaaatgggatttaatgcatcaaagagctatgggcagctcttaatgcctggaaggaaaacttcatgactgtgatcaagatggaagtggcacagtagaacatcatgagttgcgtcaagccataggtcttatgggttataggttgagtcctcaaacattaactactattgttaaacgttatagcaagaatggcagaattttctttgatgattatgttgcttgctgtgtgaagcttcgagcatagacagatttctttaggaaaagagaccacttgcaacaagggtctgcgaatttcatatatgacgattttttgcagggcactatggcaatttgaatgcttagaattttaaacctgaagagacactgtgaattctttggttgggaagaagtgaactggactactttaaaacttttaagggttttctatgttcttcctacctgttaaacctcttccctttctgtgtgtctttattttagcagatagttcaaagcaataaaagatttcttttttaatttgaggtattactgcttctggaaaagttattttataaatatgtgcatactgtcataaaatatggtatgattaattgatttaaataatgcttagccttaattttagataatgtaaacttagaggaatgtactttacaagatagattgtataagaagccaaataatgaaagcctagaaaaaagctaatttatacttatctgaaggttacaaattagacttttaaattttctttgtagttggtggtgtttgagggttggctagaaatgaaagcctggattttgtgccatgtttgtaatatagtttgttcccttgatcaaataatcagaagaaaagaaacttaaagatctttggctgggaagaaagaaaattatctcccctagttcaatctgtagttgaaattagacctaccgaagggcatgg

SEQ ID NO: 164095 - DNA, 398 bp, Homo Sapiens
  misc_feature (37)..(37): n is a, c, g, or t
catacaagcggtgagagagatagtcttctacttctgntgcggtgatgatttcatgtaagttgtggtacgtgctttataacttacatatgttctgtgtaaatatcaaatatatttttcaaaggttaggaaaaataactctacattaaaacaccattaaaaatgaaattcataccttcaactatgctggacttagcaagaaatcctgaagatgtttttagagctccattgaataccacaaaacttgcacctgtcactgatcaagaaatacaacaattatttgttttaaactgctcatttttatgttacacatttgttaaatgcagaatgtggatatgcatataagtactcaataaatgttatacccacacaacttaaactagaaaactaattacaaagac

SEQ ID NO: 164096 - DNA, 1661 bp, Homo Sapiens
  misc_feature (1402)..(1450): n is a, c, g, or t
  misc_feature (1465)..(1468): n is a, c, g, or t
  misc_feature (1532)..(1548): n is a, c, g, or t
ggcctgggtggcgaattcggcacgagggggagctgcatgaaagccgaagttatggaccgctagcatctgtcactggccaccggtttccgggagtaagcggcagctaccttacagccctgacacgagccgggtgctctctcttctcaccgcggcccacgtctcctcgctggctccggtggcctcgctgggtcgcgaggaggcggaggactgtactctgaggccaaaagccagagtcggccctgaacgcccacgactctcagggtccagaggccgtgagaccggccgcggctgaaaggtaccagggcccctgatgccggagcccgtgtgctcggccctcttgcagacggtaaagaaaccaagtggaagagtgtttcctcctctggccgtaaagcaggtactctctgcagcaccagctgtccccgccctactccggaccgccccaaagactccatgggatggacctgagtcagccgaatcctagccccttcccttgggcctgctgtggtgctcgacatcagtgacagacggaagcagcagaccatcaaggctacgggaggcccggggcgcttgcgaagatgaagtttggctgcctctccttccggcagccttatgctggctttgtcttaaatggaatcaagactgtggagacgcgctggcgtcccctgctgagcagccagcggaactgtaccatcgccgtccacattgctcacagggactgcgaaagcgatgcctggcgggagctgctggtggagagactcgggatgactcctgctcagattcaggccttgctcaggaaaggggaaaagtttggtcgaggagtgatagcgggactcgttgacattggggaaactttgcaatgccccgaagacttaactcccgatgaggttgtggaactagaaaatcaagctgcactgaccaacctgaagcagaagtacctgactgtgatttcaaaccccaggtggttactggagcccatacctaggaaaggaggcaaggatgtattccaggtagacatcccagagcacctgatccctttggggcatgaagtgtgacaagtgtgggctcctgaaaggaatgttccagagaaaccagctaaatcatggcaccttcaatttgccatcgtgacgcagacctgtataaattaggttaaagatgaatttccactgctttggagagtcccacccactaagcactgtgcatgtaaacaggttcctttgctcagatgaaggaagtagggggtggggctttccttgtgtgatgcctccttaggcacacaggcaatgtctcaagtactttgaccttagggtagaaggcaaagctgccagtaaatgtctcagcattgctgctaattttgtcctgctagtttctggattgtacaaataaatgtgttgtagatgacaannnnnnnnnnnnnnnnnnnnnnnnnnnnnnnnnnnnnnnnnnnnnnnnnaccactaaaaaaacnnnnccctgggggggcccgcccttgggcccctccgaaaaaagtttttttagaaaccatttctcttttnnnnnnnnnnnnnnnnnccccctataaagggaaaaaggggagaaaagtgggggctcatagaggttgtgggtttccccccaagagagagaaacccggcgggggccactaggaacacaaagagggggctctg

SEQ ID NO: 164097 - DNA, 579 bp, Homo Sapiens
cggtaccgagagatagcaggaattgtagggctgcagagtcttttgggatcaccttcatccaggcttcattaattaaaccaatggctaaaatcctctcatgttcctcttgcaccaccaggttcacatggtccacgcaagcttggatatcattccatgtaatggaattcattattctctgcatgtgcctgagccttcagtttcatcaactcatcgagatacctctgacagttttcttcctcaatattggtaagaccagtaactgaactgctcaatggcttccacactgtattcacatctcctgattccaatgccctgttgatcagggccaccgatgacaacatctccactgcgacagagagctctgggtgggtgagactatgttcaggactttgtcgctgcagggtagccagctccttctgatagagatcggcggcaaatggatacacctggggcagctgggcttcgggattcatcagttccaaaacagtcttctcagcaacacccttctggattgcagcattaatcagtgctactgctgccaatcttctctgatattgctgggcagcactgtttgcagca

SEQ ID NO: 164098 - DNA, 138 bp, Homo Sapiens
gactgaggcgtagcggaggaaacaaaattttttttctcttcctggtgtatagattacccaattaaatccagaaccattacattgtaaattatatccataggttttagtttctagtatatacatttgagaccctgtcac

SEQ ID NO: 164099 - DNA, 1299 bp, Homo Sapiens
  misc_feature (745)..(771): n is a, c, g, or t
  misc_feature (789)..(799): n is a, c, g, or t
  misc_feature (1070)..(1070): n is a, c, g, or t
gaccggcgagatagcaggaaggaataacaggacaggcccacgcgtctcctcggctccgcacataggtgcaaaaccgctgcctccagatcaggcctctccaaggccccctcccgaaagaagaagggcagcaaaggccccgtgatcaaaatcaccgaaatgtcagagaagtacttctcgcaggagtcggaggtctcagagtgaggcggctggaccccaggaaccccagggcactccactgcagcaggagggacttaagctagactcaagaaagcagcttggagcctctaggttgagaagagaggcaaaacctgatattgaactgagagaggggttcaaaactgactgtgttttgtgggctgccagggtgggagaggagcatcaccagctcctcagagccactccgctccatatcagtatctcacagtcccatccttccaaccttatggccagaggttttcctgatgggtgagtcggaattacgggtcagttttgtctccacctcctcgctcctctgaggctcctcctccatcatcatgctctgccaaggcccctctgactcttgccccatacttgaacttgacttctatctccagccttgccctggctctgcctcggaaactgggacggggaacggctcctccccccttagtggcggtaaccccaagaagggacgcgcgtgggcccccgtgtccccgtcactccgggaaattccccccggaaaagggtcggcttggctgcaaaacannnnnnnnnnnnnnnnnnnnnnnnnnnggttcttcttttcggggnnnnnnnnnnngaaattaccccttcccacgcgttcttttttccgtcccccctccacacgcggtcgcgcggggggcgccaccccgcccttttctatcctgggggggagaacaccctcacccccttcctgatggctccccatttctattacaaatcacgcgagcctctctagaaaactatccccgttatgcgcctcccgcgtcctcactttccctcttaccattatcccatcgcgcgctgccctagcccctactgtatgtttagagtgtcgccccactcccttnttccccaccccaccccccgatatcccgtgtaccgtaccttatcccccttgttcccacatccgccattcttacagtcacaatacccccttttcccttatacacgcacgcaccttgttccccccctacccccttattgacatgtacatttcacttgtcgcccactgccgccctcacaacaattattcaatgactgcgccccccccatgttgcacgtcaccgccgcggcaag

SEQ ID NO: 164100 - DNA, 959 bp, Homo Sapiens
  misc_feature (70)..(70): n is a, c, g, or t
  misc_feature (87)..(87): n is a, c, g, or t
  misc_feature (112)..(171): n is a, c, g, or t
  misc_feature (228)..(228): n is a, c, g, or t
ttaacatttatttaaaaaactttattttgctttaaaaaaacaattattcaattcatgaagattaaccaanaatacaaaaccccatcnaaagtttattacaataatctttcannnnnnnnnnnnnnnnnnnnnnnnnnnnnnnnnnnnnnnnnnnnnnnnnnnnnnnnnnnnctttagttttagtgactaaaataaaagcagataaataatcttcttccacagggaaanaaatacttgagggaaaaaacaatggtataacatgtgtaaagcaggaaatttaaatatcagcttagttcctcattgccaacatggcatttatatcccagatgagatttcgtaattgatccataatttgtttcagctgttgattcttctgtttgagttttttatttacttcagcaatttctcgcctctcttcactagcaaaacgaggtgggccagcccgatcatcattctttgagccatcttcttccacatatggaataagtggctcgactggaatgggatccatcccaccacagttttcattgcattggtcatataccaatctcagcttcctgaagagaactgaaagtgggcgaagattatcctgtagcttggttaaccggtctggatatgttccagtgtggtaagtgacaccattgggcagctgcatgttcctcaggagctggaagatctccatggtgcggtacacgatgtcctgcactgtctcctgcccgatgcggcacagcgacgccgtgttgacttcccgggcggcctgctgagcctggggcccggcgaagggcccgggcgccatccccgacgcggccaacggaggggtggacatggcgcggctgcagcttcaggccggaaggggccagacagcaggtgtcaggggtctgcccggaattgggaggctgtggggcctcagcgttggaaccagcttgagagaccccccgcggcccgatttcaaaaccccc

SEQ ID NO: 164101 - DNA, 451 bp, Homo Sapiens
aatagcaggagtcagagagtataggcaactcttttgaggagtttatgcaaagcggggcaagtccacctcttccttagctatgtgacccaggcaagttagtaaatgtttctaaaactccattttctcactcttagagatgagatagtaatacctgccacatagaattatcttgaaaaataaggtaagaagacaggtttcagatactgggcacagcaatagcacatagtaagcaccagtgaatgctgggtagtagtagtagtctaattcctaagagtccatggaactctaggttcaaaacccagtttcttctgggaccattagatggcatcagactcaaacaggtgctcctctagctgacagctctaaaacacaaggaagatcttggttttccttattccctagtcctttccccacaaaattctgacaattacgcatttcctgcttatctcct

SEQ ID NO: 164102 - DNA, 858 bp, Homo Sapiens
  misc_feature (782)..(782): n is a, c, g, or t
gaggcagatagcaggaggtgaccaggaaggaaatggcggcagctgggctcaccgtgactgtcacccacagcaatgagaagcacgaccttcatgttacctcccagcaggcagcagtgaaccagttgtccaagacctggcccaggttgttgaagaggtcataggggttccacagtcttttcagaaactcatatttaagggaaaatctctgaaggaaatggaaacaccgttgtcagcacttggaatacaagatggttgccgggtcatgttaattgggaaaaagaacagtccacaggaagaggttgaactaaagaagttgaaacatttggagaagtctgtggagaagatagctgaccagctggaagagttgaataaagagcttactggaatccagcagggttttctgcccaaggatttgcaagctgaagctctctgcaaacttgataggagagtaaaagccacaatagagcagtttatgaagatcttggaggagattgacacactgatcctgccagaaaatttcaaagacagtagattgaaaaggaaaggcttggtaaaaaaggttcaggcattcctagccgagtgtgacacagtggagcagaacatctgccaggagactgagcggctgcagtctacaaactttgccctggccgaagtgaggtgtagcagaaaaaggctgtgctgccctgaagaatggcgccaccagctctgccgtctctggagcggaattttacctgatttcttcaggggctgcctggggggcaactggcccatttgccaaattntccctactctcacactgggttctcaatgaaaaatagtgtctttgtgattctgagtaaagctcctatctgttttctc

SEQ ID NO: 164103 - DNA, 486 bp, Homo Sapiens
  misc_feature (15)..(15): n is a, c, g, or t
aacgagcaggcctgngtggcgaattccgcacgaggctgcccaaggatttgcaagctgaagctctctgcaaacttgataggagaagtaaaagccacaatagagcagtttatgaagatcttggaggagattgacacactgatcctgccagaaaatttcaaagacagtagattgaaaaggaaaggcttggtaaaaaaggttcaggcattcctagccgagtgtgacacagtggagcagaacatctgccaggagactgagcggctgcagtctacaaactttgccctggccgagtgaggtgtagcagaaaaaggctgtgctgccctgaagaatggcgccaccagctctgccgtctctggagcggaatttacctgatttcttcagggctgctgggggcaactggccatttgccaattttcctactctcacactggttctcaatgaaaaatagtgtctttgtgattttgagtaaagctcctatctgttttcctc

SEQ ID NO: 164104 - DNA, 709 bp, Homo Sapiens
  misc_feature (285)..(330): n is a, c, g, or t
cagaggaatagcaggaatgtcttatttttattcgcccaagtcaaccaccaggaaactggacaggcacacggatacccatcatttcacaccggcgtatataaaaggactaatgagccctggagttcggttatttttttgatcacatttggaaaggccaggctcctccttcactgcccccgccaaaaggcaataagcaaggaaaaggtttcacatgctagcaagagcggctctaaaatttcaatttctgaggaagatggtttcaaatggaaatagtcataatggtannnnnnnnnnnnnnnnnnnnnnnnnnnnnnnnnnnnnnnnnnnnnnaataaacactcaaaaaactattaaacgggcaactcaagataaccaagcagtgttcctaatgaatgaataaaaacataaggatctctggatgcatctgctgttgaggagccactccagaggaatgaatgaactgtgtgaggctgcagttattagagctaggaaccatttctagcttcaaatcatatcacagtgagatttcataaaataaaggtacccctggttagatttatgactgcaccatcatataaagccaccctttatctggtttatcactgtatgttagtaggagctgtcttcagcaactaaggtagcatttcaataaaccgggaagcagtatcaccaacttatttaaagagaatcaacctcaacttatttgaga

SEQ ID NO: 164105 - DNA, 732 bp, Homo Sapiens
caatgcggagagactgaggctcagtgagaatgaggcaggattcaaataagctgaaaaacaggaatgtggtgctaagaggccaggactgagctgccctatgcccactgcccggggctgccctccctgcacagcaggggaacctggaccctgctcctgtcttttgtgtcaaaggagctctctgtcctagcaaccccaagaagcttcagttgggggacaggctgaggagaccaacagtgcagtctgcagagacttcaacatccctggcttcccgactgtgaggttcttcaaggcctttaccaagaacggctcgggagcagtatttccagtggctggtgctgacgtgcagacgctgcgggagaggctcattgacgccctggagtcccatcatgacacgtggcccccagcctgtcccccactggagcctgccaagctggaggagattgatggattctttgcgagaaataacgaagagtacctggctctgatctttgaaaagggaggctcctacctgggtagagaggtggctctggacctgtcccagcacaaaggcgtggcggtgcgcagggtgctgacacagaggcaatgtgtggaaagttgggtcaccgattccctcttgtactgtgtcggaagcttgttccgagtcccgtgtctgatcagtctttaacgttactcaagatcttggccacagagtgcaacaagtgacactgtacattccctttgatgggtgcagtc

SEQ ID NO: 164106 - DNA, 795 bp, Homo Sapiens
gctctacgttccctgttctcgcctgcagctccgccatggctcctaaaggcagctccaaacagcagtctgaggaggacctgctcctgcaggatttcagccgcaatctctcggccaagtcctccgcgctcttcttcggaaacgcgttcatcgtgtctgccatccccatctggttatactggcgaatatggcatatggatcttattcagtctgctgttttgtatagtgtgatgaccctagtaagcacatatttggtagcctttgcatacaagaatgtgaaatttgttctcaagcacaaagtagcacagaagagggaggatgctgtttccaaagaagtgactcgaaaactttctgaagctgataatagaaagatgtctcggaaggagaaagatgaaagaatcttgtggaagaagaatgaagttgctgattatgaagctacaacattttccatcttctataacaacactctgttcctggtcgtggtcattgttgcttccttcttcatattgaagaacttcaaccccacagtgaactacatattgtccataagtgcttcatcaggactcatcgccctcctgtctactggctccaaatagaccatgtcagcttcaccccctggctttgtgtctatgggtggcctgtggtatatggaaaagtagcagggtggtcagggtgggagacacaagatgtttttatagtctagagcctttaaaaaaacccagcagaatgtaattcagtatttgtttattggctgttttttgacagattgttgaaattaaatgaattgaaagaaaaaaa

SEQ ID NO: 164107 - DNA, 859 bp, Homo Sapiens
gtgaaggctggttccaacctgaaacagctggacttgtaccaaaaatgacgggctgactaaaacctgaaggttgaccacccatcatggctcccggagccattgaaggggactgattgaagaccaaagatgctgtgttccatggtcctgcctgagggagtgtgacagttacaccacctagacccaccaggggccccactggggcaggagcacttgttttgaagagatccagagggttgggctgcagggctgtaggttgtcctgtgggtgacgcctggcctgaaggttctgagacgggaggagcaaagatgtctgatgcaagcaagtcattggctgaagacttagcagtccttctgcctcttcctggtttggtactttgtggaggtgggataatggctatggagtcatgtggtgaggactggacagagctttccaagtcctgctttacgccattctgtatggacagtcctttgggagggcttcccacaaaagggttcggggaggatttgacagagaagccgttctgttctctttcagataccccattttgagttctcactgctggctgggtttgcgaacttgaaaagggccatgggcctgcctgagcttcctgtttgccagtccggttagagatctggtcaaattgctgacccaagtagtcaacatcaccattcaggggcccattactcagcggagtagacgagctactcgaattctctttcttctgatctggagatttgagagaatcaaacgaagaaggtgtcgattggtctggctgtgtgaaaggatcgtcacggaaaggatcaggatcaggggtgggaatccgcagggttgaggatgccaggaggactatgaaaaagcc

SEQ ID NO: 164108 - DNA, 955 bp, Homo Sapiens
  misc_feature (910)..(910): n is a, c, g, or t
  misc_feature (915)..(915): n is a, c, g, or t
taggaggacaaaatgaggctgtatttcactgttagtgagtaactaaggcttctccctccctccctgtcctgtcagtcttcagccaatgacttgcttgcatcagacatctttgctcctcccgtctcagaaccttcaggccaggcgtcacccacaggacaacctacagccctgcagcccaaccctctggatctcttcaaaacaagtgctcctgccccagtggggcccctggtgggtctaggtggtgtaactgtcacactccctcaggcaggaccatggaacacagcatctttggtcttcaatcagtccccttcaatggctccgggagccatgatgggtggtcaaccttcaggttttagtcagcccgtcatttttggtacaagtccagctgtttcaggttggaaccagccttcaccctttgcagcctcaactccccctccagtgcctgttgtctggggcccttctgcatctgtggcacccaatgcttggtcaacaacaagccctttggggaatccttttcagagcaatatttttccagctcctgctgtgtccactcagcccccatccatgcactcctctctcctggtcactcctcctcagccacctcccagagctggccctcccaaggacatctccagtgatgccttcactgccttagacccacttggggataaagagatcaaggatgtgaaagaaatgtttaaggatttccaactgcggcagcacctgctgtgcccgcgcggaagggagagcagacttcttctggggactttgagtgcctttgccagttatttcaacagcaaggttgggcatttcctcagggagaatggcaggaccatggatgaatttggatggttaattcaactatttgaaacaaggttcaatggaaccaccaaaggccaggttcccagancaagntttccctggccagtttaccaaattttattggacaatggtt

SEQ ID NO: 164109 - DNA, 889 bp, Homo Sapiens
atgtgcataagactccttcggggctgtgtgatcctcagtgggccttggcacagcatcaaaccaagttataccttctcaacaccaccaagcttagtgaagaactgttctaccagatactcatttatgattttgcccattttggtgttctcaggttatcggagccagcaccgctctttgaccttgccatgcttgccttagatagtccagagagtggctggacagaggaagatggtccccaagaaggacttgctgaatacattgttgagtttctgaagaagaaggctgagatgcttgcagactatttctctttggaaattgatgaggaagggaacctgattggattaccccttctgattgacaactatgtgccccctttggagggactgcctatcttcattcttcgactagccactgaggtgaattgggacgaagaaaaggaatgttttgaaagcctcagtaaagaatgcgctatgttctattccatccggaagcagtacatatctgaggagtcgaccctctcaggccagcagagtgaagtgcctggctccattccaaactcctggaagtggactgtggaacacattgtctataaagccttgcgctcacacattctgcctcctaaacatttcacagaagatggaaatatcctgcagcttgctaacctgcctgatctatacaaagtctttgagaggtgttaaatatggttatttatgcactgtgggatgtgttcttctttctctgtattccgatacaaagtgttgtatcaaagtgtgatatacaaagtgtaccaacataagtgttggtagcacttaagacttatacttgccttctgatagtattcctttatacacagtggattgattataaataaatagatgtgtcttaacat

SEQ ID NO: 164110 - DNA, 1170 bp, Homo Sapiens
tttgaatttaatcaggcattgggaagaccagaaaaaattcacaacaaattagaatttccccaagttttatatttggacagatacatgcacagaaacagagaaataacaagaattaagagggaagagatcaagagactgaaagattacctcacggtattacaacaaaggctagaaagatatttaagctatggttccggtcccaaacgattccccttggtagatgttcttcagtatgcattggaatttgcctcaagtaaacctgtttgcacttctcctgttgacgatattgacgctagttccccacctagtggttccataccatcacagacattaccaagcacaacagaacaacagggagccctatcttcagaactgccaagcacatcaccttcatcagttgctgccatttcatcgagatcagtaatacacaaaccatttactcagtcccggatacctccagtattggcccatgcatccggcaccaaggcacataacggaggaagaactttctgtgctggaaagttgtttacatcgctggaggacagaaatagaaaatgacaccagagatttgcaggaaagcatatccagaatccatcgaacaattgaattaatgtactctgacaaatctatgatacaagttccttatcgattacatgccgttttagttcacgaaggccaagctaatgctgggcactactgggcatatatttttgatcatcgtgaaagcagatggatgaagtacaatgatattgctgtgacaaaatcatcatgggaagagctagtgagggactcttttggtggttatagaaatgccagtgcatacggtataatgtacataaatgataaggcacagttcctaatacaagaggagtttaataaagaaacggggcagccccttggtggtatagaaacattaccaccggatttgagagattttgttgaggaagacaaccaacgatttgaaaaagaactagaagaatgggatgcacaacttgcccagaaagctttgcaggaaaagcttttagcgtctcagaaattgagagagtcagagacttctgtgacacagcacaagcagcaggagacccagaatatctagagcagccatcagaagtgatttctcaaagcacttgaaagaagaaactcattcaataataccacggcatcacatgc

SEQ ID NO: 164111 - DNA, 650 bp, Homo Sapiens
agaggatccccgagataagcaggagaaattattcaaagaacatgtatttatttatttgcgaatgtttgcaactgacagtggatttgaaatattgccatgtaatagatactcatcagaacaaaatggagccaaaatagttgcaacaaaagagtggaaacgaaatgacaaaatagaattactggtgggttgtattgccgaactttcagaaattgaggagaacatgctacttagacatggagaaaacgacttcagtgtcatgtactccacaaggaaaaactgtgctcaactctggctggctcctgcttatctcaggcgaatgagcacggcactattttatcgaccagaataaaatgcaggagaaattattcaaagaacatgtatttatttatttgcgaatgtttgcaactgacagtggatttgaaatattgccatgtaatagatactcatcagaacaaaatggagccaaaatagttgcaacaaaagaatggaaaagaaatgacaaaatagaattactggtgggttgtattgcgcgaactttcagaaattgacggagaacatgctaccttagacactggagaaaacgacttcagtgtcatgtactccacaaggaaaaactgtgctcaactctgctggtcctgctttctgcgccg

SEQ ID NO: 164112 - DNA, 1146 bp, Homo Sapiens
atactgcagaaataaaacactcaacttaaaaaaggttgaaacaaatgacaaatggaaatggctgaatcactgtacctttttgacacaaccttaaatcttagttttactatatattatttggtactcctggattcagtagttggggtaaaaaaagtttctatattcaaacatatctacagaatgtcaatataaaatgtgtggatatatacatttaatatacacatacatacacgcacacacacaaacgcatactcacatgtctaggaaccagcacctaaccacatccccgtttctcactaatgacccaatgaatcatttatgactttaagaccagcttagattctataaggctgtacaatatatggctgaaaaggtcaaacacaagcacccacgttcaggctggattcaactgttcctcctcatgatttttgaccaacagtaataccacctatgtaacaactatatctcaataacttagaattcagagtataaaaccataaacactgagctccctcattgtttaaagagcactctttccgttctatttccactaactgataagaggacacaccaaactagatgaactgtacaaatgatctttactcttaatctaaacaaacatgtgttaaaacattctgaaatgctgcatcctttgatttcttcatcttttcaattgcccgatgcaggtcctgctgttgaacaggccgaatttcatcttcgtcatggctttcttctgatgtagaattaacatattctctaacacagaggagggcagcatctcgacacatctcttttaggtcacttcctgaaaacccatcagtttcctgggcaacttctagcaggtctacatgcctatccacattttcatttttcaagatgagtttcaggattgcttctctctgttttaaagcaggctggttgatatgaaatcttgtaggcattcttctcataatagccgagtcaaggtcctgaggacgattggtagctcccattactatgacctggcagctgtgatcagtatccaatccatcccagagactcataaactgagctttcatcatggctgtagcttcatggtcagaacttgaacggtttcgtagaaaggagtctatttaatctataaagatgatggtacggtgtcgctat

SEQ ID NO: 164113 - DNA, 704 bp, Homo Sapiens
  misc_feature (495)..(495): n is a, c, g, or t
  misc_feature (528)..(528): n is a, c, g, or t
aagtcaaaaatgcttcctttattacataaagccaatactgctacttctaagttcaactgtttgtgcatctctatatcgttcaaagtgttacgcccgtgatattaacaatgaccgcttccaagtgtcagtgaacagtggctccctgtgagtgtcatcatggtacctctccccattgcacacaagtcaacaaactgctctagaaagttaagttctcccaggcccagagtaaacatatactcaatattcttccatactttattataccataagaagcaaacttctgaaggagatacaattaaagataccacaggtgtcctagcttgtcaatattctgttttatcattttcattaacaaagcagattacaatgtagccctaatttgcattataattagttgttacaagacactgcacattctcctgaagacacacatgatttccaagatgccaggtcactcttccaatcagtgaatggcgagctcactggcaggtgcanggctacttcctgtattccaatgatgtgcctganatagcgctttgcaagatgagcgtggattatgtggacacaattttgaggcaatctccattacacatttggtagaagactgcctaacttaatcttactattagtgtattagtgttgtatattatgaagacatattatattccattattctgcttagctcaaggaaaggaattaaagaa

SEQ ID NO: 164114 - DNA, 892 bp, Homo Sapiens
  misc_feature (632)..(645): n is a, c, g, or t
  misc_feature (755)..(763): n is a, c, g, or t
gggttgacccaatttaatgctttcaataattccaggttaaccgttcggggcgtaacctttttttgccttctgcggaaggcctgccagttccagcgacggaccaacggcgcttatgaccgaccccaagctcatcacctggtctccggtgtggtgcaacgatgttccctggaactttgagaagttcctggtgggccctgacggtgtgcccctacgcaggtacagccgccgcttccagaccattgacatcgagcctgacatcgaagccctgctgtctcaagggctcagctgtgcctagggcgcccctcctaccccggctgcttggcagttgcagtgctgctgtctcgggggggttttcatctatgagggtgtttcctctaaacctacgagggaggaacacctgatcttacagaaaataccacctcgagatgggtgctggtcctgttgatcccagtctctgccagaccaaggcgagtttccccactaataaagtgccgggtgtcagcagacacttggaagcggtcattgttaatatcacgggcgtaacactttgaacgatatagagatgcacaaacagttgaacttacaagtagcagtattggctttatgtaataaaaggaagcatttttgacttnnnnnnnnnnnnnnaaaaatttttaaaaacttttttttgggcggggggccccaaagggaagggaacatgggccaaactttttcccaaagaaacccggacaagaaaaagggtgggattccccccnnnnnnnnncccccggggggaaccggggcgttttaacaaatctcaaagggttttcggggttcttttggggctcctccccccgggagtcccaaggaagcctccaatataaattttcccccccgccctgtgccttttttt

SEQ ID NO: 164115 - DNA, 954 bp, Homo Sapiens
  misc_feature (763)..(771): n is a, c, g, or t
  misc_feature (774)..(774): n is a, c, g, or t
gggaaaaaggaggcgcctgctggcctccccttacagtgcttgttcggggcgctccgctggcttcttggacaattgcgccatgtgtgctgctcggctagcggcggcggcggcggcccagtcggtgtatgccttctcggcgcgcccgctggccggcggggagcctgtgagcctgggctccctgcggggcaaggtactacttatcgagaatgtggcgtccctctgaggcaccacggtccgggactacacccagatgaacgagctgcagcggcgcctcggaccccggggcctggtggtgctcggcttcccgtgcaaccagtttgggcatcaggagaacgccaagaacgaagagattctgaattccctcaagtacgtccggcctggtggtgggttcgagcccaacttcatgctcttcgagaagtgcgaggtgaacggtgcgggggcgcaccctctcttcgccttcctgcgggaggccctgccagctcccagcgacgacgccaccgcgcttatgaccgaccccaagctcatcacctgggcctccggtgtgtcgcaaccatgttgcctggaactttgagaagttcctggtgggcccctgacgggggtgccccctacgcagggacagcccgccgccttccagaacatttgacatccgagacctgaaatccaaagcccctgcctgtctcaaagggcccagcctggggcctaggggcgcccccttcctaaccccggttgcttttggcaattggcaagggttggctgtcctccnnnnnnnnnctnttcactccaagggagggggggttttccctcctaagacccttatgaagggggaagggaaccaccctcgggatctctttacggagaaaaaaataccccacccttcctcaaaaaatgggggtgcggctgtgggaccacactggcgtggagaaaccccccgcgggttctctcttgggtgccagt

SEQ ID NO: 164116 - DNA, 1778 bp, Homo Sapiens
ggggccccggggtaagctcgcgccgccgcgtcagctcagcgctgggtctctcggtcccgcagccgtgaggaggacggtctgcatactcgctgcccgccggctccctcccccgcgtccctgcgaccgccgcggcgaagatggcctcaggagtgcaagtagctgatgaagtatgtcgcattttttatgacatgaaagttcgtaaatgctccacaccagaagaaatcaagaaaagaaagaaggctgtcattttttgtctcagtgcagacaaaaagtgcatcattgtagaagaaggcaaagagatcttggttggagatgttggtgtaaccataactgatcctttcaagcattttgtgggaatgcttcctgaaaaagattgtcgctatgctttgtatgatgcaagctttgaaacaaaagaatccagaaaagaagagttgatgttttttttgtgggcaccagaactagcacctctgaaaagtaaaatgatctatgcaagctccaaggatgcaattaaaaagaaatttcaaggcataaaacatgaatgtcaagcaaatggaccagaagatctcaatcgggcttgtattgctgaaaagttaggtggatccttaattgtagcctttgaaggatgccctgtgtagattattcagtgccacaaattgaaagcttccatgtttaatgttatcctcttgctatataaataaagcaaatatatttaggccagggtctcactgagggggagctgtcttgtcatcttttagagtaaactattctataaacatatgcaaacagccctaaataaatctaaagtctaaagttttattgatgtgaaattaaattcttattggccaaatgcctgttttgatgagttgatttataaagatttttgttaagctcaggattttaaattacacagttcacaaacagtaaaggccatgtgaagagaattattacatctttattaacctcagcatttactttgtttcttttgcttaggaaattgctcataatctggttataattttggtccaaattctttattcttccttgagctaagcagaataatggaatataatatgtcttcataatataacaacactaatacactaatagtaagattaagttaggcagtcttctaccaaatgtgtaatggagattgcctcaaaattgtgtccacataatccacgctcatcttgcaaagcgctatttcaggcacatcattggaatacaggaagtagccctgcacctgccagtgagctcgccattcactgattggaagagtgacctggcatcttggaaatcattgtgtgtcttcaggagaatgtgcagtgtcttgtaacaactaattataatgcaaattagggctacattgtaatctgctttgttaatgaaaatgataaaacagaatattgacaagctaggacacctgtggtatctttaattgtatctcctacagaagtttgcttcttatggtataataaagtatgggacagaatatgagtatcatgttactctgggcctgggagaacttaactttctagagcagttagttgacttgtgtgcaatgggggagaaggtaccactgatgaacactccacagggagccactgttcacttgacacttgggaggcggcatcggataatatcacggggcgttacacttgcaacgaatatagaggattgccaaacagttggaacctttgacagttagccagttgggcttccttgtactaacggagcattttgacttaaacaatacaaaccacactgcatccacaacaata

SEQ ID NO: 164117 - DNA, 816 bp, Homo Sapiens
ggggaaactccccttggttcggcaggagctggggtcaacagggcccagcccccatttgaaggtggtatttctgaaagatcgggtttctcccctggtaggtttaggggaaccaccttcatagatgaaaccccccccgagacagcagcactgcaatgcccaaccagccggggtaggaggggcgcccttaggcacagctgagcccttgagacagcagggcttcgatgtcaggctcgatgtcaatggtctggaagcgggcggctgtacctgcgtaggggcacaccgtcagggcccaccaggaacttctcaaagttccaggcaacatcgttgcgacacaccggagaccaggtgatgagcttggggtcggtcataagcgcggtggcgtcgtcgctgggagctggcagggcctcccgcaggaaggcgaagagagggtgcgcccccgcaccgttcacctcgcacttctcgaagagcatgaagttgggctcgaacccaccaccaggccggacgtacttgagggaattcagaatctcttcgttcttggcgttctcctgatgcccaaactggttgcacgggaagccgagcaccaccaggccccggggtccgaggcgccgctgcagctcgttcatctgggtgtagtcccggaccgtggtgcctcagagggacgccacattctcgataagtagtaccttgccccgcagggagcccaggctcacaggctccccgccggccagcgggcgcgccgagaaggcatacaccgactgggccgccgccgccgccgctagccgagcagcacacatggcgcaattgtccaagaaaccc

SEQ ID NO: 164118 - DNA, 837 bp, Homo Sapiens
  misc_feature (785)..(785): n is a, c, g, or t
ggaaaaaaggaggcgcctgctggcctccccttacagtgcttgttcggggcgctccgctggcttcttggacaattgcgccatgtgtgctgctcggctagcggcggcggcggcccagtcggtgtatgccttctcggcgcgcccgctggccggcggggagcctgtgagcctgggctccctgcggggcaaggtactacttatcgagaatgtggcgtccctctgaggcaccacggtccgggactacacccagatgaacgagctgcagcggcgcctcggaccccggggcctggtggtgctcggcttcccgtgcaaccagtttgggcatcaggagaacgccaagaacgaagagattctgaattccctcaagtacgtccggcctggtggtgggttcgagcccaacttcatgctcttcgagaagtgcgaggtgaacggtgcgggggcgcaccctctcttcgccttcctgcgggaggccctgccagctcccagcgacgacgccaccgcgcttatgaccgaccccaagctcatcacctggtctccggtgtgtcgcaacgatgttgcctggaactttgagaagttcctggtgggccctgacggtgtgcccctacgcaggtacagccgccgcttccagaccattgacatcgagcctgacatcgaagccctgctgtctcaagggcccagctgtgcctaaggcgcccctcctaccccggctgcttggcagttgcagtgctgctgtctcggggggggtttcaatctatgaagggtgttttctccaaacctacgagggaggnaacacctgatctttacagaaataccacctccaaaatgggtggctggtcctgt

SEQ ID NO: 164119 - DNA, 331 bp, Homo Sapiens
taatgtatcgctataatggaaaggaagaacacctcctcagaagtcagcgcaggaagagcctgctttggacacgggagaaaagaagccattgctaactacttcaactgacagaaaccttcacttgaaaacaatgattttaatatatctctatatctaatttctcccgacattagaaacaaaacaaaaagaactgtcctttctgcgctcaaattttacgagtgtgcctttatattcatctactttattaagatgtatccttaatgtgtaatttacttattataagcatgatcttttaaaaatatatttggcttttaaagtatgcaccgtgttt

SEQ ID NO: 164120 - DNA, 770 bp, Homo Sapiens
gggcccggcgcggggaatgtcccgggtggagctggctgagtcgcgcgctctgctccacccgacggggctgtgtgtgctgggcctggctcgcggcgaaccgagatggcagagcagtcggacgaggccgtgaagtactacaccctagaggagattcagaagcacaaccacagcaagagcacctggctgatcctgcaccacaaggtgtacgatttgaccaaatttctggaagagcatcctggtggggaagaagttttaagggaacaagctggaggtgacgctactgagaactttgaggatgtcgggcactctacagatgccagggaaatgtccaaaacattcatcattggggagctccatccagatgacagaccaaagttaaacaagcctccggaaactcttatcactactattgattctagttccagttggtggaccaactgggtgatccctgccatctctgcagtggccgtcgccttgatgtatcgcctatacatggcagaggactgaacacctcctcaaaagtcagcgcaggaagagcctgctttggacacgggagaaaagaagccattgctaactacttcaactgacagaaaccctccacttgaaaacaaggattttaatatatctctttctttttcttccgacattagatactaatacttaaagaactgtccgttggtgcgctcaaatttgttgcgagtgtgcctgtttgactcatctactttatttggatgttgcatgaatgtgtaactggtagataattgtatgca

SEQ ID NO: 164121 - DNA, 1719 bp, Homo Sapiens
  misc_feature (822)..(823): n is a, c, g, or t
tttttttctctttgataatactgtttattgtccacggaccgagcgattgctcaagaatgatacaaagcatcagagacatgcgcagtctgcttgtcaactttcaacaactcttgtgtgttcccagcaccggaaggtctcagacttcatattccagcataaacacagtgctcccctcccccaaaaatccaaacggaaacaaaatcaacagagctttaaattacggcagcaagtccaatatttcttaatacttatcaagcaaagatttgaaaataactacaatgtaaactttattttaaatattttgagttgcttgcaggatgaaaataggagaagagagctgtgcttagaacataacatataaattaaacgatgccaaatggagagccttcttaaactatatatatattgccactatttattgtgaaggtatttgagcggcttcctctgtcagctgccacccggctcttcttaacctgttttgttttctgctcagcacggttaaaagaccaacgtgtgtggatcaaatataaaggccacacctttcagaccgaacctactcaaagatcctttactttgcaataatttgaactggagaaccaaagacgggagacgaatgaaagcaaagatgctcaaagaaccaaaggaaagacctgaaggaatccacctgcataggccacgcgttccactctgggtcaaatgcttccacgatgcagaaacctttttttaaaaaagtgcaagtctaatacctaccaagggtaataaaaaacacagcacaggaatgattacagctgatgtcaaaacaaccaaacattaaaaaaaccnnaatcagcagaaacaggagtaaatgttacatatgatatcaccatacaggaagcgaacaggggtggggtgttatatgggttggaggggtctggtggagttgtatatactgaaatcacatggactggtccattatgacatcttaccaactttaggtcactgtacagcatgaaaacgcccgtggggcaggggccgattcctggataccctcccagtctgccctagaaagggaagtcatcaagatctgtgctgaccaggtcccggtgggcatgggggctgcatgccacttgggggtcaggagtcttaacaggtgctttggggttgccgctgaatagaacaggctaaggtggctttggaagcattttgcaagaccacgcccaggccgccaagcttcggtttcattgcgtgtgtatgtttacataatgtgcctgtatatcgtcagtttatctttacaacacaggtgggaggaaacaagagattctccttatcattaccgagaaagttcttcctatcctaacccccatatcactggcttcaggaaaccacactgagggaacacataggttccctagttccctaggaagtttcttagctaggtaatctttgtcatttaagaaatacaagcagaagttggtatatctgcaactcaggttcacctatcatctgagaattcacctttagaaaaataagatgtctcttaaaacaggccatagtgtcctggaggctgagaaagaagtgagtgtgtcaccaaagccacctacctccaaaatccttcccttcctaggctggacttcttactatgcttagctggcgtcacatgcagaaagccccgtgcagaacgatggctgtcagtctttgagggagggaacactaagcctgggagggcacagcaagaccccc

SEQ ID NO: 164122 - DNA, 621 bp, Homo Sapiens
  misc_feature (61)..(107): n is a, c, g, or t
  misc_feature (110)..(119): n is a, c, g, or t
cgacaactagcaggatactgatagcctgggaggctgttgagggctttgtcaggagagaaannnnnnnnnnnnnnnnnnnnnnnnnnnnnnnnnnnnnnnnnnnnnnnctnnnnnnnnnngtctatttttaaaaacaatttttaaaagttgtattcgtctcagattcaaaatattatcacacaggtgatttatcttaaaaatccatgtgagtactgacctatatgtcattttttgcaaatctaaaacaaaaatatttcaaaatgttcagtggcagagagtactggtaccacaaaatcagagcagtagaagcaaaggggatataagatgtggacatgtctgtagcttgaggagatggcacctagaggaaaagagaattaagtgtttatctgggaaaatgttaatgatatacacagaacataggagctggaataaagaaggcatgcttaggttatagcaaggtatactcctggcctaaaatatcaccatctttctctgcattgcctgggacaaagtaagaatgggggcagaaaaaaagggaagactgagaacacagagcacttagtctacttattagcaaaaataaagtgagatttcctaaaatcaggtataatgtcatctgcc

SEQ ID NO: 164123 - DNA, 796 bp, Homo Sapiens
gaggaccagtcttaataggataaattaaaggtatgctaccacatataaaacttctttacagtcagttaagtattatacaacttttcaaactaaaggaaaacaaatcaaaatattaaaagaagatactgtctaatctaaaagtgtactggtttctacaagtgtcaaaaaaagatttgatgtagtgcaactgtctatacttgtggtgcctttgaaaaaagggtgggaaggaggggagagaagaaacttttcttgcttctggaagcaaaagacatattggaattagagaataaacagaccatgcagtgcgtcactccacgctgcagtcattggtgctcatctgccaaccaaacctttccttaagtctcactgtggcaatctccttaggattcaaacccagagttaaggctggtctgctaaaaacgggggcactattgtcattcaaccctttagatctctagatttcctaatgcccgaataaggccaaatacagaataattaattaagcatttctttttccaaaagcaaatcaagtcactctcctttcttgctaatttatactttttcttatggcaatgatttttttctagaaacagtgaacagatgaaccacagtttatatccaaaaaataaacttgccaaatgctgctgatactaaaaacagattagttatcatgggagacaaaatagataatctagacttaaattgcatatccaaaggagcatataaaatgtttcttagcattaagtttttgttatagtactacgctcgagagaaacattaagaaaatctttcctgc

SEQ ID NO: 164124 - DNA, 418 bp, Homo Sapiens
  misc_feature (382)..(382): n is a, c, g, or t
  misc_feature (403)..(403): n is a, c, g, or t
ttaatgtttctctcgagcgtagtactataacaaaaacttaatgctaagaaacattttatatgctcctttggatatgcaatttaatctagattatctatttttctcccatgataactaatctgtttttagtatcagcagcatttggcaagtttattttttggatataaactgtggttcatctgttcactgtttctagaaaaaaatcattgccataaggaaaaagtataaattaggcaagaaagggagagtgacttgatttgcttttgggaaaaaggaaatgctttaattaattattctgtatttggccttattcgggcattagggaaatctaggagatcctaaaggggttggaatgaccatagtcccccccgttttttaggcngaccagccttaaccctggggnttggatccccaaggg

SEQ ID NO: 164125 - DNA, 498 bp, Homo Sapiens
agagataagcaggaactgggatcagggagtaaaaagcatattatgggacaaaacagatacatgatgtgcaaaacactgtctgcaatttaaatgtgatgtgatggaatttgggagccattacaaatctgatttaaagagaaggaactggcccaatgatgcccaagcaggaggactcctgcttctgtggtcacttatccagagaagctgacaactagtgagagcaagagttggtttcatctggcatttcccccactatctctggtggcattgtctagggcagtgaatgcctcaaaaggcaggcagcattaaagagaacacaatggatggatgagatccaagagcgaaccccaaataaatgagagtttactacatattaaaaggtacaactttagtttataaaaaattttactataaagattttcataccttttctaataggagcttggatctttttcaagtccatctgcttttccctcctttcacgatcgtcggggatcg

SEQ ID NO: 164126 - DNA, 412 bp, Homo Sapiens
  misc_feature (393)..(393): n is a, c, g, or t
aaggtatccagcagagaagctggaacagagcaccatagtgaaagagcggggcactgtgtacttcaaggaaggtaaatacaagcaagctttactacagtataagaagatcgtgtcttggctggaatatgagtctagtttttccaatgaggaagcacagaaagcacaggcccttcgactggcctctcacctcaacctggccatgtgtcatctgaaactacaggccttctctgctgccattgaaagctgtaacaaggccctagaactggacagcaacaacgagaagggcctcttccgccggggagaggcccacctggccgtgaatgactttgaactggcacgggctgatttccagaaggtcctgcagctctaccccaacaacaaagccgccaagancctactccctaagacccta

SEQ ID NO: 164127 - DNA, 1102 bp, Homo Sapiens
  misc_feature (989)..(989): n is a, c, g, or t
ggccttttgtcatctgaacttagagccttttctcttgcattgaaagctgtaccaggcccttgaactggacagcaacaacgagaggggcctcttccgccggggagaggcccacctggccgtgaatgactttgaactggcacgggctgatttccagaaggtcctgcagattctaccccaacaacaaagccgccaagacccagctggctgtgtgccagcagcggatccgaaggcagcttgcccgggagaagaagctctatgccaatatgtttgagaggctggctgaggaggagaacaaggccaaggcagaggcttcctcaggagaccatcccactgacacagagatgaaggaggagcagaagagcaacacggcagggagccagtctcaggtggagacagaagcatagcccctctccaccagccctactcctgcggctgcctgccccccagtctccccactccaccctgttagttttgtaaaaactgaagaattttgagtgaattagacctttatttttctatctggttggatggtggctttaggggaagggggaaaggtgtaggctgggggattgaggtggggaatcattttagctggtgtcagcccctcttcccttcctccattgcacatgaacatatgtccatccatatatattcatcagaatgttaatttattttgctccctctgttaggtccattttctaagggtagaagaggcaagtggtagggatgaggtctgataagaacccagggtggagagggagactcctgggcagccgttttcctcatcctttccctctccccagtccatttccaaatgtggcctccatgtgggtgctagggacatgggaaaaaccactgctatgccatttcctctctctgttcccctcctcacccccgacggtgtggctgatgatgtcttctggtgtcatggtgaccaccccctgttccctgtttctggtattttcccctgtcagtttccccctctccgnccaggtggtgtcccaaaaatccctcagctctttctctgcccgttgctgaaaagtccaggccttgcctcaagttcccatgctttgagcaataaaagctggaaccataaccacac

SEQ ID NO: 164128 - DNA, 928 bp, Homo Sapiens
tgcccaggcggggttgtgtcgcaggcagggggttccgaaaggccagctttccccgggaaaaggaaagttttattcccaatattttgaagagggctggctgaggaggagaaccaaggccaaggccagaggtttccttcaggagaccatcccccttgccccagagagaaggaggagccaaagagcaacacggcagggagccattctcaggtggagacagaagcatagcccctttccaccagccctactcctgcggctgcctgccccccagtctccccactccaccctgttagttttgtaaaaactgaagaattttgagtgaattagacctttatttttctatctggttggatggtggctttaggggaagggggaaaggtgtaggctgggggattgaggtggggaatcattttagctggtgtcagcccctcttcccttcctccattgcacatgaacatatgtccatccatatatattcatcagaatgttaatttattttgctccctctgttaggtccattttctaagggtagaagaggcaagtggtagggatgaggtctgataagaacccagggtggagagggagactcctgggcagccgttttcctcatcctttccctctcccagtccatttccaaatgtggcctccatgtgggtgctagggacatgggaaaaaccactgctatgccatttcttctctctgttcccttcctcacccccgacggtgtggctgatgatgtcttctggtgtcatggtgaccaccccctgttccctgttctggtatttcccctgtcagtttcccctctcggccaggttgtgtcccaaaatcccctcagcctcttctctgcacgttgctgaaggtccaggcttgcctcaagttccatgcttgagcaataaagtggaaacaataaaacctgggtgtcagaccaaac

SEQ ID NO: 164129 - DNA, 851 bp, Homo Sapiens
  misc_feature (154)..(173): n is a, c, g, or t
ggctcgctccaattatggcactgaaatgcggtgattctagtatattctgggcactgggtttcaggtagcatgtccatccaaagggccacacggaatacgcttggtgccagcatcttggatttcgctcagtttccaaaaagaatccacaaagggnnnnnnnnnnnnnnnnnnnngggcaggaggggtcgaaatgaatgattatgtcaatcatacttggtctcaacaccagcatctgattattcaaatgaaaccaacaggaaaaaagctgactgcacatgagtccgatggtgaacacagctccttgtccatgtctgtcggccatactcattgaagctcctgagaaaagcctggctcagtggccatcaacacacttcccagcctgtatagtgaaggatcaacagctccccagctcactcccgtccttccacttccgtcctttgactgtctttttcatctctgtctgccttcatgcctccgatagaagtactctgtgtattcaggttgtctttttgcaactgtcacaccatccacaagttcaaagtgatagttctccagggcagacaagattctttctgacatcccattatgccaacaggcacaggacagcacgaccccacagacagcccccaggaggacccccagggcactcatggctatgatggtgatgaggatggggtctaaggtcttcaacacattgcctggcttcctggagatgttcttgtcaccttctccttcaccttcgtatcctggcgtgctccctgtttcatcaattttaatttctgggttcttatatccaggtctgctggttttgcacaatctcttgtaaaatgtgggtatcaatactcatgtca

SEQ ID NO: 164130 - DNA, 1165 bp, Homo Sapiens
tcctttaatcagccttcctcgtttgatgcaactccttatatcaaagatctatttacctgtaccattaagagattaaaagcagctgacattgatcaggaagtcaaggaaagggctatttcctgtatgggacaaattatttgcaaccttggagacaattggggttctgacttgcctaatacacttcagattttcttggagagactaaagaatgaaattaccaggttaactacagtaaaggcattgacactgattgctgggtcacctttgaagatagatttgaggcctgttctgggagaaggggttcctatccttgcttcatttcttagaaaaaaccagagagctttgaaactgggtactctttctgcccttgatattctaataaaaaactatagtgacagcttgacagctgccatgattgatgcagttctagatgagctcccacctcttatcagcgaaagtgatatgcatgtttcacaaatggccatcagttttcttaccactttggcaaaagtatatccctcctccctttcaaagataagtggatccattctcaatgaacttattggacttgtgagatcacccttattgcaggggggagctcttagtgccatgctagactttttccaagctctggttgtcactggaacaaataatttaggatacatggatttgttgcgcatgctgactggtccagttttactctcagagcacagctcttactcataagcagtcttattattccattgccaaatgtgtagctgcccttactcgagcatgccctaaagagggaccagctgtagtaggtcagtttattcaagatgtcaagaactcaaggtctacagattccattcgtctcttagctctactttctcttggagaagttgggcatcatattgacttaagtggacagttggaactaaaatctgtaatactagaagctttctcatctcctagtgaagaagtcaaatcagctgcatcctatgcattaggcagcattagtgtgggcaaccttcctgaatatctgccgtttgtcctgcaagaaataactagtcgacccaaaaggcagtatcttatacttcattccttgaaggaaattattagctatgcatcagtggtgggccttaaaccatatgttgaagacatctgggccttattagctaaagca

SEQ ID NO: 164131 - DNA, 888 bp, Homo Sapiens
  misc_feature (842)..(842): n is a, c, g, or t
  misc_feature (876)..(876): n is a, c, g, or t
cccgacacacagtgaagttgggagagaagctggagagataccacacggccatacggagatcagaatctgtcaagtctcggggtctgccttgcactgagttattcgtggctcctgtgggtgtagccagcaagcgccacctctttgagaaggaactggcgggccagagccgagcagaaccagcctccagccggaaggagaacttgaggctctcaggggttgtgacatcaaggctcaacctgtggatcagcaggacccaggaatctggagatcaggacccccaggaggcacagaaagcatcatctgcaaccgagaggactcagtggggacagaaatctgactcctcgctggacgctgaggtgtgacaagccccgccaagacagacctgcaagtcttcgtctcaagggacctccctcatgccaggcccctgcctctcacagcagcaccctttcctctcattgtccctgttccctttttgcctgtggatctgtttggccagggtccctggggtcaggaatatttgcaagactcagccagctccttcccagcccagcctcttggggctgggactttctcaccctgcggcaggcacaacagatgctgggacccagtctctgcccaggtcacagcacaagtgcacatcagcactatggggcctatgtcctgcccagagacctctgctccttcctgctcacatccacagtcagggcacggagcccctcaagaactccagagtcacctgtctcatcggctcccagcaagtgcctctttgtctatgatgtcccccttctctgaggcctggacccacccatctttgtccctggggcctggctccagccactgangcccgctctggccagggggagaaggagctgccgntgcgtccttccc

SEQ ID NO: 164132 - DNA, 630 bp, Homo Sapiens
aggagataagcaggaagagtgagagggaggtgaggatgaaaataggtacaatgtacactattcaggtgacagaagcactaaaatcccagacttccgctatacaattcatcatgtaactgaaaaccacttgtacccctaaagctactgaaatataacaattttttaaaataacatttttaaaattacattaagtacaaatgcagtaaacgctgataagagccagagatcatcagattagttttttaagtcctaattatgtgctgttaatagagactttaaatataaagaaatataatagtaaaaggatgaaaaatgagataacatacatatgtaagcacaggaaagcaggagcgggtttatttaaaaactacacatcaggaagtatgactagaaagaaagatattttacaatgataagtgttaattcatcaggaagtcataacaagcacaaatgtttttgcaactaataacaaagcttccaaatacatgaagcaaaaactgatggtgttaagggagaattagacaaatttaatccacttatatttaacataatatagatatggttgacctggttggatttaaatctactgataaggttggatttaagtctactgtcctgctatctcctccg

SEQ ID NO: 164133 - DNA, 503 bp, Homo Sapiens
ccagataagcaggatccctgtttttctcccgcttgcgagcttttgggagtgtgctgaatctcagactgcaatagataaacccaagagggacaggcaccagtagcctgagcttgctttctcccctggctcatgggaatcaagcagtagaaatttttagtgagtgttgttttccatagtatgcttactagttgtgtcttcctgttttgttcttggtgatttgaagaaacctgtttacaaggtaagggactgaaacaaataggtgacaggaaaaagagcagcaggggtacgagctggaggagtaagtggcttggcttgctctctttcagaatggagggctgtatggaaaggaggggtagtgttcttgaagagtgttggggtttaaatctagggggaccgtgtcttggcattgattgaaactcctggcttaacatcaccccgaaactgttagttggactgaacatgacatttggcagtgcagttaaaaacacttcctgcttatctct

SEQ ID NO: 164134 - DNA, 409 bp, Homo Sapiens
aatcttaagtttcctggcctgcatttcccgggtaggggcaaatgactccaagctggtctctaagccaatacccttataaaccagagcccaggaaagacagctcgagtgtataattctctggagctcaattctatgcagttgtgctgatatttcattaagtcactgtgtatttttaagtgttgatacattaaaagtcgctttatggaagatgagtaaattttttaaatacttggaaattttatttccttgttaacttctacagatcagggcatgcaaccaaaagcagcttaaatgaaatattttaaaataaaatatcaggaagctatttttagatttcttctggcttatgtttctactttagaccctcattgttctcttattaaaaaaattatttcctgctactctggtg

SEQ ID NO: 164135 - DNA, 963 bp, Homo Sapiens
  misc_feature (816)..(817): n is a, c, g, or t
taacagtaagccccgacacgtctctgctactggactgtggtgagggcacatttgggcagctgtgccgtcattacggagaccaggtggacagggtcctgggcaccctggctgctgtgtttgtgtcccacctgcacgcagatcaccacacgggcttgccaagtatcttgctgcagagagaacgcgccttggcatctttgggaaagccgcttcaccctttgctggtggttgcccccaaccagctcaaagcctggctccagcagtaccacaaccagtgccaggaggtcctgcaccacatcagtatgattcctgccaaatgccttcaggaaggggctgagatctccagtcctgcagtggaaagattgatcagttcgctgttgcgaacatgtgatttggaagagtttcagacctgtctggtgcggcactgcaagcatgcgtttggctgtgcgctggtgcacacctctggctggaaagtggtctattccggggacaccatgccctgcgaggctctggtccggatggggaaagatgccaccctcctgatacatgaagccaccctggaagatggtttggaagaggaagcagtggaaaagacacacagcacaacgtcccaagccatcagcgtggggatgcggatgaacgcggagttcattatgctgaaccacttcagccagcgctatgccaaggtccccctcttcagccccaacttcagcgagaaagtgggagttgcctttgaccacatgaaggtctgctttggagactttccaacaatgcccaagctgattcccccactgaaagccctgtttgctggcgacatcnnagagatggaggagcgcagggagaaacgggagctgccgcaggtgcgggcgggccctcctgtccaaggaagctggcagggcggcctggaaggaagggggagccttcaagcaaaggccgggccccacccacgaggaagccacaggggcc

SEQ ID NO: 164136 - DNA, 282 bp, Homo Sapiens
taattcattcttggatagtgaagcaaaactgattgaaaataccaagataagacagaaaaagtgactggaaagaggagcttttcttccaggcatgttccagtttcaccctaagactgaccttcaaataatcaggttgtactgaaataaaggacttgttaaaaattaaaattatgtcatcgagatgatagcttttttcctcctccaacagtttattgtcatgtgctgtgggagagctcgagtgaagagcaataaactccaggtcttataagaatgtacatacca

SEQ ID NO: 164137 - DNA, 1136 bp, Homo Sapiens
gagctcggtacctctgctggtgatgtgctggggaacttcgtggcagtggcggaaagtttcttatcacacgtcggagacatgacagtgcacagctagttctaatgaaaggttttggtggaactgcaggaatggcatttgtgggaacagtgtgttcaaggagccacgcaggcgggattaatgtgtttggacaaatcactgtggagacatttgcttccattgttgctcatgaattgggtcataatcttggaatgaatcacgatgatgggagagattgtacctgtggagcaaagagctgcatcatgaattcaggagcatcgggttccagaaactttagcagttgcagtgcagaggactttgagaagttaactttaaataaaggaggaaactgccttcttaataattccaaagcctgatgaagcctataagtgctccctcctgtggtaataagttggtggacgctggggaagagtgtgactgtggtcactccaaaggaatgtgaatggacacccttgctgcgaaggaagtaccgtgtaagcttaacatcatttgcgtgagtgtgcatatggtgactgttgtaaagactgtcggttccttccaggaggtactttatgccgaggaaaaaccagtgagtgtgatgttccagagtactgcaatggttcttctcagttctgtcagccagatgtctttattcagaatggatatccttgccagaataacaaagcctattgctacaacggcatgtgccagtattatgatgctcaatgtcaagtcatctttggctcaagctgtcactgaaatttcatgctccattctgagcactatgcttcaagaggcagtgaggcaaactggaacatatttaggagggagcgtccttgttgcatgaaaagtgattgtaggatagtgacctggtgaagaatgctttgtgtggaaagcttcagtgtgagaatgtacaagagatacctgtatttggaattgtgcctgctattattcaaacgcctagtcgaggcaccaaatgtaggggtgtggatgtccagctaggatcagatgttccagatcctgggatggttacgaaggcaaaaagtggtgctggaaagatctgtgaaactcatgtgtaatgctctgtctgattatgatgg

SEQ ID NO: 164138 - DNA, 977 bp, Homo Sapiens
agaaggtaaaaaaataggtgagggaactatataaatggaggtgcaggagcaggacgggcaggaatgaagtttccctgagatgatactttcggttgtggtggaggtggccttgatgggaactgctgaggttgcttggctgcataggttggtactgcaaatctgtttgcatatataggaacttctctgggaggtgtcactggagaaacatgtcgaggaacactccccggctgtctagaagggtttgcttgatttttgccatctgactcatatgtttgtgatctcttctttctgaagtagcttctccacagttgatccctcttgatgaagataaaaatagcacagacaataaggggaacaattaggaagaagaagaccagaagtccgtccctcaatgcagtattcatttcattgtatgtaggcccactgtccacacttcctccgtatcctttagtctcacaatttgggggagcccagccattttcacagtgacaattcttattgctattacataccccatgtccatgacactttttctgaacatcacagtcataattcagaacagaagcatctacacactggaagtttctacagatctttccagcaccacattttgtgccttcgttaaccatcccaggatctggaacatctgatcctagctggaaatccacaccccaacatttggtgcctcgactaggcgtttgaataatagcaggcacaattccaaatacaggtatctcttgtacattctcacactgaagctttccacacaaagcattcccagtggcacacttcttgtattcattgccagagaaaccacaattgccaaatctgtcacctttagaattcacttcaatgaaacaatctttgggggcagccttggcttttgagccaaagatgacttgacattgagcatcataatactggcacatgccgttgtagcaataggctttgtatctggcaaggatatccatctgaag

SEQ ID NO: 164139 - DNA, 987 bp, Homo Sapiens
ggtgccgaattgtcctccgcagctatgatgcctgtgatacactaaggccccgtgatgtgaccttcgaccctgagctcgtggaccctgtggtagctgcaggagctgtagtcaccagctccggcattgtcttcttctccaacccagcacatccagagttccgagtgaacctgaccctgcgatggagcttcagcaatggtacctcatggcggaaagagacagtccagctatggccaggccccagtggctattcatccctggcaaccctggagggcagcatggatggagaggagcaggccccccagctctacgtcctgtatgagaaaggccggaaccactacacagagagcatctccgtggccaaaatcagtgtctatgggacactctgagctgtgccactgccacaggggtattctgccttcaggactctgccttcaggaacacgggtctgtagagggtctgctggagacgcctgaaagacagttccatcttcctttagactccagccttggcaaaatcaccttccctttaccagggaaatcacttcctttaggactgaaagctaggcgtcctctcccacaaaaaagtcctgccctcatctgagaatactgtctttccatatggctaagtgtggccccaccaccctctctgccctcccgggacattgattggtcctgtcttgggcaggtctagtgagctgtagaattgaatcaatgtgaactcagggaactggggaaggctgagcctcctctttggtgttgcggtaagataaccgacagggctggtgaaagtccccagatggcaggatatttggtttcagagtaaggactaggtgcaccaccatgactgactatcaatcaaaatgtttgtaacttaaaatttttaatgaaggataatgaatatttgtagagtctctatggttctgtcaatgcacatcttcgtgtctgttttcctcatgtatccattgtgagcagcgttgagggggatccg

SEQ ID NO: 164140 - DNA, 687 bp, Homo Sapiens
  misc_feature (115)..(115): n is a, c, g, or t
tgacctggcctctaggatgggtgagggatgctttctgcatggcaagggaacttggttagggtagggagggagggtatgagagagggaaattcagcactgggtggaaggtttccanggaagaggggactcagcaacgaggggtgctccctctgcagtgtttattggaatagtactggtactttttattgtaggtcgtcttgtttctagcgaaacaggtggcagcagccttatcacactcacacagttgacttctgcaggagtcctgttttgcacaggtgattctgctccccgagttgctaaacttgtagctcagaaatttggtgccacatccacgtttctcccagacgtttgtagcaaacagtcatgagtgacacagcagcgaatccgttgcatccttgggggatcctctgcaacccacgccacagtggcagccgtagaagccataactgagtgcggcttcctttcctgtcgtcaacttgatcattctgtggaaattcaccaaattcccatgggcctgcagtaggccaaagatcatgatcactgccaacagtaggagggtcttcatggtaagagtccttgggtgacaaatgcagatggactggcctagctcctctgctgggtggtctcaacttctgccccggccgtcgctcccctgctcctccttggtggctctctcagaggactcca

SEQ ID NO: 164141 - DNA, 349 bp, Homo Sapiens
gcggccgcctactactactaaattcgcggccgcgtcgacctcctgggctgctggattgtctcgtctaggtcatcgaggcagacgggggcgaagagcgagcacaggaacttcttggtgtccgggtggcactgcttcatgaccagcgggatccaagcgccggcctgctccagcacctccttcatggtctcgtggcccagcaggttgggcagccgcatgttctggtattcgatgccgtggcacagctgcaggttggccgggatgggcttgcaattgctgcgcttgtaggagaagtcgggctggccaaagaggaagagcccgcgcgccgagcccgtcgacgcggccgcgaatt

SEQ ID NO: 164142 - DNA, 440 bp, Homo Sapiens
gcggccgcctactactactaaattcgcggccgcgtcgacgtgaaagtcaaagagcccccaaagaaggcagaggaagagaaagcccctgccacaccaaaaacagaggagaagaaggacagcaagaaagaggaggcacccaagaaggaggctccaaagcccaaggtggaggagaagaaggaacctgctgtcgaaaagcccaaagaatccaaagttgaagccaagaaggaagaggctgaagataagaaaaaagtccccaccccagagaaggaggctcctgccaaggtggaggtgaaggaagacgctaaacccaaagaaaagacagaggtggccaagaaggaaccagatgatgccaaggccaaggaacccagcaaaccagcagagacaatccagcagcccaggaggtcgacgcggccgcgaatttagtagtagtaggcggccgc

SEQ ID NO: 164143 - DNA, 339 bp, Homo Sapiens
gcggccgcctactactactaaattcgcggccgcgtcgacggccatggaagaagccaagaaagaaggctatgacttgagaagtgatgccattcccattgtggctgccaaggcctctcgggatattgccagtgattacaaatacaaagaagcatatcgtaaacagttgggtcaccacattggcgcccgagcagtacacgatgaccccaagataatgtggtccctccacattgccaaagtgcagagtgaccgtgagtacaagaaagattttgagaaatacgagacaatccagcagcccaggaggtcgacgcggccgcgaatttagtagtagtaggcggccgc

SEQ ID NO: 164144 - DNA, 391 bp, Homo Sapiens
tactactactaaattcgcggccgcgtcgacgaggtcctgtcctctcccctcagccctatgagctcccagatggctcagtcgtcatcaatgcccgaaaccagaacaactaccactgccactgccgaattgtcctccgcagctatgatgcctgtgatacactaaggccccgtgatgtgaccttcgaccctgagctcgtggaccctgtggtagctgcaggagctgtagtcaccagctccggcattgtcttcttctccaacccagcacatccagagttccgagtgaacctgaccctgcgatggagcttcagcaatggtacctcatggcggaaagagacaatccagcagcccaggaggtcgacgcggccgcgaatttagtagtagtaggcggccgc

SEQ ID NO: 164145 - DNA, 418 bp, Homo Sapiens
cgcgtcgacattgaatgtgaatggcctaaatgctccacttaaaagatacagaactgcagaatggataagaactcatcaaccatctgctgccctcaggagactcacctaacacataaagactcacgtaaacttaaaggggtggaaaaaggcatgtcatgcaaatgacaccataaacaagcaggggtagctattcttgtatcagacaaaaactttaaagcaacagcagttaaaagagacaaagagggacattatataatggtaataaggccttgtcacaggataatatcacaatcctaaacatatatgaacctaacactggagcttccaaatttataaaacaattactaacagacctaagaaacgagacaatccagcagcccaggaggtcgacgcggccgcgaatttagtagtagtagcc

SEQ ID NO: 164146 - DNA, 306 bp, Homo Sapiens
ggctactactactaaattcgcgggcgagtggacaacaagacgacctacaataaaaagtaccagtactattccaataaacactgcagagggagcacccctcgttgctgagtcccctcttccctggaaaccttccacccagtgctgaatttccctctctcataccctccctccctaccctaaccaagttccttggccatgcagaaagcatccctcacccatcctagaggccaggcaggagcccttctatacccacccagaacgagacaatccagcagcccaggtcgacgcggccgcgaatttagtagt

SEQ ID NO: 164147 - DNA, 1269 bp, Homo Sapiens
  misc_feature (949)..(949): n is a, c, g, or t
ggggactctggggagtctagctgccagggtcgcggcagctgcggggagagatgactggggagcgacccagcacggcgctcccggacagacgctgggggccgcggattctgggcttctggggaggctgtagggtttgggtgtttgccgcgatcttcctgctgctgtctctggcagcctcctggtccaaggctgagaacgacttcggtctggtgcagccgctggtgaccatggagcaactgctgtgggtgagcgggagacagatcggctcagtggacaccttccgcatcccgctcatcacagccactccgcggggcactcttctcgcctttgctgaggcgaggaaaatgtcctcatccgatgagggggccaagttcatcgccctgcggaggtccatggaccagggcagcacatggtctcctacagcgttcattgtcaatgatggggatgtccccgatgggctgaaccttggggcagtagtgagcgatgttgagacaggagtagtatttcttttctactccctttgtgctcacaaggccggctgccaggtggcctctaccatgttggtatggagcaaggatgatggtgtttcctggagcacaccccggaatctctccctggatattggcactgaagtgtttgcccctggaccgggctctggtattcagaaacagcgggagccacggaagggccgcctcatcgtgtgtggccatgggacgctggagcgggacggagtcttctgtctcctcagcgatgatcatggtgcctcctggcgctacggaagtggggtcagcggcatcccctacggtcagcccaagcaggaaaatgatttcaatcctgatgaatgccagccctatgagctcccagatggctcagtcgtcatcaatgcccgaaaccagaaaaactaccactgccactgcccgaattgtccctccgcagctatgatgcctgntgatacactaaagcccccgtgatgtggactttcgaaccctgaactcgtggacccctgtggttacctgccaggagctgttaatccaccagctccgggcattggcttctttctccaacccagcacaatccagaagttccgattggaacctgacccctgcgattggagtttccaccaatgggtacctccatggccggaaaaagacaagtcccacctattggccaaggccccccggtgggctatttcatccctgggcaaaccctggaaggggccaccttgaaatggaaaaagaaccaggccccccaaaattctaaggggcctgg

SEQ ID NO: 164148 - DNA, 736 bp, Homo Sapiens
gggcagaagttgagaccacccagcagaggagctaggccagtccatctgcatttgtcacccaagaactcttaccatgaagaccctcctactgttggcagtgatcatgatctttgaatgatcaagttgaccacaggaaaggaagccgcactcagttatggcttctacggctgccactgtggcgtgggtggcagaggatcccccaaggatgcaacggatcgctgctgtgtcactcatgactgttgctacaaacgtctggagaaacgtggatgtggcaccaaatttctgagctacaagtttagcaactcggggagcagaatcaacctgtgcaaaaaagggactcctgcagaagtcaactgtgtgaagtgtgataaggctgctgccacctgttttgctagaaacaagacgacctacaataaaaagtaccagtactattccaataaacactgcagagggagcacccctcgttgctgagtcccctcttccctggaaaccttccacccagtgctgaatttccctctctcataccctccctccctaccctaaccaagttccttggccatgcagaaagcatccctcacccatcctagaggccaggcaggagcccttctatacccacccagaatgagacatccagcagatttccagccttctactgctctcctccacctcaactccgtgcttaaccaaagaagctgtactccggggggtctcttctgaataaagcaattagcaaatc

SEQ ID NO: 164149 - DNA, 1269 bp, Homo Sapiens
gaaagttattgaaaccacagagcaagatcaggagcccagcgaggccaccgttgggaatggtgaggtcactctaacgtatgcaacaggaacaaaagaagagagtgctggagttcaggataacctctttctagagaaggctatgcagcttgcaaagaggcatgccaatgcccttttcgactacgcggtgacaggagacgtgaagatgctgctggccgtccagcgccatctcactgctgtgcaggatgagaatggggacagtgtcttacacttagcaatcatccaccttcattctcaacttgtgagggatctactagaagtcacatctggtttgatttctgatgacattatcaacatgagaaatgatctgtaccagacgcccttgcacttggcagtgatcactaagcaggaagatgtggtggaggatttgctgagggctggggccgacctgagccttctggaccgcttgggtaactctgttttgcacctagctgccaaagaaggacatgataaagttctcagtatcttactcaagcacaaaaaggcagcactacttcttgaccaccccaacggggacggtctgaatgccattcatctagccatgatgagcaatagcctgccatgtttgctgctgctggtggccgctggggctgacgtcaatgctcaggagcagaagtccgggcgcacagcactgcacctggctgtggagcacgacaacatctcattggcaggctgcctgctcctggagggtgatgcccatgtggacagtactacctacgatggaaccacacccctgcatatagcagctgggagagggtccaccaggctggcagctcttctcaaagcagcaggagcagatcccctggtggagaactttgagcctctctatgacctggatgactcttgggaaaatgcaggagaggatgaaggagttgtgcctggaaccacgcctctagatatggccaccagctggcaggtatttgacatattaaatgggaaaccatatgagccagagtttacatctgatgatttactagcacaaggagacatgaaacagctggctgaagatgtgaagctgcagctgtataagttactagaaattcctgatccagacaaaaactgggctactctggcgcagaaattaggtctggggatacttaataatgccttccggctgagtcctgctccttccaaaacacttatggacaactatgaggtctctgggggtacagtcagagagctggtggaggccctgagacaaatgggctacac

SEQ ID NO: 164150 - DNA, 848 bp, Homo Sapiens
caaggcaagcaggaagcagcagatgcggctctccgtgtcttgattggggagaacgagaaggcagaacgcatgggtttcacagaggtaaccccagtgacaggggccagtctcagaagaactatgctcctcctctcaaggtccccagaagcacagccaaagacactccctctcactggcagcaccttccatgaccagatagccatgctgagccaccggtgcttcaacactctgactaacagcttccagccctccttgctcggccgcaagattctggccgccatcattatgaaaaaagactctgaggacatgggtgtcgtcgtcagcttgggaacagggaatcgctgtgtaaaaggagattctctcagcctaaaaggagaaactgtcaatgactgccatgcagaaataatctcccggagaggcttcatcaggtttctctacagtgagttaatgaaatacaactcccagactgcgaaggatagtatatttgaacctgctaagggaggagaaaagctccaaataaaaaagactgtgtcattccatctgtatatcagcactgctccgtgtggagatggcgccctctttgacaagtcctgcagcgaccgtgctatggaaagcacagaatcccgccactaccctgtcttcgagaatcccaaacaaggaaagctccgcaccaaggtggagaacggagaaggcacaatccctgtggaatccagtgacattgtgcctacgtgggatggcattcggctcggggagagactccgtaccatgtcctgtagtgacaaaatcctacgctgggaacgtgctggggcctgccaagggggcactgtttgaacccaaacttccctgcc

SEQ ID NO: 164151 - DNA, 436 bp, Homo Sapiens
tcgactctgaggatcgaggagacaaagtgcatataattggccacattcccccagggcactgtctgaagagctggagctggaattattaccgaattgtagccaggtatgagaacaccctggctgctcagttctttggccacactcatgtggatgaattgtgaggtcttctatgatgaagagactctgagccggccgctggctgtagccttcctggcacccagtgcaactacctacatcggccttaatcctggttaccgtgtgtaccaaatagatggaaactactccgggagctctcacgtggtcctggaccatgagacctacatcctgaatctgacccaggcaaacataccgggagccataccgcactggcagcttcataaacagggctcgagaaacctatgggctgcccaacacactgcctgcactagtggaggga

SEQ ID NO: 164152 - DNA, 608 bp, Homo Sapiens
  misc_feature (514)..(517): n is a, c, g, or t
  misc_feature (520)..(522): n is a, c, g, or t
  misc_feature (524)..(524): n is a, c, g, or t
  misc_feature (527)..(527): n is a, c, g, or t
  misc_feature (530)..(532): n is a, c, g, or t
  misc_feature (559)..(560): n is a, c, g, or t
  misc_feature (562)..(562): n is a, c, g, or t
ttgccaatgttgtccaggcctggtctctactcctggggctcaagcagtcctccgtgcctcagtctccccaaagtgctgaaattacagggaatgaactctggaagcccagccagggacaatgcaccttcacagagattctgcactaatctgagtgaaggtctaaggtttggaatctccccctcatggagagaagctttgtatggctgtcatgcttagacagtgattcctgcaacttgaccttcaggctgggagaggtggagagccatgcctgttctccttccttgctatggaatttgctgacacaatatcttccgcctggtgctgggcatatcctaagaacttacaactttcctgtattatcctgtgtgagcagctgtcaccttattgggggaaaaatgcctgaaaattagggggcacttcaagtagatagcttctatttcctatatttgtcttatatacaagtatttgcttttatcaaaataattccaataaagcattttaaagttcgccacannnnctnnncnttnacnnnaagggacctaatacttacaaaaaacanntntacatgttgggccgccttcggccctcgaaaagctttccaaaacatt

SEQ ID NO: 164153 - DNA, 869 bp, Homo Sapiens
  misc_feature (744)..(753): n is a, c, g, or t
  misc_feature (755)..(760): n is a, c, g, or t
  misc_feature (766)..(768): n is a, c, g, or t
  misc_feature (770)..(770): n is a, c, g, or t
  misc_feature (772)..(772): n is a, c, g, or t
  misc_feature (844)..(844): n is a, c, g, or t
gggctttttgcgaagtgggctcgtgggttggcagtatgagagttgtaatggcccgactgttgagtgagggggagcaggggatcccaacggcttgcgctgcctttgcgcagcagccggcgggcggccacgtcgcggcctggctggggtaggagagggcggtccccagtgcagttgggtgaactaccgttgcacactggagtttctggtgtctttgcttggaactgacctagctcgtggcagggggaactcggctagcggccccacagcccctgctgactcaaaacaactgagttgtaagacgttcatcgccgtgttatccttgagtaaagaatgaactctggaagcccagccagggacaatgcaccttcacagagattctgcactaatctgagtgaaggtctaaggtttggaatctccccctcatggagagaagctttgtatggctgtcatgcttagacagtgattcctgcaacttgaccttcaggctgggagaggtggagagccatgcctgttctccttccttgctatggaatttgctgacacaatatcttccgcctggtgctgggcatatcctaagaacttacaactttcctgtattatcctgtgtgagcagctgtcaccttattgggggaaaaatgcctgaaaattagggggcacttcaagtagatagcttctatttcctatatttgtcttatatacaagtatttgcttttatcaaaataattccaataaagcatttttaannnnnnnnnnannnnnnaaaaannnananccttattcggccggcctccggccttcgaaaaagtttttcaaaacctttccctttgggcgcgcggggccccantaaggaaagtggaaaatgggcccta

SEQ ID NO: 164154 - DNA, 648 bp, Homo Sapiens
agtgggtcagtgtcttctcacaaggtgattggaaaactgcccacgaggagaagtcaactttacctcctcccaaattcacagtacgcgagtgtagtagggtcattgctgggagataaattgtctgaggagggccacccttcaggtttaccagaaatcttagggtttggcccccctggtcacaggctaaatatatggtttaaaagttttattaaaaagaaaaacagaacaagacacactcacacccagatgactaatgaaggctaagcagaatagtctgagtttgctgagattaaagcagggatagtgttgaaaagttttcctttcactagtgggacacattccccttttcttttcaaagaggaagaacatggtgtcatccaatgtgaagtgagcagtgttcgggtcaaactcttatggtaagaaactaaaaaaagatgccaagagacaaaccttcagaaatagaagaaatgcaaaagatggaataaaaaccctgatcattaaaacagagacaccttcactggtgtccaataaggattctctttacaaaacagaaacaaacaactcaaaaatttaccatactttgtaatgaaaataccagtatgttgaagacacagcagactgggtttctattagaacaagtatcagcaa

SEQ ID NO: 164155 - DNA, 388 bp, Homo Sapiens
  misc_feature (56)..(56): n is a, c, g, or t
  misc_feature (58)..(58): n is a, c, g, or t
  misc_feature (107)..(107): n is a, c, g, or t
  misc_feature (118)..(118): n is a, c, g, or t
  misc_feature (195)..(195): n is a, c, g, or t
  misc_feature (200)..(200): n is a, c, g, or t
  misc_feature (231)..(231): n is a, c, g, or t
  misc_feature (249)..(249): n is a, c, g, or t
gtccctgcggtcggtgcgagggcgaagaggaacccgtgggcccgggggatcccggngngccggaccagtgttccccagttgtgggagcagacgcgtgggccattcgngggcgggcatngctgaagtgcagctatgtttccagtgttctctggctgtttccaagagctacaagaaaagaataaatctctggagttngtgtnctttgaggaggtagctgtgcacttcaccttngaggagtggcaggacctnggatgacgctcagaggaccctgtacagggacgtgatgctggagacctacagcagcctgggtatcatttggggcattgcattaccaaacctgaagatgatctttcaagctagagcaaggagcagagccattggataagta

SEQ ID NO: 164156 - DNA, 798 bp, Homo Sapiens
cctgaccgcgggggagaaagggtggtgggggcgtgaggcttatatgtggaacgatgcagagttcgcctgcagacggatctggatatacactatgtataattgttacgtgtaatttaaaatatatctgtttgccatcgtcatgagaagattatatgtaaggctctgaagggagagggggatgtacattctgccaggctcctggggaccttatccgagtcatgaaattgatgactgttgatccagtggtgcaagaagctacactccatgtgtcatcacgcttatgactcctaatgtatttttaaggcaaaaaatgtcagccgactccatcttcacccctcgattcctcgagtccagcctttctgtgccagtgcttcactgagccacaacgctctcgccatcgggacccgtctgggcctggagtctcggggcacagttgccatggagccctcctgggtcattctactaatgtgctgagtgccagctgaaaaccccacaggagatggagtaccttggccaagcttaaagagaagattttctcagggtatttattagtgtgtccagcaaaagatcaggaagcaggatggaaagatgcattcagactgttaatttatttacaaggcaaatgattttgtgtttcttgatgacagactattaagtttgggacttattttcccatttagagaagttataatatatatttaagatgataagtttcctgcttaagttgtgcctttcagctactatgagttgaaggagcactaagggtaatgataccatgagggttggtttatactccga

SEQ ID NO: 164157 - DNA, 589 bp, Homo Sapiens
agagctggccgggattataaatgaacacattgctccttcttctgttgtggatcagttcgtgctttattctgtatttgtctcccatgtcttgctcattctccatggagaattctgtcttctctttggccattattgagtttgaagagatcttccccgaaaggattccccagacatcaagaaccgtacttgagcaggttcttccaatatagctatctgagctccccaaggactgaccagggacctttccagagctcaaggatttctggacctttctaccagttgtggaccatgagagggtgggagggcccagggagggctttcgtactgctgaatgttttccagagcatatattacaatctttcaaagtcgcacactagacttcagtggtctttcgagctatagggcatcaggtggtgggaacagcaggaaaaggcattccagtctgccccactgggtctggcagccctcccgggatgggcccacatccacctccagtccctggccaggggtgagaggcagaccagcagatggacttgatccctctgtgtctttttgcttctggctggtagataatgtcaacctgcagtct

SEQ ID NO: 164158 - DNA, 1023 bp, Homo Sapiens
ggagccgggggacggcgacagcgggtcggcgggccgcaggagggggtcatgggtaaagactactaccagacgttgggcctggcccgcggcgcgtcggacgaggagatcaagcgggcctaccgccgccaggcgctgcgctaccacccggacaagaacaaggagcccggcgccgaggagaagttcaaggagatcgctgaggcctacgacgtgctcagcgacccgcgcaagcgcgagatcgtcgaccgctacggggaggaaggcctaaaggggagtggccccagtggcggtagcggcggtggtgccaatggtacctctttcagctacacattccatggagaccctcatgccatgtttgctgagttcttcggtggcagaaatccctttgacaccttttttgggcagcggaacggggaggaaggcatggacattgatgacccattctctggcttccctatgggcatgggtggcttcaccaacgtgaactttggccgctcccgctctgcccaagagcccgcccgaaagaagcaagatcccccagtcacccacgaccttcgagtctcccttgaagagatctacagcggctgtaccaagaagatgaaaatctcccacaagcggctaaaccccgacggaaagagcattcgaaacgaagacaaaatattgaccatcgaagtgaagaaggggtggaaagaaggaaccaaaatcactttccccaaggaaggagaccagacctccaacaacattccagctgatatcgtctttgttttaaaggacaagccccacaatatctttaagagagatggctctgatgtcatttatcctgccaggatcagcctccgggaggctctgtgtggctgcacagtgaacgtccccactctggacggcaggacgatacccgtcgcattcaaagatgttatcaggcctggcatgcggcggaaaagtccctggagaaaggctccccttcccaaaacccgaaaagttggaccccattatgattgaggagtttcccgaaggttccagaattaa

SEQ ID NO: 164159 - DNA, 747 bp, Homo Sapiens
gaggtttagcatcagtctttaatgctgtcgcacttcattgactagtcacacactttggtctcatgttggcagtggcaacttacaatgagtctaaaggtctgagcactggactggcctccagggaacagacatttgttccaactccccttccctccccaagatttcttcagaattccattatggccctatacagagagcactggctgccagggacaggttttgagtgtacaccaactatacatggaattataaaaacatatttacagacgttccacagtgctcctgtaatcagaagcaaagacccttttatcaaaagggattgtatctagggctgtgcaaaattcaaaaggatcagatccctttgaaagagtccatagtccatgaaacaaaaaattacctgggccactggtaagccccacgtgtgccaagattgccttacagaaatgtaaagagtgtgacccacaaagtgaggacattcagcttcactggagccagaggtcaggaaggccccttgctgaggccaggctcccagaccatcaagggagaggtggctgcacttgctggagtcactcactggaggctggctcccttggtcctgctggaacgagaggtattgcttgtggacgccaaccaggcagttctgcaggaatagtttaggttctcaatttgagatggccaaagagaagacagaattctccaggagaagagcaagacatgggagacaaatacagaataaagcacaaaccc

SEQ ID NO: 164160 - DNA, 1119 bp, Homo Sapiens
  misc_feature (957)..(957): n is a, c, g, or t
agaagatgaaaatctcccacaagcggctaaaccccgacggaaagagcattcgaaacgaagacaaaatattgaccatcgaagtgaagaaggggtggaaagaaggaaccaaaatcactttccccaaggaaggagaccagacctccaacaacattccagctgatatcgtctttgttttaaaggacaagccccacaatatctttaagagagatggctctgatgtcatttatcctgccaggatcagcctccgggaggctctgtgtggctgcacagtgaacgtccccactctggacggcaggacgatacccgtcgtattcaaagatgttatcaggcctggcatgcggcgaaaagttcctggagaaggcctccccctccccaaaacacccgagaaacgtggggacctcattattgagtttgaagtgatcttccccgaaaggattccccagacatcaagaaccgtacttgagcaggttcttccaatatagctatctgagctccccaaggactgaccagggacctttccagagctcaaggatttctggacctttctaccagttgtggaccatgagagggtgggagggcccagggagggctttcgtactgctgaatgttttccagagcatatattacaatctttcaaagtcgcacactagacttcagtggtttttcgagctatagggcatcaggtggtgggaacagcaggaaaaggcattccagtctgccccactgggtctggcagccctcccgggatgggcccacatccacctccagtccctggccaggggtgagaggcagaccagcagctggacttgatccctctgtgtctttttgcttctggctggtagataatgtcaacctgcagtcttgattcccagaccctgtacactcctccttttctgttgtgtgatcagtttgtgctttattctgtatttgtctcccatgtcttgctcttctcctggnagaattctgtcttcctctttggccatctcaaaatgagaaacctaaactattccctgcagaaactggctggggttgggcgttccacaagtaattacactcctcggtttcacagcaagaaccaaaggggagcccaagccctcccagggggaagtgaacttcccc

SEQ ID NO: 164161 - DNA, 794 bp, Homo Sapiens
agatagcaggaggcagcctggcagttggcacaatagtccagcgaagaaaaaggaaaatcatcagtcaatttctacaccaaaaaataaaagtacatataagcccagatggaacggagatagtggtgctaaatcttctgcatcaagggtgttgttcccttcaatggctccatgtcgcctagatcccccgatcgatccagtgttctattgtggtctcctctctcatttggtgtggaatagttgttatctagtgattttgtgtttgatcccatattgctcatctgaatttcttcccgatcaggtttcttatctgatttttggttccggtcaatgagagggagagtactatcatcatatgaatgactgctctggcttcgggaagcattgtttagattcacctgaaagtctgatttcttccatccttctttttccagtggcttccgcagttccttatatccccagattgtctgtaatacaagtgctgctgctcgaacttctttttctgagcggttccctgatttgttgatcaacaccagcttctcaataccctgtgtctctcgaagctttttggcagcctccaagttctcagcgataacctcgttgatagtgttcaaaatagagatgacagtgtcctcagagaaattccaagaggagttctgctgtcctcctggcaagattctttaccaagttaggaatagcatgttacccaattaattctttgttgcgagcatccacagccaggtttctcaggtgctccagagcactttcaccacccgttcatgtcattagttcagggc

SEQ ID NO: 164162 - DNA, 1588 bp, Homo Sapiens
  misc_feature (520)..(538): n is a, c, g, or t
  misc_feature (941)..(951): n is a, c, g, or t
  misc_feature (1458)..(1458): n is a, c, g, or t
cgggcccaagggctggaaggagctcgggctgagcgggtgctagagctgtatccatcctgccacccagaccactgttcctggagacgagtgcccatccacgggccggcctgcggcttgggccccagccttaacttctcgacagttccgtgaggatgacttccggagagttgtggactttatagatgaaggggtcaacattggcttagaggtgaagagcaagactgccaagctccaggatttcaaatccttcctgcttaaggactcagaaacaagtcagcgtctggccaacctcaggcaacgggtggagcagtttgccagggccttccccatgcctggttttgatgagcattgaaggcacctgggaaatgaggcccacagactcaaagttactctccttccccctacctgggccagtgaaatagaaagcctttctattttttggtgcgggagggaagacctctcacttagggcaagagccaggtatagtctcccttcccagaatttgtaactgagaagatcnnnnnnnnnnnnnnnnnnnggtaacaagacttagaaggagggcccaggcactttctgtttgaacccctgtcatgatcacagtgtcagagacgcgtcctctttcttggggaagttgaggagtgcccttcagagccagtagcaggcaggggtgggtaggcaccctccttcctgtttttatctaataaaatgctaacctgccctgagtttccattactgtgggtggggctcccctgggccaaacagtgatttgtctccctcaatgtgtacaccgctccgctcccaccaccgctaccacaaggacccccggggctgcaccctcctctttctgtctctgatcagagccgacacccgacgtgattagcccgcgcagctaattcaatttgttaaatgaaattgtattttgccccctctcttcccttaannnnnnnnnnnacgccttccatgcccggccgcgcttcggcccttaagcaacttttctatcccacttccttgtggacctgcgggcccccccatggtaaggggaaaactgcgtcataccccgccttcctagggaaacccttgggttacgggactatgcgcctgggtaactcttcccccactaataaaccgtccgggcggcacatcggcctcccccctgaaacaccatgcctcagcggtaccaccttcagggtctctaccctgggcgtcccctcaccctgcgcatttctgtgccgacgtgtccaacttttatacctaccgccccttccgccggacacttcttctcataggcacccggctgtgtcgttctgctttatatctctcgtgccccgatattgcccacaccggcttatttctccgcgtgagtgcgctggatctccggccgtcgcccctgcaccccttctgtttgatatccgtaagtactcagccggccaactaagcgttaacctcacaatagacccncaccacccccaggtcttgatgattatttatctccccaaccgtgttcgccacccatctcgcatattattctatccctccttctaacgtgtgtgtcaccggacctgtttgtcagtggcgccgcattccgccc

SEQ ID NO: 164163 - DNA, 867 bp, Homo Sapiens
  misc_feature (508)..(527): n is a, c, g, or t
  misc_feature (707)..(713): n is a, c, g, or t
  misc_feature (715)..(716): n is a, c, g, or t
  misc_feature (718)..(718): n is a, c, g, or t
gggagctcgggctgagcgggtgctagagcttgtacccatcactgccaacaagaacacctgtcctggagaccgaagtgccatcacaccgggcggcctgcggcttggggccccagccttaacttctcgacagttccgtgaggatgacttccggagagttgtggactttatagatgaaggggtcaacattggcttagaggtgaagagcaagactgccaagctccaggatttcaaatccttcctgcttaaggactcagaaacaagtcagcgtctggccaacctcaggcaacgggtggagcagtttgccagggccttccccatgcctggttttgatgagcattgaaggcacctgggaaatgaggcccacagactcaaagttactctccttccccctacctgggccagtgaaatagaaagcctttctattttttggtgcgggagggaagacctctcacttagggcaagagccaggtatagtctcccttcccagaatttgtaactgagaagatcnnnnnnnnnnnnnnnnnnnnggtacaagacttagaaggagggcccaggcacttttctgtttgaacccctgtcatgatcacagtgtcagagacgcgtcctccttcttggggaagttgaggagtgcccttcagaaccagtagcaggcaggggggggtaagccccctccctcctggttttatccattaaatgctaacctgccnnnnnnngnnanaccaaaccaagccacctctagcctccggggtaaaaccccccccaatcataaatctataaacccccaatccttcgcgccattgtagacccccacaaactgtctaataagtgcggccgccctcggcccctcaaaaatttttgaacacatcc

SEQ ID NO: 164164 - DNA, 959 bp, Homo Sapiens
caaattccagtttaaatccagcaatttatgatgcttggctatggaagccctaggcaaatgaattcaaaggcattctaagtaaaagaagggaaaagaaaggaagagatggtctcagtagagatgaactcaggtgcagaatctgagtctcagcacaagggctactatgcagaagtgggtaaaggaatgagaacactcaggagctcggtgggcacacagtcatggggactaggcagttccaaggattgaaatacggataagcaggtcgagaaaagcgacatccagagaacttgtagatgagtgctccgtggtttgtgacattgaaaaatgagacaatgcctgcctcatagtctaggaaaaccccaatacgacagggaggcacagccataaagagagtcaaaaccttgggatcagaagaggaggagtcctcaaaagcattatattcacatgtattctgtaatcctataacccagtagccatattgaggtctatatctggagtaaacttttgaataatttacacttggatcaaaagcaaacccagagctcttccttttattcagactacttattttactgtgtacgcccaggatccaggcaatctttccagacacatctacttcccagtaatatttccccgaagagaaatattggcagccgaagacaccaaaagcagaaaaatcacatggatttgaattcttaaatgtgcaggtgcgtacagttttcacttgtctctgatccacagaaatagcaacattcgaagtggcactgcctggattcagcatcacgtccacccagtagtactggacatctgtcagctctttaagaacttgcagcatcccactcagatctggtactcggaatacactctttagtttcttggaaacagattttggcttcttcaatgtccagctttcactccttttcatgacgtcaatcacatcctgcagcatctctactgcc

SEQ ID NO: 164165 - DNA, 595 bp, Homo Sapiens
  misc_feature (581)..(581): n is a, c, g, or t
atggggtcgttgattaggaggcgatataagcggaggagtaggcagactgaggaagtgatagtaatagggaataataagccaagggacgatcgaagaatccaggcgtaaaaattaaccaacgagaaatgaaactagaacaggatatgactacagtagatgaaggtgatgaagggagtatgccagcagatatagccacattactaaaaacatcaatgggcctgtgaaataagaactgtgaactctcaatggatgaggaaatatcaacttggtggcactcaaggacatttacattatgatgaccatggggtttatgaacatgtataacgttttataatttccatattacatttctcatagtatggacaacttttcgccactaactgaattctccaaatactcacacgtgaaatttcaaaaaagaagccacaaatatgtagttctgaagatgttgaataatcattttacaaagcagttttctgaatggggattagttggtgatcgtttgtaaccaatatgctaatgctttagaaatgtcagtatttctctaattatttctacctcccaatatatatatacttgtntttcactggattat

SEQ ID NO: 164166 - DNA, 1774 bp, Homo Sapiens
  misc_feature (158)..(206): n is a, c, g, or t
ccatatactaatgtctatgatttatggaaaacttcaaattatccaaatgtcaggcttcgctgtacaattgtcagttttagtctgactttttataaaagggacaactgcagtatttagtacaagttcggatgcacttttttgaacatctgatgtcttannnnnnnnnnnnnnnnnnnnnnnnnnnnnnnnnnnnnnnnnnnnnnnnnctgaagaagcaaggctgctttttcagccacagatacgacaaaagcaaggcctgttatgatggtcatgaggaagtcttacaagcctctgaaactaaaggcaactaagaatgttacatttggtatattaaaatcttaccctcatatcatatttaacaagccttgcttttatctacaaagattttctatgtacagtacagacagggtatagttcaatcctctgctactgaggtagttaaccaacccttttaaaaaggttctgaaaagaaccactatctggaatgcctgactaaccagctctgatgattacacctgaaactgcatatctgaacacaattcaaaagtgatcactataaaaaagatatagacaatcatgattaaccttggtgagcagaaataaaatttaaggataccatcagtggcattcatctataccactgcaataaaatttaaatgcacaaattcaagagaatatttcaaaataccactgttgggatccttaatttaaaaaaggggaaaaatctacttagagcagatttttaaaagaactttattctttattaagataccatgctaggagttatgaaggatttctgttggaacacattttgaaaatagagtagctttagtttaataacttgcactgcagagaaaattgttaaagaaattcatatcaaagtccaagtattagttcaatgtcccgtatttgattccatgatcttcataggaaggtcttctgcaatagaatatgctcctatacagccgacatatttaaggttgcttgatttccttaccattactccactgcaagcttctggtgtaatcccacatagcaagtcagtcttcattgtaacaggtcaggaccggcctcgaccccttttccctgcccgcggcctctttgttgttgggcacctcctctcgcacctcgaacgcctcttgctgatccaggacctcctctctgtgaataaccggctctaccgcggggaggagcagccccacgacctctggacggagcagcaccccttgctcctctaccacaccttcctctagctccaacttgaaaatcttcataaccatagtatggatcttcatatccaccacgatagttatggtaatcataaccataataatcataataatcttcatatccataataatctggaggatatccataaccacctctacctccacgccctcgacctcttgttggagggggcatatgaggtggaccataatagtagtaatcgtcatacatttgattttttgctgcttgcctctgagcttttctttctttccttttctgatctggtggcttggcaaaaacaatttcaatattttctccctccaagtctttgccattcatttcttccatagccttgacagcaccatctcgctcatcaaaatgaatgaacgcataatcttttaacttcttcactcgttccagtttcccaaactgactaaatgccttttctaaaatctcttctgttacagtattggcaaggttgcgtacaaacagcacttttacctttgccataacctcaggatcaggatcttctataggatcagccccc

SEQ ID NO: 164167 - DNA, 839 bp, Homo Sapiens
  misc_feature (753)..(753): n is a, c, g, or t
aacgagtgaagaagttaaaagattatgcgttcattcatttgatgagcgagatggtgctgtcaaggctatggaagaaatgaatggcaaagacttggagggagaaaatattgaaattgtttttgccaagccaccagatcagaaaaggaaagaaagaaaagctcagaggcaagcagcaaaaaatcaaatgtatgacgattactactattatggtccacctcatatgccccctccaacaagaggtcgagggcgtggaggtagaggtggttatggatatcctccagattattatggatatgaagattattatgattattatggttatgattaccataactatcgtggtggatatgaagatccatactatggttatgaagattttcaagttggagctagaggaaggggtggtagaggagcaaggggtgctgctccatccagaggtcgtggggctgctcctccccgcggtagagccggttattcacagagaggaggtcctggatcagcaagaggcgttcgaggtgcgagaggaggtgcccaacaacaaagaggccgcggggtacgtggtgcgaggggtggccgcggtggaaatgtaggaggaaagcgcaaagctgatgggtacaaccagccagattccaagcggcgccagaccaataatcagaactggggctcccaacccattgctcagcaaccgctcccaaggtggtgatcattctggtatactatggttacaaatctgaaaaccaggagttttatcanggatacttttggccaacaagtggaagtagaaacagtagggctctgtaccattgggggcttgattggttgatccaaactccccctaa

SEQ ID NO: 164168 - DNA, 1366 bp, Homo Sapiens
  misc_feature (876)..(1000): n is a, c, g, or t
  misc_feature (1012)..(1022): n is a, c, g, or t
  misc_feature (1094)..(1225): n is a, c, g, or t
  misc_feature (1242)..(1257): n is a, c, g, or t
  misc_feature (1305)..(1313): n is a, c, g, or t
cagcgtctggggttccggtgcagtcctcggacccagacacttcgcgtgcctagcgagttatggcgacgaaggccgtgtgcttgctgaagtgcgacggccccagtgcagggcatcatcaatttcgagcagaaggaaagtaatggaccagtgaaggtgtggggaagcattaaaggactgactgaaggcctgcatggattccatgttcatgagtttggagataatacagcaggctgtaccagtgcaggtcctcactttaatcctctatccagaaaacacggtgggccaaaggatgaagagaggcatgttggagacttgggcaatgtgactgctgacaaagatggtgtggccgatgtgtctattgaagattctgtgatctcactctcaggagaccattgcatcattggccgcacactggtggtccatgaaaaagcagatgacttgggcaaaggtggaaatgaagaaagtacaaagacaggaaacgctggaagtcgtttggcttgtggtgtaattgggatcgcccaataaacattcccttggatgtagtctgaggccccttaactcatctgttatcctgctagctgtagaaatgtatcctgataaacattaaacactgtaatcttaaaagtgtaattgtgtgactttttcagagttgctttaaagtacctgtagtgagaaactgatttatgatcacttggaagatttgtatagttttataaaactcagttaaaatgtctgtttcaatgacctgtattttgccagacttaaatcacagatgggtattaaacttgtcagaatttctttgtcattcaagcctgtgaataaaaaccctgtatggcacttattatgaggctattaaaagaatccaaattcaaactnnnnnnnnnnnnnnnnnnnnnnnnnnnnnnnnnnnnnnnnnnnnnnnnnnnnnnnnnnnnnnnnnnnnnnnnnnnnnnnnnnnnnnnnnnnnnnnnnnnnnnnnnnnnnnnnnnnnnnnnnnnnncttggggccccnnnnnnnnnnnaaaaaatttttaaaacctttttttgggggcggggcccccaagggaaaagaaaaagggccaaacttgttcccnnnnnnnnnnnnnnnnnnnnnnnnnnnnnnnnnnnnnnnnnnnnnnnnnnnnnnnnnnnnnnnnnnnnnnnnnnnnnnnnnnnnnnnnnnnnnnnnnnnnnnnnnnnnnnnnnnnnnnnnnnnnnnnnnnnntccccaattaaatttannnnnnnnnnnnnnnntctttggaaaatgggggaaatttataaactcttccgcccaaggggaannnnnnnnnaagggggttaaaaacttaaatcccccgggggaaaaaacaccttgcccccttgg

SEQ ID NO: 164169 - DNA, 871 bp, Homo Sapiens
  misc_feature (18)..(18): n is a, c, g, or t
  misc_feature (37)..(37): n is a, c, g, or t
gtctaagagcgaggctgngtggcgaattctccacgangctgcagcgtctggggtttccgttgcagtcctcggaaccaggacctcggcgtggcctagcgagttatggcgacgaaggccgtgtgcgtgctgaagggcgacggcccagtgcagggcatcatcaatttcgagcagaaggaaagtaatggaccagtgaaggtgtggggaagcattaaaggactgactgaaggcctgcatggattccatgttcatgagtttggagataatacagcaggctgtaccagtgcaggtcctcactttaatcctctatccagaaaacacggtgggccaaaggatgaagagaggcatgttggagacttgggcaatgtgactgctgacaaagatggtgtggccgatgtgtctattgaagattctgtgatctcactctcaggagaccattgcatcattggccgcacactggtggtccatgaaaaagcagatgacttgggcaaaggtggaaatgaagaaagtacaaagacaggaaacgctggaagtcgtttggcttgtggtgtaattgggatcgcccaataaacattcccttggatgtagtctgaggccccttaactcatctgttatcctgctagctgtagaaatgtatcctgataaacattaaacactgtaatcttaaaagtgtaattgtgtgactttttcagagttgctttaaagtacctgtagtgagaaactgatttatgatcacttggaagatttgtatagttttataaaactcagttaaaatgtctgtttccaatgaacctgtattttgcccagacttaaatcccagaaggggttattaaaacttggtcagaattttcctttggccattccaggccctttg

SEQ ID NO: 164170 - DNA, 833 bp, Homo Sapiens
ggggaggcgcggaggtctggcctgtaaagtagtcgcggagacggggtgctggtttgcgtcgtagtctcctgcagcgtctggggtttccgttgcagtcctcggaaccaggacctcggcgtggcctagcgagttatggcgacgaaggccgtgtgcgtgctgaagggcgacggcccagtgcagggcatcatcaatttcgagcagaaggaaagtaatggaccagtgaaggtgtggggaagcattaaaggactgactgaaggcctgcatggattccatgttcatgagtttggagataatacagcaggctgtaccagtgcaggtcctcactttaatcctctatccagaaaacacggtgggccaaaggatgaagagaggcatgttggagacttgggcaatgtgactgctgacaaagatggtgtggccgatgtgtctattgaagattctgtgatctcactctcaggagaccattgcatcattggccgcacactggtggtccatgaaaaagcagatgacttgggcaaaggtggaaatgaagaaagtacaaagacaggaaacgctggaagtcgtttggcttgtggtgtaattgggatcgcccaataaacattcccttggatgtagtctgaggccccttaactcatctgttatcctgctagctgtagaaatgtatcctgataaacattaaacactgtaatcttaaaagtgtaattggtgtgacttttttcagagttgcttttaaagtaccctggtagtgagaaaactgattttatggatccacctgggaagaattttgcaataggttttatattaaaactccagtttaaaaaatggtcctggta

SEQ ID NO: 164171 - DNA, 789 bp, Homo Sapiens
ggaggatgaggaggatgtgggccacgcaggggctggcggtggcgctggctctgagcgtgctgccgggcagccgggcgctgcggccgggcgactgcgaagtttgtatttcttatctgggaagattttaccaggacctcaaagacagagatgtcacattctcaccagccactattgaaaacgaacttataaagttctgccgggaagcaagaggcaaagagaatcggttgtgctactatatcggggccacagatgatgcagccaccaaaatcatcaatgaggtatcaaagcctctggcccaccacatccctgtggagaagatctgtgagaagcttaagaagaaggacagccagatatgtgagcttaagtatgacaagcagatcgacctgagcacagtggacctgaagaagctccgagttaaagagctgaagaagattctggatgactggggggagacatgcaaaggctgtgcagaaaagtctgactacatccggaagataaatgaactgatgcctaaatatgcccccaaggcagccagtgcacggaccgatttgtagtctgctcaatctctgttgcacctgagggggaaaaaacagttcaactgcttactcccaaaacagcctttttgtaatttattttttaagtgggctcctgacaatactgtatcagatgtgaagcctggagctttcctgatgatgctggccctacagtacccccatgaggggattcccttccttctgttgctggtgtactctaggacttcaaagtgtgtctgggatttttttattaaag

SEQ ID NO: 164172 - DNA, 743 bp, Homo Sapiens
gcataccgtcagcctgcggaattgatgggtttctctgtaggccatgcaggactttgtcgcagcaaaccttcccagcagcccttgagccaatgtaaaaccagcacaaccagccaccagtggttggtgaggcagtgcccacaaggcttatgttgtatgcctttgataaggccatcattggctttgagtagcaggtgttcctcgtcacccatttccccctcaggattacaacacctgctatcaaatcatctaagctgaaaacatgagatgcgcttggaaaggcctagtcagaagccatttcctcttatcatttccctctcctatgcaccagtaaggcccgtccagagccccagcagggagtgggccctgagtccacactgtccctgagtgatccaggaggctgccacatccccacatgtgcactgtggttccagtgtagctgctgtgagcccactgccactgcctcagaagggagccactgtgaacctctcgagtggctccaaagagcagtggctttttgagaatggcccatacttctgggccggctggatgaagggaatgccgaccctttggcctctccccctccttccatctcttctctctcttgcccctatctctcatattctacttcagaacagaacaacacaaaaaataacgcctgaaaatacaacttaaacacacgtatatacccaaaataagacccctgtgtacacataaaacatgaagaaccacattaaattgcagaa

SEQ ID NO: 164173 - DNA, 858 bp, Homo Sapiens
agtcatcgaggacatcaaacataatggggagatctttgaggaaggtttcgtcggatgaatttcgatcgttcttctggaacatagtcacaaacacaggaatctgatctgttaccacgtacacatctttcacttgtgcgatgggaacatatgcccgtccatgtcttctgtagacagtcacttccatgagttgaggcccaagtgtcacattggctgtgttcacagaaactctcactgaacatcgtcccaatttctggaaatactgaccaagtgtgtggaagacgtagatgaaattccatcttctccatccggggtggtgaggaaaaggtttcccatcagggaagacgttatgatggctttggccggtgccattttccccgtcactgtcctctgaccatgctgtccagttgtaaacatacggatcagcagataaaccagcctcatttctgcagttcttctcatagactatgttgccattggcatcttccttttggcatctagggaatatcaggttcaccgcaaatgttatatttgagcccacgagggctggtgagtcactggtcaggaccgcctgcacacggcctcccttccaggagtttttccacctcatgtctccccgcttccacactgggtagagtttttcattccagtcattttcatcagaagaccagccatttaattgattgtgctccctcatgtaagcagaaggtctttcattgcccagcacatcatgaaatcgtttggcggcatcaagtggcaatcttgcagccaggagcagaaatcccaggaaatagtagagacattccatgctgaattctcacggacgcaggcactcaaggtttaactctgaattcctctccc

SEQ ID NO: 164174 - DNA, 594 bp, Homo Sapiens
gggaaactcagaggatttcctcatcacaacagcacccacatttacgtaaagtttcagtgtctgaatcaaatgttctcttggatgaagaagtacttactgatccgaagatccaggcgctgcttcttactgttctagctacactggtaaaatataccacagatgagtttgatcaacgaattctttatgaatacttagcagaggccagtgttgtgtttccccaagtctttcctgttgtgcataatttgttggactctaagatcaacaccctgttatcattgtgccaagatccaaatttgttaaatcctatccatggaattgtgcagagtgtggtgtaccatgaagaatccccaccacaataccaaacatcttacctgcaaagttttggttttaatggcttgtggcggtttgcaggaccgttttcaaagcaaacacaaattccagactatgctgagcttattgttaagtttcttgatgccttgattgacacgtacctgcctggaattgatgaagaaaccagtgaagaatccctcctgactcccacatctccttaccctcctgcactgcagagccagcttagtatcactgtaccctaac

SEQ ID NO: 164175 - DNA, 568 bp, Homo Sapiens
caaggccccacgggtttgaaagaagactccaaattcttggcatatgaatcagctgttcggtagctccaacttatccctgcagcgaagcagcagaaccgccaatggcggcacctcaggattcacactgtgggtggtgaggccttccgctgaaggaggtactggtggatgctctcagcatctcgctttagccaggcagcattcagcagaatattttcacaacactgctggatggtacgctcagctgaaggagctgggtgactctcgaagaaagccttaacctctccagccattttatcaactgcaaatccctcaactgatagctttattagtctggatattaagaatcctccatggtatcggttataaagttcttcccagttgtcctttatgaatttccaagcagctttcctaccatgcttgctgcctccagctactccaccaattaccgatacagtgtcctgtggacgtacctcttctgaaagtgcaaacgtgaggactttttgaatcaggtcaggcaaaagagtagcgccaaggactctttcgattcggtttttctcttcttgcatat

SEQ ID NO: 164176 - DNA, 892 bp, Homo Sapiens
ggacgcgtgggtcgacccacgcgtcgctcgagctggaatcattagcactgtagaggttctaaaagtcatggaggcttttgtgaatgagcccaattatactgtatggagcgacctgagctgtaacctggggattctctcaactctcttgtcccacacagacttctatgaggatatccaggagtttgtgaaagatgtcttttcacctataggggagagactgggctgggaccccaaacctggagaaggtcatctagacgcactcctgaggggcttggtgctgggaaaactaggaaaagcaggacataaggcaacgttagaagaagcccgtcgtcggtttaaggaccacgtggaaggaaaacagattctctccgctgacctaaggagtcctgtctatctcactgtttgaaagcatggggatggcactaccttagatatcatgctaaaacttcacaaacaagcagatatgcaagaagagaaaaacagaatcgaaagagttcctggcgctactctttcacctgaactgattcaaaaagtcctcacgttggcactttcagaagaggtacgtccacaggaccactgtatcggtaattggtggagtagctggaggcagcaagcatgggaggaaagcttgcttggaaattcataaaggacaacgtgggaagaacttcacaaccgataccaggggaggagttcttaatatccagactaataaagctattcaggttgagggatttgcaggtggataaaatggctgggagaaggttaaggcgttcttcgaggaggtaacccaaggtccttcaagcttagcgtaccatccaagcaggtgttgtgaaaaatattcttggtggaatgctgccttgggtaaagcggagatgctggagaagcatccaca

SEQ ID NO: 164177 - DNA, 466 bp, Homo Sapiens
  misc_feature (157)..(157): n is a, c, g, or t
tcctttttcaatagaatttaattctggagtgtgagcaggaaccagttaactacattcattgtccaacccccactggtttgaaagaagactccaaattcttggcatatgaatcagctgttcggtagctccaccttatccctgcagcgaagcagcaganaccgccaatggccgaacctcaggattcacactgtgggtgggtgaggccttccgctgaaggaggtactggtggatgctctcagcatctcgctttagccagggcaggcattcagcagaatattttcacaacactgctgggatgggtacggctcagctgaagggagctggggtgactcttcgaaggaaagccttaacctcttccagccttttatcaactggcaaatccctcaactgataggctggcaaaacatggggtttaaacagtaaggggaaacccaggagggctgagggacaactttcccttttaccc

SEQ ID NO: 164178 - DNA, 1342 bp, Homo Sapiens
ggggcctaccagccggcagctccggagctgcccgcgccatgtccgcgcacaatcggggcaccgagctcgaccttagctggatctccaaaatacaagtgaatcacccggcagttctgaggcgtgcggaacaaatccaggctcgcagaaccgtgaaaaaggagtggcaggctgcttggctcctgaaagctgttacctttatagatcttactacactttcaggtgatgatacatcttccaacattcaaaggctctgttataaagccaaatacccaatccgggaagatctcttaaaagctttaaatatgcatgataaaggcattactacagccgccgtttgtgtttatcccgcccgggtgtgtgatgctgtaaaagcactcaaggctgcaggctgtaatatccctgtggcatcagtggccgctggatttccagctggacagactcatttgaagacacgattagaagagatcagattggctgtggaagatggagctacagaaatcgacgtggtaattaacagaagcttggtgctgacaggccagtgggaagccctgtatgatgagattcgtcagtttcgcaaggcctgtggggaggctcatcttaaaactatattagcgacaggagaacttggaactcttactaatgtctataaagccagtatgatagcaatgatggcaggatcagattttattaagacctctactggaaaagaaacagtaaatgccaccttcccggtagctatagtaatgctgcgggccattagagatttcttctggaaaactggaaacaagatagggtttaaaccagcaggaggcatccgcagtgcaaaggattcccttgcttggctctctcttgtaaaggaggagcttggagatgagtggctgaagccagaactctttcgaataggtgccagtactctgctctcggacattgagaggcagatttaccatcatgtgactggaagatatgcagcttatcatgatcttccaatgtcttaaatcagtcaccagttccagaaaagttctttacgacaatgtttaaaaattatttttctacgtaattgctaaaattatttaattaaaaaattgggcagtaggtaactggcattcctctctttaaaatttctaccgaacttaatggaatggaaaaagcaaactcatccaccatgtggtactcattttcaggcacatctgaaaatgatcttaatttactagaagatctgcactattaactttgtgaagagtttctcctaaaaactttaagtaaaatgttaatggtagctttgataacatcaaattctaagggagaaaaaaaccaatattaaaccgcccaagcagtgtgccct

SEQ ID NO: 164179 - DNA, 892 bp, Homo Sapiens
  misc_feature (56)..(70): n is a, c, g, or t
aaagcaggctggtaccggtccgggaatgcccgggatatcgtcgacccacgcgtcgnnnnnnnnnnnnnnnattttaaaaattttaatgatattcatcgttgtatatgacaatgtcagaaatttcattaggacaacaattaataaaagcgcctatccacggcaaaaatgaaagatgagttttcacagcaggaaattagtgctgaatcagtgactcctgaagtcgttacagcagcgcttgcgagatgttgcattttcctctgctagggcacactgcttgggcggtttaatattgtttttttctcccttagaatttgatgttatcaaagctaccattaacattttacttaaagtttttaggagaaactcttcacaaagttaatagtgcagatcttctagtaattaagatcatttcagatgtgcctgaaatgagtaccacatgtggatgagtttgctttttccattccattaagttcggtagaaattttaaagagaggaatgccagttacctactgcccaattttttaacttaaataattttagcaattacgtagaaaaataatttttaaacattgtcgtaaagaacttttctggaactggtgactgatttaagacattggaagatcatgataagctgcatatcttccagtcaacatgatggtaaatctgcctctcaatgtccgagagcagagtactggccctagtcaaaagagttcttggttcaagcactcatctccagctcctccctttacaaagagagaagccagcaaggaatccctttgactgggaagccctgtgggttaaacccctatctgttcccgttttccccaaaaaatctctaatgggcccggtttatataataccggaaaggggtacaacggggatatcacaaaaa

SEQ ID NO: 164180 - DNA, 1873 bp, Homo Sapiens
  misc_feature (1381)..(1423): n is a, c, g, or t
  misc_feature (1493)..(1513): n is a, c, g, or t
  misc_feature (1576)..(1588): n is a, c, g, or t
  misc_feature (1679)..(1679): n is a, c, g, or t
  misc_feature (1761)..(1771): n is a, c, g, or t
ccagtactccaagttgctgctggcctctaaggagcaggtgctgcaccgggtagttctggaggagaaagtagcactagagcagcagctggcagaggagaagcacactcccgagtcctgctttattgaggcagctatccaggagctcaagactcgggaagaggctctgtcgggattggccggaagcagaagggaggtcactggtgttgtggctgctctggaacaactggtgctgatggctcccttggcgaaggagtctgtttttcaacccaggaagggtgtgctggagtatctgtctgccttcgatgaagaaaccacggaagtttgttctctggacactccttctagacctcttgctctccctctggtagaagaggaggaagcagtgtctgaaccagagcctgaggggttgccagaggcctgtgatgacttggagttagcagatgacaatcttaaagaggggaccatttgcactgagtccagccagcagggaacccatcaccaagtcaggcttcacacgccctcagcagcctctccttgttactacttttaccaagcggaagatggacagcatatgttcctgcaccctgtgaatgtgcgctgcctcgtgcgggagtacggcagcctggagaggagccccgagaagatctcagcaactgtggtggagattgctggctactccatgtctgaggatgttcgacagcgtcacagatatctctctcacttgccactcacctgtgagttcagcatctgtgaactggctttgcaacctcctgtggtctctaaggaaaccctagagatgttctcagatgacattgagaagaggaaacgtcagcgccaaaagaaggctcgggaggaacgccgccgagagcgcaggattgagatagaggagaacaagaaacagggcaagtacccagaagtccacattcccctcgagaatctacagcagtttcctgccttcaattcttatacctgctcctctgattctgctttgggtcccaccagcaccgagggccatggggccctctccatttctcctctcagcagaagtccaggttcccatgcagactttctgctgacccctctgtcacccactgccagtcagggcagtccctcattctgcgttgggagtctggaagaagactctcccttcccttcctttgcccagatgctgagggttggaaaagcaaaagcagatgtgtggcccaaaactgctccaaagaaagatgagaacagcttagttcctcctgcccctgtggacagcgacggggagagtgataattcagaccgtgttcctgtgcccagttttcaaaattccttcagccaagctattgaagcagccttcatgaaactggacacaccagctacttcagatcccctctcnnnnnnnnnnnnnnnnnnnnnnnnnnnnnnnnnnnnnnnnnnnctcctgttcagcacctcagtcgtccacaccaagtgacagctagtggcccaggctaccttctccatctggnnnnnnnnnnnnnnnnnnnnncccccaggcttttgtttggctggtgtaatttttaagtatttgagtttgaacagattagctctnnnnnnnnnnnnnttccacaatgtgagggggaaccaagaaaattttaaatacagtgtattttccagcttcctgtctttgcaccaaaataatgtattgacccccnaaaaaggggcgcttactacaaaccaaccctgttgggccgccctcggcccctgcgaaaagctttctaccacctttcccttttnnnnnnnnnnnccccagaaggttaggggaacaaggtccatagcttggttcccatagagaaacccctgggccatgaacttggggcctggaattcctcccccaatggaaaagcgc

SEQ ID NO: 164181 - DNA, 570 bp, Homo Sapiens
  misc_feature (129)..(169): n is a, c, g, or t
  misc_feature (239)..(259): n is a, c, g, or t
ctcctgcacacgccgagagtccaaactcagaccgtgttcctgtgcccagttttcaaaattccttcagccaagctattgaagcagccttcatgaaactggtcacaccagctacttcagatcccctctctnnnnnnnnnnnnnnnnnnnnnnnnnnnnnnnnnnnnnnnnncctcctgttcagcacctcagtcgtccacaccaagtgacactactggcccaggctaccttctccatctggnnnnnnnnnnnnnnnnnnnnncccccatgcttttgtttggctgctgtaatttttaagtatttgagtttgaacagattagctctggggggagggggtttccacaatgtgagggggaaccaagaaaattttaaatacagtgtattttccagcttcctgtctttacaccaaaataaagtattgacacaagagatctcttcctgccaaggtttttagttcattgccagtttagtctttttgacccatgtgtaattaatttttctcaacccaaagtaagattgagtcccctttgagatgcattagagcagtccaacccagaatggcacacactgctc

SEQ ID NO: 164182 - DNA, 1126 bp, Homo Sapiens
gggagaccaggtttttaaagtgtgtgcaaaccacgttattactaaaacaatggaattaaagcccgtaaatgtttcaaataatgctttagtttggactgcctcagattatgctgatggagaagcaaaagtagaacagcttgcagtgagatttaaaactaaagaagtagctgattgtttcaagaaaacatttgaagaatgtcagcagaatttaatgaaactccagaaaggacatgtatcactggcagcagaactatcaaaggagaccaatcctgtggtgttttttgatgtttgtgcggacggtgaacctctagggcggataactatggaattattttcaaacattgttcctcggactgctgagaacttcagagcactatgcactggagagaaaggctttggtttcaagaattccatttttcacagagtaattccagattttgtttgccaaggaggagatatcaccaaacatgatggaacaggcggacagtccatttatggagacaaatttgaagatgaaaattttgatgtgaaacatactggtcctggtttactatccatggccaatcaaggccagaataccaataattctcaatttgttataacactgaagaaagcagaacatttggactttaagcatgtagtatttgggtttgttaaggatggcatggatactgtgaaaaagattgaatcatttggttctcccaaagggtctgtttgtcgaagaataactatcacagaatgtggacagatataaaatcattgttgttcatagaaaatttcatctgtataagcagttggattgaagcttagctattacaatttgatagttatgttcagcttttgaaaatggacgtttccgatttacaaatgtaaaattgcagcttatagctgttgtcactttttaatgtgttataattgaccttgcatggtgtgaaataaaagtttaaacactggtgtatttcaggtgtacttgtgtttatgtactcctgacgtattaaaatggaataatactaatcttgttaaaagcaatagacctcaaactattgaaggaatatgatatatgcaatttaattttaattccttttaagatatttgacttcctgctatctcctgggatcctctgact

SEQ ID NO: 164183 - DNA, 598 bp, Homo Sapiens
ccggcctatccaatggactggggatatttcaatcagagcttcaaaaagttcaggaagctcaaaaatctcagacagaagaaataactagcacaactgacagtgtatatacaggtgggactgaagtgatggtaccttctttctgtaaatctgaagaacctgattctattaccaaatccattagttcaccatctgtttcctctgaaactatggacaaacctgtagatttgtcaactagaaaggaaattgatacagaatttaatgaaactccagaaaggacatgtatcactggcagcagaattatcaaaggagaccaatcctgtggtgtattttgatgtgtgtgcggacggtgaacctctagggcggataactatggaattattttcaaacattgttcctcggactgctgagaactttagagcactatgcactggagagaaaggcttgggtttcaagaattccatttttcacagagtaattccagatttcgtatgccaaggaggagatatcaccaaacatgatggaacaggcggacagtccatgtatggagacaaatttgaagatgaaaactttgatgtgaaacatactggtcctggtttat

SEQ ID NO: 164184 - DNA, 1000 bp, Homo Sapiens
  misc_feature (31)..(31): n is a, c, g, or t
  misc_feature (113)..(113): n is a, c, g, or t
  misc_feature (118)..(119): n is a, c, g, or t
  misc_feature (158)..(295): n is a, c, g, or t
tttcgttttgaggtccccgggagtgctcgtntttgggtagatgaccatttgatgggaaaacaacacatgggctatgccaaaattaaagctactgtagaagaattaaaagaaanagttnngggaaaagaaccgaagaacctgatcgtgatgagtgtctnnnnnnnnnnnnnnnnnnnnnnnnnnnnnnnnnnnnnnnnnnnnnnnnnnnnnnnnnnnnnnnnnnnnnnnnnnnnnnnnnnnnnnnnnnnnnnnnnnnnnnnnnnnnnnnnnnnnnnnnnnnnnnnnnnnnnnnnnntcgttcacgaagtagacactcaagccgaacatcagacagaagatgcagcaggtctcgggaccacaaaaggtcacgaagtagagaaagaaggcggagcagaagtagagatcgacgaagaagcagaagccatgatcgatcagaaagaaaacacagatctcgaagtcgggatcgaagaagatcaaaaagccgggatcgaaagtcatataagcacaggagcaaaagtcgggacagagaacaagatagaaaatccaaggagaaagaaaagaggggatctgatgataaaaaaagtagtgtgaagtccggtagtcgagaaaagcagagtgaagacacaaacactgaatcgaaggaaagtgacactaagaatgaggtcaatgggaccagtgaagacattaaatactgaaggtgacactcagtccaattaaaactgatctgataagacatcagatcagacagaggaatacatgattcgaagatttatggaagaatactgagaacggcataaagtgaagatcgacatttaaaataatgaggtgaaagaaagctatagtggcatagaaaaagtataaagctcagttagtttttttattattattattattaaaagttcaattcagcgactgatgtgacctaccagatttcagcacatgtgttaatagctatatatgccactgtgaacttaggtcctgctatctcctgggtcctctg

SEQ ID NO: 164185 - DNA, 990 bp, Homo Sapiens
cgacccacgcgtccggtgtgtaggagggatttcggcctgagagcgggccgaggagattggcgacggtgtcgcccgtgttttcgttggcgggtgcctgggctggtgggaacagccgcccgaaggaagcaccatgatttcggccgcgcagttgttggatgagttaatgggccgggaccgaaacctagccccggacgagaagcgcagcaacgtgcggtgggaccacgagagcgttgtaaatattatctctgtggtttttgtcctgcggaattgttcacaaatacacgttctgatcttggtccgtgtgaaaaaattcatgatgaaaatctacgaaaacagtatgagaagagctctcgtttcatgaaagttggctatgagagagattttttgcgatacttacagagcttacttgcagaagtagaacgtaggatcagacgaggccatgctcgtttggcattatctcaaaaccagcagtcttctggggccgctggcccaacaggcaaaaatgaagaaaaaattcaggttctaacagacaaaattgatgtacttctgcaacagattgaagaattagggtctgaaggaaaagtagaagaagcccaggggatgatgaaattagttgagcaattaaaagaagagagagaactgctaaggtccacaacgtcgacaattgaaagctttgctgcacaagaaaaacaaatggaagtttgtgaagtatgtggagcctttttaatagtaggagatgcccagtcccgggtagatgaccatttgatgggaaaacaacacatgggctatgccaaaattaaagctactgtagaagaattaaaagaaaagttaaggaaaagaaccgaagaacctgatcgtgatgagcgtctaaaaaaaggagaagcaagaaagagacgcaaagagaaccacgaccgggaccagagaaggggacgaccgcagaacggaaaagaccgaagggcaagaggcagcaaagagaaacaagacaagggc

SEQ ID NO: 164186 - DNA, 893 bp, Homo Sapiens
gattatacctgcaggagttattactattacccagaaggctttgcagtctcagtcctggaaaatgaaagcccaggtgcaattgccatggcatcaattgcaaaacagactagctctctagtacctccatatctcggaatgatactgaccgcattgctgcaaggcctggctggaagaacgtgggcaggaaaggaggagctattgaaagccattgcctgtgtggtgacagcttgcagtgcagagctggaaaagtctgtgcccaatcaacccagcacaaatgaaattcttcaagctgttctgaaggaatgtagcaaagagaatgtcaaatacaagattgtagcaatcagctgtgcagctgatatcttgaaggccaccaaagaggacagattccaggagttctctaacattgtcatacctctcatcaagaagaactcacttgaaagcagtggggtccggacaaccaaaaatgaagaggagaatgaaaaggaaaaggagctccagctggaatatctgctgggtgcctttgaaagcctgggcaaagcctggccgcgaaacgcggagacccaacgttgttatcgtcaggagctgtgcaaactgatgtgtgaacggctaaaactcagcacgtggaaagtgcagctaggagtcctgcaatcaatgaatgcctttttttcaggggttaatgcttttggaagaagaacatgccgatcctgaggctttggctgaaattctgcttgaaacttgtaaatcaatcacatattctttaggtgagtgtagtaaactaaaactgatgagggagtcctaattttaaagctaaggagctgagcttcagatatttcctactttgtcttaggaactaaattctgaaataggtatggactctggtattattatactcc

SEQ ID NO: 164187 - DNA, 520 bp, Homo Sapiens
aagaaatagcaggatttaatgctgcatctctagtattcttgaggtccagacaaatttccttaaaggtgaattcagtgtgaaatggagcaatttgttcacgaagtatcaaaaggtgcttaattaagaaaagttgtccatcaatctgagtcttgtttttgctgatagactctgacgctccaagtaaggactgaatgcaggcagacaatgcttcctgtgataatccttggaacactgccctatctatgcatctgtataatttggagagacagacaagagttcttcgaaccgtaggataccacattccatgaagatctgctggagaaattgtggtctgtggtctaggattgagggattctgttgaaccagattttgtcagactgttagactctccttcttctaagtgaacatctgaaaatgaagcttctgaaggtaccttcttctgttcatctttcaaactctgtgcaatttgctccatcatgactaacttatcgggatatgccagatctccaggagctggggg

SEQ ID NO: 164188 - DNA, 328 bp, Homo Sapiens
ggctcggtaccagataagcaggatctggacagctccaagggagctcaaaagcctatgtgtgagcaccatggctggggacggctcaagggtaaaggccacttcggggcacaatccaatggacaccaaaaggataggtaaggaacacgagcttgcttccttcatagattagcctgggcccaagcccagcctactttgacagtcttttattctattcataaaggaggtcttatgcaggaaaactaagactctcatctagcagctttcttttcttaagctaagaaaaaggaatgtcataaaaaggtgaacatcactttggtgagctctgcta

SEQ ID NO: 164189 - DNA, 440 bp, Homo Sapiens
tagcagagctcaccaaagtgatgtacacctttttatgacattccttttacttagcttaagaaaagaaagctgctagatgagagtcttagttttcctgcataagacctcctttatgaatagaataaaagactgtcaaagtaggctgagcttgggcccaggctaatctatgaaggaagcaagctcgtgtaccttacctatccttttggtgtccattggattgtgccccgaagtggcctttacccttgagccgtccccagccatggtgctcacacattggcttttatcactcattggaaacaaaggaaatttatgcccactgacaaaattaagcattggcttatcccatttgctgcgtcaggtttgactttacttttttcccatctgtctccttctgtatgtagacgatatctctaactctagacttttttttctacccttcc

SEQ ID NO: 164190 - DNA, 923 bp, Homo Sapiens
  misc_feature (786)..(786): n is a, c, g, or t
  misc_feature (836)..(865): n is a, c, g, or t
tgacgcatgtgccctctggcagtctgctgctgtgtccagagtccgactccagctgggctgtaactgggcttggcccccgccttaggccccgccagcaggcgaagcagggagatgtcagactgctacacggagctggagaaggcagtcattgtcctggtggaaaacttctacaaatatgtgtctaagtacagcctggtcaagaacaagatcagcaagagcagcttccgcgagatgctccagaaagagctgaaccacatgctgtcggacacagggaaccggaaggctgcggataagctcatccagaacctggatgccaatcatgatgggcgcatcagcttcgatgagtactggaccttgataggcggcatcaccggccccatcgccaaactcatccatgagcaggagcagcagagcagcagctagagacccctttggccacaccttccaggcactggcctgatgccccgccctggtgctctccccaggctccctcctcagcctcctgcccacccagggccctttactctcttctccctccagaccttcctctgacccttgctgaactggggtccctttgtgagtgtctcagtctagaggtacctccctccctggggggtctcagctcctggagtcgcaggcccttggggcccctctgtgagatctcaatgctgtctggggaccctaagagttttctcacctgttcagtctcatctaaccttccaatgtctgatgttcctgccaaattcctgcctgaattctgggtccgtcctgacctccaaaggtcancttgggtgcttgaggtctccctgcttcttggtggcagtggtaacaacaannnnnnnnnnnnnnnnnnnnnnnnnnnnnnagacctctccacttttcccttagccccttctgctggggtaaagaaggcactttccagg

SEQ ID NO: 164191 - DNA, 921 bp, Homo Sapiens
cgggcagggctgggagggagtgggacagattctgggagtgcagcggggaggagtcccggctgggctgagcgcagggagctgccttggcagtgccagagcccaggccccagagccctgctggagaggaggcagactgaggcagcaggcccccccagcaggcgaagcagggagatgtcagactgctacacggagctggagaaggcagtcattgtcctggtggaaaacttctacaaatatgtgtctaagtacagcctggtcaagaacaagatcagcaagagcagcttccgcgagatgctccagaaagagctgaaccacatgctgtcggacacagggaaccggaaggctgcggataagctcatccagaacctggatgccaatcatgatgggcgcatcagcttcgatgagtactggaccttgataggcggcatcaccggccccatcgccaaactcatccatgagcaggagcagcagagcagcagctagagacccctttggccacaccttccaggcactggcctgatgccccgccctggtgctctccccaggctccctcctcagcctcctgcccacccagggccctttactctcttctccctccagaccttcctctgacccttgctgaactggggtccctttgtgagtgtctcagtctagaggtacctccctccctggggggtctcagctcctggagtcgcaggcccttggggcccctctgtgagatctcaatgctgtctggggaccctaagagttttctcacctgttcagtctcatctaaccttccaatgtctgatgttcctgccaaattcctgcctgaatctgggtccgtcctgacctccaaaggtcagcttgggtgcttgaggtctccctgctcttggggggcagtggtaccaagcaaccgcaagcagcagcaaccagcaacct

SEQ ID NO: 164192 - DNA, 310 bp, Homo Sapiens
  misc_feature (65)..(102): n is a, c, g, or t
cccgtccctgacctccaaaggtcagcttggtgcttgaggtctccctgctcttggtggcagtggtnnnnnnnnnnnnnnnnnnnnnnnnnnnnnnnnnnnnnnagacctctccactttcccttagcccctctgctgggtagagaggcactttcagggacttccctccagctgcctcttcatctgggaatgagctaagcaaggctgagcctcctcctgttgcttgaaataatgatgatataaaggctggatttggagtttgtatcccctggtccctctgggatgctaattaaaaccttcccactccttggat

SEQ ID NO: 164193 - DNA, 440 bp, Homo Sapiens
agggctgtgtccagagtccgactccagctgggctgtaactgggcttggcccgccttaggccccgccagcaggcaaagaggcgagatgtcagactgctacacggagctggagaaggcagtcattgtcctggtggaaaacttctacaaatatgtgtctaagtacagcctggtcaagaacaagatcagcaagagcagcttccgcgagatgctccagaaagagctgaaccacatgctgtcggacacagggaaccggaaggctgcggataagctcatccagaacctgggatgccaatcatgatgggcgcatcagcttcgatgagtactggaccttgatagggcggcatcaccggccccattcgccaaattcatccatgaggcagggagcaggcaggagcaggcagttaggaggacccttttggccacacctttccaggcattggc

SEQ ID NO: 164194 - DNA, 580 bp, Homo Sapiens
  misc_feature (366)..(443): n is a, c, g, or t
  misc_feature (488)..(488): n is a, c, g, or t
ccgagccctcaaatacctggatcttgacctactaggccattatgctgtgatgaacaaccccaccagacagcctttgccctaaacgttgcatacaggcgctgcttgaagaattctgggctgcaggactgttcctgccaggttcagtgggtatcactgacccctgtgagagtggcaactttagagtacacacagtcatgaccctagaacagcaggacatggtctgctatacagctcagactctcgtccgaatcctctcacatggtggctttaggaagatccttggccaggagggtgatgccagctatcttgcttctgaaatatctacctgggatggagtgatagtaacaccttcagaaaaggcttatnnnnnnnnnnnnnnnnnnnnnnnnnnnnnnnnnnnnnnnnnnnnnnnnnnnnnnnnnnnnnnnnnnnnnnnnnnnnnnagcatggaaactcaggagtgacattcccttcactccttttcctanccaagggggaagactggagcctaagctggctgctactgggctttacatggtgacagacatttccgtgggatagggaagatagcaggaagaaa

SEQ ID NO: 164195 - DNA, 923 bp, Homo Sapiens
  misc_feature (491)..(491): n is a, c, g, or t
  misc_feature (545)..(607): n is a, c, g, or t
atcttcgaaaactggatccagaactccatttggatatcaaagtattgcagagtgccttagcagccatccgacatgcccgctggttcgaggaaaatgcttctcagtccacagttaaagttctcatcagactactgaaggacttgaggattcgttttcctggctttgagcccctcacaccctggatccttgacctactaggccattatgctgtgatgaacaaccccaccagacagcctttggccctaaacgttgcatacaggcgctgcttgcagattctggctgcaggactgttcctgccaggttcagtgggtatcactgacccctgtgagagtggcaactttagagtacacacagtcatgaccctagaacagcaggacatggtctgctatacagctcagactctcgtccgaatcctctcacatggtggctttaggaagatccttggccaggagggtgatgccagctatcttgcttctgaaatatctacctgngatggagtgatagtaacaccttcagaaaaggcttatgagaagccaccagagaannnnnnnnnnnnnnnnnnnnnnnnnnnnnnnnnnnnnnnnnnnnnnnnnnnnnnnnnnnnnnncatggaaactcaggagtgacattcccttcactcctttttctacccaaggggggaagactggagcctaagctgcctgctactgggccttacatggtgacagacattttccgtgggatagggaagatagcaggaaaaaaagtaaacctccataaaaagtgtcattcccctggggtttttgataatgggccttaacctgcccagtcctcccatttggggacctatggccattccatcctataatgggaaggaaacccaaccatttcctttccctaaaaaattcctaataatcttcccaccttccctgaaaaaacccccc

SEQ ID NO: 164196 - DNA, 1826 bp, Homo Sapiens
  misc_feature (1585)..(1593): n is a, c, g, or t
  misc_feature (1626)..(1629): n is a, c, g, or t
  misc_feature (1631)..(1631): n is a, c, g, or t
  misc_feature (1644)..(1678): n is a, c, g, or t
  misc_feature (1772)..(1772): n is a, c, g, or t
gggggacacgccggcaagacgcctcttcagttgtctgctactcagaggaaggggcggttggtgcggcctccattgttcgtgttttaaggcgccatgaggggtgacagaggccgtggtcgtggtgggcgctttggttccagaggaggcccaggaggagggttcaggccctttgtaccacatatcccatttgacttctatttgtgtgaaatggcctttccccgggtcaagccagcacctgatgaaacttccttcagtgaggccttgctgaagaggaatcaggacctggctcccaattctgctgaacaggcatctatcctttctctggtgacaaaaataaacaatgtgattgataatctgattgtggctccagggacatttgaagtgcaaattgaagaagttcgacaggtgggatcctataaaaaggggacaatgactacaggacacaatgtggctgacctggtggtgatactcaagattctgccaacgttggaagctgttgctgccctggggaacaaagtcgtggaaagcctaagagcacaggatccttctgaagttttaaccatgctgaccaacgaaactggctttgaaatcagttcttctgatgctacagtgaagattctcattacaacagtgccacccaatcttcgaaaactggatccagaactccatttggatatcaaagtattgcagagtgccttagcagccatccgacatgcccgctggttcgaggaaaatgcttctcagtccacagttaaagttctcatcagactactgaaggacttgaggattcgttttcctggctttgagcccctcacaccctggatccttgacctactaggccattatgctgtgatgaacaaccccaccagacagcctttggccctaaacgttgcatacaggcgctgcttgcagattctggctgcaggactgttcctgccaggttcagtgggtatcactgacccctgtgagagtggcaactttagagtacacacagtcatgaccctagaacagcaggacatggtctgctatacagctcagactctcgtccgaatcctctcacatggtggctttaggaagatccttggccaggagggtgatgccagctatcttgcttctgaaatatctacctgggatggagtgatagtaacaccttcagaaaaagcttatgagaagccaccagagaagaaggaaggagaggaagaagaggagaatacagaagaaccacctcaaggagaggaagaagaaagcatggaaactcaggagtgacattcccttcactccttttcctacccaagggggaagactggagcctaagctgcctgctactgggctttacatggtgacagacatttccgtgggatagggaagatagcaggaagaaaagtaaactccatagaagtgtcattccactgggttttgatattggcttagctgccagtctcccatttgtgacctatgccatccatctataatggaggataccaacatttcttcctaatattctataatctccaactcctgaaaacccctctctcaactaatactttgctgttgaaatgttgtgaaatgttaagtgtctggaaannnnnnnnnctaagaaaaactattaaagtaccttcctagttnnnntnacccactcaccannnnnnnnnnnnnnnnnnnnnnnnnnnnnnnnnnngtaaccatcgtactttgtacttccccccttcgttcaccgcccattctagtggcccctcgggtttctttttccactgcgtgtttgccacaaattntttttttggcgccccccctctccccctagaaaaatttttttcacaaattttttt

SEQ ID NO: 164197 - DNA, 857 bp, Homo Sapiens
gggagaggaaggggcggttggtgcggcctccattgttcgtgttttaaggcgccatgaggggtgacagaggccgtggtcgtggtgggcgctttggttccagaggaggcccaggaggagggttcaggccctttgtaccacatatcccatttgacttctatttgtgtgaaatggcctttccccgggtcaagccagcacctgatgaaacttccttcagtgaggccttgctgaagaggaatcaggacctggctcccaattctgctgaacaggcatctatcctttctctggtgacaaaaataaacaatgtgattgataatctgattgtggctccagggacatttgaagtgcaaattgaagaagttcgacaggtgggatcctataaaaaggggacaatgactacaggacacaatgtggctgacctggtggtgatactcaagattctgccaacgttggaagctgtttgctgccctggggaaaaaagtcgtggaaaagcctaagagcacaggatccttctgaagttttaaccatgctgaccaacgaaactgggctttgaaaatcagtttctttctgatgcctaccagtgaagattctcatttacaacagtgccaacccaatctttcgaaaactgggatcccaaaactccatttgggatatcaaaagtatttgcagagtgcccttagcagcccatcccgacctgtcccgctgggttccagggaaaatgctttctcaagtccacaggtaaaaggttctcttccacattactggaaggaactggaggattccgttttcccttggcttttgaaccccctcacaccccctggattcccttgaccctacttagggccattatggcttgggat

SEQ ID NO: 164198 - DNA, 1271 bp, Homo Sapiens
  misc_feature (1065)..(1069): n is a, c, g, or t
  misc_feature (1071)..(1073): n is a, c, g, or t
  misc_feature (1082)..(1083): n is a, c, g, or t
aaggtcatgcactccatgttctatgaagtgagcgcacggaccagcagctcctttgcagcagccatggcccggctgggaggtgctgtgctcagcttctcggaagccacatcgtccgtccagaagggcgaattcctggctgactccgtgcagaccatgagctgctatgccgacgtcgtcgtgctccggcacccccagcctggagcagtggagctggccgccaagcactgccggaggccagtgatcaatgctggggatggggtcggagagcaccccacccaggccctgctggacatcttcaccatccgtgaggagctgggaactgtcaatggcatgacgatcacgatggtgggtgacctgaagcacggacgcacagtacattacctggcctgcctgctcacccagtatcgtgtcagcctgcgctacgtggcacctcccagcctgcgcatgccacccactgtgcgggccttcgtggcctcccacggcaccaagcaggaggaattcgagagcattgaggaggcgctgcctgacactgatgtgctctacatgactcgaatccagaaggaacgatttggctctacccaggagtacgaagcttgctttggtcagttcatcctcactccccacatcatgacccgggccaagaagaagatggtggtgatgcacccgatgccccgtgtcaacgagataagcgtggaagtggactcggatccccgcgcagcctacttccgccaggctgagaacggcatgtacatccgcatggctctgttagccaccgtgctgggccgtttctagggcctggcttcctcagcctcttctctttaggcccagctgctgggcaaggaattccagtgcctcctacgggggcagcacacttagatattcctggacatccagatagctcacatgtgctgaccacacttcaggctctggactggagctctctggcatgggggtggggcctcagatgctggggcccagtctgccccatcttcattcctgcaccttaaacctgtacagtcatttttctactgacttaataaacagccgagctgtcccccaaaaaannnnngnnnacaaaaaannaaaacatgtcggccgccctcgggccctcgaggaagcttttctagaaccattttcgttttggcggcgccggggccccagcaagggtaaagcggaaccatgggtccaataggcctggtttcccatagggaagaaacccctgggtccaatggaactaaggtggcttttggagaatctcctccaccccaaat

SEQ ID NO: 164199 - DNA, 821 bp, Homo Sapiens
  misc_feature (698)..(709): n is a, c, g, or t
ggcaggtggtggagggccttggcttctgctaagtgagatgggaaccactggagggtttgaacagaggagtgccttgatagatttatattttgcaagggtcattctagctgccatattgtgaaaaactttagtggacaagggcagaaggaagagggaagacctgttaggaagctacatgcaaggttccaggcttgggcctgggccacagcaacagcagtactcaaatatctagatttattttgaaaagagccaataggatttgctgagagtttgaatgtggagtgtaagagaaggaagagttaatgatgacattaaggttttgggcctgaatagcaggaaagatggagttaccagttactgaaatagggaaggatgggctgggtaagtaaggaatttggtgcaaagcaggctgtctgtggttggaatgggaggttctggctgcaaatcaaggtggagagttctctcaggtcaggtctgcagcagagctcgagacagggatctgaatgcacttggtttattgttgggggtgctctcagaaggaacctgtgaaagcctttatcagtcatttattggctgtgagaagttctctgggaatgggggtacatttgaaaggcaagtgacttcagtttgagggcaagtctctgggaaaaaagggttgtaggcttctggcaacctaccatgcatgggtaccgtggttnnnnnnnnnnnnctccttggccaacggggtggcgtgaaaggcgatctgggccggggcaccacagcatgcccacccaccggccgatgtagccctgtgcggcgacgtattcacggacccatgcgga

SEQ ID NO: 164200 - DNA, 2097 bp, Homo Sapiens
  misc_feature (1456)..(1480): n is a, c, g, or t
  misc_feature (1599)..(1607): n is a, c, g, or t
gaccgaggagatcatctggagcatttgagcaagtttatagaagaaacttgcccccgagtatgagaaggccgccaaggagctcagcaagcgttctcctccaattcccctggcaaaggtcgacgccaccgcagaaacagacctggccaagaggtttgatgtctctggctatcccaccctgaaaattttccgcaaaggaaggccttatgactacaacggcccacgagaaaaatatggaatcgttgattacatgatcgagcagtccgggcctccctccaaggagattctgaccctgaagcaggtccaggagttcctgaaggatggagacgatgtcatcatcatcggggtctttaagggggagagtgacccagcctaccagcaataccaggatgccgctaacaacctgagagaagattacaaatttcaccacactttcagcacagaaatagcaaagttcttgaaagtctcccaggggcagttggttgtaatgcagcctgagaaaatccagtccaagtatgagccccggagccacatgatggacgtccagggctccacccaggactcggccatcaaggacttcgtgctgaagtacgccctgcccctggttggccaccgcaaggtgtcaaacgatgctaagcgctacaccaggcgccccctggtggtcgtctactacagtgtggacttcagctttgattacagagctgcaactcagttttggcggagcaaagtcctagaggtggccaaggacttccctgagtacacctttgccattgcggacgaagaggactatgctggggaggtgaaggacctggggctcagcgagagtggggaggatgtcaatgccgccatcctggacgagagtgggaagaagttcgccatggagccagaggagtttgactctgacaccctccgcgagtttgtcactgctttcaaaaaaggaaaactgaagccagtcatcaaatcccagccagtgcccaagaacaacaagggacccgtcaaggtcgtggtgggaaagacctttgactccattgtgatggaccccaagaaggacgtcctcatcgagttctacgcgccatggtgcgggcactgcaagcagctagagcccgtgtacaacagcctggccaaggagtacaagggccaaaagggcctggtcatcgccaagatggacgccactgccaacgacgtccccagcgaccgctataaggtggagggcttccccaccatctaccccgcccccagtggggacaaaaagaacccagttaaatttgagggtggagacagagatctggagcatttgagcaagtttatagaagaacatgccacaaaactgagcaggaccaaggaagagctttgaaggcctgaggtctgcggaaggtgggaggaggcagacgccctgcgtggcccatggtcggggcgtccacgccgaggccggcaacaaacgacagtatctcggattccnnnnnnnnnnnnnnnnnnnnnnnnnatactttggtgtttcacttcatgctctgaatactgaataaccatgaatgactgaatagtttagtccagatttttacagaggatacatctatttttatcattatttggggtttgaaaaannnnnnnnnacaccttctaatttctttatttctcaaagcagataattcttctgtgtgaaaatgttttctttttttaatttaaggtttaaaattccttttccaaatcatgttgattttgctctttgctttttcgttgtctgagaaattgttggcgtagatttggcttctggtatgtgtttctgattgcttcctgttgagcacaaagtgagagctgccactgagcagccctgccaggggtgctgtttcaggctgggcatcgccaggcggcctccctgcaaaccaagggctgggggcaaaggggcatgatccagggtcccccagggtgggctcagctccagggagaggccacccacgtggcagccccacctcttgagagcccccagtgccggagcagaaaggaccctggacccagaggcagatactgcggggtggtagaaaaggtagagtaggctgtggcaatggaataaaacacgcccccaaacgttaagaactgcgttag

SEQ ID NO: 164201 - DNA, 186 bp, Homo Sapiens
ctcctaccccacgcagacctcaggccttcaaagctcttccttggtcctgctcagttttgtggcatgttcttctataaacttgctcaaatgctccagatctctgtctccaccctcaaatttaactgggtcatttttgctgtcaccagcaaccgtggggtaggagtggggatactctagagtgtgcca

SEQ ID NO: 164202 - DNA, 662 bp, Homo Sapiens
tctcaccttctgtaacccacgttcaagtgcatctgctgctcctccagctcgctccgcttctcgtggaacaggttggcatagtgattgatgaagtccaggtagtggcgaggggtgatggccatcgttctgccgcctcgctttgctagccgagcattcgcctggtgaagagtctgatgaacaaacacacagctgttcacaatggcttcccgatgggatggtggctgcggcagcttatcatacacaactggcatgtaatcaggcacgatgtaatttggcttctccagatccatcttacttgtgaattctttgccaacctgatacagtgcttcggtggaccagtctccaaaccaattcaacacacacctgttgaaaagtgctggtgatgtagctgcccggtccttgagtccctccgaggacgggttcatggtgaacacgacgtggaggttgcggataacctggctagtgaaccacttgtagagctcctcgtgcgagtccagcatcaggccttccttctgtgccccctctttgcactgcgtcatcaaggtggcatactcgtctccttcaaagagaccaggcacctctccattggccagaagggtattcattcgctccaggaatccagaatctaacacattagattcatccaggattagaaggtgaga

SEQ ID NO: 164203 - DNA, 268 bp, Homo Sapiens
gggcgttacaggatgagatatgacagaagttattgttagagtcctagttttgaagttgggtagtaagctcattggtgctcgtgacattattaaaagaaacaaataataggggatgcgtgcatccatgaggagaaacgtggcatgaacaataggtataaattctaactctcacctccgctgtgaatgaggcaaagatctacagcacatttacttgatcacacagtctgtgaaacaaagacacgttagtgccacgatatctggtccggcc

SEQ ID NO: 164204 - DNA, 740 bp, Homo Sapiens
tcagctcggaccggtctctctagaggatcagtggcgaatctcatctttgttaacttcccgtccttgttcagatccgcggaattcgttaaactgctcccgttctgataaaacccagtctggctcagggccattctcctcatgggaaaacatatccgcaatatactcatcctgatccacaaacccatccccgttcttgtcgatgtcctccagggtttccaaaaccacaatttccttcatatgttcaaactcttcaggatgcagaaaggcagtgaactcctcccgagtagctgtcaggtcaccattgaggtctgcagctttgaatcttctctcatcacgtggcagcatctttttaaaggtgtgatgatctgaagaatcatgaaactctgcggggtttcctaggtagtaaccataggtggcttgtttgtattcttcccaggaaattttatcatccttgtccctatcataatccttccagactttggcgacattatcaaagatgtatcttttctgcacccgtttgatccaggttttcagctcctcagtagtgacaaagccatccccatcattgtcgattcgatcaacaatcttccctagcctctccttgctctcgtccggggtgagctggtcgaaggtcttggagtcctccttgcccaggaaggcctcgtggtcgtactggaagctctggttgtcctcagggggccgctcgcccagctccgagtcgggccgcaccacgcgctctt

SEQ ID NO: 164205 - DNA, 167 bp, Homo Sapiens
gagacaaccagctcttacgcgacagcacttccagcagcgatcactgattagaatgagttggtgggatctcttgggaagccaaacggagcggagttctggatcatgtcccatccagtccagtgaatccacgacccgcagacctgtcccccctcatccgttatccaatg

SEQ ID NO: 164206 - DNA, 1632 bp, Homo Sapiens
  misc_feature (626)..(635): n is a, c, g, or t
  misc_feature (1427)..(1431): n is a, c, g, or t
  misc_feature (1435)..(1436): n is a, c, g, or t
gggacatcgacaagaacggggatgggtttgtggatcaggatgagtatattgcggatatgttttcccatgaggagaatggccctgagccagactgggttttatcagaacgggagcagtttaacgaattccgggatctgaacaaggacgggaagttagacaaagatgagattcgccactggatcctccctcaagattatgatcacgcacaggctgaggccaggcatctggtatatgaatcagacaaaaacaaggatgagaagctaactaaagaggaaatattggagaactggaacatgtttgttggaagccaagctaccaattacggggaagatctcacaaaaaatcatgatgagctttgatagacactcaccagaatatggcagactgtcataggcattctgttattgtcttggattgttgctacaattgtctaatttacagcagttgtgatcccacaaaaagcaagtttatacctcagattggggtataaaaattgtttttcgctcagtatttactggaaaatggacatcactagtctttcagtaagatttctctcaaaacacgtgaaaaccttggtaaattgcaattctttctggggatatattggtacaacatgacttaaaacnnnnnnnnnnctattaaaacttaaaggggaacaaaacttgaaaaagccctgttcttcagaaggtgagtgggttgagggaggcagtaatatgaagtgactgctgtgtattttaactaccagattttttatatttgccactgttaaatagttggaaaggggaaattctgattaagcgaaagtggtatcatcctaggtaagcttatttcagaacaagtctaatatttcagattctttcttttcgactttatactctgagttattacttactgtaagtggtgtatatgaaacctccatgcattttccagtatggatctgctaatatgcacagtaaatccatgtctttgtttgtttttctattaaaaagcaatcaagaaagataatgtgaaaaagaaaggaatttagaggtagggaaaagatgaatgtcagacatttgaagaactatagtaaaatgataaacactaaatatacttgagaaaactttcttaatatgccaatgaggtaggcctgatctttgaaatagtgaataggaatacaatgcatttcctcagtgatcactgattagaatgagttggtgggatccttgggaagccaaacggagcggagttctggatcatgtcccatccagtccagtgaatccacgacccgcagacctgcccccccgcaacagcttataccatggaatgaggacaaggtggatactctgagctgtggactgaactggcagacacaacctgtacagattgaaatttcaccttggtaaggaggaaagtgaatggaaataaaaggatcccccctaacggannnnnaacnnacaaaaacacaccaaaccccctccttggtcgggccgccctcgggcccctccaagaaagcttttcctaagaaccaattccgttttggggcgccggccggggccccccaataagggtaaagggggaaacattggggcctcaataagcctggggtgtttccccccagggggaagaaatccgcggggggacccctaggga

SEQ ID NO: 164207 - DNA, 1089 bp, Homo Sapiens
  misc_feature (994)..(1049): n is a, c, g, or t
ggcctgggtggcaattcggacgaggcggagatactctgagttactcggagcccgacgcctgagggtgagatgaacgcgctggcctccctaaccgtccggacctgtgatcgcttctggcagaccgaaccggcgctcctgcccccggggtgacgcgcagctcccagccgcccagacacatggccccaggccaagcaccccatcaggctaccccgtggagggatgcccaccctttcttcctcctgtccccagtgatgggcctcctcagccgcgcctggagccgcctgaggggcctgggacctctagagccctggctggtggaagcagtaaaaggagcagctctggtagaagctggcctggagggagaagctaggactcctctggcaatcccccataccccttggggcagacgccctgaagaggaggctgaagacagtggaggccctggagaggacagagaaacactggggctgaaaaccagcagttcccttcctgaagcctggggacttttggatgatgatgatggcatgtatggtgagcgagaggcaaccagtgtccctagagggcagggaagtcaatttgcagatggccagcgtgctcccctgtctcccagccttctgataaggacactgcaaggttctgataagaacccaggggaggagaaagccgaggaagagggagttgctgaagaggagggagttaacaagttctcttatccaccatcacaccgggaagtgttgtccaaccgtggaggaggaggaccatgaagaaactgtaaagaaagaagctcacagaacctctacttctgccttgtctccaggatccaagcccagcactgggggtgtcttgcccagggggagggaagagaatcaagccacgggaggataaaggacccgaaaagaagtaaaggaacccggaaagaccttccgggtcccccccaatctttcggcctccgaaccccagggcctggggagtatccctttcaggaagaggcgcnnnnnnnnnnnnnnnnnnnnnnnnnnnnnnnnnnnnnnnnnnnnnnnnnnnnnnnnctggccccaaggggccgaaaatcctaaggccctaagcccg

SEQ ID NO: 164208 - DNA, 1758 bp, Homo Sapiens
  misc_feature (874)..(888): n is a, c, g, or t
  misc_feature (980)..(1030): n is a, c, g, or t
  misc_feature (1061)..(1118): n is a, c, g, or t
  misc_feature (1239)..(1248): n is a, c, g, or t
  misc_feature (1274)..(1282): n is a, c, g, or t
ctctgtggcttttcccaacacaatcagtgctagtgctggggaggaacagtcaagagcagtcagttgcttgcttattttttctggatgagtctgggacacactgtaactttaacacatttaagaagtaggtgtgtggccttttcagaaggtggcatggtcctcaagtgagttcttagtattttatatcagcaaaataattcaattttgcaggttgcaaacaaatataaaacctgtttctgtttatgaatattattcttttagaatagaataagtacatgctgctgtaataaaattgcctttaatcacttaacaagcctaaccttgactcaaacagtgaatgcctatagaaataataaatgaaaaaaactagtatttttatatcataaaacaatgtcatttatagcttatcattcatgtattgtccagcagacattaaaagccctgtggataattaagttatcttcatacctgcaaaatggtggaggctattttcattaaaactgtcagaatttgcttactataattatgatacagtccaaagaatgcagtcactttttatcatgttaactaattgttctcttttgaagatctatggttgactaattaaacaataattcaagtagagtgtcccagaaaaaaaccacttgggctccctgtttggagtctggctggctctgagcattgccaatggcccctactcacctgactttgtatcctctccttttagaggctttgcattctgcacccagcttcactaacagtgggctgaaaacatccttgggttgagtgtttcatttgggagttatttggccagggccttttgaacagtagtgtccccatgaagtgctagataatatatgtgtaagagtcagcnnnnnnnnnnnnnnnaactctaacacccttcagaaatttctaactactttgtaactgcatggcttaacctggtgataaaagcagtgattaaaagtctacgttttccnnnnnnnnnnnnnnnnnnnnnnnnnnnnnnnnnnnnnnnnnnnnnnnnnnnccaaggtccaaaacaaagctaaacacactcnnnnnnnnnnnnnnnnnnnnnnnnnnnnnnnnnnnnnnnnnnnnnnnnnnnnnnnnnntttcttgttgggcccggggcggcccccataaggggaaagaggacacactggggcaataacccgggtttcccctaaggaaaaacccctggggctacagaacataaggcggcttggggaactnnnnnnnnnnaaataaaaaaacaaaccgccccgccnnnnnnnnnaaaacccgaaagactgtgttcccttcaaaaacaaaattctccccgagtagggaggaattctttccgggaggagggccccctttatcgtggggggacttctttattctccaacaccggggggtgtctccacaaaggggcggacgcccctcaaatattctccaaaaattttcaccgcgcccccgcggcccgccgtgggacaactttaatattggagaagatacttgggccgggacaattatcatttctatataccccctttttccggcccgacaacacggtgagaaacgcccccctccctacaaccgccgccctgtgttatagacaccccgtgaactctccgcccaagcgggggacatccgcaacccccctgttgtcaccacccttgggccttaatataatattttcgcccccctgggggcaaaaaaacggccgggcgctccacaacaaattgtccgccattttttggccccccctcc

SEQ ID NO: 164209 - DNA, 895 bp, Homo Sapiens
ggcatgcaagcttcttggtgtcggctggtcagatgacgaagagcacagatggcaggctcagtgatgtcttccctgtcaccagcccgaaggacagtacgcacaagagcctctataccacccacttggcagaccatcatcttggttcttataattattgcaagtgaggttagaaagaattccaactggcacaggtgaccacatttatatcatctgaacccagaagctgaacaagagtcccaaggagaccttccatcccttcctgtttagttgcagcatctgaaagattcctgagagtccaaagacagttctgaacaagacgttgacttggatctgtcaggtgaagtcctaaagcttgcattccaccagcttctacaatagccggcttattactagagcagacagatagcaccttcagcactctgcttgtggtccacagtagtttttcgtaagtataggtcctcattatatttactaaagcttggggtccaccactagccagtatgatgagcttgctttcttggttgccataagctaaaatttgaaggcagtctgtcgtaatagccaagaatttaacatttgttttgttgagcaaggcaaccattttctgcagcccaccagctaaacgcactgccattttagctccttcttgatgtaataaaaggttgtggagagttgtaatggcataaaacaacacagaatccactggtgaaccaagctattttcatccagggcacggaatgcctcctagacttaaagatggccagtaagccctcacgatgatgggaaaggttatgcaaggtcccagcggtacaacgagctgtttctacatcatttgtattctgcatggtacgtacaatagcagacaccatctgaggagaacgcatgatagcgtgtc

SEQ ID NO: 164210 - DNA, 391 bp, Homo Sapiens
ggtcgactactactactaaattcgcggccgcgtcgacgtgcagatgactcaggatgtgcagaaggcgatggacgagaggagatttcaagatgcagttcgactccgagggaggagctttgcgggcaacctgaacacctacaagcgacttgccatcaagctgccggatgatcagatcccaaagaccaattgcaacgtagctgtcatcaacgtgggggcacccgcggctgggatgaacgcagccgtacgctcagctgtgcgcgtgggcattgccgacggccacaggatgctcgccatctatgatggctttgacggctttgccaagggccagatcaaagaaatcggctggacagatgtcgggggcagggactgcttcagtttgtcgacgcggccg

SEQ ID NO: 164211 - DNA, 921 bp, Homo Sapiens
  misc_feature (801)..(801): n is a, c, g, or t
  misc_feature (854)..(854): n is a, c, g, or t
gatcttggccagccgcatgggagtggaggcagtcatcgccttgctagaggccaccccggacaccccagcttgcgtcgtgtcactgaacgggaaccacgccgtgcgcctgccgctgatggagtgcgtgcagatgactcaggatgtgcagaaggcgatggacgagaggagatttcaagatgcggttcgactccgagggaggagctttgcgggcaacctgaacacctacaagcgacttgccatcaagctgccggatgatcagatcccaaagaccaattgcaacgatagctgtcatcaacgtgggggcacccgcggctgggatgaacgcagccgtacgctcagctgtgcgcgtgggcattgccgacggccacaggatgctcgccatctatgatggctttgacggcttcgccaagggccagatcaaagaaatcggctggacagatgtcgggggctggaccggccaaggaggctccattcttgggacaaaacgcgttctcccgggggaagtacttggaagagatcgccacacagatgcgcacgcacagcatcaacgcgctgctgatcatcggtggattcgaggcctacctgggactcctggagctgtcagccgcccgggagaagcacgaggagttctgtgtccccatggtcatggttcccgctactgtgtccaacaatgtgccgggttccgatttcagcatcggggcagacaccgccctgaacactatcaccgacacctgcgaccgcatcaagcagtcccgcagcgggaccaagcggcgcgtgttcatcatcgagaacatggggggnctactgtgggctacctgggccacatggggggggctccgcggccggagctgatngccgcatacattttttcgaaggagccccttcccacatcacgggattcttgcaagtccaaccggtgga

SEQ ID NO: 164212 - DNA, 872 bp, Homo Sapiens
tgagaaaatcaaagagcttgtcgtcacgcagctgggctatgacacacgtgtgaccatcctcgggcacgtgcagagaggagggaccccttcggcattcgacaggatcttggccagccgcatgggagtggaggcagtcatcgccttgctagaggccaccccggacaccccagcttgcgtcgtgtcactgaacgggaaccacgccgtgcgcctgccgctgatggagtgcgtgcagatgactcaggatgtgcagaaggcgatggacgagaggagatttcaagatgcggttcgactccgagggaggagctttgcgggcaacctgaacacctacaagcgacttgccatcaagctgccggatgatcagatcccaaagaccaattgcaacgtagctgtcatcaacgtgggggcacccgcggctgggatgaacgcagccgtacgctcagctgtgcgcgtgggcattgccgacggccacaggatgctcgccatctatgatggctttgacggcttcgccaagggccagatcaaagaaatcggctggacagatgtcgggggctgggaccggccaaggaggctccattctttgggacaaaacgcgttctcccggggaagtactttgggaagagatcgccacacagatgcgcacgcacagcattcaacgcgctgctgatcatcggtggatttcgaggcctacctgggactcctggagctgtcagccgcccgggagaagcacgaggagttctgtgtccccatggtcatgggttcccgctactgtgtccaaccatgggcccggggttcccgatttcagccatcgggggcaggaacaccgcccctgaaacacctaatcacccggacaccctggcggaccggccatcaag

SEQ ID NO: 164213 - DNA, 979 bp, Homo Sapiens
gcaggctggtaccgggcgggaattcccgggatatcgtcgagcccacgcgtgcgcttgggacaaaacgcgttctcccggggaagtacttggaagagatcgccacacagatgcgcacgcacagcatcaacgcgctgctgatcatcggtggattcgaggcctacctgggactcctggagctgtcagccgcccgggagaagcacgaggagttctgcgtccccatggtcatggttcccgctactgtgtccaacaactgtgcctgggttccagatttcatgcatcaggggcagacaccgccctgaacactatcaccgacacctgcgaccgcatcaagcagtccgccagcggaaccaagcggcgcgtgttcatcatcgagaccatgggcggctactgtggctacctggccaacatgggggggctcgcggccggagctgatgccgcatacattttcgaagagcccttcgacatcagggatctgcagtccaacgtggagcacctgacggagaaaatgaagaccaccatccagagaggccttgtgctcagaaatgagagctgcagtgaaaactacaccaccgacttcatttaccagctgtattcagaagagggcaaaggcgtgtttgactgcaggaagaacgtgctgggtcacatgcagcaggggggggacacctctccatttgatagaaactttggaaccaaaatctctgcagagctatggagttggatcactgcaaaactcagaagccggggcagaggaaaaaattaccaccgatgattcctttgtgtgctgggaataggccaagaaacgtttttttcacctggggcgagctgaaggaacaacggtttgggccccggtcccccgacacgggggtcagtaggccccttaaatctgggacaaaaggcgcttaaggtgaccagccgggaatttagccgggttgccacccccttggtgccccgcggcttggcaaattttccgactgaaacc

SEQ ID NO: 164214 - DNA, 575 bp, Homo Sapiens
  misc_feature (482)..(482): n is a, c, g, or t
  misc_feature (506)..(506): n is a, c, g, or t
  misc_feature (551)..(551): n is a, c, g, or t
gcggcatgaggcaacatggggggggctcgcggccggagctgatgccgcatacattttcgaagagcccttcgacatcagggatctgcagtccaacgtggagcacctgacggagaaaatgaagaccaccatccagagaggccttgtgctcagaaatgagagctgcagtgaaaactacaccaccgacttcatttaccagctgtattcagaagagggcaaaggcgtgtttgactgcaggaagaacgtgctgggtcacatgcagcagggtggggcaccctctccatttgatagaaactttggaaccaaaatctctgccagagcttatgggagtggatcactgcaaaacttcaagggaggcccggggcaggagggaaaaaattttaccaccgattgatttcccttttgttgttgttgggggattaaggcaaaagaaacgttattttttcaacctgtgggcagagttgaaggaggcaaacgggtttttnaggcacaggtttcccaaaggaccnttggtggttcaagttacgggcccttcttgaaatttcgggccagtnccagggccgttttgactttcggtt

SEQ ID NO: 164215 - DNA, 626 bp, Homo Sapiens
agtcggtaccgaaagatctcgtggatttgtcaaataggctttttaagggtgattaatattccattatatgtatatgccacgtttggtttatctagtcttccatccatggccatttggtttgcatccaccttttggctattgtgggtaatgctgctatgaacatgggcatgcatgtgtatctttgagactctgctttcagttctttagggtaaataccgacaagtaaaattgccagggtcatggtctgaaagtatttctgtatatatgtttgttgacacttcagctgggtttttaccatttcttgactttggaaaggtctgaaaccccagagcaaatggcaattctaattgattagaaaactggatttttccttaatagattttggaagatttaggagggtagcacataaagttcatcctcccttttctcaccacatttgatgtgaatttgctacctctcagaaaacaaatttggtctctgaaataaagcagatgttttgaattctcttatataaggaaactgattttcctacatgtaaatttttatcttttaaccatttttatttaaaacttgtgacctacatttttctgtttcctccctgaagtctttgttagtggtcattttgg

SEQ ID NO: 164216 - DNA, 284 bp, Homo Sapiens
ggcttatgaataaaattataacacatattatccatattagcgtgcctaacatactaccctgccttctatgagtctatctatctaatactacacctctggccttattttagttcagggtatcactaagtaacccctacattaataaatagagtatggataatgctaatatttgagcaatacagaggattaagagatcaagatacttcactgcctattagcctaatagggatacctactttctttcaaatgccaaaaattcacattagaaacataatccagatgat

SEQ ID NO: 164217 - DNA, 710 bp, Homo Sapiens
  misc_feature (591)..(612): n is a, c, g, or t
ccagatcatcgtgggaagaaaaaagatatatttagcatccacaaaggggaataaatggttaaaacagtgtttttgagtgtctaaagattaaagggtgaaaaagaacaatgttaatagagctaggaagacaaggctgcaggaggtttacactgcatgcagggctttttcagcagtgagccaccactttgtcctctagattgtttggagatcaaactgtaaaaaagctaaaaatatttggagaacactaggtttaaattaaaaggaggggagatcaaactggagaaatgcccattatggagaccaaagtagaagtatctgcatcagagaccttttacatatacccatgtatcccaaatagtagtgaagtatttgcatagctatatgcatatatagctatacttcaaggaaaatcaaggcataggttacatggagagcaggtaaattcccaagctaaaggggtgcgtcagggaattatacagtattttctttccattccagagaaaagagtaggattgaactagcaagagagggtaaagatcctctggctttgagaatattataagagccaaaaacaagaacaaatccatgccnnnnnnnnnnnnnnnnnnnnnngacttctagctttagggttcatggcaagtttgctctctagataaattacatgttggcggtgagttgatcgaggcaagatgatctcctcgggatcctcc

SEQ ID NO: 164218 - DNA, 633 bp, Homo Sapiens
cttatcatggagtaaagagcaacctgggtgcaggtggcagctggactaggcatttctttaagaggaatgactcaatggaatctgtcccagccagcagggatggagaggtcagcccaggggactctgttagactagaattctaagaaatgctcttctctgcacctgtgggatacagagtcgacaaagaaccagtgaacagtcatcaggagagcccatgaacttggctttctgatgttataataactgataaatgtttctgtggcacaccaagaattccacagtgataattagaagcttgctgggtaatgtgaatcacgcatgactggctattacgaacttggtgtgggtgctaagaggcaagagaagggttgcagaagccacttggatccagctccgagatacatactgtgagtgcctttccacccagggctttggtgtgattgtgaaacttctgtgaggttgttgcaattgtctttctccccacttcctcctaggccagctattttcatagaggactgttactgcactccccatgagaggagatggtaaatatagaattttagcaacacaatttcagggggtgcacgatgaacactccacgcctgcaaatcttccttgaagagactcaaaaat

SEQ ID NO: 164219 - DNA, 961 bp, Homo Sapiens
  misc_feature (842)..(842): n is a, c, g, or t
  misc_feature (848)..(848): n is a, c, g, or t
  misc_feature (892)..(892): n is a, c, g, or t
aagggtagtccaggcccgttctgcaggctgttgtgtagacggcagacatccatacctcaccacagaccaaagatagacctcgtgtcagactgtgggctgatgagaggtagagcagcatgcatcgaggcctgagggtgcagggcgccctctcttggcctggaggaattgctcctaactagagtaagtttccacgagggtcccaggcagagctgcagagctggaaccggaggctccacagtccttgcctgctcatggacctccttcagagcacctttctacagactggactgcccagctccgtggggtggcatctggtttctggtgctattctgccaagttatcgagctcctcctcatgtttcaacattccatcttcccgtttctatcctcgactccaaagtaagccttcttagctccaatcagggatgaggggctcaacctcttctgtcctcaaagaggccaaacgcagtgccacagtcggtagccttcacttttagatgtcctattcatgtaaaaaagaaggtgcccccaccaggcttacatcagcaataagcaattctaatgcaacgatggtgtccacattttaccccagtgtgtgcccatgtatgcctttgtgcccgtgtaattattgttagcgcccctttcacttagaggggtgatgataaactgtggccaccttgattacaacccacatttcctgctttggggagcttccaagtaacaggccatttcttacctccctccaggaacagtgggcactgcccaccacctcgtgtctgctcataggatgacgctggagatccccacacttactctaccctcttggcaaattggcattccggnggtggnttttgtttcctttaacacattaaataaatgagtatataggatgngaggggaggggtgagaacaactagctgtagcatgtgtaggctatatactttaccattcgacttctttcc

SEQ ID NO: 164220 - DNA, 788 bp, Homo Sapiens
ggaaggcagtttgaaaatgatacaagggtcagactcagtgatgcagcagtgaccatgagaacagagcagctgcaggtagaagatggagacagaactggggagatctggtggaggtaagccgggtggaaagatgatgtcaggtttatacctagagacacatgatccattcacaaagccaggaaaactaaagagaaaacacttagaatttgaggagaagaggctagggctgggcctgagacatgggctggcctccaggtggaggggtccagcaggcaggtacaagccggatgagagttcagggcagagggcagagccggaaacagaccaaaagctgccatggagtggcgagggtggaagcagcggcacaggccgagggccatctcgccggggaagggtgggtacagcacaaccctgtggccacgtattcctcacacaggaaattcccacagaacacccaggagggtgacgatgcctcccatgaacaatgccgtgtgtctctgtttgtcctttgtccccgatttcacacctaagaaacaatgtcttcaactgtgtgatgacaagtaggaacgctgcctccattgtggaggatcatcttgaaaagacttactccaatgagagtttttaaaagttttcactactatttattgcgaagagttcgctgtaatggaactatttcttctgaagatcacagaaaagcttgtgatgtctgttacctcaccatgtctaagaggtggaaggaactgagagtcatctacccgctcattcacaagtagcccgatgggatctct

SEQ ID NO: 164221 - DNA, 413 bp, Homo Sapiens
aaaacagaccaaaagctgcccatggaaatggcgaagggtggaaaacaagcggcaaccagccgaagggcctctcgccggggaagggtgggtacaagcacaaccctgtggccacgttttcctcacacaggaaattcccacagaaacacccaggagggtgacgatgcctcccatgaacaatgccgtgtgtctctgtttgtcctttgtccccgatttcacacctaagaaacaatgtcttcagctgtgtgatgacaagtaggaacgctgcctccattgtggaggatcatcttgaaaagacttactccaatgagagtttttaaaagttttcactactatttattttgaagagttttctgtaatggaactatttcttctgaagatttcagaaaagcttttgatgtctgttacctcaccat

SEQ ID NO: 164222 - DNA, 705 bp, Homo Sapiens
tggactcgaatgatgtagagaaactgtatggatatacacccatattatcctggaatgattccatcctaaaccatataatagagaagagaacagtatggaagggtcaccgaacagttctagagtcatttagagcatatagctcgatctgcaagagatcacgcaatttccctttctgagcctcgataatgctgtgggggtcagatccctatcctcatgctgagcctcaacaagcaactactcccaaagcaacagaagagcctgaggatgtaaggtctgaagctgcgttggaccaggaacagattactgatgcttattctgtagaacataatcaattagaggctcacccaaaggcagactttatcagagaatcaagtgaggcacaagtacaaaagtttttaaacagatctgtggaagatgtaagacctcaccatactgatgcaaataatcagtctgcttgtatcgaagcacctgatcaaaagaccttatccactcctcaagaggagcggattacagctgtagaaagtcagccttcccggaaaagaagtgtacccatggatctaaccatacgcaaaaaccagacgagcagagaagtgaaccatcttgcaggcattcctaaagtaaccagcagatgcattgatccaacagaaccaatagacagggcagaggagaaaccacaaaggaggcttatacgatctctgaaggaca

SEQ ID NO: 164223 - DNA, 653 bp, Homo Sapiens
atcgtggcagttgttgaagagatattcatatgtggagttcaaacaggccgtcacacaatccttatccacctggctggctcttggagggctttgcagttcttgtaccttcattctgaagaaagtaatgctggtcagcaaatccactgtggattttaagtcctgaagccgttcaggactcccagcagggaaattattcctgtatgtagagaggtcgatcctcagtgagttgtgtagctggtccagcagttttacaaatctctctttcccaaagttggaggctgcaaagcgatcagatgcagagacattggtagaggcagttgtgtgggcgtagtaggcgttgatgttggccagtaaggtgctcatcactgctggcacaccaggacacatgtacttggatgataaacatgcaaagtgcgtcatggcctgatatatggactcaatgccataacgcatggcaaattcatccacaatttcttgggctgtctcatcaaagtacaccttccaggcatcgtctcctcgagcttcagggatgcggactcctccactgtcctgaatgtctgtgtaggtaatggaaagagattctcatggagacatgtataccacggaggtggagtaacgggacagtaaacactccacattcctcacacaacgtg

SEQ ID NO: 164224 - DNA, 1181 bp, Homo Sapiens
  misc_feature (1015)..(1015): n is a, c, g, or t
ggagaagacaccgtgacagacgaagagggcaagttcagattacgtggattgctgccgggatgtgtgtaccacgttcagctcaaggcagaaggcaacgaccacattgagcgggcgctcccccaccatagggtgattgaggttgggaataatgacatcgatgatgtaaacatcatagttttccggcagattaatcaatttgatttaagtggaaatgtgatcacttcctctgaataccttcctacgttatgggtcaagctttacaaaagcgaaaacctcgacaatccaatccagacagtttcccttggccagtccctgttcttccatttccccccactgctcagagatggcgagaactatgttgtgcttctggactccacactccccagatcccagtatgactacatcttgcctcaagtttctttcaccgcagtgggctaccataaacacatcaccttgatttttaatcccacgaggaagctgcctgaacaggacatcgcacaaggatcctacattgccctgccattgacgctgctggttctgctggccggttacaaccatgacaagctcattcctttgctgctgcagttgacaagccggctacagggagtccgcgcgctcggccaggcagcctctgacaatagcggcccagaagatgcaaagagacaagccaagaaacagaagacaaggctggacttgaggatggaaggggacagttgcagtctcacttgggacaggccacagccaggggtccggccactacccgcccgtgggataaaagccaaaagcatgcgtcagctaacttcagcctgtgctgctgggcccgcaccccatgtcccttgtcactgtggcatcctgcacccatcctcacccctccgtagagcccctcgtgcaatgcaatgaatggaccctcctgtcactctgctgaacagaatttattttctgagtcaaatatatttaattattatttttggcaaagaagtattttagctgggctgtggtgtgagaaatgtcattncttgatcttccaccttcgttttgcaagaagaagttccagtttgaccgtggggtttgggtttccatgggcgggggtaacccttagggaaattcctcctggttttcccttccacttccccctttggcaaccttgaaaaatccctggctggggaaaacccccaggccaa

SEQ ID NO: 164225 - DNA, 1767 bp, Homo Sapiens
  misc_feature (232)..(248): n is a, c, g, or t
  misc_feature (397)..(405): n is a, c, g, or t
  misc_feature (569)..(651): n is a, c, g, or t
ccccccctcggggggggcgaaagatattattttatatcgcccacacaggggcgcaccacaaagggtgtttcttgtaatgcgccccccctgggggggtattttgcaggggttcacttccaattccccggtttttgtggaagggggttcttcccacttttcgcgcgcacgaaattggcctttaaagtgggaatttcccaccccacgttttctttccaaaaagaagatggcccannnnnnnnnnnnnnnnntaaatttgtggaattttcgggagccttcccctttggggactcccctgttgggatagggattcccccgtaaaaagggccctccaaggaactctcccatttttgggatttgtttccaaaaaccgccttcgggtttcccccgccgggggcgnnnnnnnnnatttgggggagaaattccacaggccctaggttcatgggccaggggttctccctagggaaaacagactatgggcccagggttccctttatccttagtggggcccgcggcgccacaacgaaatggtttaagaaagctttttcgaggggccgaggcggcccgacaannnnnnnnnnnnnnnnnnnnnnnnnnnnnnnnnnnnnnnnnnnnnnnnnnnnnnnnnnnnnnnnnnnnnnnnnnnnnnnnnnncacaaatgaatgggccattttattgatttttacctcctaatagtggatacaggttgccgtggtttccagcaggatctcagatgcaaagggaagtgaagaaaacagatgaatccctagggtaccccgccatggaaccaaacaccacatcaactggaactcttcttgcaaacgaaggctgaagatcaagaatgacattctcacaccacagcacagcttaaatacttctttgacaaaaataataataaattatatttgactcagaaaataaattctgttcagcagagtgacaggagggtccattcattgcatgccacgaggggctctacgagggggtgaggatgggtgcaggatgccacagtgacaaggggacatgggtgcggggcccagcagcacaggctgaagttagctgacgcatgcttttggcttttatcccacgggcggggtagtggccggacccctggctgtggcctgtcccaagtgagactgcaactgtccccttcctcctcacgtccgccttgtcttctgtttcttggcttgtctctttgcatcttctgggccgctcttgtcagaggctgcctggccgagcgcgccgactccctgtagccggcttgtcaactgcagcagcaaaggaatgagcttgtcatggttgtaaccggccagcagaaccagcagcgtcaatggcagggcaatgtaggatccttgtgcgatgtcctgttcaggcagcttcctcgtgggattaaaaatcaaggtgatgtgtttatggtagcccactgcggtgaaagaaacttgaggcaagatgtagtcatactgggatctggggagtgtggagtccagaagcacaacatagttctcgccatctctgagcagtggggggaaatggaagaacagggactggccaagggaaactgtctggattggattgtcgaggttttcgcttttgtaaagcttgacccataacgtaggaaggtattcagaggaagtgatcacatttccacttaaatcaaattgattaatctgccggaaaactatgatgtttacatcatcgatgtcattattcccaacctcaatcaccctatggtggggggagccggcacatgcgttgggagcggcacatgc

SEQ ID NO: 164226 - DNA, 421 bp, Homo Sapiens
agtacacagggacctcacagaaagaggtctatgttctgactgcagtggaaggaagcatcggagacttcaaggcctatgccctggcaggcgtaagctttgagataaaaactgaggatgaccagcccctcccgggagtcctcttatccctgagtggtggcctgtttcgttccaacctcttgacctaggacaacggcattctgacattctcaaacctgagccctggacagtattacttcaaacccatgatgaaggagttcctggtttgatgccatcctacacagatgatcgaggtgcaggaaggccagaacctgaagatcaccatcacggggtaccgaaccgcttacagttgctatggcacagtgtcttccttaaacggagagcccgaacaaggggttgccatggaagcggtgggccagaactg

SEQ ID NO: 164227 - DNA, 1040 bp, Homo Sapiens
  misc_feature (886)..(886): n is a, c, g, or t
cctggccaccggtttgagcaagcgttctacacctatgacacgtcttcacctagtatcttgacattgacagccattcgccaccatgtccttggaactatcaccaccgacaaaatgatggatgtcactgtgactatcaagtcttccatcgacagtgaacccgccttggtcttaggccctctgaagtctgtgcaggagctgcggagggagcagcagctggctgagatcgaggcccgcaggcaggagagggagaaaaacggcaatgaggaaggtgaagaaagaatgaccaagcctcccgtgcaggagatggtagatgagttacaaggccccttctcgtatgatttctcttactgggcgcggtctggagagaaaatcactgttacaccgtcatctaaagagctgctcttttatcccccttcaatggaagccgttgtcagtggagaaagctgcccagggaagctgatcgagatccacgggaaggcaggcctgtttttagaaggccagatccaccccgagttggaaggagtcgagattgtcatcagtgaaaagggggcaagttcaccgctgatcacagtctttactgatgacaaaggtgcctacagtgttggccccctgcacagtgacctggagtacacggtgacctcacagaaggagggctatgttctgactgcagtggaaggaaccatcggagacttcaaggcctatgccctggcaggcgtaagctttgagataaaagctgaggatgaccagcccctcccgggagtcctcttatccctgagtggtggcctgttttcgttccacctcttgacccaggacaacggcattctgacattctcaaacctgagccctggccagtattactttcaacccatgatgaaagaattcccgnttgaaccatcccccacagatgatcgaagttgcaggaaaggccaaaaacctggaaagatcacccatccccgggggtacccgaacccgctttaccagttgggctatgggccaccaggtggcctttccctttaaacggggaaaagccccccaaaaaa

SEQ ID NO: 164228 - DNA, 404 bp, Homo Sapiens
  misc_feature (363)..(363): n is a, c, g, or t
  misc_feature (386)..(386): n is a, c, g, or t
gtgtcttccttaaacggagagcccgaacaaggggttgccatggaagcggtgggccagaacgactgcagcatttacggagaagacaccgtgacagacgaagagggcaagttcagattacgtggattgctgccgggatgtgtgtaccacgttcagctcaaagcagaaggcaacgaccacaatgaacgggcgctcccccaccatagggtgattgaggttgggaataatgacatcgatgatgtaaacatcatagttttccggcagattaatcaatttgatttaagtgggaaatgtgattcacttcctctggaataccttcctacgttatggggtcaagcttttacaaaagcgaaaaccttcggacantcccattccagacagttttcccnttgggccagttccctgtt

SEQ ID NO: 164229 - DNA, 1435 bp, Homo Sapiens
gtccaatacgcacgacttcccaggatccgccatcatcccgagcacttcagtgggagacctcgagaagatcgggtgccccactctcggaattccatcaccctcaccaacctcactccaggcacagagtatgtggtcagcatcgttgctcttaatggcagagaggaaagtcccttattgattggccaacaatcaacagtttctgatgttccgagggacctggaagttgttgctgcgacccccaccagcctactgatcagctgggatgctcctgctgtcacagtgagatattacaggatcacttacggagagacaggaggaaatagccctgtccaggagttcactgtgcctgggagcaagtctacagctaccatcagcggccttaaacctggagttgattataccatcactgtgtatgctgtcactggccgtggagacagccccgcaagcagcaagccaatttccattaattaccgaacagaaattgacaaaccatcccagatgcaagtgaccgatgttcaggacaacagcattagtgtcaagtggctgccttcaagttcccctgttactggttacagagtaaccaccactcccaaaaatggaccaggaccaacaaaaactaaaactgcaggtccagatcaaacagaaatgactattgaaggcttgcagcccacagtggagtatgtggttagtgtctatgctcagaatccaagcggagagagtcagcctctggttcagactgcagtaaccaacattcatcgcacctaaagaactgaaattcactcaggtcgacacccattcaagcaaaagcgcccgggaaagcccacaggggcaagtttccaggtacagggtgacctactcgagccctgaggatggaatccatgagctattccctgcacctgatggtgaagaagacactgcagagctgcaaggcctcagaccgggttctgagtacacagtcagtgtggttgccttgcacgatgatatggagagccagcccctgattggaacccagtccacagctattcctgcaccaactgacctgaagttcactcaggtcacacccacaagcctgagcgcccagtggacaccacccaatgttcagctcactggatatcgagtgcgggtgacccccaaggagaagaccggaccaatgaaagaaatcaaccttgctcctgacagctcatccgtggttgtatcaggacttatggtggccaccaaatatgaagtgagtgtctatgctcttaaggacactttgacaagcagaccagctcagggagttgtcaccactctggagaatgtcagcccaccaagaagggctcgtgtgacagatgctactgagaccaccatcaccattagctggagaaccaagactgagacgatcactggcttccaagttgatgccgttccagcccatggccagacacttgcatccaga

SEQ ID NO: 164230 - DNA, 1055 bp, Homo Sapiens
tgcgaggtgatctagaggattccctctggatgcaagtagtcgatgttcaggacaacagcattagtgtcaagtggctgccttcaagttcccctgattactggttacagagtaaccaccactcccaaaaatggaccaggaccaacaaaaactaaaactgcaggtccagatcaaacagaaatgactattgaaggcttgcagcccacagtggagtatgtggttagtgtctatgctcagaatccaagcggagagagtcagcctctggttcagactgcagtaaccactattcctgcaccaactgacctgaagttcactcaggtcacacccacaagcctgagcgcccagtggacaccacccaatgttcagctcactggatatcgagtgcgggtgacccccaaggagaagaccggaccaatgaaagaaatcaaccttgctcctgacagctcatccgtggttgtatcaggacttatggtggccaccaaatatgaagtgagtgtctatgctcttaaggacactttgacaagcagaccagctcagggagttgtcaccactctggagaatgtcagcccaccaagaagggctcgtgtgacagatgctactgagaccaccatcaccattagctggagaaccaagactgagacgatcactggcttccaagttgatgccgttccagccaatggccagactccaatccagagaaccatcaagccagatgtcagaagctacaccatcacaggtttacaaccaggcactgactacaagatctacctgtacaccttgaatgacaatgctcgaagcacccctgtggtcatccacgcctccactgccaatgatagcaccatccaacctacgtttcctggccaccacaaccaataccttgctgatatcaaggcagccgccacgtgccgggattaccggctaacatcatcaagtatgagaagcctgcgtctcctcccagaaaagtggtcactcggccccccctggtgtcacagaggctactattactggcctggaaccgggcaccgaatatacaatttatgtcattaccctgaagaata

SEQ ID NO: 164231 - DNA, 534 bp, Homo Sapiens
tcaattctgattgtgcaacaatgatataccatccaatgaatgaatgaatggatgttctgcctgaaggtttctatggcgttcttgaattacttctctttccatatagtttctgaatgccttgaatatcatcctgggaaagtttaaaattttggggatctccatttccataggttggatacatcactgcattaggatcagaggaatgtcccatacccaaagaatggccaagttcatgagttgcagcatacaggaagttaatccctagactgctaccatccgtccagcgttcatcctctctgcgtttgaaacgcagagaggagaaaatggtcagaggaggtgtatctggatcagggaagttacgctgaagtggatcatagtggatgccatcataaataagcagaacccttttggtatatcctgcatcttccccaaaacgatcaattcttactgtctgtgtatccactacacatatttcacataggtaaaacttgaaacaaaatcgaaatctctattgctcctccgaggatcctctag

SEQ ID NO: 164232 - DNA, 1144 bp, Homo Sapiens
acctcctaccccacggacaccaaatcaaccataggtccaagaacaattgtctctggacggcagctatgcgactcaccgtgctgtgtgctgtgtgcctgctgcctggcagcctggccctgccgctgcctcaggaggcgggaggcatgagtgagctacagtgggaacaggctcaggactatctcaagagattttatctctatgactcagaaacaaaaaatgccaacagtttagaagccaaactcaaggagatgcaaaaattctttggcctacctataactggaatgttaaactcccgcgtcatagaaataatgcagaagcccagatgtggagtgccagatgttgcagaatactcactatttccaaatagcccaaaatggacttccaaagtggtcacctacaggatcgtatcatatactcgagacttaccgcatattacagtggatcgattagtgtcaaaggctttaaacatgtggggcaaagagatccccctgcatttcaggaaagttgtatggggaactgctgacatcatgattggctttgcgcgaggagctcatggggactcctacccatttgatgggccaggaaacacgctggctcatgcctttgcgcctgggacaggtctcggaggagatgctcacttcgatgaggatgaacgctggacggatggtagcagtctagggattaacttcctgtatgctgcaactcatgaacttggccattctttgggtatgggacattcctctgatcctaatgcagtgatgtatccaacctatggaaatggagatccccaaaattttaaactttcccaggatgatattaaaggcattcagaaactatatggaaagagaagtaattcaagaaagaaatagaaacttcaggcagaacatccattcattcattcattggattgtatatcattgttgcacaatcagaattgataagcactgttcttccactccatttagcaattatgtcacccttttttattgcagttggtttttgaatgtctttcactccttttaaggataaactcctttatggtgtgactgtgtcttattcatctatacttgcagtgggtagacgtcaataaatgttacatacacaaataaataaaatgtttattccatggtaaatttaaaaaaaa

SEQ ID NO: 164233 - DNA, 1266 bp, Homo Sapiens
aggagagcgcccggcagaagctgcagctggagaaggtgaccaccgaggcgaagctgaaaaagctggaggaggagcagatcatcctggaggaccagaactgcaagctggccaaggaaaagaaactgctggaagacagaatagctgagttcaccaccaacctcacagaagaggaggagaaatctaaagagcctcgccaagctcaagaacaagcatgaggcaatgatcactgacttggaagagcgcctccgcagggaggagaagcagcgacaggagctggagaagacccgccggaagctggagggagactccacagacctcagcgaccagatcgccgagctccaggcccagatcgcggagctcaagatgcagctggccaagaaagaggaggagctccaggcccgccctggccagagtggaagaggaagctgcccagaagaacatggccctcaagaagatccgggagctggaatctcagatctctgaactccaggaagacctggagtctgagcgtgcttccaggaataaagctgagaagcagaaacgggaccttggggaagagctagaggcgctgaaaacagagttggaggacacgctggattccacagctgcccagcaggagctcaggtcaaaacgtgagcaggaggtgaacatcctgaagaagaccctggaggaggaggccaagacccacgaggcccagatccaggagatgaggcagaagcactcacaggccgtggaggagctggcggagcagctggagcagacgaagcgggtgaaagcaaacctcgagaaggcaaagcagactctggagaacgagcggggggagctggccaacgaggtgaaggtgctgctgcagggcaaaggggactcggagcacaagcgcaagaaagtggaggcgcagctgcaggagctgcaggtcaagttcaacgagggagagcgcgtgcgcacagagctggccgacaaggtcaccaagctgcaggtggagctggacaacgtgaccgggcttctcagccagtccgacagcaagtccagcaagctcaccaaggacttctccgcgctggagtcccagctgcaggacactcaggagctgctgcaggaggagaaccggcagaagctgagcctgagcaccaagctcaagcaggtggaggacgagaagaattccttccgggagcagctggaggaggaggaggaggccaagcacacctggagaagcagatcgccaccctccatgcccaggtgccgacatgaaaaagaagatggagacgcgtt

SEQ ID NO: 164234 - DNA, 443 bp, Homo Sapiens
cgtccttcatcatacctacccaccgaggcgaagctgaaaaagctggaggaggagcagatcatcctggaggaccagaactgcaagctggccaaggataagaaactggaagatgggaagatgatggcagattacggcatcagaaagggcaacttactcttcctggcatcttattgtattggagggtgaccaacctgggcatggggtgttggcaggggtcaaaaagcttatttcttttaatctcttactcaacgaacacatcttctgatgatttccccaaaattaatgagaatgagatgagtagagtaagatttgggtgggataggtaggatgaagtatattgcccaactctatgtttctttgattctaacacaattaattaagtgacatgatttttactaatgtattactgagactagtaaataaatttttaaggcaaaatagag

SEQ ID NO: 164235 - DNA, 1113 bp, Homo Sapiens
  misc_feature (28)..(28): n is a, c, g, or t
  misc_feature (94)..(94): n is a, c, g, or t
  misc_feature (402)..(433): n is a, c, g, or t
ggggaaaaggaaaaaccattgtaaagtntccaaggccaatacgagtaaatggaaaaggcctgttaaagtagatgacatcatgtgttagccctgncccctaatccccctagaattgtaatgtgtgggatataaattaggttttattattctcttaaaaatccaaagatgatctctatcactttgcccacctgtttgatgtgcagtggaaactggttaagccagttgttcatacttcgtttacaaatataaagatagctgtttaggatattttgttacatttttgtaaatttttgaaatgctagtaatgtgttttcaccagcaagtatttgttgcaaacttaatgtcattttccttaagatggttacagctatgtaacctgtattattctggacggacttattnnnnnnnnnnnnnnnnnnnnnnnnnnnnnnnnttgagttctatttaccttgcacattttttgctgttacagtgaaaaaaatggtccaagaaaatgtttgccatttttgcattgtttcgtttttaactggaacatttagaaagaaggaaatgaatgtgcattttattaattccttaggggcacaaggaggacaataatagctgatcttttgaaatttgaaaaacgtctttagatgaccaagcaaaaagactttaaaaaatggtaacgaaaatggaatgcagctactgcagctaataaaaaattttagatagcaattgttacaaccatatgcctttatagctagacattagaattatgatagcatgagtttatacattctattatttttcctccctttctcatgtttttataaataggtaataaaaaatgttttgcctgccaattgaatgatttcgtagctgaagtagaaacatttaggtttctgtagcattaaattgtgaagacaacttggagtggtacttactgaagaaactctctgtatgtcctagaataagaagcaatgatgtgctgcttctgatttttcttgcattttaaattctcagccaacctacagccatgatctttagcacagtgatatcaccatgacttcacagacatggtctagaatctgtacccttacccacatatgaagaataaaattgattaaaggttaa

SEQ ID NO: 164236 - DNA, 934 bp, Homo Sapiens
gctccctataataggcttcaatctcatggtttcacgcaaccatcaagagattggataatgaagaggtgaagctctgtcttgggtgctgtattacaagagacccgagcataatcgacatcctgacggcttctgaggggacttcttttctgcagtgtagcataggtcgaagtctcgtaggaatatgtggatgcctgaggggttctagtgattttctctgcagtctcgtaacagtatgtggaagtatcaggggttcgtgttgtctttgtagatgtctcataggaataaccttcagactcagggaaactggtaattttctcagtggtttcataagagtagctggggtccccaagtgtgtggccaccatcctcagagtcatcatagccattgctgatgtcatccagaagccttctagacctctcagtcttttcatagctgtaaccactcacttcgggggggctggtggtcttttcacttatgtcatatgagtacccaccctcttcaggggtccgtgtggtcttctcaataatttcataggaatagtcaccatcttcaggggtcttggtagtcttcccaatggtctcataggagtagccactgtcacttggagattttgtggttctctctatcttctcatagtaatagccacccacatctgaggtccgggtggtcttctcataagactcatagtcataatcttcttcatctggggacctggttgtttcctcaggcttttgataggcatagctaaagtcaccaggtgtcttccctccactgtccttctccaggccaggtgtggacaaatctctattcaaggctagatggtgttgcattgtatcgaataacactgaggcacggaagccatagggctctgcggatgctgcatctattggtggagaagaggaactgtggcaagttgctgttttctctttgactg

SEQ ID NO: 164237 - DNA, 130 bp, Homo Sapiens
gaggagatatcgtggcaaaatataaatttataaacttatacaaatctataagacagcttttcagactctaaatggaaatgttggggagagacataaaagtaggaaaagtaaaaataagcacctgatgatt

SEQ ID NO: 164238 - DNA, 557 bp, Homo Sapiens
gggcagcataagcgtgacttcggtggaggcgtccagtcgggctgggagacttctctgacctggcaacaatttcttcctgggttctggagccctcgtagtctacagcctgccccttcttaaggatcttgatggtggggtagccactcacatcaaacctgctggccagcacagacgctgaggttgcatcgatcttggcaacaggaatgggaggatctttatcctttaatatgttggcaattttttcatattccggagcaaactgcttgcaatgtccacaccatggagcataaaactccagcagcactgtgtctttgtcagccacaaaattatcaaagtttgcatcatttaggaccaagactccattttcttccttaacttccaagtcgtcttcttcctcatcatcatcttcctcctcctcctcctcttcatcctcaatggcattttctctgttagaagaatcctcgtccgggccctcggcacccgccacggccagcagctgcaccagccccaagagcagcaggagcaggaaggctttccggggcctcatggtagcgggg

SEQ ID NO: 164239 - DNA, 1307 bp, Homo Sapiens
cgcagccgccgccgccacccccgcagcagttcccgcagttccacgtcaagtccggcctgcagatcaagaagaacgccatcatcgatgactacaaggtcaccagccaggtcctggggctgggcatcaacggcaaagttttgcagatcttcaacaagaggacccaggagaaattcgccctcaaaatgcttcaggactgccccaaggcccgcagggaggtggagctgcactggcgggcctcccagtgcccgcacatcgtacggatcgtggatgtgtacgagaatctgtacgcagggaggaagtgcctgctgattgtcatggaatgtttggacggtggagaactctttagccgaatccaggatcgaggagaccaggcattcacagaaagagaagcatccgaaatcatgaagagcatcggtgaggccatccagtatctgcattcaatcaacattgcccatcgggatgtcaagcctgagaatctcttatacacctccaaaaggcccaacgccatcctgaaactcactgactttggctttgccaaggaaaccaccagccacaactctttgaccactccttgttatacaccgtactatgtggctccagaagtgctgggtccagagaagtatgacaagtcctgtgacatgtggtcctgggtgtcatcatgtacatcctgctgtgtgggtatccccccttctactccaaccacggccttgccatctctccgggcatgaagactcgcatccgaatgggccagtatgaatttcccaacccagaatggtcagaagtatcagaggaagtgaagatgctcattcggaatctgctgaaaacagagcccacccagagaatgaccatcaccgagtttatgaaccacccttggatcatgcaatcaacaaaggtccctcaaaccccactgcacaccagccgggtcctgaaggaggacaaggagcggtgggaggatgtcaaggaggagatgaccagtgccttggccacaatgcgcgtgactacgagcagatcaagataaaaaagattgaagatgcatccaaccctctgctgctgaagaggcggaagaaagctcgggccctggaggctgcggctctggccccactgagccaccgcgccctcctgcccacgggaggacaagcaataactctctacaggaatatattcctaaacgactagaggaatatgtccacatactggctcatatcggaacctgcagctgcttggagtcctgcaactgcttcagtgaatgaattctggccatggttggcgcaccccataatgcctaaaggctgggcgctcgagagtct

SEQ ID NO: 164240 - DNA, 909 bp, Homo Sapiens
tgagagacagcctgtgatcatagaaggggctacagactcacgcatacgtgggtggaaacatgtccttgctctcgcagtggccctggcaggccagccttcagttccaggactaccacctgtgcgggggctctgtcatcacgcccctgtggatcatcactgctgcacactgtgtttatgacttgtacctccccaagtcatggaccatccaggtgggtctagtttccctgttggacaatccagccccatcccacttggtggagaagattgtctgccacagcaagtacaagccacagaggctgggcaatgacatcgcccttatgaagctggccgggccactcacgttcaatgaaatgatccagcctgtgtgcctgcccaactctgaagagaacttccccgatggaaaagtgtgctggacgtcaggatggggggccttgttgatgtgctccacaaatccagccgaacaactgggcatagatgtgcttcgccaggacgttgcgcgcattgatcacctgctgcagggacatggtcttgacgtaggtctccgaggtggtgaccagcttgcgatgacacagccagtgctccatctgactgtgctccacccctagcagtcggcagaagttgcttaggtatacatcctggggtgatatactacaggaatcaccatcacgctcagcctgaatcgccacacttccaaggtgcaagatagaagcaattatcttaaaaatgctcatctgatgggactctttcactccgaggagtgtgaaggcttgtcgagtcttctcaaagtcctcagcatcgtccacaccctcgatggaagtgtctcctccctgtgatgtatagaaaaagtcctctgcacttgttagtgcaagctctttaaattctggaagaccggcagcagcaccaccagga

SEQ ID NO: 164241 - DNA, 1421 bp, Homo Sapiens
  misc_feature (22)..(22): n is a, c, g, or t
  misc_feature (42)..(42): n is a, c, g, or t
  misc_feature (697)..(706): n is a, c, g, or t
  misc_feature (1172)..(1178): n is a, c, g, or t
  misc_feature (1182)..(1192): n is a, c, g, or t
  misc_feature (1194)..(1201): n is a, c, g, or t
  misc_feature (1248)..(1309): n is a, c, g, or t
  misc_feature (1320)..(1330): n is a, c, g, or t
  misc_feature (1353)..(1361): n is a, c, g, or t
agtgggtcaagtgtttggaaanaaaagataactttccacggntttagccatcttcctggacaccttaccccaatgatgaagaccactgagcgcgtgttcccgtacatctcggtgatggtgaacaatggctccctgtcctacgaccacagcaaggatgggcgctggaccgagctggcgggctgcacggctgacttccgcaaccgcgatcacgacaccttcctggctgtgcgctactcccggggccgtctgacggtgatgaccgacctggaggacaagaacgagtggaagaactgcattgacatcaccggagtgcgcctgcccaccggctactacttccgggcctccgccggcaccggcgacctgtctgacaatcatgacatcatctccatgaagctgttccagctgatggtggagcacacgcccgacgaggagagcatcgactggaccaagatcgagcccagcgtcaacttcctcaagtcgcccaaagacaacgtggacgaccccacggggaacttccgcaggcgggtctgacggggtggcgggtgttcctgctgctgctgtgcgctctcctgggcatcgttgtctgcgccgtggtgggggccgtggtgttccagaagcggcaggagcggaacaagcgcttctactgagtggcgcctccggcggggcctgtccctgggcccaggagccaatgtgaacnnnnnnnnnnaccgggattataaaagaacaacaagatgaccttatttcttaactgtttcaaataaatgattaaagtattttcatacattttgcttcttgcccagcagggacaggtggcagagccgaggcttagggtctggcaccccccacagctggagacggaggctctcctggggctggtgtctcaggagcaggggtctgtgtctacagatgggctgtggcccctgcaggcagctgttgaacactggagggtcccccggaccacactggggtgggctcctgaggacgtggggaagtgattttgttttgtggtgtgtggcacgtgtggcgacggataaggcctgaactgggaaacccaggccttcctgttcaccctgagctgcttcctgagacagatgctcaagtgaggctgcaggcgcggtgtggtggggccgagtgtgaccgtttgctaaataaagtgaaatacccaaacctcnnnnnnnaaannnnnnnnnnnannnnnnnncccgggggctccaggggggtttgaacccccgtcggtcccgggcctgnnnnnnnnnnnnnnnnnnnnnnnnnnnnnnnnnnnnnnnnnnnnnnnnnnnnnnnnnnnnnntgggttccccnnnnnnnnnnnaaagccccctttttccagaggcnnnnnnnnnccttttttgtgaaaacccccaaaaaaacctctggggggtgcgccccccttggtgggggga

SEQ ID NO: 164242 - DNA, 883 bp, Homo Sapiens
agaatggcggcggaaggctggatttggcgttggggctggggccggcggtgcctgggaaggcctgggcttctcggccccggccctggccccactacacctctctttcttcttttgttgttggggtctgtgactgcggatataactgacggcaacagtgaacatctcaagcgggagcattcgctcattaagccctaccaaggggtcggttccagctctatgcccctctgggacttccagggcagcactatgctcacgagccagtacgtacgtctgacccctgacgagcgcagcaaagagggctctatctggaaccaccagccgtgcttcctcaaagactgggaaatgcacgtccacttcaaagtccacggcacagggaagaagaacctccatggagacggcatcgccttgtggtacacccgggaccgcctcgtgccagggcctgtgtttggaagcaaagataacttccacggcttagccatcttcctggacacctaccccaatgatgagaccactgagcgcgtgttcccgtacatctcggtgatggtgaacaatggctccctgtcctacgaccacagcaaggatgggcgctggaccgagctggcgggctgcacggctgacttccgcaaccgcgatcacgacaaccttcctggctgtgcgctactcccggggcccgcctgacggggatgaccgacctggaggaacaagaacgagtggaaaaaactgcatttgacatcacggggagtgccgcctgcccacccggataataacttcgggggccctccgccgggaaccgggcgaaccttgtctgaaaattcaggacctccttctccctggaaagctgttcccaacctggaatggggggaaacacaacgcccccaaagaa

SEQ ID NO: 164243 - DNA, 947 bp, Homo Sapiens
ctggattcggcgttggggctggggccggcggtgcctgggaaggcctgggcttctcggccccggccctggccccactacacctctctttcttcttttgtgttggggtctgtgactgcggatataactgacggcaacagtgaacatctcaagcgggagcattcgctcattaagccctaccaaggggtcggttccagctctatgcccctctgggacttccagggcagcactatgctcacgagccagtacgtacgtctgacccctgacgagcgcagcaaagagggctctatctggaaccaccagccgtgcttcctcaaagactgggaaatgcacgtccacttcaaagtccacggcacagggaagaagaacctccatggagacggcatcgccttgtggtacacccgggaccgcctcgtgccagggcctgtgtttggaagcaaagataacttccacggcttagccatcttcctggacacctaccccaatgatgagaccactgagcgcgtgttcccgtacatctcggtgatggtgaacaatggctccctgtcctacgaccacagcaaggatgggcgctggaccgagctggcgggctgcacggctgacttccgcaaccgcgatcacgacaccttcctggctgtgcgctactcccggggccgtctgacggtgatgaccgacctggaggacaagaacgagtggaagaactgcattgacatcacgggagtgcgcctgcccaacggctactacttcggggcctccgcggcaccggcgaacctgtctggaacacccatcgaccttcatctccatgaagctggaccagctggaaggttgggagcaacggcccgacgacggagagcattcgactggacaaggacgaagccacagaggtcaacttccccaagtctcgccaaagaccagggggacaacccaggggaaactctcgcagcgggccc

SEQ ID NO: 164244 - DNA, 683 bp, Homo Sapiens
caagccagtgaccttgtgatgcaccctgatgtaaatgtacgccccactacattcgctgcatcaagccaaacgagaccaagaagcccaaagactgggaggaaagcagggtaaagcatcaagtcgaatatttgggtctgaaagagaacattcgagtgagaagagctggctatgcctatcggcgcatcttccaaagattcctacagaggtatgccattctgaccaaagccacctggccttcttggcagggagaggagaagcaaggcgtcctgcacctgctgcagtcggtcaacatggacagcgaccagttccagctggggaggagtaaagtgttcatcaaagcccccgagtctctatttcttttagaagagatgagagagagaaagtatgatgggtatgctcgagcgatacagaaatcatggaggaaattcgtggcccggaagaaatacgttcaaatgagagaagaagcctcagacctcttattgaacaagaaggagagaaggagaaacagtattaacaggaactttataggggattatattgggatggaagagcacccagaactccagcagttcgtgggcaagagggagaagattgatttcgcagacacagtcaccaagtatgacaggaggttcaagggtgtaaagcgagacctgctccttaccccaaagtgcttgtacttaagc

SEQ ID NO: 164245 - DNA, 700 bp, Homo Sapiens
acgcgttctcctcacagctcttatgaagcaagaaggagagaacgagaagacagtattaacaggaacttgatagtgggattatattgggatggaagagcacccagaaactccagtcagtttcgtgggcaatgaggggagaagattgatttcgcagacacaggcaccaagtatgacaggaggttcaaggtgtgtaaagcgagaactgctccttaccccaaagtgctggtactattactcggacgagaaaaagtcaaacagggtcccagacgagggtcctggtgaaaagacgtctgaatcggaaaatcgagatagaacggatcttgtttgtcttagttacttgccaggcaggatgacattgtgattctccatgagcaagagtatgacagtttgcttgaatctgtcttcaaaactgaattcctaagcctcttagcaaagcgttacgaggagaagacccagaagcaactacctctgaaatacagcaatacgcttgaactgaagttgaaaaaggaaaactggggcccctggagtgcagggggctcccggcaaagtgcagttccaccaagggttaggggacctggctgtcctcaagcccagtaacaaagtgctgcaggtcagcatcggacctggaagggccaagaactaccgtcctaacagaaagaacaatacccaaaataaaggtaatccagtgggactcaaatgc

SEQ ID NO: 164246 - DNA, 1121 bp, Homo Sapiens
  misc_feature (376)..(376): n is a, c, g, or t
tccactagtgtaggctctatgtacttgaatcaaaactaacagaatttcatggtgcatttcctgatgcccagcttccttctaagaggatcattggccccaaaaattatgaattcttaaagtcaaagagggaagagttccaagaatatctacagaaacttctgcagcatccagaactgagtaatagtcaacttctggcagactttctttcccctaatggtggggaaacacaatttcttgataagatactaccagatgtaaatcttgggaaaattataaaatctgttcctggaaaactaatgaaagagaaaggtcagcatttggaaccttttatcatgaatttcattaattcttgtgagtctccaaagcctaaaccaangtagaaccagaactgaccattctcagccctacttcagaaaacaacaagaagcttttcaatgatctgtttaaaaataatgcaaaccgtgctgaaaatacagagagaaagcaaaatcagaattattttatggaggtgatgactgtagaaggagtctatgattacctgatgtatgtaggacgggtagttttccaggttcctgactggcttcatcatctcttaatgggaactcgaatcctctttaaaaacaccctggaaatgtatactgattactatcttcagtgtaaactagaacagctatttcaggagcaccgtttggtctcactcataacacttctcagagatgctatattctgtgaaaacactgaacctcgctctctccaagataagcaaaaaggagcaaaacagacttttgaagaaatgatgaattacattccagatctgttagtcaagtgtattggtgaagaaaccaagtatgaaagcatcagacttctgtttgatggcttacagcaaccagtactcaacaagcagctgacttatgttttattggacattgtgatacaggaactgtttccagagctcaataaggtacaaaaggaagttacctctgtgacatcttggatgtaaacacttggatttggtatagaataacccattgaaatttctgctgtgcgagggtggtagaaatttacttttttgggtatattcttatatatattatgtacgtcgctgtctgaaattttagtta

SEQ ID NO: 164247 - DNA, 887 bp, Homo Sapiens
ctccgagcctaccccgccgagtgagctgcgccgcaccgtgccgtcccacccggcacccaccagtccgatggggccgcagcggcgtgatcccctgccggggccgccctactctggggcttcctgctccagctgacagccgctcaggaagcaatcttgcatgcgtctggaaatggcacaaccaaggactactgcatgctttataacccttattggacagctcttccaagtaccctagaaaatgcaacttccattagtttgatgaatctgacttccacaccactatgcaacctttctgatattcctcctggttggcgataaagagcaaagcagttgtggttccatggggaagctgccattttcttgaaaaagccagaattgcacagaaaggaggtgctgaagcaatgttagttgtcaataacagtgtcctatttcctccctcaggtaacagatctgaatgtcctgatgtgaaaatactgattgcatttataagctacaaagactttagagatatgaaccagactctaggagataacattactgtgaaaatgtattctccatcgtggcctaactttgattatactatggtggttatttttgtaattgcggtgttcactgtggcattaggtggatactggagtggactagttgaattggaaaacttgaaagcagtgacaactgaagatagagaaatgaggaaaaagaaggaagaatatttaacttttagtcctcttacagttgtaatatttgtggtcatctgctgtgttacgatggtcttactttatttcttctacaaatggttggtttatgtcatgatagcaattttctgcatagcatcagcaatgagtctgtacaactgtcttgctgcactaattcataagataccatat

SEQ ID NO: 164248 - DNA, 660 bp, Homo Sapiens
  misc_feature (43)..(59): n is a, c, g, or t
gtgggggggtgagagagtaggagagaataccatgttaagattnnnnnnnnnnnnnnnnncattggtcatgtattaggcagaaacagtgttcataacatttttctgggttttaaatatgttgtttcggatatccttaatataaatgttttaggtattctgtgtaccctgtcgtacccccaacattatagaatattgcagtgtgtcattgcaagctttctctgctgtcaccagtgaaacatagtgcccggttaaattcccccactttaacttccttgtgatcaacagtaactggatgtttttgaggagctcaatgggaataaaaatattccaatctatttggagaccaaaggcaaaatcagttttcttaccttgggaattattcgtaccttttatggtaatttcagctttgacatgtattatgaggaacgtaccaaaaaccggttggtaacaaatctgtagagaaggtctgaatctatcgtgttggccttttcaggtgccatttctactgcctaatacagtgccatttgcctttgtgaagacccataaacattcatggtgttgaatggaagatagagactctccctaatcttactgatctcaataccccacaaatgaataagaatgatattgaaaccagccgctaaggaacatcttattatt

SEQ ID NO: 164249 - DNA, 1158 bp, Homo Sapiens
  misc_feature (357)..(367): n is a, c, g, or t
gtggtatgagccacccttttaaggaagcagtctttatttgcattttttaagagtgaacacatatatgaaaacactgcaacaggttgacacaatgctcagtcccttttaagtgaattcctggggagaaagtcaaggaccctagggagcagacagtggaatgcaacacaggaattacctatgaggtcacttttgtgagccacatgacacggcctcaactgcagccattccccagaagtatctttgctcacggtaaatgcaaagtaaccaaataccacacctgcatatttgaaaccaacaaatgtgacgttgcctatactggcctcatgtgcagaaggaattttggtcagaccatgaccnnnnnnnnnnncaaacagattgtgaaatggaattaaaagcacaattctttgtatctgggaacgtttcactggcaacactaactgtatgatacagacgttacctggaacagtagttatgtttctcttcctatccccaaagaagcacaatagaagaaatagacgcaaaatggaggagggtgttgtttaccaggttatttcagtgcagcctgtgggaatgaatacacgggccacagtgagcagtgcccttggctgtattccccagggttctgtatgttgtgcgatggttatatacaagagggtttgacaaaagagagttaactactaaaggtatccaaaaaaggcctgagaaaatctggttaaaatgtataaccttgtattgctactgatgggagttgtttttatatcttttacaaataataaaaagattgttaaaaaatagatttatccagaaagatgttgatttgaactctaaaaagcaacgtggaatcattattttcccttttgaatgaagagccatggagctccgtggttttcagctccctttctggttgcaaatcaatccttcctctggagtgagtctagggcatgcgggctcttcctaggtgtctacgtggaaatccttcactcatgcaggtgtagaacacacctggtttggttctgtgtgttccaatattttggccagcttgcccacttcaagaacaagcctcaggttcccctagctgctccttcagggacaggattagctgcctttgatttagcctggagaatcctgctctcaaaagaattgcctttacaaattccc

SEQ ID NO: 164250 - DNA, 163 bp, Homo Sapiens
aatattcacctgttctttgttcttattcttgtgggcctgtctgtttactgcctatacttaattttttaaattgtaagatgtgtcatacagatagaaggcagcatagaaatatggtataatttagatatttagtaaaataaatgcccatgtattcatctcctgg

SEQ ID NO: 164251 - DNA, 583 bp, Homo Sapiens
agtcatagaattatggcatagatctgggaaaatgcggagtgttcatttacaaagatgcgttcaaatagtgctctaagagtttgttcagtggctcacttcggctaaaatgcagaaatgcatgctgtcagcgttggtatttcacattcaatggagctgaatgttcaggacctcttcccattgaagctataatttatttggaccaaggaagccctgaaatgaattcaacaattaatattcatcgcacttcttctgtggaaggactttgtgaaggaattggtgctggattagtggatgttgctatctgggttggcacttgttcagattacccaaaaggagatgcttctactggatggaattcagtttctcgcatcattattgaagaactaccaaaataaatgctttaattttcatttgctacctctttttttattatgccttggaatggttcacttaaatgacatttaaataagtttatgtatacatctgaatgaaaagcaaagctaaatatgtttacagaccaaagtgtgattcacactgtttttaaatctagcattatcattttgcttcaatcaaaagtggttca

SEQ ID NO: 164252 - DNA, 700 bp, Homo Sapiens
  misc_feature (193)..(202): n is a, c, g, or t
  misc_feature (659)..(659): n is a, c, g, or t
ctgatcccccagagagctacaggtctgctcccgacgggcctcgggctgaacccgtccacacagggccgtgtcaatagcagcgactcaagggacgtgtgtacatatgtaaatgagaaatagagacgtgtcaacagatgcattcatttctcttggaatgtgtattgtttttattttgcgaaaccaaaccaaaccnnnnnnnnnngcttggaactccatcacgtggaaaaactagatcctgttggttatagcatttgtgagttctccacgtctgtctctctcgctcatgtaatatactctgaccctgagtggaaaggggtttttgttctgtttttattttacctacatgtactatttagcttcagtgtactagtcctgccacctgtgtatttttagggtgctatggaaataatgaaaagaaacggggatttcagaagaaaattgtaaccaaattcatactttgtataatttttgatatcatgatcacaggtgattcacacgtacacacataaacacacccaccagtgcagcctgaagtaactcccacagaaaccatcatcgtctttgtacatcgtatgtacaatgcaatcatttcatactttaaactggtcaaaaaactaattgtgatttctagtcttgcaaagctgtatgtagttagatgntgtgacaacctctaatatttatctaataaatatgtattcag

SEQ ID NO: 164253 - DNA, 765 bp, Homo Sapiens
  misc_feature (643)..(659): n is a, c, g, or t
ggtttcttttatatttggtaaacttaagttccataaagccagacgctatacaggtgcaaaggctaatgtggcaatagctctaaagacacagttgctgctcaggttttatgtatagataatagaaagcacagtttactaacacagtaaaccaacagagttcaagtcagatgagtaccctaagaattaattagattttatttcttatgctcgaaatttgctacacaaggacttatctaacctgttattttgctctgttgctgacttgattcaagtctcagtgtgttctgtgctgactgtaagatgcagaagtcctcacacctggcaaagaagagttcaaactgaaaaggggtttggtgcttcctggtttgtccaggttacctgttattaatttattattagcagcccaagaggagatatgtgcccaatgtacaatatcttatgtttgacttataaacattatcccaaagcaacatcaaatacagttcaaaagcccaagaggaaagggggtaataagaaatcagaacactgaagaatgtttaaaacattgttttctaaacactaacaaaaaaaattaagggcaaactgaaaatacaaatgagatttacaggcactgtgtgtagaatgtgcaaaaattcacttagcnnnnnnnnnnnnnnnnnggtgttgctttaagaaactttatcaaatatatttcttacaaatataaagctttctctcccaattgaaggcaattaaaaaaattcaaagtttacggacgcgtgggtc

SEQ ID NO: 164254 - DNA, 803 bp, Homo Sapiens
  misc_feature (185)..(194): n is a, c, g, or t
tccaagggactcagctcttctgtttctacagatggaacagctccatagggacagctgtataattaccttcagaggccaacgacagaatccggcaggaacagacattatcttgccagttagaagtacttctgtctcacttatgtccaaagagtggctatagatcttggccttcttccctgtatgcnnnnnnnnnnggggcccccaagaaagtccctttaatagcactttagcacaggcaatgctacaggaacaaagtttcaatgctgctgagagtgaaagaaaggaggaaagtctgccactctaccctgagctggcagtagggcactgagtaccctaggaagaagtcagagcaatggatacaaatgaccttgctcttggatttgctgagcatgatccctattctgatgtcagagattaggtttaaatggaatagagctatccatttgttcttactctctagggagacaatcttccaaaacagttttgggggggtcttctaaagctttcaaattggaagtaactttattcaactagagttgaataaaagaagggcaaaaataatctcacagagcttggaactgctgatagcccttactgagggcaaaagatggctatattgttagctatactcctaccaaagcaagcaaggagataggattatagataatttcacggacatttggaaataacattggtgattatacagacaagaataaactcacttcaagctggtctgttttaataaattttcaacgtaattgtctatttttttccctccctaagaccgtagggatcctcgagag

SEQ ID NO: 164255 - DNA, 552 bp, Homo Sapiens
aatcttctcaaacactaattgcatatactcagaactgaatttgttgtttttcactctagaccaagctttggatttcatttctgaagtttgaattttctgagtcactagtaatgtccttgaggatgatagtctgaattttctctgcaagagtacaaagattggcttttttgagatctttaatcaatgtgtcatacgcttctttctttccatgaagttgatgccaattacgaagcagttgaactttctgttctgctgtgtcttggacattgtcattcttgatctcatctattttggcttcattgacaccattctttcgaacaaagcctttaacttgacttagtgtcatgactccagcaatagtggtgatatatttactcaagtcaacatcagataaatttattgccactgtttcaggatttaaagttggagattcatgagaaccttggttttcctttctgtgctttctgcatgttttccgtacttcctttctcttcacccaaacaactagtggaattggcaaaagaagaagacaaagccaccccaagttagatc

SEQ ID NO: 164256 - DNA, 1309 bp, Homo Sapiens
  misc_feature (429)..(453): n is a, c, g, or t
  misc_feature (894)..(914): n is a, c, g, or t
caaggttcatttgtattcaaatgaatcagaactgcgaatctgaacatgaaaagacctggggggaatgcctacatctggaatcgcattacatcgaacgttaaattttatccgaccagttcttcattgctgatcacttttgataatgacagatccaacatgaaactcctgaagcaaatgaatatttaccttgtgctttcatgcaaatttagggaccaaactcaaaggtttcatccatgctggacaccagatctaagaattgtgacaggatcttctcatatttcattttagaacacttgatactagtctgatgatactcatgttagctgcactccaattaatgtttatcctaatgcaacagaaaactctgttaaactgtacaccgtaattggcatctgttaaaacaactccacttttgaacgaacagcattnnnnnnnnnnnnnnnnnnnnnnnnntttgaatttgtcagatggagttacacaggtttctctatgattgcttttgcatgccatttccaagtggaacatggccaatctttgataaagtataatagatgaaaatctctgcgtgaagaatatgctgtaggtttcacacacttttagtgaaaatggattattttcaacagcaccaagaagtcaatggtgacttatttagctcatttagaagaaagtcctataatactcatttgtttaaaaaactctgtggtaacaaaaggtatatacaccgtttactgtacacaaaatgcatctttcctgtaaactggtgtgtgttcagcacactccacacatggcaatatgttagaatctagccatcacatttgatagagttttgatagaaatgcatccaatgggaacaaacaccccatatgttgtagtgtctaaatagaaactcagtgnnnnnnnnnnnnnnnnnnnnntagacaggaagggagggagtcatccttgaatagtgatggaccatggactataacgtgattgtgttcattcttaaagcactacccagagaccaatggtgccgttgccttggtgcccgcctgagtcactacgttgccactggcgttgctcctggatttggaaagtccttgtagacccagaaactaccaaaaatctgtgatcctttccactttgagtatcctgatgctcaagcagtttcaacatcagctatcaatgttgtgatgggcttgtcataacaggattgtgaataccatatacatgatctttatgataaccattattaccattttccatattcttcatgggtatagtttcaacatcatcgtacacgtcctccgaatccattcgacgatagtac

SEQ ID NO: 164257 - DNA, 545 bp, Homo Sapiens
atatcttgtcattcttggcactgtttctaaagaaaaactccattatcccaagcaaaaagcacagaaggtggagtttggcttcaagagatgttaactcaaaatcttaggcctagcagagaatcaccaaatttatggagagttaacaggggtttaacaggaaggaagtgcctttagtaagttctcaagccagaggtgggaggcagcagctaaatcagaggacagcatcctcagtgaaagtgagccattcggggtggcatgtcactccaggaataaacacaacttagagacaaatgatttcgtaggatagcacagtgacatggtgcactgtgaacctgaggccactgtgtcaaactgtgcactggttgtgaatagggagagccaaaattatgtcctactggtaatgagctttcaatggctcggtcctctcacactgaagctccgtaagcagcttcagagccacaaccgtgccaacattggccctctgggggtactgtctgtggagcccacgagaggagccgagatccccattgggctgttcacccaac

SEQ ID NO: 164258 - DNA, 941 bp, Homo Sapiens
  misc_feature (720)..(749): n is a, c, g, or t
ggagtgtcaagccagagattcggggcagtagataaatgttcattttactgatgcactttagtttttggtctgttacctgttttccagaaatttgtggccttttaggcgggagttaggcgaccaaaccagtgagagccccaatccctgcagttttgtggcttcaagtgtgggtggacagtcctaatggggatctccagctccttcctgtgggctgccacagacagctacccccagaagggtcaatgttgggagtggttgtggctctgagctgctctacagagcttcagtgtgagaggatcgagccattgaaagctcattaccagtaggacataatttttggctctccctattcacaaccagtgcacagtttgacacagtggcctcaggttcacagtgcaccatgtcactgtgctatcctacgaaatcatttgtttctaagttgtgtttattcctggagtgacatgccaccccgaatggctcactttcactgaggatgctgtcctctgatttagctgctgcctccagcctctggcttgagaacttactaaaggcacttccttcctgttaaacccctgttaactctccataaatttggtgattctctgctaggcctaagattttgagttaacatctcttgaagccaaactccaccttctgtgctttttgcttgggataatggagtttttctttagaaacagtgccaagaatgacaagatattnnnnnnnnnnnnnnnnnnnnnnnnnnnnnncacctacttttaaagaaaatacctaacagatttttaatatagttatctctaccactttcttttctagtttcttgattttcagctcaggctgcattctaactcatactgtgaagacaaaggtgtttttgattcagaaatatatgaaatctgcatagtcttaatttgtaaaaaataaagaaaattccttaacct

SEQ ID NO: 164259 - DNA, 1066 bp, Homo Sapiens
aaaagaaaaaacttcccaattatcccccaaggcaaaaaagccgcaggaagggtggaggttgggctttcaaggagatgttaactcaaaatcttaggcctagcagagaatcaccaaatttatggagagttaacaggggtttaacaggaaggaagtgcctttagtaagttctcaagccagaggctggaggcagcagctaaatcagaggacagcatcctcagtgaaagtgagccattcggggtggcatgtcactccaggaataaacacaacttagaaacaaatgatttcgtaggatagcacagtgacatggtgcactgtgaacctgaggccactgtgtcaaactgtgcactggttgtgaatagggagagccaaaaattatgtcctactggtaatgagctttcaatggctcgatcctctcacactgaagctctgtagagcagctcagagccacaaccactcccaacattgacccttctgggggtagctgtctgtggcagcccacaggaaggagctggagatccccattaggactgtccacccacacttgaagccacaaaactgcagggattggggctctcactggtttggtcgcctaactcccgcctaaaaggccacaaatttctggaaaacaggtaacagaccaaaaactaaagtgcatcagtaaaatgaacatttatctactgccccgaatctctggcttgacactacctactggtgtccagttggagacagactaaaatgcactgaaggactattaggattgctgcctcctaagttatcacagcctcgctctgttgatgtgaatgaggaactgcttggttgttaaaggagattttgctccctgctgccccaaacaggtccttatctaggtttgctccccactgccccaaacaggtctggcaggattggttacaatgatctccagaggctcaaccattccccttccctatccttgcttgggacatttaatcacagccacctagtagaggccgctcagtaagggcgacgcgtggtcgacgatatcccggaattcgaccgtaccagctgctttttgacaactgttcaatta

SEQ ID NO: 164260 - DNA, 2297 bp, Homo Sapiens
  misc_feature (1323)..(1335): n is a, c, g, or t
ggcctgctgtctgccttgggctccctgatattgatgatttggctgatggcaacacctcatagccatgaaactgaacagaaaagactgggacttcttgctggatttgcattccttacaggagttggcctgggccctgccctggagttttgtattgctgtcaaccccagcatccttcccactgctttcatgggcacggcaatgatctttacctgcttcaccctcagtgcactctatgccaggcgccgtagctacctctttctgggaggtatcttgatgtcagccctgagcttgttgcttttgtcttccctggggaatgttttctttggatccatttggcttttccaggcaaacctgtatgtgggactggtggtcatgtgtggcttcgtcctttttgatactcaactcattattgaaaaggccgaacatggagatcaagattatatctggcactgcattgatctcttcttagatttcattactgtcttcagaaaactcatgatgatcctggccatgaatgaaaaggataagaagaaagagaagaaatgaagtgaccatccagcctttcccaattagacttcctctccttccacccctcatttcctttttgcacacattacaggtggtgtgttctgtgataatgaaaagcatcagaaaagcttttgtactttgtggtttcctctattttgaattttttgatcaaaaaactgattagcagaatatagtttggagtttggcttcatcttcctggggttcccctcactcccttttttgtcaaccccatctgtagcctcttcctctactcaggcagtcgacccgccacgatgagaagtgggaccagcagagggcgccaacttcaggagtccgctttcccaccaggcttcattcacccagtggacctgaactgtttggtagagccacccggcccttccttcctcattgttgtttggtatgcgcacagttcctgtgggactgggccgtgagttttccattggaaagaaagtcagtggtcccattgttaactcagcctcaaatctcaactgtcaggccctacaaagaaaatggagagcctcttctggtggatgctttgctccctctgagctgcccatgctggtctggcaaacacacctttctgctttgccttcacaaaagtaatgtgttccctttcccaccccttgcctgaccctcagggagtcagcctgcttccatccatgggtgggaagacttcagcacaaaggaaagactaattcttgtcaggcatttttgaaaaggctgattatgtgtatcaaggtacagcatcgtagggttcccctaaacttgccctgnnnnnnnnnnnnnagtttgttatccccttactgagcggcctctactaggtggctgtgattaaatgtcccaagcaaggatagggaaggggaatggttgagcctctggagatcattgtaaccaatcctgccagacctgtttggggcagtggggagcaaacctagataaggacctgtttggggcagcagggagcaaaatctcctttaacaaccaagcagttcctcattcacatcaacagagcgaggctgtgataacttaggaggcagcaatcctaatagtccttcagtgcattttagtctgtctccaactggacaccagtaggtagtgtcaagccagagattcggggcagtagataaatgttcattttactgatgcactttagtttttggtctgttacctgttttccagaaatttgtggccttttaggcgggagttaggcgaccaaaccagtgagagccccaatccctgcagttttgtggcttcaagtgtgggtggacagtcctaatggggatctccagctccttcctgtgggctgccacagacagctacccccagaagggtcaatgttgggagtggttgtggctctgagctgctctacagagcttcagtgtgagaggatcgagccattgaaagctcattaccagtaggacataattttttggctctccctattcacaaccagtgcacagtttgacacagtggcctcaggttcacagtgcaccatgtcactgtgctattctacaaaatcatttgtttctaaggtggggtttatttcctggagtgacatggccacccccaaatggctcactttccactgaggatgctggcctccggatttaactgctggcttcagccctctgggttgagaaacttactaaagggcacttcctttcccggttaaaccccttggtaactcccccataaaatttggggggattccctgcctaggcctaaaaatttttgagttaacttcccct

SEQ ID NO: 164261 - DNA, 1004 bp, Homo Sapiens
  misc_feature (785)..(786): n is a, c, g, or t
  misc_feature (891)..(891): n is a, c, g, or t
gggagtcagagcacatccggtgttagaagcgctggtaggccttggagaggcgggttaggaagagtggagactgctgcacggactctggaaccatgaacatatttgatcgaaagatcaactttgatgcgcttttaaaattttctcatataaccccgtcaacgcagcagcacctgaagaaggtctatgcaagttttgccctttgtatgtttgtggcggctgcaggggcctatgtccatatggtcactcatttcattcaggctggcctgctgtctgccttgggctccctgatattgatgatttggctgatggcaacacctcatagccatgaaactgaacagaaaagactgggacttcttgctggatttgcattccttacaggagttggcctgggccctgccctggagttttgtattgctgtcaaccccagcatccttcccactgctttcatgggcacggcaatgatctttacctgcttcaccctcagtgcactctatgccaggcgccgtagctacctctttctgggaggtatcttgatgtcagccctgagcttgttgcttttgtcttccctggggaatgttttctttggatccatttggcttttccaggcaaacctgtatgtgggactggtggtcatgtgtggcttcgtcctttttgatactccactcattattgaaaaggcccaacatggagatcaagaattatatctggcactgcattgatctcttcttagatttcattactggcttcagaaaactcatgatgatcctggccatgaatgaaaaggnntaggaggaaagaggagaaatggagtgaccatccaaccttttcccaattagactttcctctcctttccacccctcattttctttttgcacacctttacaagggggngggggttccggggataatggaaaagcatccgaaaaaacctttgggaaccttgggggttttcccccaattttgaaatttttttgagacccaaaaactggtttttacccgaaaat

SEQ ID NO: 164262 - DNA, 898 bp, Homo Sapiens
  misc_feature (806)..(806): n is a, c, g, or t
gggagagcacatccggtgttagaagcgctggtaggccttggagaggcgggttaggaagagtggagactgctgcacggactctggaaccatgaacatatttgatcgaaagatcaactttgatgcgcttttaaaattttctcatataaccccgtcaacgcagcagcacctgaagaaggtctatgcaagttttgccctttgtatgtttgtggcggctgcaggggcctatgtccatatggtcactcatttcattcaggctggcctgctgtctgccttgggctccctgatattgatgatttggctgatggcaacacctcatagccatgaaactgaacagaaaagactgggacttcttgctggatttgcattccttacaggagttggcctgggccctgccctggagttttgtattgctgtcaaccccagcatccttcccactgctttcatgggcacggcaatgatctttacctgcttcacccctcagtgcactctatgccaggcgcccgtagctacctcctttctgggaggtatcttgatgtcagcccctgagcttgttggcttttgtcttcccctggggaatgttttcctttggatccattttggctttttccaggcaaaccctgtatgtggggactgggtgggccatggtgtgggcttccgtcccttttttgatactccaacttcatttattgggaacagggccgaaactttgggagaatccaggaattatttacccggggcacctggccattgggattctcctctcccttaaaaattttccatattacctggtgccttctcggaaaaanaaccttcccgtggaatggaattcccttggggccccccgtggaaattggaaaaaaggggggttcttacggaaaacgcacaacggagaagcaat

SEQ ID NO: 164263 - DNA, 763 bp, Homo Sapiens
  misc_feature (649)..(691): n is a, c, g, or t
  misc_feature (710)..(719): n is a, c, g, or t
gggagagcacatccggtgttagaagcgctggtaggccttggagaggcgggttaggaagagtggagactgctgcacggactctggaaccatgaacatatttgatcgaaagatcaactttgatgcgcttttaaaattttctcatataaccccgtcaacgcagcagcacctgaagaaggtctatgcaagttttgccctttgtatgtttgtggcggctgcaggggcctatgtccatatggtcactcatttcattcaggctggcctgctgtctgccttgggctccctgatattgatgatttggctgatggcaacacctcatagccatgaaactgaacagaaaagactgggacttcttgctggatttgcattccttacaggagttggcctgggccctgccctggagttttgtattgctgtcaaccccagcatccttcccactgctttcatgggcacggcaatgatctttacctgcttcaccctcagtgcactctatgccagggcgcccgtacctacctcctttctggggaggtatccttgatgtcagcccctgaagctctggtggcttttggccctccccggggggaaaaggtttttcctttgggaatcccattttggggctttttttcccaggccaaaaaccctggttattgtnnnnnnnnnnnnnnnnnnnnnnnnnnnnnnnnnnnnnnnnnnncctttttccggtccccccnnnnnnnnnnggggaaaaaaacttccccaaaccctttccaatatttaaaattgg

SEQ ID NO: 164264 - DNA, 861 bp, Homo Sapiens
gggggagagcacatccggtgttagaagcgctggtaggccttggagaggcgggttaggaagagtggagactgctgcacggactctggaaccatgaacatatttgatcgaaagatcaactttgatgcgcttttaaaattttctcatataaccccgtcaacgcagcagcacctgaagaaggtctatgcaagttttgccctttgtatgtttgtggcggctgcaggggcctatgtccatatggtcactcatttcattcaggctggcctgctgtctgccttgggctccctgatattgatgatttggctgatggcaacacctcatagccatgaaactgaacagaaaagactgggacttcttgctggatttgcattccttacaggagttggcctgggccctgccctggagttttgtattgctgtcaaccccagcatccttcccactgctttcatgggcacggcaatgatctttacctgcttcaccctcagtgcactctatgccaggcgccgtagctacctctttctgggaggtatcttgatgtcagccctgagcttgttgcttttgtcttccctggggaatgttttctttggatccatttggcttttccaggcaaacctgtatgtgggactggtggtcatgtgtggcttcctcctttttgatactcaactcattattgaaaaggccgaacatggagatcaagattatatctgggcactggcattgatctcttcttagaatttccattactggccttcagaaaactcatgaatgatccctgggccctggaatggaaaggggttaggaggaaaagaggaggaaattggaggtgaccactccagccctttcccaagttaaaccttccctctc

SEQ ID NO: 164265 - DNA, 431 bp, Homo Sapiens
  misc_feature (195)..(230): n is a, c, g, or t
  misc_feature (233)..(233): n is a, c, g, or t
  misc_feature (235)..(235): n is a, c, g, or t
  misc_feature (273)..(273): n is a, c, g, or t
  misc_feature (277)..(277): n is a, c, g, or t
  misc_feature (294)..(294): n is a, c, g, or t
  misc_feature (333)..(333): n is a, c, g, or t
  misc_feature (359)..(359): n is a, c, g, or t
  misc_feature (366)..(366): n is a, c, g, or t
  misc_feature (399)..(399): n is a, c, g, or t
  misc_feature (419)..(419): n is a, c, g, or t
aaaggttaaggaattttctttattttttacaaattaagactatgcagatttcatatatttctgaatcaaaaacacctttgtcttcacagtatgagttagaatgcagcctgagctgaaaatcaagaaactagaaaagaaagtggtagagataactatattaaaaatctgttaggcattttctttaaaagtaggtgnnnnnnnnnnnnnnnnnnnnnnnnnnnnnnnnnnnnaanancttgtcattcttggcactgtttctaaagaaaaactccnttancccaaggcaaaaaagcncagaaggtgggagtttgggcttcaaggaggatgttaacncaaaatcttagggcctagcaggggantcacccnaatttatggggggagttaaccgggggtttaacngggagggagtgcccttaggnaaggttccccag

SEQ ID NO: 164266 - DNA, 975 bp, Homo Sapiens
  misc_feature (734)..(743): n is a, c, g, or t
ctaccccacggcagaacctgtttctctgccacaagaaccacctaagccaagagtcgaagctaaaccagaagttcaatctcagccacctcgtgtgcgtgaacaacgacctagagaacgacctggttttcctcctagaggaccaagaccaggcagaggagatatggaacagaatgactctgacaaccgtagaataattcgctatccagatagtcatcaactttttgttggtaacttgccacatgatattgatgaaaatgagctaaaggaattcttcatgagtttgggaaacgttgtggaacttcgcatcaataccaagggtgttgggggaaagcttccaaattttggttttgtggttttggatgactctgaaccagttcagagaatcttaattgcaaaaccgattatgtttcgaggggaagtacgtttaaatgtggaagagaaaaaaacaagagctgcaagagagcgagaaaccagaggtggtggtgatgatcgcagggatattaggcgcaatgatcgaggtcccggtggtccacgtggaattgtgggtggtggaatgatgcgtgatcgtgatggaagaggacctcctccaaggggtggcatggcacagaaacttggctctggaagaggaaccgggcaaatggagggccgcttcacaggacagcgtcgctgaagctccactgttggcaaagtcttggcagtggtacattattcatcgtgtttgcattcttgttaannnnnnnnnnggcttgggaatgtgacacagccttttggatcatttctttgatgtgaaaagcatcttgggttatcagttaaatggaggtggacattatttccccaatttcacaacaggattcacattgttaatttataaatctagacttggagaattaaggactgagaaatgaccatatcttaaactatctacgacaaagtgaacttaaaaggacatgcccactgaattcaggtcctttgagt

SEQ ID NO: 164267 - DNA, 1426 bp, Homo Sapiens
aaggtcaccagaaagacctacaggagatcttagagaaagaatgaagaacaagcgccaagacgtggacactgagccccagaaacgaaatacagaggagtcatcctcacctgttaggaaagaatcttcaagagggagacatagggaaaaggaagacataaaaatcactaaggaaagaactccagaaagtgaagaagaaaatgtagaatgggaaactaatagagatgattctgacaatggagatattaattatgattatgttcatgaattgtcattggaaatgaagcgtcagaagatacagagggaattaatgaagctggaacaagaaaacatggagaagagagaagaaattatcattaaaaaggaggttcaccagaagtggttagatcaaaattgtccccgtcaccttctctaagaaagtctagcaaatctccgaagcgaaaatcaagcccgaagtcgtcttcagctagcaagaaagataggaagacatctgcagtatcttctcccctgttggaccagcagagaaattcaaaaaccaaccaaagtaaaaagaaaggaccacgtactcctagtccaccccctcctataccagaagatatcgctctggggaaaaaatacaaagaaaaatataaagtaaaagacaggatagaagaaaaaacaagagatggaaaggacagaggacgagattttgaacgacaaagagaaaagagagacaagccaaggtctacttccccagcaggacagcatcattctcctatatcttctagacatcactcatcttcctcacaatcaggatcatctattcaaagacattctccttctcctcgtcgaaaaagaactccttcaccatcttatcagcggacactaactccacctttacgacgctctgcctctccttatccttcacattctttgtcgtctccccagagaaagcagagtcctccaagacatcgctctccaatgcgagagaaagggagacatgatcatgaacgaacttcacagtctcatgatcgacgccacgaacaggagggaagatactaggggcaaacgagacagagaaaaggactcaagagaagaacgagaatatgaacaggatcagagctcttctagagaccacagagatgacagagaacctcgagatggtcgggatcggagagatgccagagatactaggggaccgaagggaactaagagactccagagacatgcgggactcaagggagatgagagattatagcagagatacaaaagagagccgtgatcccagagaattctcggtccactcgtgatggcccattgactacagggaccgtgaaggtcgagatactcatcgaaaggaggatacttatccagaagaatcccggagttatgggccgaaaccatttgagagaaagacaagtctcgtacggaaatagggagatgagtccag

SEQ ID NO: 164268 - DNA, 936 bp, Homo Sapiens
gggtaagccccagcctcacatactcatataaaaaccagaaacaaaataacaaaaacggggtgagaacaaaaaatacagatgacaggttctgtagttatggtactgaactgagcttcctgtcagccaaaactagaagggaaacatgaccaccacctgacttgttgcagaggctttagatctgagcacttggatctgaaaacagtttctctttagatgccttcaaataagggacagtatccttgatgacaatacagtacatacattcacaattctccaagaccatctctgtgtatatcaaggttaacctggatgaatatttctgcagcagccatggggtaggcaggcaatatgaccaaatatgtagtttggaggctcaaatgaaacaggagaaagagctcaggaaccatgaagcatggtgcaggtatcagggtcaagtattctaaccctaagatcagggtgcatgagaactggagaggcctcaatactgagacttagacgaaaggtgtggaattaacttcctagtgtgactaatccaacttagctcaaagcggctctgagatcagcccttctctcaagtcaactcataaacaaatgctttagttacaggaggtattaactgcaaaataacagccaaaagcattcctgggcacgtccattgagctccatgtaacagaagccattaactgcatctcagcaaccaaattgtctttcatcttgtagtcacagaatccctgagttttaactcagcacatgactgcccagataagaggttctatgtcccagcatctctttcagcaaagtgtggccacagtgatctgagcaatgctcagtcatatctttttttaaaaatctgctcttttctctctctctttccccagtggaatgcagatatggagctgatgagtctgctttgatcttatgggtaagaaaacataa

SEQ ID NO: 164269 - DNA, 664 bp, Homo Sapiens
gagaaagcctctcaagtgagatagaagattgccgtacctttccaccacagaaatgtatttgtgtcgttggcaccagcctcccccatcagcgttaccatatacgggaatcctctccaaagaaggaggagactggtagcaagtaaggcatagagaacacttgctcttataccctagtggtggcggtcaagctaacaagtgtgaaaatgcctttggcatttttaaaaaagtgcaatcaataaagcagagttctgtcaagaatgagtaagttaacagccagagacagacactgtgcaggcattgcaaatagatggaattacagcaaaatgtgctcaatgtatttgcctgcttacaacactgggagatgtgttagtccagtaagttgactcatcacaagagcaccagacttggggctgtaatctccggcaacttgcatgccctctgaaagaagggttttctgtgctgtgaaatgcatagaactatactttgccatgcacgactgttcctgcaattgatattgtgtgaaatctgggagggtggtctttgggtgtactcaggggccaatggtaattctggggtaggggagccagcttggggtggggaatattcacctgggcctccgctctttaactatataaacatttatctgtatatctatgttccctgt

SEQ ID NO: 164270 - DNA, 989 bp, Homo Sapiens
cacgaggtgctgcagtcgagagagacacgctcctgcgcggatagaacgtatggaaaggcggatgcagctggtaaagaaggataacgagaaagaaaggcacaagctgtttcagggctatgaaactgaagagagagaggaaacagagctatctgagaaaattaaactggagtgccagccggagctttccgagacatcccagactctgcctcccaagcccttctcatgtgggcggagtggaaagggacataaaaggaaatccccatttggaagtacagaaagaaagactcctgttaaaaagctggctcctgaattttcaaaagtcaaaacaaaaactcctaagcactctcctattaaagaggaaccctgtggttccttatctgaaactgtttgtaaacgtgaattgaggagccaagaaaccccagaaaagccccggtcttcagtggacaccccaccaagactctccactccccaaaagggacccagcacccatcccaaggagaaagccttctcaagtgagatagaagatttgccgtacctttccaccacagaaatgtatttgtgtcgttggcaccagcctcccccatcaccgttaccattacgggaatcctctccaaagaaggaggagactgtagcaaggtgtctgatgccatcaagtgttgcaggagaaacttcagtcttggctgttccttcttggagggaccactcagtagagcctctaagggacccaaatccttcagaccttttggagaacctggatgacagtgtgttttcgaagcggcatgcaaaactggagctggatgagaagagaaggaaaagatgggatattcagaggatcagggaacaaaagaatttaccagcgactgcagctcagaatgtataaaaaggaagggatttcaggaaatctgagccctgagggttacctcattttttcccctgaacccagaatggatgtttgaaaagttttgatggaattacccccccttccttgg

SEQ ID NO: 164271 - DNA, 503 bp, Homo Sapiens
tccttattcgtgttgcacctgacaagcttctagaggtccatgcagtactgagtctcaaaaataatcaaaaggaaatgaatgggtctggcactaggctctaaacatctcagcaggaaggagaagtgttaacgtttacattttaagtatctatgacacgtgatgtgtactgacaccatagagggtggaagggtgattataaagatttcatacccattatgtaatgactcatgtatcttaagtttttctcttaactgaaacattaacatacaactctatgcaaattcagtttaaaacatgcagctaagaaataacctacaactcaaagacagaatccaatgatatatcaaaactgcattggtaactatgaatattattatgtggacatctactgtggcatgcatctgtacaaacctttcaggcagtggtccacagctgggttatgaataaaaaggcataaattttactctcatatagtaacaatgaagtataccagtacagaaaag

SEQ ID NO: 164272 - DNA, 1777 bp, Homo Sapiens
  misc_feature (1174)..(1348): n is a, c, g, or t
  misc_feature (1506)..(1531): n is a, c, g, or t
ccaaagcctacattccctgcttatacacagtctacagcttcaacaactagtacaacaaatagtactgcagctaaaccaacggcttcaataacaagtaagcctgctacacttacaacaactagtgcaaccagtaagttgatccatccagatgaggatatatccctggaagagagaagggcacagttacctaagtatcaacgtaatcttcctcggccaggacaggcccccatcggtaatccaccagttggaccaattggaggtatgatgccaccacagccaggcatcccacagcaacaaggaatgagacccccaatgccacctcatggtcagtatggtggtcatcatcaaggcatgccaggataccttcctggtgctatgcccccgtatgggcagggaccgccaatggtgcccccttaccagggtgggcctcctcgacctccgatgggaatgagacctcctgtaatgtcgcaaggtggccgttactgatcttacttcatccagtctaataggtttggagattaaaccttttctcaacttgtgctgtttatatagccaagcttccgtcaataaggcttcattgtgactttaacaaacattatcttcccacataccaggaactattggacatttattttacatgggaaaaattatttggaataataaagcaggaacttttcctgaagttgcaatttatactgtatggcttctttttcatgtttcatctaggtttttagaagtgaagtatagtaaatttggttcgttaaattgtgaaggcgctggaattacatgaacataccaccctagtaaaggcaagttctgtaagcttacattgctatttgtaaagtttgccttcacagcatttcagatgctgttggacttcatgtccccaacctagcttggtgagggctgtaactgtttccaagtacttgtacattggaagtctgaatgtgtaacaatatttaatgtatttagagttcctcatgttgcagggtttaagaaatctgacccaccaaggtcatgtgacttttctgtactgttaaacttcattgtaataaaatgagagaaaaatttatgcctttttattcataacccagctgtggaccactgcctgaaaggttgtacagatgcatgccacagtagatgtccacataataaaattcatagttaccaagcnnnnnnnnnnnnnnnnnnnnnnnnnnnnnnnnnnnnnnnnnnnnnnnnnnnnnnnnnnnnnnnnnnnnnnnnnnnnnnnnnnnnnnnnnnnnnnnnnnnnnnnnnnnnnnnnnnnnnnnnnnnnnnnnnnnnnnnnnnnnnnnnnnnnnnnnnnnnnnnnnnnnnnnnnnnnnnnggggcaccaaccaacatacaaacaccgagcagggaggacagggagaacacaacacccggctataacacgcggcaggacgcacatactgcgggagagaaagagaagaaccccaacagacaacaactgggggggaaggagcccaacaaccaataatgtgnnnnnnnnnnnnnnnnnnnnnnnnnnagcgagatacataatctcgaaaccaccatacgaagagagagcaacacaacacacaagccatccgaacgacgaagacaacaaaaggagggataaaaacaaaacatcgaggaccaaaataatactggagcgacagggaagagatgaacaacaagaacgcgccgcacaacaaaggagagaacaaatagaatcaccagcaagacaaaaagttgaacacaccagaaggacacaacaccgtagagcagaaag

SEQ ID NO: 164273 - DNA, 570 bp, Homo Sapiens
tgcacgattctatgcccactctgtgattacaaaacagcagatagaagcaacttcaaaaaacatgtagagcatacatgtgaacccacggcagttcaattgccctgtatgtgactatgcagcttccaagaagtgtaatctacagtatcacttcaaatctaagcatcctacttgtcctaataaaacaatggatgtctcaaaagtgaaactaaagaaaaccaaaaaacgagaggctgacttgcctgataatattaccaatgaaaaaacagaaatagaacaaacaaaaataaaaggggatggaacatatgagagcttgagatgttgaagacactgagaaagtcaaacatgcccattgcaatcccagtaggaaagaatggaggaattgcaataatctgaagagatggtaactgaaattgatttagaattggtggtcagcccatcatgacaggaaatttataatgtataacaaacagaataagctacaggtagaaaataccaaatacagagaggtaagcagggagaaaacacagtaccttcagaagaacagcagtagcgtcttgatgctctgtttgg

SEQ ID NO: 164274 - DNA, 1117 bp, Homo Sapiens
tcacaataccttctagatatatgcatatctttctatattatgtaaatggctttacccatttaaataataaaccatacagcatttaagaatcattattatatgattaacaatgtcatgttccaggtttaacaatttcataggccaaaaaaaatttcttcttaaaaactagttttataaacgcagaatatattccatgagtaactgctggtattttttaagaaaatatattgtgcaattgtggctaccacgtactgctggcaaagcattattatttatgtaaaatgtgaaaaaaaggtgtaaaaatttttcaactgcctatgatcatgatgaaaggttactgccttcttacaaaaattatattggcatcttcttaaaaataattcgaaaaagggataaactccctagccaaaaataaataaataaaaaggtgcattttttaaaatgatgctactgcaatgcaatggtttaaataccaaaaaactgagaaaatgagctgtctgtgatccagcattaaagaacatactaaaaaagagcattaatgtaaattaagtagaaaggggatcaaaattgaactaaccaagtttgtgcagtattgtagccaggcttctaaaattagatgtagaaaatataaatagactgctttaggtagtgagccaccagtgtccaaaaaaaggaatgaaattaagaaaaagctcagttaacttgatccaaagctctgagtaattcttcaccctgcagtaggtttctgctgccttgtataggagcattaacttcacaatcataactggtcagctgtggtaatccactttcatccattgattgccccagcagtctacatgctaaatcagagggtattaaaataattgtcttttgctccattccattctgttcactagatttgcatccttttacacgtttccaagaaagtgttgtagtagctgcatgatcgtctggctgctgtaataatgttccaattcctactgcttgaaaaagtgaaccatcatgttccatttttcgctttctctgagcattctgcaaagctagtatctttggatttagttcttcctcaggaactgtagttctttgactcaaagcgacagataacacgttagggctt

SEQ ID NO: 164275 - DNA, 1330 bp, Homo Sapiens
  misc_feature (602)..(614): n is a, c, g, or t
ttaagtcggtttcaggaagctgaagaacggccaaaaatgtttgaagaactaggacagaggctgcagcattatgccaagatagcagctgacttcagaaataaggatgagaaatacaaccatattgatgagtctgaaatgaaaaaagtggagaagtctgttaatgaagtgatggaatggatgaataatgtcatgaatgctcaggctaaaaagagtcttgatcaggatccagttgtacgtgctcaggaaattaaaacaaaaatcaaggaattgaacaacacatgtgaacccgttgtaacacaaccgaaaccaaaaattgaatcacccaaactggaaagaactccaaatggcccaaatattgataaaaaggaagaagatttagaagacaaaaacaattttggtgctgaacctccacatcagaatggtgaatgttaccctaatgagaaaaattctgttaatatggacttggactagataaccttaaattggcctattccttcaattaataaaatatttttgccatagtatgtgactctacataacatactgaaactatttatattttcttttttaaggatatttagaaattttgtgtattatatggnnnnnnnnnnnnngcttaagtctgtagtctttatgatcctaaaagggaaaattgccttggtaactttcagattcctgtggaattgtgaattcatactaagctttctgtgcagtctcaccatttgcatcactgaggatgaaactgacttttgtcttttggagaaaaaaaactgtactgcttgttcaagagggctgtgattaaaatctttaagcatttgttcctgccaaggtagttttcttgcattttgctctccattcagcatgtgtgtgggtgtggatgtttataaacaagactaagtctgacttcataagggctttctaaaaccatttctgtccaagagaaaatgactttttgctttgatattaaaaattcaatgagtaaaacaaaagctagtcaaatgtgttagcagcatgcagaacaaaaactttaaactttctctctcactatacagtatattgtcatgtgaaagtgtggaatggaagaaatgtcgatccctgttgtaactgattgtgaacacttttatgagctttaaaataaagctcatcttatggtgtcattttaaactcgcccccgcacattccgagcgcaccctgtcggaccgcccggccctggagaaactttttagacccctccccttcggcgtgccggccccataaggaaagtgaacaagcgcccatagctgttccccaggcaaaccgcggtcctcaataatggcttggatcccccccc

SEQ ID NO: 164276 - DNA, 443 bp, Homo Sapiens
aactaagcagctatccaaggaattctgagagtaggcaaacaaattttgccttcatggtacagttctcagtttttcttataggagaaatatggtatatgtttataagaatcttttatgagattatagatttcaatgctgtggatagtgtcttgcacccaaacaagaaagtccataatggagtgatcttccctcagcttcctatcgatttagttacctcttgaaagcacaaaaattaaaacattgccatatgttgaatttttaaaaagcacttggagtgagcggaacatatcctgataaatgccttttagagataggttcttgatattcagacatctgcagaaagtgttctggtccccaaagtcatttcacttcgaaatacaacacagctccttcaaacagcactttttccacataaatctagttgcctctccctgtggacattc

SEQ ID NO: 164277 - DNA, 263 bp, Homo Sapiens
gtgcctagcaggatcccaaagaactctgttgaatggaacatggctgcaccatacctggtgtgatctcaggtattgggtgggtttgctgtagatactcagtgaatctgggagaagggtgtagagatctattgatgacaaaaactgagaaatagaatgtagatcatcagcttgtgaggaggaagagtttggagtaatagagcagtcattgagtatgcaaggagctaggagaacttagaagtcttccttctcctagaccagtctct

SEQ ID NO: 164278 - DNA, 581 bp, Homo Sapiens
taaacacgaaagtattgacacaccccacagattttacatgtgtgtaaatgtttcactttaaaatctctatgacagatacacaggaaacatgagatggtttctgctaatgagtggcccttgagtacacacttagatgctgtctgccctgtaaatttggatctggtgccccagggcagtcaactcttctagcacaggctgaaaacacgtgtgtgtcaactgaggctcacaccacttggggaatgagcctgttttctttccaggtcaggccctggtgtgagatcaattttagggctcctaattggagcacagaaatgtatttggtcaaatttcattgaaggtgatttcttcctttttctgttgtacttcatggaaaaaccaagatggaacctgaaagttaatgtatccttgcttttagcaagagactcagtttctaataaactagtccctaaggacatatgccgcaattgagttaatttttacctttttacccctattggaaaactaaccatgggtgctggcacttataaatattactcctccggaactccagtgttggttaagttaccaggcttataccaggt

SEQ ID NO: 164279 - DNA, 767 bp, Homo Sapiens
catggcaggaatggagaacatcatgtccaaggacattcaatgtcaatgtgaaggtggatacaggtcccagggaagatctgattaaggtcctggaggatatgagacaagaatatgagcttattataaagaagaagcatcgagacttggacacctggtataaagaaccgtctgcagccatgtcccacggaggcagccacgtccagccacctgtgcagagcagacaaggtgacatccacgaactgaagcgcacattccaagccctggagattgacctgcagacacagtacagcacgaaatctgctttggaaaacatgttatccgagacccagtctcggtactcctgcaagctccaggacatgcaagagatcatctcccactatgaggaggaactgacgcagctacgccatgaactggagcggcagaacaatgaataccaagtgctgctgggcatcaaaacccacctggagaaggaaatcaccacgtaccgacggctcctggagggagagagtgaagggacacgggaagaatcaaagtcgagcatgaaagtgtctgcaactccaaagatcaaggccataacccaggagaccatcaacggaagattagttctttgtcaagtgaatgaaatccaaaagcacgcatgagaccaatgaaagtttccgcctgttgtaaaatctattttcccccaaggaaagtccttgcacagacaccagtgagtgagttctaaaagatacccttggaatagcttggatagctgctgttttgggcgc

SEQ ID NO: 164280 - DNA, 551 bp, Homo Sapiens
atgcacccattccgagatagtaacagatgtatgacctgccatattcagtaagaactgagattggaatatttaatgactccaattccagggtttcagaaccgcatcgcagcatctttcctgaaatgcactcagactcagccagcaaagacgtgcctggccgcatcctgctggatatagacaatgataccgagagcactgccctgtgaagaaagccctttcccagccctccaccacttccaccctggcgagtggagcaggggcaggcgaacctctttctttgcagaccgaacagtgaaaagctttcagtggaggacaaaggagggcctcactgtgcgggacctggccttctgcacggcccaaggagaacctggaggccaccactaaagctgaatgacctgtgtcttgaagaagttggctttctttacatgggaaggaaatcatgccaaaaaaatccaaaacaaagaagtacctggagtggagagagtattcctgctgaaacgcgcataggaagcttttgtccctgctgttaatgcgggcagcacctacagcaa

SEQ ID NO: 164281 - DNA, 386 bp, Homo Sapiens
cgcaacagagactcggtatcaaagaaagaaaaacatcgttgtgccaagccagactataatttaatgccatctggtacttagggaacatgtaagataggtaatacactatcataatctgtgataaataatatacatggtaaattcaagtcttgtactacattagggatttattttagtgtcagtaggttcttcctaagattagagttactgggtcaaaggtggagaataagggtctacgagtgtacgttgaccaagtgtcttccgtaaagactgtacgaacgtccagttccagtgtttgagagtgctggtctcactgactcttctccagcactgagggttttgtgtttctttatttgttttggttttaggtctttaccaatttgatt

SEQ ID NO: 164282 - DNA, 864 bp, Homo Sapiens
  misc_feature (626)..(627): n is a, c, g, or t
  misc_feature (686)..(686): n is a, c, g, or t
  misc_feature (775)..(775): n is a, c, g, or t
  misc_feature (789)..(789): n is a, c, g, or t
  misc_feature (799)..(799): n is a, c, g, or t
  misc_feature (823)..(823): n is a, c, g, or t
ggagggggttcctaagtattgcagtgggctgtagtagctgagttcttttccatgtatccgaaactgtatccagttacagtttactcaggaaaacggtagatcaattcagccatggtagtgctgtttggcagggattggttacggagagaactgctcatcaggccaaaactcaagccgtgccttttaggaggccaccagcagagggacttggtcctccttgtctggtacttgtgtacatgccggtgacctgaggactccactcacactggcgagcaaaaagggagcagtgattctcttttctctccccaccccctgccctttgttaccaacaccagttttccatgggggtacatgagtttctgaatttttaaaaaatgtttttggtttggtttttctggggactgataagtgctttaagcaatgtccatacctccgtcaagacgcccagcgtagtcattttctcgtatttttctgttcacagtatttgtgtgtgtgcttgtatttggcagctcaatttggctgtattatatattgagtgatgaattgatcctcttttttccctaagggatatgaattgtttttcttgtgttatattctgcttgtgaatagctgggagcaaacctggnngctgacacgcgtaagtaggggctgcaaagcgagaagagagccggtggagtgtacttgtnccctgacaggctggacctacctgagtctctgagcttttcagtcccaaatctttggcaaggctcaaaaatgcacagaacctttcctcttnttccccactccccntgggcagggnaccgggaccatccctacatgcaanatgctgtttcctccaggcccctcccattggccatgggaaaa

SEQ ID NO: 164283 - DNA, 482 bp, Homo Sapiens
aagtcgtctagaggatcccacagcagctatccaaagacttacgtatttctagacataaagcagtttgtcacaaattcatctttacagaaaaccagcatctagcttagcatcttgccccttataatttgtaggcttataaaggcaaatcattcccaccatcacttaacgccgggattatacacattctagaaatgattctgagaggagtgtatagtatggtgcctatctacactcacatgatattcttattcacgttttttttaaccataagtggcaaatattttaaaatatttgaaaaacactccagaatctagtacgctttatttttagactgaacctaaagtaggttgttcttttaacaaagggtttaattcgggtggggaatataacatatcaaaatacatgaacaaatggaaagttacttctagaaaagcaaagaaattgggtatcattttggtttcttggaatagctgctgtagttg

SEQ ID NO: 164284 - DNA, 774 bp, Homo Sapiens
agtttagttacagcatgtagatacagaaggtatctttatagtagttacaccaatatcctagtctgctggccccgaatataactaatagtattaggatgtaagcaatattaagatggtttttattattttttatacactgtgtgcttttactttttatttaaactacagcaaaaaactgattttttaactaaaattgaatggcgtttatcttaatgaccagttattgaccaaagtgtactcagaagatgttattatgtcccaatctaaggaatcctttaatttggggattaattttacttacacatgccatttcagtttcagttgcctcattctattacatcattcttgtcaagtctaagctttatcatgtctgaattcttttaacactgaatctgtgatgtaaaaatgtatgatgtgccataaattttattcataataaactaagttatagcctattgtaatctgtaaaacatttcttgtaaattacctaatttattttttcatttatgtacagtatcttatgtaaatttgaaaaatgtttgccatggcgcattctgtaaacattcccgtattcttttccttaatgcttatttgcatgaaggtaacttgggttttgcttgtttgtattggataaccattaagccaacttcagtttctctgcctttttttctgtagtttaaccatttctaattttgttcatattctaaatagatgttagaatcatactttttattttctactttctaaataaattatctaagttgtttactatga

SEQ ID NO: 164285 - DNA, 723 bp, Homo Sapiens
  misc_feature (662)..(670): n is a, c, g, or t
cataccagacagtctccatagccgcaccagcatggcaataagctttaaccaaacgaaaacaaacaaacaaaagcacttcgcaatttgttgctgcaaaacagggagagaaaagagtgtacaaacttgatggaatcacaacagtcaatataatttaagggacaataaagtcaataaggttgatggtgtttattgtttaaaaagttgaattctgctgtttgcttggggctgtttagaaagttgcattctgctgtttgcttggacaccgtaccactgaacaaactccacagagtcttgctatccgccagcaggggtgccgtccaaactcacggcaaataagcggcatcaggggctcaccatccacaacaggaggtgttttattttcatggatgtggttgaaatacaatttcttcagcaaactcagcaaaaacttttcaggggcaaaaatgaactctgcacttaaagaaaaatagcaaatgaaaacacaaaatcctaacaagtaaataaacgctctgcatcagcacactggtatcaaaacacacatccacagcacgtcctaatcctacgggaaacaatccttgcttatcagaggtgcatatctaaattcaatagcttaccaatatcttcttgggagtaggccaaaaggaaacagaaaacccacattnnnnnnnnngtttcttttcgctaaacgttttcctgaagccgaatctgagttaggtctacctg

SEQ ID NO: 164286 - DNA, 372 bp, Homo Sapiens
  misc_feature (18)..(18): n is a, c, g, or t
gtccttaaattccctttntcctttttaataaaaaaagaactattaaaaatggattggacaaattttgagttaaaaaattgttaaaacattctctatatttaatttcaattttataatagattacaggaagatgcttatgaaacaaatacatttgtttcagtacatgtctttaaatgatagacttataagtatgtaaacaactatataataaaaggtttccaaacgctgcctgtaagaaatcaggcaaattttaccataagcaataaaccattccaagccttccagacagtctccatagccgcaccagcatggcaataagctttaaccaaacgaaaacaaacaaacaaaagcacttcgcaatttgttgctgca

SEQ ID NO: 164287 - DNA, 627 bp, Homo Sapiens
cccagctatgtgataagattaaacccgcttcctagaccacccagaaatctacaggtcattcctggagatcctgcacacgtaccagaaggagcagctgactacgaggggccggccattccgaggcatgtctgaagaggaggtgttcaccgaggtggccaacctcttccggggccaggaggacctgctctcagagtttggacagttcctgcccgaagccaagcggtctctgttcacaggaaacgggccgtgcgagatgcacagcgtgcagaagaacgagcacgacaagaccccggagcacagcaggaagcgctcccggccctcgctcctccgccccgtgtctgtacccgccaagaaaaaaatgaaacttcgtggtaccaaagacctgtccatcgctgcagtggggaagtacgggactctgcaggaattttctttctttgacaaggtccgccgggtgctgaagagccaggaggtgtatgaaaacttcctccgctgcatcgcactcttcaaccaggagctggtgtctggctctgagctcctgcagctcgtcagcccatttctggggtgacgcagctgacttcccagggctccctaggggggttctggtcctgctctactccatctacttgc

SEQ ID NO: 164288 - DNA, 770 bp, Homo Sapiens
ggggtctgagcgcccggcggaaaaccgaagttggaagtgtctcttagcagcgcgcggagaagaacggggagccagcatcatggcagaacaggatgtggaaaacgatcttttggattacgatgaagaggaagagccccaggctcctcaagagagcacaccagctccccctaagaaagacatcaagggatcctacgtttccatccacagctctggcttccgggactttctgctgaagccggagctcctgcgggccatcgtggactgtggctttgagcatccttctgaggtccagcatgagtgcattccccaggccatcctgggcatggacgtcctgtgccaggccaagtccgggatgggcaagacagcggtcttcgtgctggccaccctacagcagattgagcctgtcaacggacaggtgacggtcctggtcatgtgccacacgagggagctggccttccagatcagcaaggaatatgagcgcttttccaagtacatgcccagcgtcaaggtgtctgtgttcttcggtggtctctccatcaagaaggatgaagaagtgttgaagaagaactgtccccattgtcgtggtggggaccccggggccgcatcctgggcgctcgtgcggaataggagcttcagcctaaagaatgtgaagcacttttgtgctggacgagtgtgacaagatgctggagcagctggacatgcgggcgggatgtggcaggagatcttcccgcctgacacccacccaaaaaaccgtgggatgaagggtcaag

SEQ ID NO: 164289 - DNA, 845 bp, Homo Sapiens
cgacaccgtactagaacaatccaccagagtaatgcaaattacatgagacataaatgtcacagaaaaaaagtaaaagataagggaatacatggtttactccagtcatagttcaacttcttaacaaaatgtgagtattccctttggatatgtctgaaatgtaagtatgttttttgcactaagacagccttctataatcatgtgataatgaaatcataatgacaaagttcatcttcccacagtttttgctggccaatctctctaacctcagcctaggtaatttggtggcttgccctcaacatttccttaactagaataaacatagagaaatagaattagtaataatccttttacataaataccaaaaatcatggcataacaactccccaaaaaggaaaggtataaaagaaatggatgaggagaaagctaataaagaaaagtaggcaagatgtctcagattctccctggggtagatcttctcagggcgataaagaaaacgtcttcccaaaaaacccctttagacagaatctgagatggcttaaaatagctgctccagggcaaagcaatgcctgcttaaccaggaataacatactacttctaagtcctgtatagaggtgctcctgcggcagcagacagctcgtctaccatctgactaggtaccacaagagtttttgctttctgtattttaaagacaaagatctgcccatcacctatatttttatttatctcatgggattttcgtattttcctgggaatgcaggcactctgttcttatcatggctgaaatacggtaggcttaatacttcacaattatatagcacctttcacccaagggcctgttcgtgtag

SEQ ID NO: 164290 - DNA, 859 bp, Homo Sapiens
agctggtagggtccggaattcccgggatatcgtcgacccacgcgtccggggagaatctgagacatcttgcctacttttctttattagctttctcctcattcatttcttttatacctttcctttttggggagttgttatgccatgatttttggtatttatgtaaaaggattattactaattctatttctctatgtttattctagttaaggaaatgttgagggcaagccaccaaattacctaggctgaggttagagagattggccagcaaaaactgtgggaagatgaactttgtcattatgatttcattatcacatgattatagaaggctgtcttagtgcaaaaaacatacttacatttcagacatatccaaagggaatactcacattttgttaagaagttgaactatgactggagtaaaccatgtattcccttatcttttactttttttctgtgacatttatgtctcatgtaatttgcattactctggtggattgttctagtactgtattgggcttcttcgttaatagattatttcatatactataattgtaaatattttgatacaaatgtttataactctagggatataaaaacagattctgattcccaaaaaaataaagacactaacaaaaagggggggacgctctagaagttttccctcggggggcccaaagtttacgcgttcacccgtctttctgtgtccacagggggtccctatagggagtcggatttatacgcttaggcactgccccgtcgttttaccaaacggtcgttgacctgcggcaacaccctgctacctggggcaccttggtgacgggacccttacttctggggggtgtgaccttttttggccaccttc

SEQ ID NO: 164291 - DNA, 1524 bp, Homo Sapiens
aagcccctgccctggggagaaagtagttggctagtagtgtgatgctcccttgatggggtccagagagcctccctgcagccaccagacttggcctccagctgttcttagtgacacacactgtctggggccccatcagctgccacaacaccagccccacttctgggtcatgcactgaggtccacagacctactgcactgagttaaaatagcggtacaagttctggcaagagcagatactgtctttgtgctgaatacgctaagcctggaagccatcctgcccttctgacccaaagcaaaacatcacattccagtctgaagtgcctactggggggctttggcctgtgagccattgtccctctttggaacagatatttagctctgtggaattcagtgacaaaatgggaggaggaaagagagtttgtaaggtcatgctggtgggttagctaaaccaagaaggagaccttttcacaatggaaaacctgggggatggtcagagcccagtcgagacctcacacacggctgtccctcagggagacctcatgccatggtctttgctaggcctcttgctgaaagccaaggcagctcttctggagtttctctaaagtcactagtgaacaattcggtggtaaagtaccacacaaactatgggatccaaggggcagtcttgcaacagtgccatgttagggttatgtttttaggattcccctcaatgcagtcagtgtttcttttaagtatacaacaggagagagatggacatggctcattgtagcacaatcctattactcttcctctaacatttttgaggaagttttgtctaattatcaatattgaggatcagggctcctaggctcagtggtagctctggcttagacaccacctggagtgatcacctcttggggaccctgcctatcccacttcacaggtgaggcatggcaattctggaagctgattaaaacacacataaaccaaaaccaaacaacaggcccttgggtgaaaggtgctatataattgtgaagtattaagcctaccgtatttcagccatgataagaacagagtgcctgcattcccaggaaaatacgaaaatcccatgagataaataaaaatataggtgatgggcagatcttttctttaaaataaaaaagcaaaaactcttgtggtacctagtcagatggtagacgagctgtctgctgccgcaggagcacctctatacaggacttagaagtagtatgttattcctggttaagcaggcattgctttgccctggagcagctattttaagccatctcagattctgtctaaaggggttttgggggaagacgttttctttatcgccctgagaagatctaccccagggagaatctgagacatcttgcctacttttcttaattagctttctcctcatccatttctttaatacctttccttttggggagtgtatgccatgatttgggtattatgtacaggatttttctaattctatgccctatgtaaatcctagttaaggaatgttgagggcaagcaccaa

SEQ ID NO: 164292 - DNA, 1171 bp, Homo Sapiens
ccagagagactctcacatctggactcatccggaaacactgatgcttgggcgtactccaaagttgttcaggaacgcctcgtgcaagccgaatactggcatgaccccataaaggaggatgtgtatcgcaaccacagcatcttcttggcagatataaatcaggagcggggtatcaatgagtcctacaagaaaaacctgatggccctgaagaagtttgtgatggtgaaattcctcaatgattccattgtggaccctgtagattcggagtggtttggattttacagaagtggccaagccaaggaaaccattcccttacaggagacctccctgtacacacaggaccgcctggggctaaaggaaatggacaatgcaggacagctagtgtttctggctacagaaggggaccatcttcagttgtctgaagaatggttttatgcccacatcataccattccttggatgaaacccgtatagttcacaatagagctcagggagcccctaactcttccaaaccacatgggagacagtttccttcatgcccaagcctgagctcagatccagcttgcaactaatccttctatcatctaacatgccctacttggaaagatctaagatctgaatcttatcctttgccatcttctgttaccatatggtgttgaatgcaagtttaattaccatggagattgttttacaaacttttgatgtggtcaagttcagttttagaaaagggagtctgttccagatcagggccagaactgtgcccaggcccaaaggagacaactaactaaagtagtgagatagattctaagggcaaacatttttccaagtcttgccatatttcaagcaaagaggtgcccaggcctgaggtactcacataaatgctttgttttgctggtgatttaaccagtgcttggaaaaatcttgcttggctatttctgcatcatttcttaaggctgccttcctctctgagtacgttgccctctgtgctatcaatcatcttatcatcaattattagacaaatcccactggcctacagtcttgcttctgcagcacccactttgtctcctcaggtagtgatgaattagttgctgtcacaaaaggagggaagtagcacccaaattaaattgcttaagagaggaaatgtacatgttgtataacttagggacggaagatca

SEQ ID NO: 164293 - DNA, 1008 bp, Homo Sapiens
ggggtgacacagcgaagatggcgtcgcccggctgcctgtggctcttggctgtggctctcctgccatggacctgcgcttctcgggcgctgcagcatctggacccgccggcgccgctgccgttggtgatctggcatgggatgggagacagctgttgcaatcccttaagcatgggtgctattaaaaaaatggtggagaagaaaatacctggaatttacgtcttatctttagagattgggaagaccctgatggaggacgtggagaacagcttcttcttgaatgtcaattcccaagtaacaacagtgtgtcaggcacttgctaaggatcctaaattgcagcaaggctacaatgctatgggattctcccagggaggccaatttctgagggcagtggctcagagatgcccttcacctcccatgatcaatctgatctcggttgggggacaacatcaaggtgtttttggactccctcgatgcccaggagagagctctcacatctgtgacttcatcccaaaaacactgaatgctggggcgtactccaaagttgttcacgaacgcctcgtggcaacccgaatactggcatgaccccactaaaggaggatgtgtatcgcaaccacagcattcttctgggcaaatataaaccaggaccggggtatcaaggaatcctacaagaaaaacctgatggccctgaagaagttggtgatggtgaaattcctcaatgattccattgtggaccctgtagattcggagtggtttggattttacagaagtggccaagccaaggaaaccattcccttacaggagacctccctgtacacacaggaccggctggggctaaaggaaatggaccatgcaggacagctagtgtgtctggctacgaaagggaccatctcagttggctgaagaatggtgtatgccacattatacattccttggtgaaaccggttagtcacatagaggtcaggagccctattttccaaccatgggaagttcttatgccagcggtcgatca

SEQ ID NO: 164294 - DNA, 673 bp, Homo Sapiens
tctagaggatcccggcacgaggcataagatcctaaattgcagcaaggctacaatgctatgggattctcccaggaggccaatttctgagggcagtggctcagagatgcccttcacctcccatgatcaatctgatctcggttgggggacaacatcaaggtgtttttggactccctcgatgcccaggagagagctctcacatctgtgacttcatccgaaaaacactgaatgctggggcgtactccaaagttgttcaggaacgcctcgtgcaagccgaatactggcatgaccccataaaggaggatgtgtatcgcaaccacagcatcttcttggcagatataaatcaggagcggggtatcaatgagtcctacaagaaaaacctgatggccctgaagaagtttgtgatggtgaaattcctcaatgattccattgtggaccctgtagattcggagtggtttggattttacagaagtggccaagccaaggaaaccattcccttacaggagacctccctgtacacacaggaccgcctggggctaaaggaaatggacaatgcaggacagctagtgtttctggctacagaaggggaccatcttcagttgtctgaagaatggtttaatgccacatcataccattcctggatgaaaccgtatagtcacatagagtcaggagccct

SEQ ID NO: 164295 - DNA, 611 bp, Homo Sapiens
cggacgaggctaagatcctaaattgcagcaggctacaatgctatgggattctcccaggaggccaatttctgagggcagggctcagagatgcccttcacctcccatgatcaatctgatctcggttgggggacaacatcaaggtgtttttggactccctcgatgcccaggagagagctctcacatctgtgacttcatccgaaaaacactgaatgctggggcgtactccaaagttgttcaggaacgcctcgtgcaagccgaatactggcatgaccccataaaggaggatgtgtatcgcaaccacagcatcttcttggcagatataaatcaggagcggggtatcaatgagtcctacaagaaaaacctgatggccctgaagaagtttgtgatggtgaaattcctcaatgattccattgtggaccctgtagattcggagtggtttggattttacagaagtggccaagccaaggaaaccattcccttacaggagacctccctgtacacacaggaccgcctggggctaaaggaaatggacatgcaggacagctagggttctggtacagaaggggacatcttagttgtctgagaatgtttatgccacatatacattcttg

SEQ ID NO: 164296 - DNA, 670 bp, Homo Sapiens
ttgaaactaggctccctggcctatttactatacggttcatccagaatgtatattgggcataaccattcttcaacactgaagatgtccccttctgtagccagaaacactagctgtcctgcattgtccatttcctttagccccaggcggtcctgtgtgtacagggaggtctcctgtaagggaatggtttccttggcttggccacttctgtaaaatccaaaccactccgaatctacagggtccacaatggaatcattgaggaatttcaccatcacaaacttcttcagggccatcaggtttttcttgtaggactcattgataccccgctcctgatttatatctgccaagaagatgctgtggttgcgatacacatcctcctttatggggtcatgccagtattcggcttgcacgaggcgttcctgaacaactttggagtacgccccagcattcagtgtttttcggatgaagtcacagatgtaagagctctctcctgggcatcgagggagtccaaaaacaccttgatgttgtcccccaaccgagatcagattgatcatgggaggtgaagggcatctctgagccactgccctcagaaattgggcctccctgggagaatcccatagcattgtagccttgctgcaatttagatctttgcctcgtccgggatcctctagat

SEQ ID NO: 164297 - DNA, 730 bp, Homo Sapiens
tggtcagagctgttctagagtatacccggatgcaggataaagatcctaattgcagcaaggtacaatgctatgggattctcccagtgacggcaatttctgagggcagtggctcagagatgcccttcacctcccatgatcaatctgatctcggttgggggacaacatcaaggtgtttttggactccctcgatgcccaggagagagctctcacatctgtgacttcatccgaaaaacactgaatgctggggcgtactccaaagttgttcaggaacgcctcgtgaaagccgaatactggcatgaccccataaaggaggatgtgtatcgcaaccacagcatcttcttggcagatataaatcaggagcggggtatcaatgagtcctacaagaaaaacctgatggccctgaagaagtttgtgatggtgaaattcctcaatgattccattgtggaccctgtagattcggagtggtttggattttacagaagtggccaagccaaggaaacccattcccttacaggagcacctccctgtacacacaggaccgcctggggctaaaggaaatggccaatgcaggacagctagtgtatctggctacagaaggggaccatcttcagggtctgaagaaggtttatgccacatcataccattcttgctgacaccgtaagttcacataagctcggagccctaattttcaaccaatggggacagttcttatgccagctgagtcagatca

SEQ ID NO: 164298 - DNA, 544 bp, Homo Sapiens
cacgaggctaacagatcagatcttagatctttccaagtagggtatgttagatgatagaaggattagttgcaagctggatctgagctcaggcttgggcatgaaggaaactgtctcccatgtggtttggaagagttaggggctccctgaactctattgtgaactatacgggtttcatccaaggaatggtatgatgtgggcataaaaccattcttcagacaactgaagatggtccccttctgtagccagaaacactagctgtcctgcatagtccatttcctttagccccaggcggtccttgttgtgtaccaggggaggtcttcctgtaagggaacatggtatccttggcttggccacttctgtcaaatccaaaccagtccgaatctacagggtccacaatggaatcattgaggaatttcaccatcacaaacttcttcagggccatcaggttattcttgtaggagtccattgatacccgctcctgatttatatctgccagaagatgctgtggttggatacaatcctccttatggggcatgccagttcg

SEQ ID NO: 164299 - DNA, 672 bp, Homo Sapiens
ttttttgacccctcgatcccagagagagctctcacatctgtgacttcatccgaaaaacactgaatgctgggcgtactccaaagttgttcaggaacgcctcgtgcaagccgaatactggcatgaccccataaaggaggatgtgtatcgcaaccacagcatcttcttggcagatataaatcaggagcggggtatcaatgagtcctacaagaaaaacctgatggccctgaagaagtttgtgatggtgaaattcctcaatgattccattgtggaccctgtagattcggagtggtttggattttacagaagtggccaagccaaggaaaccattcccttacaggagacctccctgtacacacaggaccgcctggggctaaaggaaatggacaatgcaggacagctagtgtttctggctacagaaggggaccatcttcagttgtctgaagaatggttttatgcccacatcataccattccttggatgaaacccgtatagttcacaatagagctcagggagcccctaactcttccaaaccacatgggagacagtttccttcatgcccaagcctgagctcagatccagcttgcaactaatccttctatcatctaacatgccctacttggaaagatctaagatctgaatctttagcctcgtccgggatcctctagacgaccg

SEQ ID NO: 164300 - DNA, 459 bp, Homo Sapiens
agctatccaaggagatatctccttcttggtgctaattttctagatgataataggctagtttagatttcttgctcattttcagaataactttccaggaagagatggcatttagaacttcagctttggtgctcaggtataaagccaattaaggtacaattgtaccataaagggaacaatctgtttctgattgcacagtttctaatttttaaaactgatgtggtttgcatttcataaaaggcaaagtttacagaaccataaacattctcaattttctttatgctagacatataaattatttttcaaactgtatagatttggggtaaaaagttgtctcagttcctctcccaattgcaatgagaaaaaaaagcttaatttttacattatacttaattttctaaaccatgtaactccattgacacatttttcaacttaaggtctgcatagcagacttttaataag

SEQ ID NO: 164301 - DNA, 264 bp, Homo Sapiens
caggtgcacagaagcttgtgcagactcttctaccccttctggatcagatgagagactccacctttgcagcctagctgatcctcaagcacgaattcaacaataacatcctatctatttccccacataattatgcagctaatcctggccctctctgacaatcttgagaaaaaattccagctttcatcattcgaattcctggcttgaaaaaaaatatcgagtaaataaaaatcaaagctcctcttggatagctgctgttgttggtcc

SEQ ID NO: 164302 - DNA, 493 bp, Homo Sapiens
gacagagattaggggctgggaagagtagaggctgggagtggttaagaagataaaaacagctctttccttccctggaagtataataaaattttcaacagactctttcaaccaaaacttgtttcaaagcaaactgaattctgtatatggcacagcaataatattcccttttaggttttatccacgtgcctgctgactccatgatagaaactgtataaaatatataaaaatattcccaaggcaacttcatataagttttcagtctcttagagctcttcaagtcaagtcattgctgctactctgtgccactgcgttctctcttcacaggtgttgccggcacctccccattgacggtttcagccccactaacagacatcaggcttctccgttccttctggtttgacttgtgctccacttttgtaactctaaatctgccaacagaaaggaccgtgacctcgccttggcgccgtgtctgctcttgatagctgctgttgta

SEQ ID NO: 164303 - DNA, 431 bp, Homo Sapiens
  misc_feature (30)..(30): n is a, c, g, or t
  misc_feature (49)..(49): n is a, c, g, or t
gtgaaaaggaggggaatatagtattggaantttatagctagttaaaacnataagtatccatcctaatttgggtgtttattttgccagatgagaaaacagacctagaaccgtggcatgttttgcctgaaacatacagtgagttagagacagggcctaagatagcttctagcatcagatcaatcccaagaatccatcagcaacctcagaccaacccaagaagataatttaaatctatactgcttattggtcaatatatttggttctagtattaataaagaaaaatgttattaaaatagcatacatagtagtaaaataaaatacaaaaagtgtgttgatttatagctgtttgagatgataaaagtgaagcaaagcctgttaaatcattggaagacttggaaaattattttaaataaaataattacatgtaattc

SEQ ID NO: 164304 - DNA, 471 bp, Homo Sapiens
gtcctaacatacagcagctatccaagagatccttgcgttctagactctagaattaaatggggtaaagggttatgcttttaagaactataagctgaaatgatttacttcagttcaatatagaatatttgtcagtcaagataacaatcaatgtgtacaaaaatttacataacaagaggaaaaataggcagtgcagcacctttagaaaaataattaaaagtttcattgcatttacaggtaagtgccacactgagaatttacaatacagtaatttactgcaatcacaggggagttccataaagaaacaaagctcttacactccaggtttttggaaggtgttattggaatgcttaactgaaaccacagaacttgtatatccttaggattgagttgatgaaggtcataaaaggttttcatagcatctattatataaaaggagttcactgcacttggatagctgtgtagtaccgctga

SEQ ID NO: 164305 - DNA, 841 bp, Homo Sapiens
  misc_feature (413)..(413): n is a, c, g, or t
gtctaagaggatacacagaaatttttaagtggttacctccacggaatgggattaggggatcagaggtgagggaactcatggtttggctatttctcgttctttctgcactgtttcaaatttttacaagtgtatgttattgtacttttaaaaagattagcttggcaacaagtctagcctgaaatgggtgctattttgactagtctgagtgaaaagtgaggatttaaatgaagtaacccctaaactcagccagtcccatgtttttttaacacttggaatatctaattccatttacactgcattcttcaaatgtaattttcaaagatgccttttgcctcacccctggcttttaagtattattatagacctttgggagacctcacggaaacaagcaatccccctaaattctcgcccanggaaagtacccttggattaaatggtttttgagaaccttgagagtgtatattctatgaaatggaagaaacaagaactagacagagtcacaaatgctgttgatcacagacaatctctgccatccataaggtaaatgtaatacatctggcgacctgctgagtgtgaacttgcagcaggtgaggaaggaactctgaactctcacaatcttgtttcttcatttcccagagagaaactcggcaaagagaaaaaggacatttccccccaggttatctgaaagaatttcaatgcttacctttaatcatgtgacattgtttatcttggattaaaagaaaagaaaatgtatttattttgtgcatattttcaataaaatatataaaatcgagttggtatatagtgccaaataccattaattaaaaatattttaacctga

SEQ ID NO: 164306 - DNA, 1113 bp, Homo Sapiens
acaagtttcgtttccgtttggttgttgtgtttttgggtgtggaacctttaataaaagtaaaaaatgaatgcaaaaagaacacaatgttgaaaacttagtatgaatgtgaacctcactagatgttcaaatctggtagagtgcaaattttgttcatactattttacatttttacaaactcaaatcactttggttcatatattttctataaactattggcaaaaaaatcctcaaatttacattcttttggctacattatttctaacagatatagatttacttccggtttcggagagaaagacttattgtgtgtgcgtgatcaagtctgttttaaagattcactcgctgctttcatctaataacttctggtttttcataaaatgctgacatcttcattggaaatttttttcatgtaactgttttcattttcagaaaatatataagggggtcattccaaagttcagaatgatcctatttttttaaaaaacaaaattcctgtaaaacaaattaactccaggaacttaaaatttactccaagacatttccctcaaaacaaagcaaaaaaccccagcaaagatcgttacatcacaaaaccaaacacaaagaccagcgctcacaggcaagtacctctaagcttccattctgctgactggtggcttccatttaaaaggagtcttttaatcaagccactttcacagaatttaaaacaaaccaaacacatgtaaattgcaaaatacaaaaaggtaaatttataagtaaaaatgaccaaacccacaaaactggagtatttcgaaggttgagggttcagtggagggtgtaacacgaaaggaacttcacaactgaaagaaatcattgccgagtttcctccaggcagcactgaaatgaatggagaaccttctctcgaacatctcaccacgttcacaaaaaataccatatttaagcagatacaaggctccagcattggttttcatcatacattgcacttgaagtttaagacccaatacttgcaaattaggtctggtatggtctatgccataaaaatgcaatacattgtgctcacccatatcattgactagaaacaccacacgtttaatgccatgccatatgcactctcct

SEQ ID NO: 164307 - DNA, 1426 bp, Homo Sapiens
gcttcgaggacgcattcaggagaagaaggatacgacatggctcgcctgtggcaagagaaggagttcagcgaacgagaaaaatacaaagaaacacatttccagagttccctgcaccccgtgcttatgcagatagttactgttcggcgtattacaagatgaagccaagagtgacgaaagaagctgtatctactccatcacgaatggcccacagggatcaggaatggtatgatgctgaaattgccagaaaactgcaagaagaagaacttttggctacccaggtggacatgagagccgctcaagtagctcaagatgaagaaatcgctcgacttctaatggctgaagaaaagaaagcttacaaaaaagccaaggagcgggagaaatcatctttggacaaaagaaagcaagaccccgagtggaagccaaaaacagctaaagcagcaaattcaaagtcaaaagagagtgatgaacctcaccattctaagaatgaaaggccagcacggccaccaccacctatcatgacagatggtgaagatgcggattacactcattttacaaaccagcagagttccacacggcatttctcaaaatcagagtcctctcataaaggttttcattacaaacattaaaaacctaggaatctgccttgaaaatggactcactatagcaaatattactgggtgatacagaatgaattctacacttactttttttctcctgtgtttgcattcctgggatttatcctcaagtgcatttctgaccataagtaattttaattcatttcaaatgttttggttattcatgatcacttgggcagtataagaaaatgtagcttctgaatattggccacctctatgctgcatatacttcttgggatatagtatctaagacctttgtaaactgccattttgttaggtatggagtttggtatctagggagtaggccttatttagcaattcaaattttatggagatgaatgatcaacgtgaaacaatgtttgaatgcgtccggacgcattcacaagaattagagaaagtccttacacaactgcatgcaggggtctgctggagaaaaagacagcccaggagagtgcaacagatttaacaggaaacgaattaaaatgtagaaactgattttcaacttacttcgaagagtacataagaaattgcaaactactctctatgcaacattttgaatgctaagtggaaaaccatgcattttggcacgaaatttattaaagattataccatactaattaattactattacttcgttactgaatggtcgtcgaagttgcgacggacgcattcacatcatgcctttcctgaacccagatggctttgagaaggcagcgtctcatcctggtgactcaaggtcagttttgtggcttgatgctatgctctctgcgtatagatctgtgatctggcta

SEQ ID NO: 164308 - DNA, 1580 bp, Homo Sapiens
  misc_feature (1392)..(1392): n is a, c, g, or t
attggggccggggacgcggagcaggtggccgcggcggggcagctgggccgccagcttggtgcctcggggaccgtctcccgctgctttggtcaccagcccctgcccgcccgacccgctccgttctccggcctgcgagccctgccggccggactttgcgccgcgtccggcgctgctgctgcgctcggggccccgctcggcgccggcggtgaccgggaagcccgcgttaaaggggcaaccgggaccctggcccggtatggctgaagtcagcatcgaccagtccaagctgcctggagtcaaggaagtatgccgagattttgccgtcctggaggaccacaccctggcccacagcctgcaggaacaagagattgagcatcatttggcatccaacattcagcggaaccgtctggtacaacatgatctccaggtggctaagcagctccaagaggaagacctcaaagcccaagcccagctccagaagcgctacaaagaccttgaacaacaagactgtgaaattgctcaggaaatccaggagaagctaaccattgaggcagagagacgacgcattcaggagaagaaggatgaggacatagctcgccttttgcaagaaaaggagttacaggaagagaaaaagagaaagaaacactttccagagttccctgcaacccgtgcttatgcagatagttactattatgaagatggaggaatgaagccaagagtgatgaaagaagctgtatctactccatcacgaatggcccacagggatcaggaatggtatgatgctgaaattgccagaaaactgcaagaagaagaacttttggctacccaggtggacatgagagccgctcaagtagctcaagatgaagaaatcgctcgacttctaatggctgaagaaaagaaagcttacaaaaaagccaaggagcgggagaaatcatctttggacaaaagaaagcaagaccccgagtggaagccaaaaacagctaaagcagcaaattccaagtcaaaagagagtgatgaacctcaccattctaagaatgaaaggccagcacggccaccaccacctatcatgaccagatggtgaagatgcggattacactcattttacaaaccagcagagttccacacggcatttctcaaaatcagagtcctctcataaaggttctcattacaaacattaaaaacctaggaatctgcccttgaaaaatggacctcactataggccaaattatcacctgggttgttccggatcggattcctacactatcacttttctctccgtgtgtgcgcatccctgggatttatccctcaagtgcatttctgaccataagtaattttaattcatttcaacatgtggggttattcatgatcacttgggcagtataagaaaaatgtagnttctgactattggcacctctatgcctgcatataacttctggggatatagtattctaaagacctttcgtaacctgccatttggtaaggtatggaagttaggatctaagggagtaggcccttattcagcaagttcaaatccatggagatgcatgatcccggtgaaccagttggattgcaagcgaattacg

SEQ ID NO: 164309 - DNA, 719 bp, Homo Sapiens
atagctgtctagaggatccgtaggcggagattgtcacgctgatcatgcactagtacatgtaggcttctcccattttgcaaagcttagcaattggtaggaaactttgatcttgttgtccaagaaaaggaatgtctgacaggcttaagctttcgtccccttgcacttagactcgaagttagtaaatccttaaaggctttttaatagcagacttccaaaagattgcatttaggatttctagcatgcttttaatttcagattttcagctgacattagctatagtatacagtaggttaagactcatgtctatgactttcactctaagactggcaaaaggacagcagtcttctatgtttagtcaatattcatttcagtagaagataatcttatctaatttttgagaccagaataagccttttaaggtaaacctcaaaattatcattttatggtaatactgaccattttagtcccctaggtttgacatgggagatagtgactacactggtgtctgacttttttcctagagatttctccctgaaaaatacaagggctgttggtgagagcagacttgaggtgatgatagttggcctctggtctacaaagatttcataactccttggaaagcttcttataatcattcttaacttcttggtagctagaaatttagagtagttgaaatctttaggaatgtgaggctggaggtattgacggagtcacgatgg

SEQ ID NO: 164310 - DNA, 1322 bp, Homo Sapiens
tggcatagctgttcctgatgtgacctcgtgatctgcaaatacctccagcccctcagaagttccttcctaaagatgtcaactactctaaatttctagctaccaagaagttaagaatgattataagaagctttccaaggcgttatgaaatctttgtagaccagaggccaactatcatcacctcaagtctgctctcaccaacagcccttgtatttttcaggaagaaatctctaggaaaaaagtcagacaccagtgtagtcactatctcccatgtcaaacctaggggactaaaatggtcagtattaccataaaatgataattttgaggtttaccttaaaaggcttattctggtctcaaaaattagataagattatcttctactgaaatgaatattgactaaacatagaagactgctgtcctttggccagtcttagagtgaaagtcatagacatgagtcttaacctactgtatactatagctaatgtcagctgaaaatctgaaattaaaagcatgctagaaatcctaaatgcaatcttttggaagtctgctattaaaaagcctttaaggatttactcaacttcgagtctaagtgcaaggggacgaaagcttaagcctgtcagacattccttttcttggacaaaaagatcaaagtttcctacaaattgctaagctttgcacaagggagaagcctacatgtactagtgcatggaatcagtttcatcttatttcatggggactcttctcccactggaaagaaacagaatgaggaatgaatcttaattggtctcttcatcagaagtggtaaacttggtctctatattcacgaagtcagacagttttttaagcagactgtggaagcagacagaaccagcttcctgtagccacagaccactacatggtatctaagctaaagcaaagatgaacaattatccagattcacttgaactgtactaaagggcaaggttcaccactacaaaaaggaagttgtctaaaagcaagaattcaattaacgctgggtaagaaaagtcaaaacactaatgagttgtccatgaagccaactgctaagaacgcgctcaactatacgcgacatgaagacactatgcacgaagccttacttggcgagtctgaatttctattaactaagggcagagtgagggagaacaaagagctacttccgtaacattttagtatccagatagtacagcagaaacggttcccggggcaatgggtgctgcattaatcacactgattaaagcagatgaatcattcgtttttctccctccgtgccgagattacgccaccccaggcctccgctaccttacgga

SEQ ID NO: 164311 - DNA, 955 bp, Homo Sapiens
  misc_feature (93)..(93): n is a, c, g, or t
  misc_feature (104)..(104): n is a, c, g, or t
  misc_feature (567)..(575): n is a, c, g, or t
  misc_feature (737)..(750): n is a, c, g, or t
  misc_feature (763)..(862): n is a, c, g, or t
  misc_feature (885)..(909): n is a, c, g, or t
ccgccctcttgtgggggtgtttatttaaagcggtgtcggcgatccggatatgtcgacagcgtcgatcttatctatttgagaccagaaaataangcctttttaanggtaaacgctcaaatattatcagttgttatggtaattactgaccattaagtccctaggtttgacatgggagatagtgactacactggtgtctgactataatcctagagatttctccctgaaaaatacaagggctgttggtgagagcagacttgaggtgatgatagttggcctctggtctacaaagatttcataactccttggaaagcttcttataatcattcttaacttcttggtagctagaaatttagagtagttgaaatctttaggaatgaacttctgagggccaaaaaatgtgactgacgggaacaattcttaaactgattaactagctgtaatatagttttgtgaatttattgcactgatgttgtaccttgtggtatatctgtccctattaaataagtgttgttttctcctctttaatattgctgtgaacagtggtgcccattgtagcatatgtttgannnnnnnnnattatttcataagaaaactacgttaattttaccttactttcattgtaaataagcctgtcttcctatctggattttttgtgtgcatacatattctactgattaactacttttgcagttttaatcctgtattatttcttctactttgttttgtgtaaaaggggnnnnnnnnnnnnnngctggaatcttcnnnnnnnnnnnnnnnnnnnnnnnnnnnnnnnnnnnnnnnnnnnnnnnnnnnnnnnnnnnnnnnnnnnnnnnnnnnnnnnnnnnnnnnnnnnnnnnnnnnnttttggggccccctcggcccccnnnnnnnnnnnnnnnnnnnnnnnnnggggccggggccccaaagggaagggaaaaggggctaaactttttcc

SEQ ID NO: 164312 - DNA, 2141 bp, Homo Sapiens
  misc_feature (174)..(174): n is a, c, g, or t
  misc_feature (2103)..(2103): n is a, c, g, or t
tcatatccaacaagttggtgaccgttgttatgatgaaaaaatgtatgatgctgctaagttgttgtacaataatgtttccaattttggacgtttggcatctaccctggttcacctgggtgaatatcaggcagctgttgatggggctaggaaagctaacagtactcgaacatgganagaggtctgcttcgcctgtgtagatgggaaagaattccgtcttgctcagatgtgtggacttcatattgctgtacatgcagatgaattagaagaacttatcaactactatcaggatcgtggctattttgaagagctgatcaccatgttggaagcagcactgggacttgagcgagctcacatgggaatgtttactgaattagctattctatactctaaatttaagcctcagaaaatgagggagcacctggagctgttctggtctagagtgaatattcccaaggtgctaacacctgcagaacaagctcatctgtgggcagaaatggtgttttggtatgacaagtatgaagaatatgataatgccataattaccatgatgaatcatccaactgatgcctggaaagaagggcaattcaaagatatcattaccaaggttgccaatgtggaactatactacagagcaatacagttctacttagaattcaagcctctgttgttaaatgatttgctgatggtgctgtctccacggttggatcacactcgtgcagtcaattatttcagcaaggttaaacagctaccactggtgaaaccgtatttgcgttcagttcagaaccataacaacaaatctgtgaatgaatcattgaacaatctttttattacagaggaagattatcaggctctgcgaacatcaatagatgcttatgacaactttgacaatatctcgcttgctcagcgtttggaaaaacatgaactcattgagttcaggagaattgctgcttatctcttcaaaggcaacaatcgctggaaacagagtgtagagctgtgcaagaaagacagcctttacaaggatgcatgcagtatgcttctgaatctaaagatactgaattggctgaagaactcctgcagtggtttttgcaggaagaaaaaagagagtgctttggagcttgtctgtttacctgttacgatcttttaaggccagatgtcgtcctagaaactgcatggaggcacaatatcatggattttgccatgccctatttcatccaggtcatgaaggagtacttgacaaaggtggataaattagatgcttcagaatcactgagaaaagaagaagaacaagctacagagacacaacccattgtttatggtcagccccagttgatgctgacagcaggacccagtgttgccgtccctccccaggcaccttttggttatggttataccgcaccaccgtatggacagccacagcctggctttgggtacagcatgtgagatgaagcgctgatcctgtagtcacctattttcgtactgaaacatcgtctttacccacttctcagtttataatgggggaaaacaggcaacgtgttcttgtaacctttatttcatgaaggacttctttttgtttctaactataaacttggatcacctatgttaaaaccttatttcacattccacatcattttagaatttattttcgaaggggaatagtttcaatgttttattcacttgggctttttttcttccccctctttctttaaagaactgctcaatattcaatctgttgtgaagaacctgatttgcactctgtagtgtttaaagaaacaaagaaactctaatattgaatctcttaaatttagtgtatgtaaacagcttacaaatacgtattgtctaaatgcatttaaatctgttttattcaaagaaaagctaaagcaaaaacactggcatatgaccatgcaagactgtcagtgccaacaaagacaacactaatcagcacatcgtacactgggattgcagtgcttcccagattattgaaaaatgttacagacaacttgcctgatttttaaatgaggcgtaaaaggcccctcttaacctatggcagggtttccccattatggcatataggaaaatggctaggtatgtttttggcttcacttncatatggtaacgggtgcccttatgttgtggctgtatcc

SEQ ID NO: 164313 - DNA, 1140 bp, Homo Sapiens
  misc_feature (80)..(113): n is a, c, g, or t
tgaagacttcttttgttctaactttaacttgatcacccttgttaaaccttatttcacattccacatcatttaggatttannnnnnnnnnnnnnnnnnnnnnnnnnnnnnnnnntgggcttttttcttccccctctttctttaaaggaactgctcaatattcaatctgttgtgaagaacctgatttgcactcggtagtgtttaaagaaacaaagaaactctaatattgaatctcttaaatttagtgtatgtaaacagcttacaaatacgtattgtctaaatgcatttaaatctgttttattcaaagaaaagctaaagcaaaaacactggcatatgaccatgcaagactgtcagtgccaacaaagacaacactaatcagcacatcgtacactggattgcagtgcttcccagattattgaaaaatgttacagacaacttgcctgatttttaaatgagcgtaaaaggccctctaacctatgcaggtttccccattatgcatatagaaaatgctagtatgttttgctcacttcatatgtaacaggtgcccttatgttgtgctgtatcctgtgctttttctgtgggaccattccattcaggagcaaagagcaccatgattccaatcttgtgtgtgtttactaacccttccctgaggtttgtgtatgttggatattgtggtgttttagatcactgagtgtacagaagagagaaattcaaacaaaatattgctgttcttcagttttgtttgtggaatttgaaattactcaaatttaaaataaattactggactgtggaaataacatagaaattgaagtattaattaaataccactcaaacgaaaagaacagtagttttagtagttttatattggatacatgaggcattagggaggcatgaaagggaagaggaatgaggattgagacatgtgaagacattgtgcattatatcaatgtgcattcctgtagttcattaacaaggtacatgcaatagtctaaagaaccagagtcactactatagtggcttaacatttaatctgtctccaatattttaaccaagtgacaccgaggtttttatcgaagcatttcacttaaatgaacaaatcatggctgttatattaacttgaaataaaatatatttaaacatgt

SEQ ID NO: 164314 - DNA, 715 bp, Homo Sapiens
cggccacccccataaggcataggccaagaccatacccgccgaatgtaggtgaggaaatccaaattggtcacatccccagggaagatgtagactatcaccgtgtacccacacggtccgggactcaatccaaatgcctctacaggacaagaagctctctctcagacaaccatctcatgggccccattccaggacacttctgagtacatcatttcatgtcatcctgttggcactgatgaagaacccttacagttcagggttcctggaacttctaccagtgccactctgacaggcctcaccagaggtgccacctacaacatcatagtggaggcactgaaagaccagcagaggcataaggttcgggaagaggttgttaccgtgggcaactctgtcaacgaaggcttgaaccaacctacggatgactcgtgctctgatcccctacacagtttcccattatgccgttggagatgagtgggaacgaatgtctgaatcaggctttaaactgttgtgccagtgcttaggctttggaagtggtcatttcagatgtgattcatctagatggtgccatgacaatggtgtgaactacaagattgcagagaagtgggaccgtcagggagaaaatggaaagatgatgagctgcacatgtcttgggaacggggagcggcacatgggttggggatctaaagagtcggctgctacgtagggtcggaggggtgag

SEQ ID NO: 164315 - DNA, 2254 bp, Homo Sapiens
  misc_feature (1319)..(1524): n is a, c, g, or t
atggactccatcatcgccgggaagaggtgttaccgtgggcactctgtcaacgaaggcttgaaccaacctacggatgactcgtgctttgacccctacacagtttcccattatgccgttggagatgagtgggaacgaatgtctgaatcaggctttaaactgttgtgccagtgcttaggctttggaagtggtcatttcagatgtgattcatctagatggtgccatgacaatggtgtgaactacaagattggagagaagtgggaccgtcagggagaaaatggccagatgatgagctgcacatgtcttgggaacggaaaaggagaattcaagtgtgaccctcatgaggcaacgtgttatgatgatgggaagacataccacgtaggagaacagtggcagaaggaatatctcggtgccatttgctcctgcacatgctttggaggccagcggggctggcgctgtgacaactgccgcagacctgggggtgaacccagtcccgaaggcactactggccagtcctacaaccagtattctcagagataccatcagagaacaaacactaatgttaattgcccaattgagtgcttcatgcctttagatgtacaggctgacagagaagattcccgagagtaaatcatctttccaatccagaggaacaagcatgtctctctgccaagatccatctaaactggagtgatgttagcagacccagcttagagttcttctttctttcttaagccctttgctctggaggaagttctccagcttcagctcaactcacagcttctccaagcatcaccctgggagtttcctgagggttttctcataaatgagggctgcacattgcctgttctgcttcgaagtattcaataccgctcagtattttaaatgaagtgattctaagatttggtttgggatcaataggaaagcatatgcagccaaccaagatgcaaatgttttgaaatgatatgaccaaaattttaagtaggaaagtcacccaaacacttctgctttcacttaagtgtctggcccgcaatactgtaggaacaagcatgatcttgttactgtgatattttaaatatccacagtactcactttttccaaatgatcctagtaattgcctagaaatatctttctcttacctgttatttatcaatttttcccagtatttttatacggaaaaaattgtattgaaaacacttagtatgcagttgataagaggaatttggtataattatggtgggtgattattttttatactgtatgtgccaaagctttactactgtggaaagacaactgttttaataaaagatttacattccacnnnnnnnnnnnnnnnnnnnnnnnnnnnnnnnnnnnnnnnnnnnnnnnnnnnnnnnnnnnnnnnnnnnnnnnnnnnnnnnnnnnnnnnnnnnnnnnnnnnnnnnnnnnnnnnnnnnnnnnnnnnnnnnnnnnnnnnnnnnnnnnnnnnnnnnnnnnnnnnnnnnnnnnnnnnnnnnnnnnnnnnnnnnnnnnnnnnnnnnnnnnnnnccagggacgcaaccgcgcgctcacgaacaactccaaattgtattcctgcggcccccaccgacatcaaaaaaattgaatacacaactattgctgggagccctgccttacgacaagcccgtgcaacctccgtcaatagttgctgtttgtagagacaataaacccacttcttggccgagtttggctaacctcctccaccaaacaagacacaaaccccccccgggagcgatcccccgcctggtctatcaaaaaacccttaaacggcgcttgacaatcaaccacccctctcccccagaggtctcaaacaacggcgggcgcccatgtcatggtcctcccacattattataccccacggccccccacctcctatatattgtcccgaaaacaccaactccagggggacctacgccccgccacagacaaccccgcccagcgaacaaggataacacccccattatgacgggaaagttagaacgccctcggtcaatctctcagccagtcaaataccagcacacaccgtcatttgggcggaagaattatgcgcgccgataacatatcttgctccgcggaacaatctcacccgcgcgcggacgacacaatatacgccataccgtcctcttcacactgccgcctctgccatcactctcatctcccgaccatggggaaatgacctgtctcctcatacccagacgtgtgggcgtggagtctgtcatcaatcaataatatctctctc

SEQ ID NO: 164316 - DNA, 645 bp, Homo Sapiens
ggtgtagggtcaagccgttcgttgagagagttgcccacggtaacaacctcttcccgaaccttatgcctctgctggtctttcagtgcctccactatgatgttgtaggtggcacctctggtgaggcctgtcagagtggcactggtagaagttccaggaaccctgaactgtaagggttcttcatcagtgccaacaggatgacatgaaatgatgtactcagaagtgtcctggaatggggcccatgagatggttgtctgagagagagcttcttgtcctacattcggcgggtatggtcttggcctatgccttatgggggtggccgttgtgggcggtgtggtccgcctaaaaccatgttcctcaaagatcatttgttgcccaacactgggttgctgaccagaagtgccaggaagctgaataccatttccagtgtcatacccagggtgggtgacgaaaggggtcttttgaactgtggaaggaacatccaagatctctggtccatgaagattggggtgtggaaaggttaccagttggggaagctcgtcttgtcttttccttccaatcggggctcgctcatctgattattctcagggcaatgactagattgtatttcggtgccggttcacgcagtaatagtagcctgttaacagg

SEQ ID NO: 164317 - DNA, 637 bp, Homo Sapiens
gggtctgctgcctgattatgtctgtagtacacttcacttatttgagccaaacgctgtgccgctccctctcagacaaccatctcatgggccccattccaggacacttctgagtacatcatttcatgtcatcctgttggcactgatgaagaacccttacagttcagggttcctggaacttctaccagtgccactctgacaggcctcaccagaggtgccacctacaacatcatagtggaggcactgaaagaccagcagaggcataaggttcgggaagaggttgttaccgtgggcaactctgtcaacgaaggcttgaaccaacctacggatgactcgtgctttgacccctacacagtttcccattatgccgttggagatgagtgggaacgaatgtctgaatcaggctttaaactgttgtgccagtgcttaggctttggaagtggtcatttcagatgtgattcatctagatggtgccatgacaatggtgtgaactacaagattggagagaagtgggaccgtcagggagaaaatggccagatgatgagctgcacatgtcttgggaacggggagcggcacatgcgttgggggatcaaatagagtcgtgctgcgtgcgtacggcaataagtcaagaagcagatcc

SEQ ID NO: 164318 - DNA, 320 bp, Homo Sapiens
acctacagtagctattcaatggacatcagttaataaggtgaaaaataagaataggccagaaccacattctgatgagaatggcagtaccacaccgaaagtaaagaaagataaacagaacatctttgaattttttgagagacagactttgttacttaggcctggaggcaaatggtatgatctggagtacagcaatgaatattctttgaaaccccagcctcaggatgttgtatctaagtacaaaacccttgctcagaagctgtatcagcatgaaatcaacttattcaaaagtaagacgaatagtcaaaagggagcctcttcga

SEQ ID NO: 164319 - DNA, 267 bp, Homo Sapiens
caacatacagagctattccaagtatcttaatttcaaacatgattgtcctagtgactgaatgggtgtgagttatgtatactttatcatcctggtggttcatattcactatcagtgaaaattaggcagtcagaaaaaagtaaaagggctcactactctcaaaaaccagaatttctaaacagactaggccctaaaaagggaagaagaaaaaaattacagagcagaaagggaatcaaaatcagaagggtgatgagtgaaagaacatggcag

SEQ ID NO: 164320 - DNA, 842 bp, Homo Sapiens
  misc_feature (97)..(97): n is a, c, g, or t
  misc_feature (109)..(110): n is a, c, g, or t
  misc_feature (603)..(612): n is a, c, g, or t
cggcccccaaaaaagagaaattgggttttttaagaaaaaacttttcttcggagggggccgagaagggcgggcccggaccaaggaaatttattttttnatgttgtgggtnngtatttttttccgtcttccaaatttattatctttttcccacagtacacatttttcaccaagccgtaaatcctttgcagttatcaaaagtgtgtaaacaattgcctgaatccccatatccccccacctcggcttaaggttgtgaatgttttaagtccttcaatcaagtttcaactcttccacttgcataaggaatcaagagccttctctctttaaattatgtgtgttttatcatacagcctgcaatgcagtaaatcacagtgaaagccctggggaaaacaaaacaacatgatctttacagcgggacttgaaacttcacaatagtaaatgcagttcaagaagcttcccataataaaagcgcgggttttcatttccagaaatcaagtcaattagaaaccctaggttctacttaaaaacccattttgatctaaaagtgaaaacagtcccctatccatagtcattttataaactctatacagtttcacttgcagagannnnnnnnnncccagtctggaaaacagtagtgcaataacgtttaacttctttaaagttatatagtccaggatgtaaatagctctgtggaaagatacgaagatgctctggtaaacaagaaattttggcaagcccatgctggcttacgagtccattaaagcttgtaagtccatcgtggctttcaacaaaatgttgcatatacatcactgagaacaaagcagaaataaataggcagaaatgac

SEQ ID NO: 164321 - DNA, 469 bp, Homo Sapiens
cggtacatacaagctgtaggatcactggcgtcatcaagtcaccaagctggcaacggccaaaccaagggagtacctatccactggaagaatctcaaacagcgctacttactcaggatcagtggcaccagccaactcagctttgggacaaacccagccaagtgaccaggacactttcagtgcaaagagctgagcacattccagcagggaaacgaactccgatgtgcgcccattgtaaccaggtcatcagaggaccattcttagtggcactggggaaatcttggcacccagaagaattcaactgcgctcactgcaaaaatacaatggcctacattggatttgtagaggagaaaggagccctgtattgtgagctgtgctatgagaaattctttgcccctgaatgtggtcgatgccaaaggaagatccttggagaagtcatcaatgcgtagaaacaaacttggccccttatcga

SEQ ID NO: 164322 - DNA, 748 bp, Homo Sapiens
  misc_feature (441)..(455): n is a, c, g, or t
tgagagtgtacggaggtggtcctatggatggactgtagactgaaacttcctataactgtagtgatatgtacacagctacatagcaaagtgcttcattatgaaaatgaagaaaacaggtatgagaaaaatatattttagagtttcaaagaactcaaactgttatttttcagactaggcactgaaacattttttctacaaaaacttgccagagattgtctcttcgctgtatagttccattatcaagctgggctacagacaacagacagctaactagctccatcctcctgagaaacactgtgcatagaaatgagactctcacactgttcgctgtcttctggaactctctgaattcgatgttttctgcatataaaagcaaatattcttctgattcccaccatcacaggatcccaattattataatggcataggagagttacaatnnnnnnnnnnnnnnntacagggatagctcctgcaaaaaataaccaagaaaactgcaccttttgcatacacatgtcagctattatggacagaggtatcgtaaggcttagtgcaagtgtgcctatcaatgatgaggtaagaaagcagccccacaaccacaggaactctgagagtactgttccaataaggccattaatgataatgcacattaatactactttattgggaaactcgaagtcctcaaatccagtataatgaagtaaaaagaaacctggccataagagcagcagattaaacaaacctacaaaac

SEQ ID NO: 164323 - DNA, 415 bp, Homo Sapiens
tacacagctattccaaggatctgccattaacaggatcaatgtatgtgtcggccaaaaaatcatagccctcccccatgacaaccgacaagtgagactgtttgatatgtcaggagtgcgcctggcgcggcttccccggagcagccgacagggccacaggagaatggtatgctgctcggcatggagtgaagaccaccccgtgtgcaatctgttcacctgtgggtttgaccggcaagccattggttggaacatcaacatccctgcattgctacaagaaaaataaggacaccggcagcccttagtttcactgtttgccagcacagacctttgatgggtgcaggcttttctgcgtattaatcagccatttttgtgagagtttgaccctggaaagggtgctttgtatatgttcttttcacat

SEQ ID NO: 164324 - DNA, 979 bp, Homo Sapiens
aaaaaaaggatttcacagtgagaaagttttggttagtgcataccgtggaagggcgccagggtctttgtggattgcatgttgacattgaccgtgagattcggcttcaaaccaatactgcctttggaatatgacagaatcaatagcccagagagcttagtcaaagacgatatcacggtctaccttaaccaaggcactttcttaagcagaaaatattgttgaggttacctttgctgctaaagatccaatcttctaacgccacaacagcatagcaaatcctaggataattcacctcctcatttgacaaatcagagctgtaattcgctttaacaaattacgcatttctatcacgttcactaacagcttatgataagtctgtgtagtcttccttttctccagttctgttacccaatttagattagtaaagcgtacacaactggaaagactgctgtaataacacagccttgttatttttaagtcctattttgatattaatttctgattagttagtaaataacacctggattctatggaggacctcggtcttcatccaagtggcctgagtatttcactggcaggttgtgaatttttcttttcctctttggggatccaaatgatgatgtgcaatttcatgttttaacttgggaaactgaaagtgttcccatatagcttcaaaaacaaaaacaaatgtgttatccgacggatacttttatggttactaactagtactttcctaattgggaaagtagtgcttaagtttgcaaattaagttggggagggcaataataaaatgagggcccgtaacagaaccagtgtgtgtataacgaaaaccatgtataaaatgggcctatcacccttgtcagagatataaattaccacatttgccttcccttcatcagctaacactgtatcacttatataccataacttgttaatcaggattggcttcatacactgaattttcagtatttattcgcaaggt

SEQ ID NO: 164325 - DNA, 1644 bp, Homo Sapiens
  misc_feature (1247)..(1249): n is a, c, g, or t
  misc_feature (1252)..(1256): n is a, c, g, or t
  misc_feature (1271)..(1271): n is a, c, g, or t
  misc_feature (1275)..(1303): n is a, c, g, or t
  misc_feature (1381)..(1419): n is a, c, g, or t
  misc_feature (1477)..(1485): n is a, c, g, or t
gtgtcagaaaatgagcttggtgttggtggcacgagtcagtggaaaatctgtggcctagatcctacatctacacttggcatctattttgaagttgtcaatcagcacaacaccccgatcccccaaggaggcagaggagccatccagtttgtcacgcattatcagcactccagcacccagagacgcatccgcgtgaccaccatcgcccgaaattgggcagatgtacagagtcagctcaggcacatagaagcagcatttgaccaggaggctgcggcagtgttgatggcacggcttggggtgttccgagcggagtcagaggaggggcccgatgtgctccggtggctggaccgacaactcatccgactgtgtcaaaagtttggacagtataacaaagaagaccccacttcttttaggttatcagattccttttctctatatcctcagtttatgttccatctgagaagatctccatttcttcaagtgtttaacaacagtcctgatgagtcgtcatattacagacatcattttgcccggcaggacctgacccagtccctcatcatgatccagcccattctctactcttactcctttcatgggccaccagagccagtactcttggatagcagcagcattctagctgacagaattttgctgatggatactttctttcaaattgtcatttatcttggtgagaccatagcccagtgggcgtaaagctggctaccaggacatgcccgagtatgaaaacttcaagcaccttctgcaggcaccactggatgatgctcaagaaattctgcaagcacgcttcccgatgccacgttacatcaacacggagcatggaggcagtcaggctcgattccttttgtccaaagtgaacccatctcagacacacaataacctgtatgcttggggacaggaaactggagcacccatcctaactgatgatgttagcctgcaggtgttcatggaccatttgaagaagctggctgtctccagtgcctgttaagctgaggatacaaccaggaaatgcaacggtgtcagattgtgttcaaaatgtctagaaaggcttgataacattcctgttacttttctagcagattttaacaaataatcaaggacattttatatgtaactcctttagattataaattaattggaattcctggcctttgccctttttcttgcccataaatatacgcctaagttgaatgaagtaggttggccctcataggttacgggcgacacaaaannnaannnnntaatgggaccacccntgtnnnnnnnnnnnnnnnnnnnnnnnnnnnnnacaaaaaaaccagagaagggaacgcgcaatcacgctcgtctggtgcacttcccatgaaagaacctactcacccaccannnnnnnnnnnnnnnnnnnnnnnnnnnnnnnnnnnnnnntggccctactgataatacgcacactttgttacccacatacatatccccgtgccgcgtnnnnnnnnngcgcacggagaaaagcacaaacgaacattcacacagtccatcccagctgccccccccactcccaacaatccgcgccccactctcataccccccgttccctcccaccactgcttgctgacactaatacacgcgaggcccacccacgcacaccccccccgc

SEQ ID NO: 164326 - DNA, 759 bp, Homo Sapiens
ggaaccattgaagatacattaatgactgtgaaacagtatgaaagtgccaggattgaatatgatgcatatcgcactgatttggaagaactgaatcttggaccacgtgacgcaaacactctgccaaagattgagcagtcacagcatctcttccaagcacataaggaaaaatatgataaaatgcgtaatgatgtttctgtcaaattgaaatttctagaagaaaataaggttaaagtattgcacaatcagctggtccttttccacaatgccattgccgcttactttgctgggaatcagaagcagcttgaacagacacttaaacagttccatatcaaattgaaaacccctggagtggatgccccatcttggcttgaagaacagtaaaatcacagcggaaaataaaaagaaagtcgcgttgttatatttctaaaccaacctaacaagaattaagcagagttgggggaagtgggaggggtgacaagcattatagtgattcttgcacaaacagctttaatttttccctttttcatactttaacaattgaactgttaagggtggttttaatgtaaacatagtttctataatctgaacacaataattttcctttttgagaaatccttttgtattgtgaggggtgatggctatttctgtagtttgaaaacctctaataaagatttgcactgaccaagataaaaattccaggtttttgggtcccggggaaatggagggccccattggtaaacttttttccaaaggggagga

SEQ ID NO: 164327 - DNA, 990 bp, Homo Sapiens
  misc_feature (310)..(310): n is a, c, g, or t
ggggggatgtaagcagcaaggacacagacattcccttactgaacactcaggagcccatggagccagcagaataacttgatccattccagacgctttgctgagtttcataaagcagggcactgagacacccgtccgtgttcctaaccagaaatcctaaagaagaggaattatacagaaggaacagcaggaggttttcctggacaccgccaacttcacattgctcagtggactcattctaagggcaagacattgaaaatgatgaattccaatctggatacagtcatgacagctcatgtgctcctcaacttangctgtgcggttagccagcctgtaatgagaggagagaggcctgagtcacctagcatagggttgcagcaagccctggattcagagtgttaaacagaggcttgccctcttcaggacaacagttccaattccaaggagcctacctgaggtccctactctcactggggtccccaggatgaaaacgacaatgtgcctttttattattatttatttgggggtcctgtgttatttaagagatcaaatgtataaccacctagctcttttcacctgacttagtaataactcatactaactggtttggatgcctgggttgtgacttctactgaccgctagataaacgtgtgcctgtcccccaggtggtgggaataatttacaatctgtccaaccagaaaagaatgtgtgtgtttgagcagcattgacacatatctgctttgataagagacttcctgattctctaggtcggttcgtggttatcccattgtggaaattcatcttgaatcccattgtcctatagtcctagcaataagagaaatttcctcaagtttccatgtgcggttctcctagctgcagcaatactttgacatttaaagagaaatttagagaatattctcatcctctaaaaatgtttaaatatataccaaacagtggcccctgcattattttctgtgccactgcaacccatta

SEQ ID NO: 164328 - DNA, 736 bp, Homo Sapiens
gagtgcttgtagacgccaggatgctggaccacttgaccaagaaagaccttcgagggcagctgaaaatggtcgacagttttcacagaaacagtttccagtgtggaattatgtgcctgagaaggttaaattatgaccggaaagaactggaaaggaaaaagagaagaaagtcagagtgaaataaaagacgtgcttgtttggagcacatgatcgagtgattcgctggatcctgtcaattggccttaaagaatatgcaaacaatcttatagagagtggtgttcacggagcacttctggccttagatgaaaccttcgacttcagtgcactggcacggctgttacagatcccgacgcagaacacacaagcacgagtggaaagagatcttctgatggttctttaagccacgaggaagaccttgctaaagtaatagagctccaagaaatcataagtaagcagtcaagggaacagggccaaatgaaagaacgcctggcttccctttccagtcatgtgacagaactggaagaggatctggacacggctagaaaagatctcatcaaatctgaagaaatgaacacaaaattgcaacgagatgtccgtgaagccatggcccaaaaggaagatatggaagagagaatcactactcttgaaaaaggctacctcgctgcacagggtgaaagcacatctgtgcttgacctcatgataacttgacatgaattgccattaagattctatgctcgac

SEQ ID NO: 164329 - DNA, 1940 bp, Homo Sapiens
  misc_feature (117)..(231): n is a, c, g, or t
  misc_feature (311)..(404): n is a, c, g, or t
  misc_feature (441)..(500): n is a, c, g, or t
  misc_feature (535)..(626): n is a, c, g, or t
  misc_feature (697)..(744): n is a, c, g, or t
ctctctcgctcctcctgtgctcctcttcgtgtcccctctttctgtttgcttctcttcgcccttgtctctctttctcttcctcgttgttcgctcctcgtctccttttttgtgttctgnnnnnnnnnnnnnnnnnnnnnnnnnnnnnnnnnnnnnnnnnnnnnnnnnnnnnnnnnnnnnnnnnnnnnnnnnnnnnnnnnnnnnnnnnnnnnnnnnnnnnnnnnnnnnnnnnnngccggtcgcgtctgtccctctctgtctgcgttgtcgcgtgttcgctctcctgttctgcgctcttctgtctggctccttgnnnnnnnnnnnnnnnnnnnnnnnnnnnnnnnnnnnnnnnnnnnnnnnnnnnnnnnnnnnnnnnnnnnnnnnnnnnnnnnnnnnnnnnnnnnnnngcgctccgccctcggccctcttgctcccttgctctgnnnnnnnnnnnnnnnnnnnnnnnnnnnnnnnnnnnnnnnnnnnnnnnnnnnnnnnnnnnnctgccgtcgcccccgtccgctccttctcccgcgcnnnnnnnnnnnnnnnnnnnnnnnnnnnnnnnnnnnnnnnnnnnnnnnnnnnnnnnnnnnnnnnnnnnnnnnnnnnnnnnnnnnnnnnnnnnngttgtctctcgtcctctcctctgttcctgctcgcctttcgtgccttgcctcgcgcccctgctgtctgcctnnnnnnnnnnnnnnnnnnnnnnnnnnnnnnnnnnnnnnnnnnnnnnnngccggcgcttcctgcctgcccttcccgctctcttcgcgctctccaccttctcgctcgcccttcctgccgtttcgcgtcgcctcggctccctaccacttgtcgtcctcaccctcgcctactctcctcttctcgcctctctctcacctactttccctatcgtcctgctcctttcgcgctgccgtcccctgccgtctgccctcctctgctctctgtcggtccttccgcttcgccacagagcgaacgagaaaattgagattaaagtaggacgaacagcagtgtatagtgagccagcccgctaggtgtcgtgtcgcggcgtgtcggcgtgtggtgtgtcgggggtgcgggtgtgttgcttgttgttctctctctcgtagcgcgcccgcacatggtgttcttcttacacggcacgcggccgtggttctctgcgtgggatgctttactccggctgcccgtccgtgttcgtgtttgtctttttgcgcccgtggtccctggacgccccctttattagttgtgccaatatgcctttagggcccatttgccaggtatccgccgatcactcgatcctggctcccgaccaagcaccgtcttttatttcactctgactgtcttctctttttcttgccagttctttccggtcataatgtaaccttctcaggcacataattccacactggaaactgtttctgtgaaaactgtcgaccattttcagctgccctcgaaggtctttcttggtcaagtggtccagcatcctggcgtctacaaggcactccatgaagtagctgcggtactgggggaggcccaggctggggagccactcgttgccgatccactcgtggttcatgtccccataggcgagtgtcgttctagatgtgggcggggcagacgggctggtcagcgacatgatctcctggatggccagcctcagcttcagcctgtgcagggggttgctgatgccaatctcacgctggatctctgtgtcggacagggccgacatgatggccccgcttttcacgtttgctcggcaggcagccacataccaggctggcatcccaacccagagctctagccagaccacaaccgttggcccgtcccattgggcaaaaggtaaaccttgtccgacgcgtgggtcgacgatatccacgggattccgaccggtaccagcctgcttttagtcgacttatttttctgcgccgatg

SEQ ID NO: 164330 - DNA, 1058 bp, Homo Sapiens
gggatttcggagcgactcagcgcctgcccgccctctcgccgcgtcgccggtgcctgcgcctcccgctccacctcgcttcttctctcccggccgaggcccgggggaccagagcgagaagcggggaccatgttccgacgcaagttgacggctctcgactaccacaaccccgccggcttcaactgcaaagatgaaacagaatttagaaacttcatcgtttggcttgaagaccagaaaatcaggcactacaagattgaagacagagggaatttaagaaacatccacagcagcgactggcccaagttctttgaaaagtatctcagagatgttaactgtcctttcaagattcaagatcgacaagaagctattgactggcttcttggtttagctgttagacttgaatatggagataatgctgaaaaatacaaggatttagtacctgataattcaaaaactgctgacaatgcaactaaaaatgcagaaccattgatcaatttggatgtaaataatcctgattttaaggctggtgtgatggctttggctaacctgcttcagattcagcgtcatgatgattacctggtaatgcttaaggcaattcggattttggttcaggagcgcctgacacaggatgcagttgctaaggcaaatcaaacaaaagagggcttacctgttgctttagacaaacatattcttggttttgacacaggagatgcagttcttaatgaagctgctcaaattctgcgattgctgcacatagaggagctcagagagctacagacaaaaatcaacgaagccatagtagctgttcaggcaattattgctgatccaaagacagaccacagactgggaaaagttggaagatgaacacttgaggacttcagcttctcacctacttagtacagttgggaaccatacacttctggcatgtttggaaatcaaaatgtcacattctcgggggaggaagcccagaaaattgggtatgttctagagatttaccaccattgcttattgcttttttctttaataaagtttaggaaagtagaattttaaaaaaacacaaa

SEQ ID NO: 164331 - DNA, 866 bp, Homo Sapiens
  misc_feature (754)..(755): n is a, c, g, or t
tatgaaaaaaattccaaagaaggagtctttgacattaataatgaggcaaatggcattaaaattggccctcagcatgctgctaccaatgcaacacatgcaggcaatcagggaggacagcaggctgggggcggctgctgttgagtctgtttttactgtctagctgcccaacggggcctactcacttattctttcaccccctctcctcctgctcagctgagacatgaaactatttgaaatggctttatgtcacagaagactttaatccgtcaaattcttgtataactttgaataaatggttaatgttcacttaaaagacagattttggagattgtattcatatctatttgcatttgatttctaggtcaattgatgtgattatttttgttaaatgttgtcttgtgcccttaactacgaactgaattgtattaaacactacaaagtcatcttgagtattttaaatcggtttgtgtagttaggtttcccaacatctgtggttacctaatgtttaatattatagaactgtcctcagaaactttgtcaattttcacggctataaggaaacagaaggactcttttaattctgtatttatcatttactttctgtatatatagtttaataacctgcttgggtgtaatttgccaagcttgaattctttaatgcatttgcataaattctatactgtttagagcttaaagctacagaagcattgttaggaattgcttggacactgaattttaaactttttgacattgnntaacagcatgttcatctttttctgtcactagtcccagaaaaatatgctttatgtatattacaaaggctttgtatatgtttacctgtttttatgcccaaagtttgctttgtc

SEQ ID NO: 164332 - DNA, 1060 bp, Homo Sapiens
  misc_feature (977)..(997): n is a, c, g, or t
ctgtacggtccggaattccgggatatcgtcgaccacgcgtcggattctaggtcaattgatgtgattattttgttaatgttgtctgtgcccttaactacgaactgaattgtattaaacactacaaagtcatcttgagtattttaaatcggttgtgtagttaggtttcccaacatctgtggttacctaatgtttaatattatagaactgtcctcagaaactttgtcaattttcacggctataaggaaacagaaggactcttttaattctgtatttatcatttactttctgtatatatagtttaataacctgcttgggtgtaatttgccaagcttgaattctttaatgcatttgcataaattctatactgtttagagcttaaagctacagaagcatgttaggaattgcttggacactgaattttaaactttttgacattgttaacaagcatgttcatcttttcttgtcactagtccaagaaaaatatgcttaatgtatattacaaaggctttggtatatgttaacctgttttaatgccaaaagtttgctttgtccacaatttccttaagacctcttcagaaagggatttgtttgccttaatgaatactgttgggaaaaaacacagtataatgagtgaaaagggcagaagcaagaaatttctacatcttagcgactccaagaagaatgagtatccacatttagatggcacattatgaggactttaatctttccttaaacacaataatgttttcttttttcttttattcacatgatttctaagtatatttttcatgcaggacagtttttcaaccttgatgtacagtgactgtgtaaaatttttctttcagtggcaacctctataatctttaaaatatggtgagcatcttgtctgttttgaaggggatatgacaataaatctatcagatgggaaatcctgttacaaagtagaaaagctttagtaatttactcagtgtggtggnnnnnnnnnnnnnnnnnnnnnctcccttggtctataatgaaattgttacagcagtgcaaaataaaatcctatgtataaaagaag

SEQ ID NO: 164333 - DNA, 423 bp, Homo Sapiens
  misc_feature (364)..(364): n is a, c, g, or t
  misc_feature (376)..(376): n is a, c, g, or t
  misc_feature (379)..(379): n is a, c, g, or t
cctgccaacatctcatttctccaacatctcttctctgtaattttttaggatggtgcacagaatggtctgcttctgtcctcttttgttccaaatgaggtgaaacataaacccacctatgtgtcttcctctaaagctctggattatagaaatgatcaacaaataacatttattttcacatctaagcataaatactaaaatgaagattactgttcactttcctcttccattatttcaactctgcgaggcccatagagtagaacgtaagcgatataccagtctccaccaccagaaagccgtaagatatcttctggtggtacaaagcgtgactttgtcatcatcaaacttaatccattcatcttgtttnccttttacccanganacataatgggtgaaaagaaatgagaagttggaagggggtcccca

SEQ ID NO: 164334 - DNA, 496 bp, Homo Sapiens
gctatattctgcatatttaaaagtcagagtgaatgccttcaaccattccttctgtgtcatttttcttgctgccttttcacccaagattcagcagtcagatgtttactgcacacctattacctattatttgctgttcttgcatggttcaaaccaccattctgtagccacccatcctttgccttatctaacaaacatttttccaggaaggtggaaaaggaagtgttgctctcattgtgtgactcagtgctgctgtccatcccatggaaacatgggcacaatcaagtatttgtccagcctattgcaggcttttcctgactttaaaataaattgtgatcaataatagtacctttgattatacatttattattgtgtctctctctgatgtactgtggattgtacatttaactttggaatggctttgtaataatcagtcttaagaaaatgttgacaagctctggttgcttatttttagaaaatgaggacatttaataataat

SEQ ID NO: 164335 - DNA, 1074 bp, Homo Sapiens
ggggacttaaattgcgacttcaggtagaaatcaccaaacagtctccaacgttgcaaagaaatgccttgtatatcaaatcttccaagatcagccggctgcctgcttacttgaccattcagatggctcgatttttttataaagagaaggaatctgtgaatgccaaagttcttaaggatgttaaatttcctcttatgttggatatgtatgaactgtgtacaccagaacttcaagagaaaatggtgtcttttcgatccaaattcaaggatctagaagataaaaaagtgaatcagcagccaaatacaagtgacaaaaagagtagtccccagaaagaagttaagtatgaacccttttcttttgctgatgatattggctccaataattgtggatactatgacttacaagcagtactaacacaccagggaaggtctagttcttcaggtcattatgtatcatgggtgaaaaggaaacaagatgaatggattaagtttgatgatgacaaagtcagcatcgtaacaccagaagatatcttacggctttctggtggtggagactggcatatcgcttacgttctactctatgggcctcgcagagttgaaataatggaagaggaaagtgaacagtaatcttcattttagtatttatgcttagatgtgaaaataaatgttatttgttgatcatttctataatccagagctttagaggaagacacataggtgggtttatgtttcacctcatttggaacaaaagaggacagaagcagaccactctgtgcaccaacctaaaaaattacagagaagagaaaattatctttggattgtgctgccctatataaaggtggcagaaagacatttttaaaaagcttattatttcttgcattattttaaaaagttcagagttgaaatgcctttcaaccatttccttctgtggtcatttttcttgctgcctttttcacccaagattcagcagtcagatgtttactgcacacctattacctattatttgctggtcttgcatggttcaaaccaccattctgtagccaccatcctttgccttatctaacaacatttttccaga

SEQ ID NO: 164336 - DNA, 1153 bp, Homo Sapiens
  misc_feature (180)..(180): n is a, c, g, or t
  misc_feature (913)..(945): n is a, c, g, or t
gccgaaggctggggaaaaagggacagaatccataggttggggtgagggctagggcacctggacttatttcaaggtaagcaatacctggaagggttaaagtcaatccatacgccccagctttgatttgctcaaaccagaaagccaatccaagctggtaaacccccagggcagggtagagancctgggattagagggagatggtagctaggcccaagcaggaggaaaagctccccaggacagccccagggatcaggaaaaagtacccaggcagttgggggacacacacaacatcccctaaccactacatgtggccatcacatttagcacccaggacttcctgggctgccagaatggagtcagtcactctgcagaaactgtgggagatgtaaggctctcaccaggaatacgcaactatccaaggtaaagcctttagtcagttccagtgcagccacactgggaggtgactttgcccccggccagccctcttcttggatctcgctgtctgtatggtgggaagatcctcaaagcagcagcccggattctcaactaaactccggaggaggaggtctccgtcccaggaagagccctccgccttctccaagtgaaaaacaactcacctcaaacatatttcctctataaaatatctgctttctctgaaagtaataaatatttaccatgttctataaccaaggagcagcaacggggggacaagaggaagagaactttgctgtgactccaagtgacaaaatcctagagattcagggtgccatttttatttcccatggagctgaggacctgagcacaggcagccaccagggctgctcagaccctcccgaccttcaggggtgggagtggttttggagttctgatcttgggtaggcaggcctgtcatattgccagaaatacaggcatnnnnnnnnnnnnnnnnnnnnnnnnnnnnnnnnntagcaggaagtaaaggggacaatgaagagagctaagggactccttccgtcttcctcctggcactgtctccttcctctttctgcctccacaccaatctcttggccaccagctggaatgtcaaacagtggatggtgacagcaggcagggaagggccacggcaaggcagcccaggcaggagccgcagcaggagtacaggatgacacccttg

SEQ ID NO: 164337 - DNA, 1932 bp, Homo Sapiens
  misc_feature (1870)..(1880): n is a, c, g, or t
ggggctggaggcggcagcggttggaggcttcgcccggctttgcagcggggacttcggcggcggcgcctcaggcacctcggcccggacacgatgaggcgagtggtacgacagagcaagtttcggcatgtatttgggcaagcggtgaaaaatgaccagtgctatgatgacatccgggtttctcgtgtgacctgggatagttccttttgtgctgtcaatcccagatttgttgccataatcatagaggcaagtgggggaggagcgttccttgtcctccctctgcacaagactggtcgaattgacaaatcttaccctacagtatgtggccacacaggaccagtgctggacatagactggtgcccacataacgatcaggtcattgccagcggttcagaggactgcacggtcatggtatggcagatcccagaaaaatggactcaccctttccctgactgaacctgtggtgatttttggaaggccactcaaagagagtcggcatcgtggcttggcatccaacggcccgcaatgtgcttcttagtgcaggctgtgataatgccattatcatctggaatgtgggaacaggggaagcccttataaacttggacgatatgcattcagacatgatttacaatgtgagctggaaccggaatggcagtctgatctgcacagcttccaaagacaagaaagtgagagtcattgatcccaggaaacaagagattgttgctgagaaggagaaagcacatgaaggagcaagacccatgagagccatcttcctggcccgatggcaatgtcttcaccactgggttcagccgcatgagcgagcggcagctggctctctggaatccgaaaaatatgcaggaaccaattgctcttcatgagatggacactagcaatggggtgttgctgcctttctatgaccctgacaccagcatcatttacttatgtggaaagggtgacagcagtattcgctattttgagatcacggatgaatccccgtacgtccactacctcaacacattcagcagcaaggagcctcagagagggatgggttacatgcccaagaggggacttgatgttaacaaatgtgagattgccagattcttcaaacttcatgagagaaagtgtgaacctattattatgactgttcccaggaagtctgaccttttccaagatgacctgtatcctgacacagcggggccagaggccgcgctggaggcagaagagtggttcgaaggcaagaatgcagacccaatcctcatctccttgaagcacgggtacattccaggcaaaaacagggatctcaaggtggtcaagaagaacattctggatagcaagcccactgcaaacaagaagtgcgacctgatcagcatccccaagaaaaccacagacacggccagtgtgcaaaatgaagccaagttggatgagattttaaaagagatcaaatctataaaagacacaatctgcaatcaagatgagcgtatttccaagttagaacagcagatggcaaagatagcagcctgaaggtcccacccccacccctacagaaaaaatgggagcaagaacttgtgcttgggagctggttattggtgtggtcctagggagggcggaaagggaggcactgccatttggagacattccatttcagatttgtcaaccagcgataggccacattccagtaagaactcaatttgtctcccaaatttgcagaaacaaaacgtgatttaaaagctgagctttttatcagaaagcttttttgatgttttaagtgttatgtgacttgttgaactttttaaaaagtgctacttttaaaatcccagatactctgaattttagaaaacaaactaattctgattgtgtcgtgcccaagtacccnnnnnnnnnnnaatgaatagggaccaatgccacatggcttttatatttctttctttttaatgc

SEQ ID NO: 164338 - DNA, 387 bp, Homo Sapiens
gggaacatattaaaaatgacaagtaccttgtgggtcaacgactcgtgaactacgaacggaaatctggcaaacaaggctcatctccaccacctccacagtcatcccaagaataaagtagttgtctcaacaacttgaccttcccctttacatgtccttttttgtggacttctctctttggagatttttcccagtgatctctcagcgttgtttttaagttaaatgtatttgacttgtgttctcagcattcagagagcagcggtgtaagattctgctgttctccctggatcttctgacattactgctgtctgagatttgtatatgtgtaaatacaagttccttgataccctaaaaccttggattaaacagaatgtgcattgtacatcttta

SEQ ID NO: 164339 - DNA, 807 bp, Homo Sapiens
aagtggtggttaatcctttacaagaaaccaaacaagcctttgaaagatgtcataggctctctgatccttctgacttaccaaggaatgccttcagaatttttaccattcttgtggaatttttatgtattgagcatattgattatgctttggaaacaggacttgctggaattccctcttcagattctaggaatgcaaatctttattttttggacgttgtgcaacaggccaatactatttttcatctttttgacaaacagtttaatgatcaccttatgccactaataagctcttctcctaagttatctgaatgccttcagaagaaaaaagaaataattgaacaaatggagatgaaattggatactggcattgataggacattaaattgtatgattggacagatgaagcatattttggctgcagaacagaagaaaacagattttaggccagaagatgaaaacaatgttttgattcaatatactaatgcctgtgtaaaagtctctgcttacgtaagaaaacaagtggagaagattaaaaattccatggatgggaagaatgtggatacagttttgatggaacttggagtacgttttcatcgacttatctatgagcatcttcaacaatattcctacagttgtatgggtggcatgttggcaatttgcgatgtagccggatataggaagtgtgccaaagacttcaagattccaatggtattacatctttttggtactctgcatgcactttgcaatcttctggtagttgacccagataatttaaagcaagtctgctcaggagaacaacttgctaatc

SEQ ID NO: 164340 - DNA, 898 bp, Homo Sapiens
gggattggtggcggaggcaatggccggcaaccagctgtaagcgaggcacggaagacatatgcttgtgagacaaaggtgtctctgaaactatggatggtacaagaacttcacttgacattgaagagtactcggatactgaggtacagaaaaaccaagtactaactctggaagaatggcaagacaagtgggtgaacggcaagactgcttttcatcaggaacaaggacatcagctattaaagaagcatttagatactttccttaaaggcaagagtggactgagggtattttttcctctttgcggaaaagcggttgagatgaaatggtttgcagaccggggacacagtgtagttggtgtggaaatcagtgaacttgggatacaagaattttttacagagcagaatctttcttactcagaagaaccaatcaccgaaattcctggaaccaaagtatttaagagttcttcggggaacatttcattgtactgttgcagtatttttgatcttcccaggacaaatattggcaaatttgacatgatttgggatagaggagcattagttgccattaatccaggtgatcgcaaatgctatgcagatacaatgttttccctcctgggaaagaagtttcagtatctcctgtgtgttctttcttatgatccaactaaacatccaggtccaccattttatgttccacatgctgaaattgaacaggtcgtcggtaaaatatgcatatacgtgtcttgagaaggttgatggcttttgaagaacgacataaaagttggggaattggactgtcttgttgacaaggtgatatctactttcagaaaagtactgagacatggatcacattatatcacactggactgtctttgagagcactggcaattttgctaagcctgtaa

SEQ ID NO: 164341 - DNA, 794 bp, Homo Sapiens
acgcaccataacagtgagacggcaaacagaggaataatgtgtgaggaacagtcggacttctggcagttccggtcagtctactgataacagccttctgggctacccacagcagattgaaccaagctttgagccagaggatgaagacagcgaagaagatgacattatcattgaagacaagggagtgccacagcagattccaaaagctgttcctaatactgagagcctggagtcattaacacagatagagctaagctttgagtctggacagaatggctttattccctctaatgaagtgagcttagcagccatagcaagcagctcaaacacggaatttgaaacacatgctccagatcaaaaactcttagaagaagatggaacaatcataacattatgaaaccgtggtttgaatgttttcagagtgaggatgccatgaggacttgtacagttggctagtttaaaagcatatatacctctgaccagtgacgtggaataggcatgagacgagtaacgttgcaagcttacaatattattaaagtagtagtttgataattgttaatataaactttggtggatcagaggtgaatttaagtccaaaacaaaggggcctttgctgatgaagttacgtgcttttgctgttttgtctgtggagaatcagatgttaaagcacattcttggaactatgtgagaagactagatcatttctgttggaagtggttgcatatttaacctgctgtgcagagcccagttaatttttcctttaactgtatttttaaaattctaatgttagagatagg

SEQ ID NO: 164342 - DNA, 915 bp, Homo Sapiens
  misc_feature (615)..(640): n is a, c, g, or t
taaccacagaaacagctatgactaagaatttaggtggaattgatgtctgggcaattaaaataaatggcataagagcttaaaaaccaaagttgtgccagtggctttcaactagaggcagtaacctgtcattccagaggatgctgagaaatgtgtaggggcacttttttggttgtcatatatactaggggcttctgttggcatttaagcctaaagacactcacccctgcagtgcatgggacagcctggcacaatgaagaattagccctcccaaaatgtagattattttatttcaagggatagggcagattaccattagaagcaaaattaaaagtacaagctgggcaaactgacagaatactagataggagagactaattccaaccttctaaatttggctagtaaagtgcaataaaggcattgataagttctgttagctcaccatagcacttgtaaatcaggaattaataattgaatcagatttaagggctctgtcctgttatacatatttaaggcagaaaaaaagttacatgtcgattaggtacttatcaagaatggtcaagctgagattttggttaatagagtaagcttacatatctagagaaacaacatagtggnnnnnnnnnnnnnnnnnnnnnnnnnntctaccggtaatttcccaatagctttgaatattcacagcagagctttattacttgagagaaagactggaagacctgaaagccacttctgctttctaaccccagttccttaaatattgaaatcttgtacattttgtgaaattccagtatgttttgcttaaggtgttaataaaattagtttgcatcatgtagtcattgagtgagggggagatataagccaaggattttaaattgacccttagctatagagaatttgctataagctagtcttgtttgt

SEQ ID NO: 164343 - DNA, 575 bp, Homo Sapiens
gtagtccacagaccagcaagttccattaaacacgtttatggtaacaattcagatttaaagacagacgcattaacatgtcagaacttactagcaatttcacgcacagctcaatctacagcagattctgaagaaaataaagttaaatagctcatacgaaagtcaccgtctgggctacggatctcctagtgacagcccagacgaccgcgggagtgtgcggcggcggggcggggaccccggagcaggtcttacctgcaaggacaggatgctgatatccgtgttgagggtggtcagcggcgtcctggatcgctcgattctgcccgggtctctggtgatgcaggctgacaatagtgggatgcgagtccagggcgatctgcaggtccaagatgtagtcgatgacgtgctgcaggatttccatcttgtctcaccttcttgttctgggggatgctgggcaccacatccttgagcttggagtagcagtcgttcatgttgtatagcaggctcatcgggtcgtccacaggggttttgctccgagagatgcacaggctgtggtacgacagcatgtttttcttaacgga

SEQ ID NO: 164344 - DNA, 606 bp, Homo Sapiens
  misc_feature (107)..(107): n is a, c, g, or t
  misc_feature (276)..(298): n is a, c, g, or t
tcttccccgggtgttctcttacttggactgtgatattcgttatttatgaaaaagacttttaaatgccctttctgcagttggaaggttttctttatatactattcccnccatggggagcgaaaacgttaaaatcacaaggaattgcccaatctaagcagactttgccttttttcaaaggtggagcgtgaataccagaaggatccagtattcagtcacttaaatgaagtcttttggtcagaaattacctttttgacacaagcctactgaatgctgtgnnnnnnnnnnnnnnnnnnnnnnnctatttgagtgaaaccttgtgaactctttaattagagttttcttgtatagtggcagagatgtctatttctgcattcaaaagtgtaatgatgtacttattcatgctaaactttttataaaagtttagttgtaaacttaacccttttatacaaaataaatcaagtgtgtttattgaatggtgattgcctgctttatttcagaggaccagtgctttgatttttattatgctatgttataactgaacccaaataaatacaagttcaaatttatgtagactgtataagattataataaaacatgtctgaagtc

SEQ ID NO: 164345 - DNA, 846 bp, Homo Sapiens
  misc_feature (553)..(571): n is a, c, g, or t
  misc_feature (647)..(651): n is a, c, g, or t
  misc_feature (655)..(667): n is a, c, g, or t
  misc_feature (671)..(671): n is a, c, g, or t
  misc_feature (673)..(673): n is a, c, g, or t
  misc_feature (676)..(680): n is a, c, g, or t
  misc_feature (754)..(754): n is a, c, g, or t
gggattctgagccgagcccggtgccaagcgcagctagctcagcaggcggcagcggcggcctgagcttcagggcagccagctccctcccggtctcgccttccctcgcggtcagcatgaaagccttcagtcccgtgaggtccgttaggaaaaacagcctgtcggaccacagcctgggcatctcccggagcaaaacccctgtggacgacccgatgagcctgctatacaacatgaacgactgctactccaagctcaaggagctggtgcccagcatcccccagaacaagaaggtgagcaagatggaaatcctgcagcacgtcatcgactacatcttggacctgcagatcgccctggactcgcatcccactattgtcagcctgcatcaccagagacccgggcagaaccaggcgtccaggacgccgctgaccaccctcaacacggatatcagcatcctgtccttgcaggcttctgaattcccttctgagttaatgtcaaatgacagcaaagcactgtgtggctgaataagcggtgttcatgatttcttttattctttgcnnnnnnnnnnnnnnnnnnnattcacggaatcttttaagtgctgaacttatttttcaaccatttcacaaggaggacaagttgaatggacctttttnnnnngaannnnnnnnnnnnnaaananaannnnnccttgtccggccacctcggcccctcgagaaagcttttctagacccattccgtttgggcgcggcgggcccccagntagggtaaggtgaaacatgggtccataagcctggttttccctaaggaaaaactccctgggtccattggaactaagggggctttggggaattt

SEQ ID NO: 164346 - DNA, 446 bp, Homo Sapiens
  misc_feature (12)..(12): n is a, c, g, or t
  misc_feature (23)..(23): n is a, c, g, or t
  misc_feature (427)..(427): n is a, c, g, or t
aaacccttgttnaaaggtgggtncaaaaggcgcccctggaacccctggttcctgccccgggtcctctggtgaatgcaaggctgaacaaataatgggaatgccgaagtcccagggcgaatctgcaaggtcccaagatgtaatcgatgacgtgctgcaggatttccatcttgctcaccttcttgttctgggggaatgctgggcaccagctccttgagcttggagtagcagtcgttcatgttgtatagcaggctcatcgggtcgtccacaggggttttgctccgggagatgcccaggctgtggtccgacaggctgtttttctaacggactcacgggactgaaggctttcatgctgaccgcgagggaaggcgagaccgggagggagctggctgccctgaagctcaggccgcctgccgcctgctgagcttantgcgcttggcaccgggctc

SEQ ID NO: 164347 - DNA, 1907 bp, Homo Sapiens
  misc_feature (423)..(445): n is a, c, g, or t
gattgaccaaaccactttaaagtttttacttaacatttcccattggggagaaaaatttccaggcgttaaaccaatgaatggaagccagtacttaactcggcaggggctaccaggcttttccatacgggaccacacgcagaagcctcagtgcacacacttctgtgttacagtaacacaacatcaaaagcaacacagctgtatacagaaacgtaggtcattcttttcagccctaatggagatgtaattaacagtatcgagcactctggaaaatcactcggcaggtttatatggactacatggagatcatatcctgtagtgtagtgaaagctaagtcctcaagagccatatgtatagatacacaatgttctttaataatctttaaaacagagatcaaagttcatttaagtcctgttggcattaacnnnnnnnnnnnnnnnnnnnnnnnggaaccaaatgatcatctaaagtttaaaattcctaaattgtccaatttatacaactgtgggagacttattcaaggtttttgaaagtccaggactgtttcagctgaaccagagggcacacaatttgcatcactgaaactgtcctgggttagtcaatgaaataaaaatgtctaaccacatacacatggatatgatctttgtcggttagattattgataaagtcagtctcagacaagtttccaaactgtgctatttaactagatacaattgagaaattctcaaatgaaaattttatatagtgtcatatcaatcaaaagaaaataatgaaactaagaatacagatcactgttggaagagaaagcaggtggtgatggtgtgggtactgcaggaggtggtggggccgtggcacactagaaaagttgggtcacgctgagtaggaagcatttgattttctctggtgcttttagctctggggccggtcaaaggcctctctctggcatggctgtccagggtttgtcccaatgtgtctgagtgagccagcttgagaaggggtcgtgccgtttcttctttcacacaggggaaaaaaaagaccaaacacggaggtgcccagggtgtggatctgctggtgtcccgggagaaccagctggctgggcagcccctcttccccacaggcagctgctattgcgtagggaccgccaggtcaccgagtggccatcacaacaaacccccgcacagtccagcccggccacagccgcctccttgtgtttctgttgtcttccctgctgctggcccacatccgtttacccaccgtgtctctcgggcccactggaggtatcagaaattccaaatttgtcaaagcagtttcagtattttcagtatatatgttgggattttataatggttcatggccagaaaaggttcagcacctcccacacacagacattggtccgtttcctgttcttggcatctctgtactttgttggtccaactcagacagcaactttaagatgttcagcgcagccatatcatggcaggactccacatccttgccgataccatggctgatcagaggtggctgagaggagcaattgataagagatacaaattcgttcttgttgtttttggggaagtctttgtattcaacctggaatccctggactctggaaagatagtccagttgctcagagggtctcgtgagaggtccatggggtacgtggcctgaagagatgttattctttaaaatggtctcggctgtgggcgaggtgcccccatacaacaactctcgggctatcatggcagttaccgtggccttggcaggattcggagctgccctggtaaaatctttggtgtgatgtccttgactaactcctacagcctgggcgacctcgggcaccatgggaagaattccagcaggcagctgctgatgacttagataaggcatcctgaactcatcctctttattac

SEQ ID NO: 164348 - DNA, 1070 bp, Homo Sapiens
catgaagaggatgggacctgtttggcccatgaattcaattgactcattggccccatcacaagagatcagtgactcaatgctcagcacccagctggcaatgtgcccaggaccccctgcacttcccaagcagtgagcgcacacccaatgggtaagcccatgaacccagtttatgacactgcgttgggcaaaacgtccatgtccccagcactgagcatggcctaagccccatagcagctggcaagggacccaactgccctgcctgcctctagctcccagcattgctactgtgcaggccaagggtactgaagttagtcccactgtcccctgtccatgcatgttggagggaccaggccatcgtggtggggtgggacaggagtatagttgtggccaagggcttgtgagtgggcctcctactccccagcacaggtgcaggaggaactctggaagcactgctctctgtcagtgatacagcttccaaggtgttcttgagtagcagacattgtccctcagaaggggtgaccccacgggcatgcgcaccctgttccagcgggggccttttttgtagatgggcttgacggagccaggagcccagcgcgtcaggtaccggttgagttggggtttgctcttcggaacaactccttcaggaagccgaggcctgtgatttggtaatagacctgctcggtgggccatcttcacacactcctcgatcttgcggtgttcttcctggcataggcctgtgatctttcggggcagcatgcctccatgaggccggatgaactggctaagcagcagaacatcgtcatagttatacttgtgcttcaggttccaacggcagatggggcactggccagaggggttaggaggatttggactctccttgggagtcgctgtgatacggccttcaattatagttgtcttcccttcttgggtctccaccacttccctgaacccgcgagctggaagccgagaccagctggtcgctgccgggcccgctagtagcccacggagaagccgcccacagccggacaccagagccttgagggccgccatcttcaaaaacctaccctccc

SEQ ID NO: 164349 - DNA, 715 bp, Homo Sapiens
ggaagaaaagtggatatccggagtgttaattatactcaccacccaatgccaaccttcccgctcccttgggctttccctctggccccctcagagctgcagagggagctgcaaagactatcccctcttccccgccactcaggtctattaccaaatcacaggcctcggcttcctgaaggagttgttccgaagagcaaaccccaactcaaccggtacctgacgcgctgggctcctggctccgtcaagcccatctacaaaaaaggcccccgctggaacagggtgcgcatgcccgtggggtcaccccttctgagggacaatgcctgctactcaagaacaccctcggaagctgtatcactgacacacagcagtgcttccagagttccctcctgcacctgtgctggggagtaggaggcccactcacaagcccttggccacaactatactcctgtcccaccccaccacgatggcctggtccctccaacatgcatggacaggggacactgggactaacttcagcacccttggcctgcacagtagcaatgctgggagctagaggcaggcagggcagttgggtcccttgccagctgctatggggcttaggccatgctcagtgctggggacaggagttttgcccaacgcagtgtcataaaactgggttcatgggctttagaaaacatcacacatcaacacaagccaccacaccacccaacaccacaag

SEQ ID NO: 164350 - DNA, 1142 bp, Homo Sapiens
  misc_feature (560)..(696): n is a, c, g, or t
  misc_feature (704)..(717): n is a, c, g, or t
  misc_feature (735)..(811): n is a, c, g, or t
  misc_feature (822)..(920): n is a, c, g, or t
  misc_feature (937)..(946): n is a, c, g, or t
catttccactatgtcggttcaggatttcaaaagaatctgacgtcaatgcaatatccattattaaaagctttaaatatgaccggcatcattaccatgggataaaagtatcaattctttgaagaaatcggttctaaggaaacttcggagaaaggcattagatctggaaagcttgagcctccttgggttcgtctacaaattagaaggaaatatgaatgaagccctggagtactatgagcgggccctgagactggctgctgactttgagaactctgtgagacaaggtccttaggcacccagatatcagccactttcacatttcatttcattttatgctaacatttactaatcatcttttctgcttactgttttcagaaacattataattcactgtaatgatgtaattcttgaataataaatctgacaaaatattagttgtgttcaacaattagtgaaacagaatgtgtgtatgcatgtaagaaagagaaatcatttgtatgagtgctatgtagtagagaaaaaatgttagttaactttgtaggaaataaaacattggacttacnnnnnnnnnnnnnnnnnnnnnnnnnnnnnnnnnnnnnnnnnnnnnnnnnnnnnnnnnnnnnnnnnnnnnnnnnnnnnnnnnnnnnnnnnnnnnnnnnnnnnnnnnnnnnnnnnnnnnnnnnnnnnnnnnnnnnnnnnttgggggnnnnnnnnnnnnnnaaaaaattttttaaaacnnnnnnnnnnnnnnnnnnnnnnnnnnnnnnnnnnnnnnnnnnnnnnnnnnnnnnnnnnnnnnnnnnnnnnnnnnnnngggttggattnnnnnnnnnnnnnnnnnnnnnnnnnnnnnnnnnnnnnnnnnnnnnnnnnnnnnnnnnnnnnnnnnnnnnnnnnnnnnnnnnnnnnnnnnnnnnnnnnnntcttcttttaaaatttnnnnnnnnnngggcattttttaaaaagtggggggaattttttaaccttcccgcccccatgggaccccctccaaccgggtggtggtaaccctaattcccccgggggtatccccccttggccctggggaaaaaattttcccccgggacggaaagcttgctaaatgacccgtgaatcactgactcactatagagtaattaggcttccaa

SEQ ID NO: 164351 - DNA, 728 bp, Homo Sapiens
  misc_feature (138)..(146): n is a, c, g, or t
  misc_feature (703)..(703): n is a, c, g, or t
tataggagctagccaagaaaaataaatgtcatgacttaacattaacagctatgcaaatttggatcaacacaaaatcaagctagatcataattagaactcgatctgttctttctttaaaatactacaaactactatttnnnnnnnnncacaacaactttacattcagaaatcagacaatctggagataggccactgaatgcgagaaacccaaggctttggctctgatgctagagttgccctggaatccacacacataggacaaaaggtccagggctcaagttttaaaatccttttgctaagaaaagacatatgcacagtgattgcagtggttgcataccactgaaagaagggggtggggggaggacgtaacattaagaatggttgaaattttgtgtttttctgttaaattacaactaccaaaaagatcacaccaatccaattttagcagcactctccgaattttcacgaataagaaaaccataatttaaagaaaaattctaacctatttcacaacaatttagcaattctatcaccgggaatgtgttccacggccaccaaattttgggatgtgtacagttctgactctggggtgacactgcgaacacatcaagaaacccgcaaaggcataaacaccttgcagagctgaagaattcacatgccgagccaagttgggggcaaaatatcccactcgtcctgggtcatnctgggaaagccatctgtaatgatga

SEQ ID NO: 164352 - DNA, 827 bp, Homo Sapiens
ggggactcctggagcttgccaccagcttggacttctagggactttcctctcagccaggaaggattttgatattcatcagaaatacctccagaagattcaaggagctgtagaggtgaagtaagcctgtgaaggaccagcatgggaatcctatactctgagcccatctgccaagcagcctatcagaatgactttggacaagtgtggcggtgggtgaaagaagacagcagctatgccaacgttcaagatggctttaatggagacacgcccctgatctgtgcttgcaggcgagggcatgtgagaatcgtttccttccttttaagaagaaatgctaatgtcaacctcaaaaaccagaaagagagaacctgcttgcattatgctgtgaagaaaaaatttaccttcattgattatctactaattatcctcttaatgcctgttctgcttattgggtatttcctcatggtatcaaagacaaagcagaatgaggctcttgtacgaatgctacttgatgctggcgtcgaagttaatgctacagattgttatggctgtaccgcattacattatgcctgtgaaatgaaaaaccagtctcttatccctctgctcttggaagcccgtgcagaccccacaataaagaataagcatgggtgagagctcactggatattgcacggagattaaaattttcccacaattgaattaatgctaaggaaagccttggtaatccctggggacccacccgaatggaggataacgaaaaaaagttacgaactgggattctatcctccacttttagaccttttgggcctggggggccccctttaccctggaatg

SEQ ID NO: 164353 - DNA, 1020 bp, Homo Sapiens
aatttcagttcatctaactttgagtatccattggccaaccagtcccagcgctgtcgtgctcctctactcgaaggagctcaaacaagtgggatgagtttgaacgatattttagaagagaggaggcatgtcagtgacttgaatatttgcaatgaaatgctacacacctcttgtctatatgggaattactccatgtaaaccaattgatattaaatgtagtgttctcaattctgaggagattcattatgtcattaaacagctttccaaggaatcccttcaatctgtggatgtcctccgagaggaagtgagtgagatcttagatgaaatgagtcacaaactgcgtcttggagccattcggttttgtgccttcaccctgagcaaagtatttaaacaaattttctcgaaggtgtgtgtaaatgaagaaggtattcagaaactacaaagagccatccaggagcatcctgttgttctgctgcctagtcatcgaagttacattgacttcctcatgttgtcttttcttctatacaattatgatttgcctgtgccagttatagcagcaggaatggacttcctgggaatgaaaatggttggtgagctgctacgaatgtcgggtgcctttttcatgcggcgtacctttggtggcaataaactctaccgggctgtattctctgaatatgtaaaaactatgttacggaatggttatgctcctgttgaatttttcctcgaaggggacaagaagccgctctgccaagacattgactcctaaatttggtcttctgaatattgtgatggagccattttttaaaagagaagtttttgatacctaccttgtcccaattagtatcagttatgataagatcttggaagaaactctttatgtgtatgagcttctaggggttcctaaaccaaaagagtctacaactgggttgctgaaagccagaaagattctctctgaaaattttggaagcatccatgtgtactttggagatcctgtgtcacttcgatccttggcagcacgcatat

SEQ ID NO: 164354 - DNA, 2086 bp, Homo Sapiens
cgtgggcactgcatggttttgcttggcatgcccatcagctgaggacagcaaactcccagcagcccctacagaggtggcacatgcttggccacacatctactccctgccccacaccatctatgctcttggttggtgctggctgggatggcggttctgcccagtggtgtctctgagcgcgggatgacaggagcaaccgaagcaccctgaaggccttcactccttgttgggtaactcagccatggagatgccaaagcactagccaggaggtgagttcctctttagggctttggttttcattcctttttgtttggcttggccaaaccagaattcagcttatctgaattattttccaaaggaatgctgtcagggagggactgttctgccagcctaacaaagcaacgtagccacgtatagtacccactttctgctctttggagagaacacaggttatcaagttcatctctcttgactactcttatgatagctgatgccacagagcctatgggcaaatgccagacccagggttagacacaaggacctgaagtgacatgacggcgggacaggggaaatgtgactttctaattaggcattttatgttagtcacagtcttgaatgtataaacagcactaagactctcaggtcaggtaccttggtgatcagctactagttcttccagccctcattgaggtaacaagataaagacaaatccacttctttggccaaattcaggctttggctttatgactttcccacagagactggaatgcgtcagcctgagaccactggcctattttctcagctgccctcttgaggtcctttaacactcaaattcccagctccccactgaggtgttgtgatgcttgccttttgacctccccatcccctttagtccctgcttactactttgacattcacatcctcagtgtctcagtcttttttgccgagaaagcacagtagtctgggactgggcatttatcttctctgactgaaaatctctccttggtcttaaggaaaatactaacattgaactcactgacatgatcttagcttctttaatcagactttgtgacttaaaagtttgggggttttctttgaaagtttccagccctattcagaaagcaactcttggctgtgtgcatttttcaactccaagcagcccaggggtaagtaaacaaagtatggatgaaggtcagattttcttgtcagtttctgagaaacctggcagcctgctgttaacaacacaggccagtattgggttttattgaaattgggtaggggaccaaggtcggcctaaagaatggcggcaggtcctgggcaggaaagaatttttcctttatcacataactgtaatatttggttgctcagcataagtgatggaagcaaacactaatttctaataaaatggtgttaaactcaatggtacagagccaggtttacagtgagcaggccttgaccagcttgcggccatgggctgagttcctgtgcttctgtttatcatctgaccttgtgttctagccaggtcgtaagcgcgactgtactgttgccctgcaaccccagctccccctggaggactaaggacaagaataacaagggctggaactgtgatttaatattaattcaagaaaactacctctaacaatcactgcagtggcggaggaaaagaaatcctaagaattggggcaagatgcagcacaattcatctctggctcttggaaatctgagagaagctcaggaagtagcttgacttagtcatcaatccatacctaaagctgctcctcagccaaattcctgcatttgtggtctggatgcttggcagagtcatgctgagggctggcacacccattgctccaggaaacccgactggcttgcctccctcctctcctgggcctagcgaggccagaaatggcaatggtcggtcagtgctaagagccaggccactccgagcctgacactggcctccctctctgcatttggcagaaggtaaagtgaacaagagtccagtccagcacccccgccaactagctgagaggcacagtgaccctaggagatgtccagccagcctccaggctgagagggaaacaggcac

SEQ ID NO: 164355 - DNA, 537 bp, Homo Sapiens
ttagttgtactacactgcaaaatcctcacttgctgtgattgaatagtctctgtaggcagacaagaaaatatagctgcccaaagcacttcatcctcctagaatggaaaggtgtcaggatcccaaatacactgcaagtagatggagaaaattactgggaaggagaaaattacaaaagagactttcagtatctgtttggaacagtggatgatgaaagtggtagttacgtgtacagcatgaaaataaatttatcagacaatgatgcttgtttccatcagttattaaaaatggaaaaatagaattcttataaatgctaaaatgaaacaagagaaaaataatcactgttttataaaagaatgggaaagacatttaatttactgatgcgtgctctattcatggcatttaggaaaaaatgttaacattcttcatcctcttttcactgttttctgtattcttaaaatgtgcttctgaatcgcaaatgtgatttcactaaccggcaaaacaatgtcagaaccaaatgcttagccatttggtgtggag

SEQ ID NO: 164356 - DNA, 1243 bp, Homo Sapiens
  misc_feature (876)..(899): n is a, c, g, or t
aacagtcattcagaagccattgagacatcaggcagcagaaaggaaggtgggatggagcaggccctgtgaaggaccaagaacaaagtaatagccacagttatgaaatttcatgttattctgataaagactaatatatgcttgataacctagtgataatccataagtttggtatttcacaacatttttcagaaagcacataagattaacattcaaataaggcattatagaaagttttataaagaatgaagtgtttcctataattcttgttaaaaaaccttggttcatcgttgaaagatcgatgaatttgtttaaatatcagaagaaaagggaaataaaattgtgtgccccccaaacacataagaaccacttactggcacttgtattttaagtacctgggaaagaaaacggaacagatttttaaaggcaataacgacttgtaagacggcttgtttcatttgatttggcacgaagtaaagtaagagtaaatatgccatggaagacataatcaagtttttcctccatctctcatatttccccacttctaccagaccacacagtacatcagcaaccatcctttagattccaatttttaaaatggctgcctcagacgaacaccaataagagttctttctcccttaaaatatggtggcagtgaatgctaacaggtatcaatttctttgatcaggaacaaagaactccttcaggaaactcactttcctggtccttgttaacctatcatgtaaattctttttattggtacacctgtttactaattataattgattgctatttatgccaagggagcatttcccaggcatgcctcatctatttactaacaacaaagtatgcttactttatttacatagtgccacgggnnnnnnnnnnnnnnnnnnnnnnnnattggcgggggagatggtactataacttgttatttatcagggcagatcacacatttggatcaaaaagaaaaaccagcaagtagatcctaaaacacatttcttaacctgagtcataactgaaaacatagactttaattacattttgttgaaaattcattcaactttggtgcttgtaaaagcacttatgtcaatttttgacacaaatcataaccctcagtacacaggtattttcaaaggaaacaagtcatcttaaagtaatatttttctatatgctaattgatacatctttatagcaaattgaaaattctgagtaaactgaaagtatgctaaggaaaataacatcc

SEQ ID NO: 164357 - DNA, 522 bp, Homo Sapiens
tagctctatccagaaactgccgcttccgtctggttagaagccagtggtggatatttctttgttacattagaaatgcaaacattcccttgtcaaccaagaatactcaaagctacttgtattggaaatggcagaaggcctaaatccaaatttcttattttttataatttaccatagaagttttgtgattaaattcttacttctgccagtggaggttcatgcctgaaaggtcatggggtcctgtctgtaaatagacctaaagagaagtgcagtatttattctttgtaggcataatgtgtttgtcactgacaagcattcatattcatcccactagtcttttattgcagtcttttattgtcattttcagccttatgttggagagctttgctttctcatcatgttcacattgtcttaagttttgtgagcttctgagaaagagcttggtaaaggtttaaaggggactttgtgccaccagggagcattttatttgggcgtctcacccttttctaatgaaagctgttgtaa

SEQ ID NO: 164358 - DNA, 611 bp, Homo Sapiens
agttgtccatttcgatttaatatcttcattcttatatactttatcaccatcttctggttctggactggatggcaatgacagttgaatatcatgcaatgaaccacttccatcatgctgatgcaggagacgtttcagtttgagtaactgagtttttacagcagtgcaatcctgaaccatgtgccgaagggtcatctcatccagtatcactgtattttctggtacatcaacaaacatcttctgagcctggaaaaagggcatccctccatagctttcaaaatgacccaaaggagattctctatagggagagcctctgctcaagtcactttttccatggtgatgatagtggtcagggtggctgaggtggtaatgctcctgtccactccacctctggggtggccttttccaaaaaccttcctgaggctgccgaacatttctgtctggtcggtcaaagcggttcatattgtcacactccacattttcaagaggtgcatcctcaggcagatccacatcaagcataagatcatcatcctcaaggtcacacgactcaagattattcaaaatatcctattttaagaccgtctcagtgttctgtaagccgtccctcacctccc

SEQ ID NO: 164359 - DNA, 711 bp, Homo Sapiens
ccaagccttgtgagaaatctcttgtttgtatttcttcaggtattttcaatatgtttttctttattttcttcagcatttaatcactgtatactatgtaattcctgaaggggaagaactaattaggagttgattgagactttattatggtatagttaggacttgattgtagaagggactaaatgttccaacataatctttacccttctccccaaacaaaatatcaattctgtgtctctacatgcctttgattccttagaggtcggtaatttaacataaaacagggatgtcactttgaggggcagatgaaagtctagagaactgttccttaatagcattgtaaaagttccattccaactgccagtgtagattttaaaagtgttaaatagtgactcccttgattaaactgtttgtaattatttgagtagattaataatgaaaatactttggaaataatatacattttgacattctaccaagaggacaactttggttctggaactggtttctatttgtcaaatcagtttccttttaacataattaatccctttaacaaaaagccgtctatgggattaaaagacacgtgaaatgatacttttattattcccttgctcatataactttaaaaataatacttttagctctaatagctcaagaacacaatattcgttaatgttcagtaaagtacctgagacatctttcaatgtttcctaa

SEQ ID NO: 164360 - DNA, 1097 bp, Homo Sapiens
  misc_feature (198)..(210): n is a, c, g, or t
  misc_feature (444)..(532): n is a, c, g, or t
  misc_feature (534)..(550): n is a, c, g, or t
  misc_feature (706)..(716): n is a, c, g, or t
ttccttaagagtgtctgctacataacaaaggcataacaaataatggctattattacagccaggatgaagaatactaataagagctttcaaactggaccaaccactacttccgtgtttcaagttcatttctagcacatgaacatgatcactgttagccagtgaagtagcttctgactagatcattgattaaatctcacnnnnnnnnnnnnntagtatatggaaaccaagatgagagcaaaagaaaacgttacctgagtaggcagctaaaacatattttgacattatttttaagcagcattcataaggttcacggagcacagataataaaagaaaaagcaatgtagaagtcttaaaaaacccaaaggaaattgctatgaaagaaaccctaatgaaaggtaagagatttccaaagaaaacagagggcaggtgcagtagctcatgctnnnnnnnnnnnnnnnnnnnnnnnnnnnnnnnnnnnnnnnnnnnnnnnnnnnnnnnnnnnnnnnnnnnnnnnnnnnnnnnnnnnnnnnnntnnnnnnnnnnnnnnnnnttagctgagtgtggtggcgcacacctgtagtcccagctactctggagtctgagttgggaggactgtttgagcccaggaggttgaggctgcggtgagccatgatgttgcacaactgcactccagcctgggtgacagcgtgaggccctgtctccaagnnnnnnnnnnnggaacagagtctttgcatgcttaatccatgtttatctaattttaaaacaatacaagactggtcatctttttatctaccaaccaagggtcagtatacttatttttatcttagtttatttctaggatgatcttaatttctttttccctgttttatgaagcatttagttcctttctgttcccagtatgaaatttatttttgaagaattctacttttgttttctttaaagccagggactttttcccctattaatctaatcccaaaaatcaaaggtgacgaaaagaaaagaaaatgctcccagccgtgggagcatatttgtggaaaggacattcaaggctacatgtaggaaagggtaaaatataagaaagattccatgcggacccc

SEQ ID NO: 164361 - DNA, 551 bp, Homo Sapiens
  misc_feature (246)..(305): n is a, c, g, or t
ctatacgacaatggagtggaaaagagatttttatttttctatattggcagttttcccatcagtgaccggttttattactgaacaggaacagcttaatgctgaaaatttgctgctgaatgactggcaaagactattcgactcttgaaaatttctagcacaaatgcactgaggaaaaaacgttcttcctagtaagggtctattctcaaatagagatatattccctattaaaatcagtcttaaaatagnnnnnnnnnnnnnnnnnnnnnnnnnnnnnnnnnnnnnnnnnnnnnnnnnnnnnnnnnnnnacatgatcaacatgatttacagttagctatcctagaagtatgcttttttaattctaaaaatcctatttacaaagtatgcttacattgcattttaaaagacatgcatcaaatgtaaacaaatgattacagccattttataaaaagtcatattctttaaaacattttttgtcatcattaaaaattaaaaggcaataaagtgtcattgtcgtgaaacagtacgtgatctaaggaaaataacatcggaca

SEQ ID NO: 164362 - DNA, 695 bp, Homo Sapiens
tggaagaccagaagagaagtggaatcctcagacctcaagctttttgcaagtgttggtgtctgtccagtcccttatattagtagctgagccttattttaatgaaccgggatatgaacggtctagaggcactcccagtgacacacagagttctcgagaatatgatggaaacattcgacaagcaacagttaagtgggcaatgctagaacaaatcagaaacccttcaccatgttttaaagaggtaatacacaaacatttttacttgaaaagagttgagataatggcccaatgtgaggagtggattgcggatatccagcagtacagcagtgataagcgggtaggcaggactatgtctcaccatgcagcagctctcaagcgtcacactgctcagctccgcgaagagttgctgaaacttccctgccctgaaggcttggatcctgacactgacgatgccccagaggtgtgcagagccacaacaggtgctgaggagactctaatgcatgatcaggttaaacccagcagcagcaaagaactccccagtgacttccagttatgagctgcattgatgtggacttcatagacacaaaggcttcgaagcacaagccaaatatgtcaatatttgtatgtaagaaactaattatgtaataggtaatgaactgaaactatactatgccctataggagaacgcgtcaaaatcg

SEQ ID NO: 164363 - DNA, 1205 bp, Homo Sapiens
  misc_feature (173)..(181): n is a, c, g, or t
gttcagtcattctggttttcaatgcagtgctttatctcatgtccttgaatatagttgtgtaactttattttttaggtaataattagaacagttcccttcagaggctgcatttgccttcttctgccacctaaatattacttcccttcaaatctgcctttgaatcatcatttttnnnnnnnnnttaacatgtttttgttgtagttatcttctggggtttcaattcctcagaaacaacttttttcacaacggaaaggaaagaacactagtgttctttcagtaaagtacaaagtgtttattttacaaaagagtaggtactcttgagagcattcaaatcatgctgacaaggatactgatagaaaaagtgatttcttcttattataaagtacatttaaagttcaaggactaaccttatttatttgggaaaggggaggaggaaggaaatgatatggtacccagacactgggctaggctgcaactttatctcatttaatactcccagctgtcatgtgagaaagaaagcaggctaggcatgtgaaatcactttcatggattattaatggatttaagagggcatcaatcagctcaactcaagatttcataatcatttttagtatttagattgtgcctcaaagttgtagtacctcacaatacctccactggtttcctgttgtaaaaaccttcagtgagtttgaccattgtgctcttggctcttgggctggagtaccgtggtgagggagtaaacactagaagtctttagtacaaaactgctctagggacacctggtgattcctacacaagtgatgtttatatttctcataaagagtcttccctatcccaaggtcttcatgatgccagtagccatatatgataaattatgttcagtgataacttagttatcagaaatcagctcagtggtcttccccgccatgattcacatttgatgagtttttaaaaatcaaagtgattttgaaaatctctaatggctcagaaaataaaaacatccagtttgtggatgactatatttagatttctctagactctagtggaagacctttggaaaggccatgccaaccgtgcttgtactgctagaagcactttatgtttcctttttgggtgaaatggatttatgtgagtgctttaaacaaatagcaatacttatagactgaaataaaatgaaacttcaaataagactatgtttaatttgt

SEQ ID NO: 164364 - DNA, 1026 bp, Homo Sapiens
gggattcctagttaaggcggcacagggccgaggcgtagtgtgggtgactcctccgttccttgggtcccgtcgtctgtgatactgcagtgcagccatggcagaaccgcagcccccgtccggcggcctcacggacgaggccgccctcagttgctgctccgacgcggaccccagtaccaaggattttctattgcagcagaccatgctacgagtgaaggatcctaagaagtcactggatttttatactagagttcttggaatgacgctaatccaaaaatgtgattttcccattatgaagttttcactctacttcttggcttatgaggataaaaatgacatccctaaagaaaaagatgaaaaaatagcctgggcgctctccagaaaagctacacttgagctgacacacaattggggcactgaagatgatgagacccagagttaccacaatggcaattcagaccctcgaggattcggtcatattggaattgctgttcctgatgtatacagtgcttgtaaaaggtttgaagaactgggagtcaaatttgtgaagaaacctgatgatggtaaaatgaaaggcctggcatttattcaagatcctgatggctactggattgaaattttgaatcctaacaaaatggcaaccttaatgtagtgctgtgagaattctcctttgagatttcagaagaaaggaaacaatgtgattcaagatatttacataccagaagcatctaggactgatggatcactgtcccgattcaaattattcttcagtccatttccccttcctatttcagctgttccttttcacctaactgttcagtcattctggttttcaagcagtgctttatctcatgtccttgaatatagttgtgtaactttataaggtaggtaataattagaacagttccccttcaaaggctgcatttgccttcattctgccacctaaaatattacttcccttcacatctggctttgaatcaatcatttttacaaacaaattacatgtcaggatgtaagtatctactgggg

SEQ ID NO: 164365 - DNA, 992 bp, Homo Sapiens
  misc_feature (279)..(287): n is a, c, g, or t
ggcatagatataacactgttaaaaagcagctggtacggccggaatcccgggatatcgtcgacccacgcgtcgggtttcaagcagtgctttatctcatgtccttgaataaagttacacaactatattcaaggacatgagataaagcactgcttgaatatagttgtgtaactttattttttaggtaataattagaacagttcccttcagaggctgcatttgccttcttctgccacctaaatattacttcccttcaaatctgcctttgaatcatcatttttnnnnnnnnnttaacatgtttttgttgtagttatcttctggggtttcaattcctcagaaacaacttttttcacaacggaaaggaaagaacactagtgttctttcagtaaagtacaaagtgtttattttacaaaagagtaggtactcttgagagcaattcaaatcatgctgacaaggatactgatagaaaaagtgatttcttcttattataaagtacatttaaagttcaaggactaaccttatttatttgggaaaggggaggaggaaggaaatgatatggtacccagacactgggctaggctgcaactttatctcatttaatactcccagctgtcatgtgagaaagaaagcaggctaggcatgtgaaatcactttcatggattattatggatttaagagggcatccaatcagtcaaatcaagattcataatcatttttagtatttagatcgtgcctcaaagttgtagtacctcacaattactcactggttctgtggtaaaaactcagtgagtttgacatgtggtctggctctggctgagtacggggaggagtaaccttaattttgtccaactgtctggccccgtgttctcccagggttttttttcaaaattccttcaggtttagccgcattaatttgaaataacggccccatagtaaaagacatgcaaccggtattacaagggggatcgtatataaaaacagtcatcattttattc

SEQ ID NO: 164366 - DNA, 561 bp, Homo Sapiens
tttgaaatttcaaagttgttagcaaaattattcatttccataatttttacgagtaaaaatagaaagagctgatcatgtaccttaatattgtcactttatatattactcaaaagtacaaataaccctaaaagtagaatcccaggcttatcatattataaaaatactgagacatttatcaaacataactaatataaatgaaactacatttttaaaaatgtttcacaaacaccagtccatctttctctttggttcagaaaataaaagaggtaggttcaaataaagaaaatgcctattacatcattagattttcattaaaatgctggaaatttataacagaaattattagaagtgaaatgagtttaagaactaaattaaaaactgataataacttcaactagtaaatatttttctaagttctaatcacacaaataagaaaagatagttgactataaaaatggctttagtaacaataaaaaaatgctctcattattataaagtaagtctcctatataaaaacatgttccataaaacttggggcaagagagaatatggattccaatt

SEQ ID NO: 164367 - DNA, 1433 bp, Homo Sapiens
agagattgatgacacaagagtttcccgcttattaggatcagacagggttgtcgttttggaaagtaggccaacagaaaatcctactgcacacagcaatctctacatcttggctggacatgaaaatagttactaagcaacagaaactgatctcaaatgacaggaaaatgaatatactccattgaaaggaaaaataaggaaattcaatacaaactgcactatgatttgctttaactattatgggttatattgcaaatgatctgtactttagggtagaattcaatattttctgcagctggaaacagctagtctatctcttgccactgtgtggtggttatatcaagtttgcttaataaaagctatgagacaaatagtcctctatttccaggaaacacagtctttttttaaaaaaaacaatgtttgtaacaagggtgccatggtatttttagataactcgtgattatcttaagaaaagttaaatttagtgatcattttatatcatgtcttattccttcttaatgaacataatttgttaaattctcaagcaagggttccacttttatattggccattctgtatgtttttgtaaaacagaatatttaatccttatttattaatctcttgctggagtggtgtaatgtatctaacttttagcaaaggagggttgcagagcagcttaaattttttttataatgtataagaattttgtttatcttttaagagtagtaaagtactttgagtgtttgggggttcaacacacacatgcaattttgcttaacaaaagtattttataatacagtttcatacagaattaccttaaaagggagtcttatgttttcaactacagatagttgtaagggatcatacagaagatattgatgatagttgaaatattcttagaaggggtgtgtatgtctagctgtgtctaccatgtgtatgtattcttgacaagcagtataaaataccctgtgatttttctttacattagggataatgcataaggaattaatcctcatatatattatcatcccctaatgcagcagggggaagtatttaattgcccatgatatgtattttacttatactatgccagagaggaaactataaagtaattacacatgtaatcttgggtttttcacatatgtaggtattcattttgagtaggttgaagaagaaaaaaaatatttaaatgaattgaattcctgatgggatagtatcaataagtatttaaaagccagtattctaaaaataataaagggtagggtcatttttgagtttgtttttcttttgctattgttaatattcaaaatttaaagtgttacattggtacctgttgtcttaatgcatttattgagaacagcattgagatgatgaacaaggggttagcaatagcaaatctataattatcttgactaattactaagcggatcagcggg

SEQ ID NO: 164368 - DNA, 1116 bp, Homo Sapiens
tcgcactggagacagcataaagagtgaacaaatgttgggatgagagaagatgacatcaatgtgggagttcagtataactggggataaactagaagaacctgtgattttacagtcatcttattacctgccagggctcatctagccatggcaatgtttgccttgaatgggggtgaaagcctttctttgttggatcaaatactactacactattacacttccacactatttatttggggatgggctgggagtgacagtagcctagtagttcagctacctgattactgccccattcttttagaagcacatgtctgccaaggagtggtttgtactgctgtgtttggtacatctagtcttttttctgctataagttttccttacctgtcctttagtgtagattttattcatcacaggacagaataatcaaggacaaccaaaatccttttgttagtttcagtacctcagctatcaacatttctgagctaccattcaatgttcctctgtgtcatggagtgaaattcttgttttgtgggtattaggagtgtgggaatgtgataacctaaacaacctttgctctgaaattccatttttccctctttccctgagttgtattgacctacagagttaatttcctttgtatttttttaagaaaatattaaaaatcaacggtctcaaacaaaaacaaaaaggcgagaggcccaaccctgtcgggccgcctcggcccctcaagaagccttttctagaccctttcctttgggcggcgcggccccccactcagcgtaaggggaacactggtcccttagctggttctccctaggggagaatcctgggggacatgaccttaaatgcctttggctatcttcccccaccaataaaaaaagaacgtgcccggggcgggctaaacccggaggggggttctgggagacaaacctcccaaaaatgggcgagggttctctgaagaggcccctgtaaggctgtgggaaccctctttcccaagcgcgggaggagccgccacaacccctgggaggccaccccatattaactctcacacaatttaaaaacccgcccctcgggggccccccgcggccccccactttccacttttgggggccggaaaaa

SEQ ID NO: 164369 - DNA, 749 bp, Homo Sapiens
tagagattatgtcagctggtggcttcttatctataattaattgcattaagaaattatctattactagttttaaaaggatttcatttaaatgattctatttggagaaaaaaacaaaatggatatggagtttgttagatgccttttagccttttcctttaacctatgttctgtggaatgcagttgtgggagatcattcgtaagtgttcaaagaaaataaaagggttccatagtcaagtaactttgggatatgctgtgttccataacctcctcatgacgatttacagtactcccagatcaaagagtttacaacctaaagtctgttgtcatactcctaaattacaagttacaacatcaaaaacactcaataaatagtcattgcatgactgaaagactggaagaacaaatagaactgtaagaaactgatttgattctagtgaaattcccctccctttctttcaccctcctcccaaaacagcatggaaggtggagtggagcaacttacaggtaatggcagtgggtagacagcagtgtgctttcaagcacatctcagccctgaggagtataaatcccatccatagctggaaaaatagcctgagatacgaaaagttttacccagcaaattccagtttattggttcaatgacctaatgtccattcccttagtaggcacagcagtttcaaaggtgacatcatctgaacaaacagtcctggtgataacatgtcaatgatttaacttaaggaaataaactt

SEQ ID NO: 164370 - DNA, 590 bp, Homo Sapiens
ttagatttcaccgagacacagtgtctcatcacataatgcaaagtacaaccccaaaatattcagcatatgaagaaccaggacaatcttaattcacttggcaaagagaatcctcgaataacaatactgagaagacacagatgttacaatcatctgacacatacttttaaatagttattacaacaatgatccatgaatgaaaggataacactcttgaagtgaatggaaaattgggaagtcttagcaagtatctggaagctctaaacactgattttaacttaaaaattaaaaaatgtattcatcaaaactattaggagaaaaaaagcttcaatgggttatttcaataacaaaattgagacactcagaataaagtcaatgaacttgaaaacacaacaaaaataccaacctaacctgaacaataaagaaaaatgagtgcttttgcaaatgaacagagcctccgggacaaacagaaaaataagaaaaatctaacacatcattgtaatcctgcaggaagaagagaaagaggtcctccagaaagaaaactccgaagaattaatggctgaaaacatatcaaatttatcaaaacactttag

SEQ ID NO: 164371 - DNA, 522 bp, Homo Sapiens
  misc_feature (495)..(495): n is a, c, g, or t
ggtatagaagctggcttcttggaggagaatgggaactgatttatttttttggaaggaatcattgtaactatcaggaagacagtgtgggcacatgggaaaaagagatttcatgatagccactgctcattgagagaacagaaggctttgaagatcttctcccaggaagctgtaaacacatacagagaagatatttaccaaaatgtctgaaataagaagtatggagattaataatgaaaaattgattgccgcccacacctacactggcaactttggcttttgatgtttattgaatttctgaaggaatttgtaacttcaccagttttggatatttcactgttctctaatgtccagggacaggtatctgtgggcaaagtggcagcagaaaggaggtggggaaaataaataccgccccctctgggtgagaattttggagggacaataggtgattgaaaattaaaaaaaatatatacaggctccattttaataatttgaatnggggaaataatagtttcataaggaaat

SEQ ID NO: 164372 - DNA, 536 bp, Homo Sapiens
tagggatagaaggtgctaagcatcatgcaaaagatatgaactgaaggctgtgtcggggctgcaggaaggagacaggatctagtctggaggaataggggagagaaagactaagggtcagctatcacagagaagtcttggataaacagagatgcggatgggtcaatgaggaaggagaaggaaactgtgtgaacaaagaaaggttgggtaagagttagctggaatgtatggcaactgaggacgtgttccatgccaagtcactgggaaagccactgaagcatgtaaaagtggggatgaaactagattagagctatgttgttggaagactgctctggccgtgtttaaaatgggatcacacaacggcattggaattagaagttattgcaataatgggaacaagtaacaaggacttgaaccagggcctatgtaataacagcagggcaatgaggatggaaaggatacttgagtaattgcagagtcttgttgagagttagaggcagattctggtctcaaatggtatctttctcttaaggaaaata

SEQ ID NO: 164373 - DNA, 750 bp, Homo Sapiens
gtgcagacatgaatggattaccaacaaaaggaccaacagaaatctgtgataaaaagaaagactaaagaaattttcctaaaggaccccatcatttaaaaaatggacctgataatatgaagcatcttccttgtaattgtctctgacctttttatctgagaccggaattcaggataggagtctagatatttacctgatactaatcaggaaatatatgatatccgtatttaaaatgtagttagttatatttaatgacctcattcctaagttcctttttcgttaatgtagctttcatttctgttattgctgtttgaataatatgattaaatagaaggtttgtgccagtagacattatgttactaaatcagcactttaaaatctttggttctctaattcatatgaatttgctgtttgctctaatttctttgggctcttctaatttgagtggagtacaattttgttgtgaaacagtccagtgaaactgtgcagggaaatgaaggtagaattttgggaggtaataatgatgtgaaacataaagatttaataattactgtccaacacagtggagcagcttgtccacaaatatagtaattactatttattgctctaaggaagattaaaaaaagatagggaaaagggggaaacttctttgaaaaatgaaacatctgttacattaatgtctaattataaaattttaatccttactgcatttcttctgttcctacaaatgtattaaacattcagtttaactgg

SEQ ID NO: 164374 - DNA, 604 bp, Homo Sapiens
ccttaggaagaaactaaaggtcatgaattgagacctttgttctaatacaaatatttagtgctacaaatgtctctatatatacttctttagtagcatgctataaattttgatgttgtgttctaattttcattcagttcatgatactttgtaatttcccttttcattttcttgacccaagggttagttggaatatgttaatttcccaatatttgaagatatcctagatacctctctgttattaatttccaagttaattctactgtggtcaggaaattacacactatctgactaaaatccttttaaatttattgaggcttactttatgatccattcttctttcaaaagaaggtgcattctactgttgttgggtaaagggtacacttaatgtcaattaggatatgttgtgttcagtattgttgttcaagtcatctgtatccttactgattttctttctaccttcctatcagttatcgagaggggtattgaagtctctgattttaagtgtgaatttgtctatttttccttgtagttcttaacatcttgcttcaagatttttgaagctattagatcacgaatgtttgggactgttatgtcctctaaggaa

SEQ ID NO: 164375 - DNA, 563 bp, Homo Sapiens
agacacttggagaaagcggaacatacagatggtccccaatttaccagggtttgactttacggtggtggagaagtcatatgcattcagtagaaactattgaaaaaggaaaataaatctcaggacccccaaaccactaagccaaatggaactcactaataaatcttgggaccccaaatatcactaggccacaaggaaattccttgtgaacaaagaacagacagaactcaaagtcctctctttgctcaccatgagacaaatgcttatctgattgcttcctttgccatattgtttcactaagagactaaggcctaagtgactattcctgtaaattgtgttttcagtggaaggcttatcagaaactcaaaagaatgcaacgtttgtctctcatctacctatgacctggatgcccccatccccactttgggtcatcccacctttccagatcgaaccaatgtacaccttacatatatttgttgatgtctcatgtctccctacaatgtatagaaccaccatcaggacctcctgaggctgtgtcacagacacattctaacctcaaggaaata

SEQ ID NO: 164376 - DNA, 594 bp, Homo Sapiens
ctagatagttagcagttcccaaaaatataacaaatatttgtggatgcatgagatgcaatccttcaaagaatgaatctgaaatatatttttaatatttacttaatatccactgaagatatctttatgcaagacaagagtcagccatcagacactgaaatatattatgatagattatgaagaattttctctgtagaattatattcttcctggaacctggtagagtagattagactcaaaggctttttcttccttttcttactcctgttttttccactcactcttcccaagagatttcctaaagcttcaagcttaataagcctaatagtgaaaaataactgaatttaatggtataatgaagttcttcatttccagacatctttaattgatcttaaagctcatttgagtctttgcccctgaacaaagacagacccattaaaatctaagaattctaaattttcacaactgtttgagcttcttttcattttgaaggatttggaatatatatgttttcataaaagtatcaagtgaaatatagttacatgggagctcaatcatgtgcagattgcattctgttatgttgactcaggtggtgtg

SEQ ID NO: 164377 - DNA, 876 bp, Homo Sapiens
  misc_feature (845)..(845): n is a, c, g, or t
gacatgagtggattgataccatcgtggtactccttgggatcgcctttgtagtctataagctgttcctgagtgacgggcagtattctcctccaccgtactctgagtatcctccattttcccaccgttaccagagattcaccaactcagcaggacctcctcccccaggctttaagtctgagttcacaggaccacagaatactggccatggtgcaacttctggttttggcagtgcttttacaggacaacaaggatatgaaaattcaggaccagggttctggacaggcttgggaactggtggaatactaggatatttgtttggcagcaatagagcggcaacacccttctcagactcgtggtactacccgtcctatcctccctcctaccctggcacgtggaatagggcttactcaccccttcatggaggctcgggcagctattcggtatgttcaaactcagacacgaaaaccagaactgcatcaggatatggtggtaccaggagacgataaagtagaaagttggagtcaaacactggatgcagaaattttggatttttcatcactttctctttagaaaaaaagtactacctgttaacaattgggaaaaggggatattcaaaagttctgtggtgttatgtccagtgtagctttttgtattctattatttgaggctaaaagttgatgtgtgacaaaatacttatgtgttgtatgtcagtgtaacatgcagatgtatattgcagtttttgaaagtgatcattacctgtggaatgctaaaaatacattaatttccaaaacctgtgatgccctaagaagcattaagaatgaaggtgttgcaggcgtttgaagggnaccgagcggttttgcaacggttcaaaaagga

SEQ ID NO: 164378 - DNA, 943 bp, Homo Sapiens
cgagtgggtccctgccctgggctggaacgaccctgacagaatgttgctgcgggatgtaaaagctcttaccctccactatgaccgctataccacctcccgcaggctggatcccatcccacagttgaaatgtgttggaggcacagctggttgtgattcttataccccaaaagtcatacagtgtcagaacaaaggctgggatgggtatgatgtacagtgggaatgtaagacggacttagatattgcatacaaatttggaaaaactgtggtgagctgtgaaggctatgagtcctctgaagaccagtatgtactaagaggttcttgctggcttggagtataatttacgattatacagaacttggcctgcagaaactgaaggagtctggaaagcagcacggctttgcctctttctctgattattattataagtggtcctcggcggattcctgtaacatgagtggattgattaccatcgtggtactccttgggatcgcctacgtagtctataagctgttcctgagtgacgggcagtattctcctccaccgtactctgagtatcctccattttcccaccgtttaccagagattcaccaactcagcaggacctcctcccccaggcttcaacgtctgagtacacaggaccacagaatactggcccaggctgccacttccggctctcggcaagagctagacagcgacaacaaggactactgaacaactcagcgacacagcggcttcacggcacaggcttggcgaacctggctggccctactacggatcatcagctacggccagccaactccgacgcgtgccaacaccccctcctcaagcactacgatggtaacataccccggcccctagtccctccccatcctaagccctgggccccggctgcaacacacggctaaaccacaaggccctaacactgcgcaggccacgggcagga

SEQ ID NO: 164379 - DNA, 772 bp, Homo Sapiens
  misc_feature (576)..(687): n is a, c, g, or t
  misc_feature (690)..(691): n is a, c, g, or t
  misc_feature (693)..(694): n is a, c, g, or t
  misc_feature (697)..(702): n is a, c, g, or t
  misc_feature (712)..(727): n is a, c, g, or t
gggatgtatattgcagttttgaaagtgatcattactgtggaatgctaaaaatacattaatttctaaaacctgtgatgccctaagaagcattaagaatgaaggtgttgtactaatagaaactaagtacagaaaatttcagttttaggtggttgtagctgatgagttattacctcatagagactataatattctatttggtattatattatttgatgtttgctgttcttcaaacatttaaatcaagctttggactaattatgctaatttgtgagttctgatcacttttgagctctgaagctttgaatcattcagtggtggagatggccttctggtaactgaatattaccttctgtaggaaaaggtggaaaataagcatctagaaggttgttgtgaatgactctgtgctggcaaaaatgcttgaaacctctatatttctttcgttcataagaggtaaaggtcaaatttttcaacaaaagtcttttaataacaaaagcatgcagttctctgtgaaatctcaaatattgttgtaatagtctgtttcaatcttaaaaagaatcaataaaaacaaacaagggnnnnnnnnnnnnnnnnnnnnnnnnnnnnnnnnnnnnnnnnnnnnnnnnnnnnnnnnnnnnnnnnnnnnnnnnnnnnnnnnnnnnnnnnnnnnnnnnnnnnnnnnnnnnnnnnaannannaannnnnntttttggggnnnnnnnnnnnnnnnnaaaaaattttttaaaaacacattttttggggcgcgcggggccccc

SEQ ID NO: 164380 - DNA, 941 bp, Homo Sapiens
ggtggcaattccgacgagggagacccctgtgggttgtgaggccgccccgggcggtggcagcaagaagagggactccctggggactgcgggctcagcgcacctcattatcaaggatcttgggagaaattcattcaaggcttttggatcacagaccagttattcaaggtgaaactcgttattttgtaaaagaatttgaagaaaaacgtggtcttcgagaaatgcgagttcttgaaaatttgaagaacatgatccatgaaacaaatgaacatactcttcccaaatgtagagacacaatgcgggacagcctcagccaagttctccagaagatgccaagcagctaatgactcagtctgtagactccaacagagggaacaggaacgaaaaaagattcatagtgaccacttagtagctagtgagaaacagcatatgctccagtgggacaacttcatgaaggagcaacccaacaaaagggctgaagtggatgaagagcacagaaaagccatggaaaggcttaaagaacaatatgctgagatggagaaggacctagcgaaattttcaaccttttaagaacttgaaccacaacaatcacaaactaatgagaagatgttcacctctctcctgaaaactattcccaccagaccgtttagcctctgcttcaagcttagcaatatattcagtggcactcttatatcagaagaaagaaatttctactggcattctgattggatatttaaagaagggtgccacatttttccagctttaagtgcctatatatgattatttgaatgaagaggagtaggaaggaaaatggaatcaatatactctttgttaggcagaattgatcatcttttccattgattaactcagagaactgtaggtatagacttcttagaaagataatttcattcctgtctatacggggttaacaataggttattatg

SEQ ID NO: 164381 - DNA, 805 bp, Homo Sapiens
ctctggagagctccccttggagagcttcaaacagctttgctgaaactgtactttgggctccagacttcactgtccttaggcagtgaaaccatcacctggtttgcattcttcatgactgaggttaacttaaaacaaaaatggtaggaaagctttcctatgcttcgggtaagagacaaatttgcttttgtagaattggtggctgagaaaggcagacagggcctgattaaagaagacatttgtcaccactagccaccaagttaagttgtggaacccaaaggtgacggccatggaaacgtagatcatcagctctgctaagtagttaggggaagaaacatattcaaaccagtctccaaatgggatcctgtggttacagtgaatgaccactcctgctttatttttcctgagattgccgagaataacatggcacttatactgatgggcagatgaccagatgaacatcatcatcccaagaatatggaaccaccgtgcttgcatcaatagatttttccctgttatgtaggcattcctgccatccattggcacttggctcagcacagttaggccaacaaggacataatagacaagtccaaaacagtactgcacgacgtgaatcatgacattggagaagacactgacgtagaggcactcgaagagtcttcgtaagctgtgcagccacagaaatactagcactaagaatgcagacagtgccagctcccctccctggaactgtgccgccccgagaattctgagcaaaccatgaagccagcttggaaaggtgctcccaggaacagatggtagaccgact

SEQ ID NO: 164382 - DNA, 529 bp, Homo Sapiens
tgagcaggtagatgactggtccaataaattctcagaatggaagaagaaagcacagtcaagatttacacagcatcaaaacactgttaaagaattgcagatccagcttgagttaaaatcaaaggaagcttatgaaaaggatgagcagataaatttattgaaggaagagcttgatcagcaaaataaaagatttgattgtttaaagggtgaaatggaagacgacaagagcaagatggagaaaaaggagtctaatttagaaacagagttaaagtctcaaacagcaagaattatggaattagaggaccatattacccagaaaactattgaaatagagtccttaaatgaagttcttaaaaattacaatcaacaaaaggatattgaacacaaagaattggttcagaaacttcaacattttcaagagttaggagaagaaaaggacaacagggttaaagaagctgaagaaaaaatcttaacacttgaaaaccaagtttattcctgaaagctgacttgaaactaagaacagagtataatt

SEQ ID NO: 164383 - DNA, 993 bp, Homo Sapiens
  misc_feature (912)..(921): n is a, c, g, or t
  misc_feature (936)..(936): n is a, c, g, or t
caaatttagggactatatgctacctgggtttccagggcacacctagacaaacaagggagaagagtgtcagaatcagaatcatggagaaaatgggcgggggtggtgtgggtgatgggactcattgtagaaaggaagccttgctcattcttgaggagcattaaggtatttcgaaactgccaagggtgctggtgcggatggacactaatgcagccacgattggagaatactttgcttcatagtattggagcacatgttactgcttcattttggagcttgtggagttgatgactttctgttttctgtttgtaaattatttgctaagcatattttctctaggcttttttccttttggggttctacagtcgtaaaagagataataagattagttggacagtttaaagcttttattcgtcctttgacaaaagtaaatgggagggcattccatccccttcctgaagggggacactccatgagtgtctgtgagaggcagctatctgcacttctaaactgcaaacagaaatcccgtgttttaagactgaatgttttatttatcaaaatgcagcttttgggggagggaggggaaatgtaatacttggaataatttgtaaaatgatttttaattttatattccgcggaaaagaattttatttattggaaatttaacccttcgtggccgcccgcaaaaggatgggggcccctttctcctggggggaatccccacctgggttcccctaagaaaatcccaagggaaaatcccctcggaactttcctcggaatacccacgcctgcaaaaaggcgcaaaaaccgtgaatccgggtttaaaaaatggggcccccaccccgggggggcggctccacggcagggaatggctgggctaacggggaatggcccaccccacaatccctcctaatnnnnnnnnnnagggccttgtgcccnttggcccttcccaaagaaagggggtaataatattatgccaagaaataaatttttcac

SEQ ID NO: 164384 - DNA, 922 bp, Homo Sapiens
  misc_feature (539)..(622): n is a, c, g, or t
ggtgaggagcattaaggtatttcgaaactgccaagggtgctggtgcggatggacactaatgcagccacgattggagaatactttgcttcatagtattggagcacatgttactgcttcattttggagcttgtggagttgatgactttctgttttctgtttgtaaattatttgctaagcatattttctctaggcttttttccttttggggttctacagtcgtaaaagagataataagattagttggacagtttaaagcttttattcgtcctttgacaaaagtaaatgggagggcattccatcccttcctgaagggggacactccatgagtgtctgtgagaggcagctatctgcactctaaactgcaaacagaaatcaggtgttttaagactgaatgttttatttatcaaaatgtagcttttggggagggaggggaaatgtaatactggaataatttgtaaatgattttaattttatattcagtgaaaagattttatttatggaattaaccatttaataaagaaatatttacctaataaggnnnnnnnnnnnnnnnnnnnnnnnnnnnnnnnnnnnnnnnnnnnnnnnnnnnnnnnnnnnnnnnnnnnnnnnnnnnnnnnnnnnncaagggagaaggacggccaacggagccagcgatactacagaggaatcgatgattcttccgccgccccctggactaagagacatcttcggtaaaaaaacttccttgcaatggggggaggcgccgtggggggaggcggccgcgcggcgcgaagtaaaaaatgtgttcttaaaaaaaggtcttgagggggcggctcgcgccccaatgaggacaatgtcaaactgaaaggagaagcggtcttgggcgaaataaagggacgggggagacggaccaccatcaaggggggtgtatgccgcaccaacg

SEQ ID NO: 164385 - DNA, 1461 bp, Homo Sapiens
ccgcagggtgcggctggtggacacaggggacaagttccgcttcttcagcatggtgcgcgacctcatgctctggatggaggatgtcatccggcagatcgaggcccaggagaagccaagggatgtatcatctgttgaactcttaatgaataatcatcaaggcatcaaagctgaaattgatgcacgtaatgacagtttcacaacctgcattgaacttgggaaatccctgttggcgagaaaacactatgcatctgaggagatcaaggaaaaattactgcagttgacggaaaagaggaaagaaatgatcgacaagtgggaagaccgatgggaatggttaagactgattctggaggtccatcagttctcaagagacgccagtgtggccgaggcctggctgcttggacaggagccgtacctatccagccgagagataggccagagcgtggacgaggtggagaagctcatcaagcgccacgaggcatttgaaaagtctgcagcaacctgggatgagaggttctctgccctggaaaggctgactacattggagttactggaagtgcgcagacagcaagaggaagaggagaggaagaggcggccaccttctcccgagccgagcacgaaggtttcagaggaagccgagtcccagcagcagtgggatacttcaaaaggagaacaagtttcccaaaacggtttgccagctgaacagggatctccacggatggcagaaacggtggacacaagcgaaatggtcaacggcgctacagaacaaaggacgagctctaaagagtccagccccatcccctccccgacctctgatcgtaaagccaagactgccctcccagcccagagtgccgccaccttaccagccagaacccaggagacaccttcggcccagatggaaggcttcctcaatcggaaacacgagtgggaggcccacaataagaaagcctcaagcaggtcctggcacaatgtttattgtgtcataaataaccaagaaatgggtttctacaaagatgcaaagactgctgcttctggaattccctaccacagcgaggtccctgtgagtttgaaagaagctgtctgcgaagtggcccttgattacaaaaagaagaaacacgtattcaagctaagactaaatgatggcaatgagtacctcttccaagccaaagacgatgaggaaatgaacacatggatccaggctatctcttccgccatctcctctgataaacacgaggtgtctgccagcacccagagcacgccagcatccagccgcgcgcagaccctccccaccagcgtcgtcaccatcaaccagcgagtccagtcccggcaagcgggaaaaggacaaagagaaagacaaagagaagcggttcagcctttttggcaaaaagaaatgaactcctttccttcacctcctgcccttctcttaccttttcagtaaattccagcatgcaagctcagaaccaa

SEQ ID NO: 164386 - DNA, 681 bp, Homo Sapiens
tagaaaagtcccgaggcaaatctcatacacttcctaaaatatttatgcgaagagtaaaacgatcagcaaacacattatttggaagttccagtagttaatgcctgtcagttttttgcaggtgagttttgtctaaagtcccaacagaacacaattatctcccgtaacaaggccacttttatcatgcaaaactggcttcagtcccgaaaagcaagagctgagacttccaaaggtagtgctactaatgtatgtgcacgtatatataaatatatacatatgctctacttcataaaatatttacaatacaatctgtggagaatttaaacacaacagaaatccattaatgtacgctgcagatttttttaagtagccttgaaaatcagcttcagtagttggagcagtgctgagctagaagtatttgtcatgttctctgttctctcaatgaattctgtcaaaacgctcagtgcagaaaattcagcgtttcagagatcttcagctaatcttaaaacaacaatcataagaaggcccagtcgatgacactcagggttatacagctctcccacatctgtgaactcgggtttggggatgttggttaagtttgtgactggtcctctggtttgctgggagatgagcagccgcagagtcacacacatcaaacacgcactcttcgctcagacagagata

SEQ ID NO: 164387 - DNA, 1189 bp, Homo Sapiens
gtaggcaaccgacaggctaccagcttcttgccaagggtcagaaggaacgtgaggttcttgataagctcccattctgccagcattccgcttaatggcccaggcctcttgggagaacattatggccctggaccccggccatggacttgagcgtgaatctgctcatagtagtgaatgggtctgcttcttgttgtaggcgtctgggtaagccaaagccggcaatgtgcaccaagtcacagaggtggagggccagcgtgatggccaacaggcccgtggtgggcttctgcttaatcttccgtggctgttgcattggcaggctcagcagtttgtcagctgcaatctccatgaagaaggggttgagaatccgaatctgtttaggattgacatcccagatgaggggaggctgtttccagaaaccctttcgcacccgcttcttatcactcaggatggtctcaatccagtggaagtccattgccttgaaagctaccaggacgaggagtgtgtctgggttgttttctactttggggtcgaagtgggcagattcagggtagaagagacgcatggtggtcttggagcccacgtcaccctcatagccagccactggggcattgttcaatctgatgaccacatcgtacttgttgatggcatctcccagtgagctgttccgcagccggtgcccgttccccacgaccacacagcggcggcacctgaggctctggatgttcttggggatggaggagctggtgatggctagcacccggaggagcagatcctcacctccccttggtcccatagggcagctcgtaagcagatggcgtcttgacccagaaataatcctcaagccgcaggaagatgggctgatcccgggagtagttgccaaagagcttagaggccttgctctctgcctcaccctggaggcacggctccttcttctctgggatgggaaaataaaaaagctcgatgtacctgtcttcccgggagatggaataccacaccatgacgaccaggaccagagccaacatggccaggagcttccagcgggacttgctgaccatgtttctcagcaggcagcaggattcctggggagagctgtcatcccggctgcctcgggccaccttgccagcccacgcagttgggcagccatgtttgagttacgcaagcaggtcagatgaaactggttcacctgagcctt

SEQ ID NO: 164388 - DNA, 560 bp, Homo Sapiens
cctctgttcttgagtctcagaatatcttcgtttcttttgtgttttatatgtttcttcaccctgaaagtctggtcataatgttggcctcttgttctggagcctttgtgttccagtgatgagattctaaaatgtagaatttggcttgtttgtgacttatccttagctttgataaagttttattttgtagatttcatttattgttctgtcatacagataacacctttggagtacaggatggcaatttggatgtctcaaatatagatctttacactgccttaaaccaggctctagctcatttaaattgactgtaatactgactctgaagtgctaggcaaggttgaaacagcgcacatttctttaaattttttgcttaagtaaaatttctagacatgaacttactagatcagaggatattaccatcattctggtttttgcattaattttcaaaaagattgaggcaatttgtaatgtcatcagcagtgtataagcatttcaattttaatatacttcctttaaaattaggtatcagtattttaaaatgttttacctaagacagagat

SEQ ID NO: 164389 - DNA, 482 bp, Homo Sapiens
tatactctgtcttgagtagggttcactttcagagttaaagcaaatattgttatttcagtaatagctcctaaattagtgatatatcttaaacttacagcaaattctactgctgctaagaatttgaattgtcctaagtcggctttttgtaaagagtattaaaagagtttatttcacagttggctagttttttaatgttttaagtgtttcctatagagcagtgccgtatctgcaggtggtaagggattgggattgaacagttttcagattggaagtggttactttcctgaagtgacaccccaggccttttgcttctaatatttttttccatcgatgtctgtgactgacttccctgcttccaagaagatagctccatgacctcaaaatcctcctccgaaatttttataaacttctaatctttgttcctttactgcacaagtggtgactgcgttcaccctccttgtgaaataaagcaaaagtgagct

SEQ ID NO: 164390 - DNA, 582 bp, Homo Sapiens
ttgagcaacttataagattgttatacaattaaataagatgatgtatttaagcatttagcaaagtacctgacttatagtgctctctgaatagcaactgtcattattattgtgatccttattattaggtatgcattattaagtcatataaatactttgaactatgctgtgagcctggtaagaaatgaagcaagaggagaatttcagatagatgtggggtaggacatgaggcttcagggacgttagagttgataatttattttgcattcattcaactctttttcactgaaagtcagagatgtaatgagaaaatataattaaattattaaagtccttcctcaagatcctaatattaacaggaaaacagctaaaataactctcccatgttttccagagtaaccaccagggtccaccttgacataggcatgaggcaatgccttggttcagcataaaaatgccaccaggaaacctatgtcatcttggtccaagaaacttataaataccattcattcaaaatgggcacatgtgttgagtgaggcagcagtgagtccaggacagcaacaagattatacagtctttccttat

SEQ ID NO: 164391 - DNA, 535 bp, Homo Sapiens
gtcttagtcacagctcagtcactgtcatagaaatgtctctgacttcttttaaacattatttgctacttcacgttcataagtttaggtaatcattttcctgaccagttatataaaaataatttttaaaataatacatctcaaagatgtttgacataatagaaaatggggctggatgtgtgtttatatacatagtgtaactgaaagagcttattcccagttggcagacctgcagcaggccacttaacatttctagaactatgattccttacctgcaaaatttaaaaataaaccaaattaggtccaaagccccactctccttctcattaattttttaatttatgtaataatctgatggcgtctcacttacagcattaatcagatctgacttgtgttttaggcatctgagtttgtcatactttacccactctctctacctcccccaagttcaggccctggaagccagggattttgtttcattcatttgtatgttccctgctatacccagaaagtgccttgaatgctcaggtgctcaaga

SEQ ID NO: 164392 - DNA, 550 bp, Homo Sapiens
gagtgctaatgctgctatcactgagataaaacaataataatcttttctctcatgtctttaagtgtcttcattgattagtaatgctctgtttattaaaactgaccaaaggctgacttcctttgttaaaatcttttaggtgtgttggttttatctgtcaacttagatgcatattttttcttccttccttaagcagttcacaatcttcatacacatttcttgataatgctcactttatatacatttttgtcttgaaaactcttatctgctaacagtttataagtaaactgtggtcatgttcaaagagaagaggcatcagtttcctgcttttgatacctattcttacacgtgaaactaacactaatttaaaaaatccagaatagctgtaattcgcttccatgcatcttcttgttttatttgtataatgaactaattattctcttatgtatgtatatgtgtatatatattacataatgtgccgtatattggcacgtttctttctttcaaaagcctacacgagttgcaatttcacagagaaccctaagaacagagt

SEQ ID NO: 164393 - DNA, 181 bp, Homo Sapiens
cggtaccattatctctgtcttgagcaggaaagacagaaaagagtcttcccctttccatgcaggacagttgtcctcattcactttgtggccttcaggtaatgccagagagtggctccagccggttgccctcaattactaaggatctactaggaaacagctgctgaaagattaaaaaagaaaa

SEQ ID NO: 164394 - DNA, 274 bp, Homo Sapiens
actgcacccggccacatcacctcccatgttctatcttacgtattcagaacttgttcatcttgtaactgaaagcgtgtaccctttgaccaacactgtttttcctgtcttaacaggatctacagatcaaggaccaggggaggggatagtggaggaaaacggagttagtctgtttctaaatgaggggacagtatgtttcttggggcctgaggacagcttaataaagtagacaaatgaagaaaaacaacaatttgcattaaaaaatatccaattctta

SEQ ID NO: 164395 - DNA, 514 bp, Homo Sapiens
tgggttcaatctcagtggctgccccttccctattgtaaaagaaaaatgtttggtggggtaggcggggatgagaggggtagatggtgatatgctgctgaataagaaggtttgattgataggtggaatgtgctatgatacatctccattgtttacattctaactccaggtaaatcatcctcagtttctctaagttcccctcctgactgttaactctctatagccttaggacatctgggatcaggaaattctccctgctctacttctttcttctgttacagatcacgatgatggctcctgtggagtccaaattttcccaatcaactggagatatagataaagtgacagataccaaaccaagagtggctgagtggcgttatgggcctgcccgactgtggtatgatatgctgggtgtccctgaagatggcagtgggtttgactatggcttcaaactgagaaagacagaacatgaacctgtgataaaatctagaatgatagaggaatttaggaaacttaa

SEQ ID NO: 164396 - DNA, 1608 bp, Homo Sapiens
  misc_feature (1543)..(1543): n is a, c, g, or t
cccgcaaatacctcaggactgagttacaagtaccaaaggctgggatgcttcttggaaaactattctcctgtatcaagaattggttgttcattaaagcaggcagtagatatgaggacttcagcaatttaggaaccacccatttgctgcgtcttacatccagtctgacgacaaaaggagcttcatctttcaagataacccgtggaattgaagcagttggtggcaaattaagtgtgaccgcaacaagggaaaacatggcttatactgtggaatgcctgcggggtgatgttgatattctaatggagttcctgctcaatgtcaccacagcaccagaatttcgtcgttgggaagtagctgaccttcagcctcagctaaagattgacaaagctgtggcctttcagaatccgcagactcatgtcattgaaaatttgcatgcagcagcttaccggaatgccttggctaatcccttgtattgtcctgactataggattggaaaagtgacatcagaggagttacattacttcgttcagaaccatttcacaagtgcaagaatggctttgattggacttggtgtgagtcatcctgttctaaagcaagttgctgaacagtttctcaacatgaggggtgggcttggtttatctggtgcaaaggccaactaccgtggaggtgaaatccgagaacagaatggagacagtcttgtccatgctgcttttgtagcagaaagtgctgtcgcgggaagtgcagaggcaaatgcatttagtgttcttcagcatgtcctcggtgctgggccacatgtcaagaggggcagcaacaccaccagccatctgcaccaggctgttgccaaggcaactcagcagccatttgatgtttctgcatttaatgccagttactcagattctggactctttgggatttatactatctcccaggccacagctgctggagatgttatcaaggctgcctataatcaagtaaaaacaatagctcaaggaaacctttccaacacagatgtccaagctgccaagaacaagctgaaagctggatacctaatgtcagtggagtcttctgagtgtttcctggaagaagtcgggtcccaggctctagttgctggttcttacatgccaccatccacagtccttcagcagattgattcagtggctaatgctgatatcataaatgcggcaaagaagtttgtttctggccagaagtcaatggcagcaagtggaaatttgggacatacaccttttgttgatgagttgtaatactgatgcacacattacaggagagagctgaacgttctctcagcccagagcagcaaacacatgaaagtcagaagtctctaatatatcatttgtcttttttccagtgaggtaaaataaggcataaatgcaggtaattattcccagctgacctaaagtcaataaaaacttcctgtttaaagtggtttaacttaacatttttccccaacgaagctaatccaaaaaggagtttattaaggggcctggaaatccttttggatctaacaaggcctttaaagggagaaccnggaaaaatagtctagttggaacagaaggaaaacgctccagacagacctaattaagaacttaaggg

SEQ ID NO: 164397 - DNA, 1202 bp, Homo Sapiens
ggggagtacctcacgaaggggacgtgggaaagtgttagcggggaacgctgggaaactcccggcctccgccaccatcttgctttcctttaatccggcagtgaccgtgtgtcagaacaatcttgaatcatgaagctactaaccagagccggctctttctcgagattttattccctcaaagttgcccccaaagttaaagccacagctgcgcctgcaggagcaccgccacaacctcaggaccttgagtttaccaagttaccaaatggcttggtgattgcttctttggaaaactattctcctgtatcaagaattggtttgttcattaaagcaggcagtagatatgaggacttcagcaatttaggaaccacccatttgctgcgtcttacatccagtctgacgacaaaaggagcttcatctttcaagataacccgtggaattgaagcagttggtggcaaattaagtgtgaccgcaacaagggaaaacatggcttatactgtggaatgcctgcggggtgatgttgatattctaatggagttcctgctcaatgtcaccacagcaccagaatttcgtcgttgggaagtagctgaccttcagcctcagctaaagattgacaaagctgtggcctttcagaatccgcagactcatgtcattgaaaatttgcatgcagcagcttaccggaatgccttggctaatcccttgtattgtcctgactataggattggaaaagtgacatcagaggagttacattacttcgttcagaaccatttcacaagtgcaagaatggctttgattggacttggtgtgagtcatcctgttctaaagcaagtcgctgaacagtttctcaacactgaggggtgggcttggtttatctggtgcaaaggccaactaccgtggaggtgaaatccgagaacagaatggagacagtcttgtccatgctgctttagtagcagaaagtgctgtcgcgggaagtgcagaggcaaatgcatttagtgttcttcagcatgtcctcggtgctgggccacatgtcaagaggggcagcaacacaccgagcatctgcaccaggctgttgccaagggcaactcagcagccatctgatgttctgcatttactggccagttactcaagattctgggactcttagggaattcatacttatctcccagggccacagatgctggagaatcgtatcaaggcttgcctataaa

SEQ ID NO: 164398 - DNA, 867 bp, Homo Sapiens
tatttccttaggcatctgctgttcttaagaatcattccaaggatctcattttcataacttaagtcccactgatccttttcaatcctctggcacagcccgtttgagccctgaaaagccttaagtacttttcaataccagagaaatactgcagtcactgtatagtagggatctttaccttgaatgtggaatgcagtttccgtcagggaactgggagaataagtgaacttttaatgcagagtcattctgaagatattccaaagatgccagttaccttagggtcatccggagggtcatactgaacaatccagtcgacttcaggaatgtctagtcctctcgctgccacatccgtacacaatagtgttcccgaatctgcattgcagaactggaagaatgtggttgtacgcttattttgcttttgctttccctagaattaaataaaaacatccattagagctggaatcttgaggaagactagcagtagaacccccaaattgtggaactgttaccctactttatttcgagctcatcccttggcctatgtcctatttccccaactgttccgcaagcccctcaaggaggatggtgtcttgcactcttcgaaagtcctcatacccctccacacccagcagcgctcccccacacaggatccatcatctagtggtgatcaaactactcagaacaatgtttccaggagagggcaatacctccaatcctacaatctataggatttaataagcatacccctgttttcaatgagctcatcatcatcacttacatgaatggccaagacgggcaaatcaatgtagttcagcaactcatagtggtatttcacagacatacaagatgaaaagaagaccataagcttct

SEQ ID NO: 164399 - DNA, 856 bp, Homo Sapiens
  misc_feature (373)..(414): n is a, c, g, or t
  misc_feature (428)..(446): n is a, c, g, or t
tacatagtcatgctgaaacacagtaaggagattgcttctttaactgtaattaagtgtacaaaaagaactgcagatgattagaatcacctacccagtaagtttttttcttgcattgcttgtgtatagcagcaagtaataagtactagactgtaaaattcgttgtaacaatcagaggtagtattgagtagtggggatatattgcatctctggctataagtgcagtttgaatgaagagatggtgaaactcaagccgaagaaaagcaccgttggtcaaccatcttatgtcaaaacgtattacttgaagtaacacatatgcttaatttgaggtaaggtggtattcaggtctttcatggaaactgatacacaatgaaannnnnnnnnnnnnnnnnnnnnnnnnnnnnnnnnnnnnnnnnngattgccccccccnnnnnnnnnnnnnnnnnnnaaattgatgtataactatagcaaaagaaatttagatttcgctcctcccacctcataattaggtgagttcatcatgcattattctgttgtaccttttcattaaattacaaagaggataattttacttgtctagtttccttaaatgctctgaggctgacaagtgttatttattgctaaatggcattttggctctgtaggaagtagatttcctgaaaatgaagtgttgtcctgaaaacaagtgctgtgagtaaatttattactcctgctgatatgtgtgatatccataaatagaagagttggcaatacttgtttgcttacttccctttttgaaaaatgaacataaccttttctagtttgttagctccggccgtaatggccgaattcccgggcatatgtccggtaccgtcgact

SEQ ID NO: 164400 - DNA, 161 bp, Homo Sapiens
taaaatatagcaagcaatttcagtggaccttttaggcatgtgtgagtgggcacaaaaagctgagtcatgaagtttactcttcctggtgaattaccatgaaagcttgaaagaaaagcactctcattattttaaaatagtaaaacttgctcaggagatttccc

SEQ ID NO: 164401 - DNA, 447 bp, Homo Sapiens
gactcttgtttttctgaggctcacaaagactagactcacagcttagttctatagtgtctatttagctgtacttaaagcctacatcaagtactttattgtcaaataaaaagctatctatgaggagcttagtaacttaagtagctctccagagtttggtaaatattttgtgtctacttttgatctctattgtctaggaaaggttctgtcaagttgtaaagtgctagaaagtgttattttaaacctttaaaaggtagtaagagtactacaaccctgggatccttggttgcaacaaagaagcacaaagccaactactatagttttccaaaaacaccatttcctcagtccctgccccaaggaaataaaaaagcatccaggaagtcccatctttaaaaaatacttagctatcagcctggggcttctaaaattcaggccctgaaaaaacgatag

SEQ ID NO: 164402 - DNA, 171 bp, Homo Sapiens
atcagacaaaaacacagaattttaaaatgagagaaaaaaactatcttaaatgactcatttaaaaagtttaagagaaccaattccatgtaaaaacaacagaagcacattagttgaatcccatacaatgctattatatgaaaaaagaaggacccagaatgcagccctaaggac

SEQ ID NO: 164403 - DNA, 486 bp, Homo Sapiens
tagggacgactacactgaaacattcaaatgtgtggcgaaaacataattttcattccttggatggaacttcaaccagagcctttcatcctcaaactggattgcctcttctttcaagccctgttcctcaaagaaaaacacaatcaggttgctttgatctggattcttcattactacatctgaaaagcttctcatctagaagtcctcgaccatgtttaaacattgaagatgatccagatattcatgaaaaaccatttttgagttctagtgctccacctataacaagtcttagtctcctaggaaattttgaggaatctgtctagaactatcgtttcgatcctctcggcattgttgatggttttactgccgaggtaggggcaagtggtgctttctgccccacacatttgactcttccagttgaagtgtcattctacagtgtttcagatgacaatgctccctctccttatatgggtgtgattactttagagt

SEQ ID NO: 164404 - DNA, 802 bp, Homo Sapiens; identical to SEQ ID NO: 4573
  misc_feature (784)..(784): n is a, c, g, or t

SEQ ID NO: 164405 - DNA, 963 bp, Homo Sapiens
cctgcacgtttagtatatgtagaaaatacttccatgacattttcatataaggttatataacttttcatacataaacatgaaatttgttgtagaaaattctttaaaccaaacatttaaatctaggacttcaatttaatttgttccttgaatctatttttatgtggcccttaaaaaatatccaaaaaacccattgctaatatagcaataaaaatactttgggtactgacagactctttggagtgtttatattacaaatttgtattcatattcttttctgtgatgtgttgtactaaaatccaaaatggcttttgcaccatttttaagccaattttttcctttgatgttggtaccagaattactataagtgactgctgcttttgggggtaaacattttgttagtgaagataaaaccagaacactaaattatggataaaattttcagaataggtggcacaggtaaatttcactaggttatattttgtgtagtaaagaaaaaaattatttggtcaatgttatcttaattcatactacaatttaagattatcttatgtgtattatagtaaatagatgattttcagattcaaggctcctaagagtttgatttgctctgttttttcctaaaataaatattgtctctcccaactgttaagttctaggtattgtacttccaattttaacttcagaaccaagatgttggcatgaaccaggctgctgttgaagtacatgtatattataaattatcttatttgtgttatactcttacatgttatcttttctaagaaaacaaagtccctattattcctattgcaaagcacacaggaattaagaaagtacagtaattttttaaaaaaaatccggtaaatgtagtattcttaacctgttctatattacttatacctattgtctatatagctttaatttatagttgtcagtttaactattggcatgtctggcaaagacaat

SEQ ID NO: 164406 - DNA, 553 bp, Homo Sapiens
gctcatctgtcctgagtacacatatgccaagtcttaaggtatctaccgagtattttatgtaactagcttatgcgtaaccattttctgatacctactcatttgataagtcaagttgcttctgcacctctggataatagtagatactcctaaagccctgtttggaatctggttttctcagcggcagcttgacatgtgcacccttttgtattaaacactgcaagggtgatgcaggggagcaggaaagccatcctaaactcactactgagtacgattcagtatgttcctgtggatgtctgctgtgactaatataaatttcttgcagaatcagctacacttaattatgttgctgatagacaagcatccacgcttcagctggcactaagtgttttcattgtaggatcagcagcaggttaaagactgaacggttagtgaagacaaatgtctcaagaggctgcgatgtctaggttgggcttgtgacttcttagtggcctagccttcttgatggcaccttgaaagtgaacttctagaaatctacatttaaaaggcaaagctt

SEQ ID NO: 164407 - DNA, 573 bp, Homo Sapiens
ggaccattatactctgtcttaggatgaattaaaaaatcaactggtttgctctcttcccacctgaaaagggatgactgcattaatatatgtgctttccacatccatatatgttttaataaaagtctaccatctatgtcttttgtttcaaacattttgaaacaaaatatgtattgattcttcaatgaatgaaatcacgcctcaaagtttggagaaggaaaagccagtgaaaataaggccaaaaaaccataccacaaaaggacaggaagcctgcagaaataaacagttctccttctgaagcgatgttttagaatactgatataattcatggaaacaagaaaacaaatactgttcatctttattcaaattgagtgaattctggcaacatcataatctggtggctcaggccaacagaagtgactagaactttatggaaaagtactgttcaacattaaatctacaaacaaaggtttatggaagagggaatgtcaaatttatgtatttttatcatatggtgagctgctcatgtcgtcttgacagtctgaaggctttaaaagatggttttacattgttagc

SEQ ID NO: 164408 - DNA, 425 bp, Homo Sapiens
ccatgtaggagttatcaaccactaatatttcatgcaaaagtatcacttttataataatctttttcttgtatgaaactaatttccttaaaaaatagctactatatactgaaaacagtattatgccaaatatttcccacatacacaagtttctaatacgtactacctacaagctacagaatagtcaaccatttaacaagaaggcagattatattctttcatttcaccaactgccatatcaaaagttacttatctttgaaggaaaatatttgctggcaataattttatctcattgacaactgatttatatctaaagtttagatgtcctatttatcaagcaatgaaggctctagagactaacaaagatttccatttaagatattattccgtattattgtctatttcatcttactacaagacaaattaat

SEQ ID NO: 164409 - DNA, 560 bp, Homo Sapiens
gaaagagctagacctggtgcttggagaagagacatctttggaagaatcatctggcacaagttcaagcagtgggttataccttggcacctaaataaaagatacaataggaaacgattctttgccttgccttatgtggaccattttctcagactggaacgtgagaaacgagcccgcatcaaagcacggaaggaaaatttagagagaaagaaagcaaaaattcttttaaaaaagtttccacatcttgctgaagcccaaaagtcaagtcttgtctaagatgtctgaactattaaatttaccattttgtttttcttgaatagtctgtgtacaggagtaaatatgttaagtggtttataaagaaattctgtttttagccaagtgactttactaatcagttgttctaagtgtgaatatggcatgctaattagctaatttggtagaagctaatttgcttctaaaaatcaggtataaagttcagatgagattcccactttataaattctgacatttaagcagctttaaatgtcaccctggtacctaacgagtaaaaacagtcatggacc

SEQ ID NO: 164410 - DNA, 787 bp, Homo Sapiens
  misc_feature (615)..(615): n is a, c, g, or t
gagagtttcatccgccctgaaatcttcccgatcgttaataactcctcaggtccctgcctgcacagggttttttcttagtttgttgcctaagagtacaccaaatgtgacatcctttcaccaatatagattacttcataccacatgtcaaggaaaggactagaagaattttttgatgacccaaaaaactgggggcaagaaaaagtaaaatctggagcagcatggacctgtcagcaactaaggaacaaaagtaatgaagatttacacaaactttggtatgtcttactgaaagaaagaaacatgcttctaaccctagagcaggaggccaagcggcagagatgccaatgccaagtccagagcggttagataaggtagtagattccatggatgcattagataaagttgtccaggaaagagaagatgccctaaggcttcttcagactggtcaagaaagagctagacctggtgcttggagaagagacatctttggaagaatcatctggcacaagttcaagcagtgggttataccttggcacctaaataaaagatacaataggaaacgattcttggccttgccatatgtggaccattttctcagactggaacgtgagaaacgangccgcatcaaagcacggaagggacacattagcagagaacgaaagcaacaattcttttaaacaagtttccacatcttggcttgaagcccaaaaagtccaagtctggtctacgaaggtctgaacctattaaactttacgcatttggttagcttgaaacagcacaagcaacagag

SEQ ID NO: 164411 - DNA, 635 bp, Homo Sapiens
  misc_feature (116)..(116): n is a, c, g, or t
gctgttagtgtttgagatactcttgctcttcttattggtggtaccatttatgtgttctatgtttaagagaatctctatgcattatatattaggtgttgattgtaagtgaagagganatgtgataaggctgactcatgtaaatggtttctcgtcagggagctctagcaagatgctctctgcccctctttcccgtaacccctgtcacttcctctagttccgcagcgtgggattgcgtatgcgactgggcagacccgtcgactgtctcgccctgaaccccacacacagatggcttctccttggaaccacagtctcttgtactcacgcctaaacagcagcaggcattaggattttagtcaggctggttcttgcgtgctctgtgcccccaccagtttgctcacctcttggggcaattttgtaatgtgttttcatctgtcttgtaaaaccttttgattgtaccgaaatggtatctgcagtcgcctttggaaataaatggtcattaattggtgtacttagcattctgaattttagtctcaggtgtttctgttgttgaagatccttgaatgaaaaggaaccctcaccatggggcttactgttataatgtttcttcatttactgttattaaaagatttatgaga

SEQ ID NO: 164412 - DNA, 1140 bp, Homo Sapiens
gggttcctgtaagtatcatattaacaatttgtggaaattgaaaaagcataaactgtgttatttgattagtaatatgttcccttaaaattcattttgaggtgtatgttatacacacagtaaatttttgttcaggaatgacttgctcattctgtgtttttaaaaataggaaataaggcatagtgagtcatcattacatcaattaaccaaaaaatatttcatcccctccgtcactgaaattatctacttcagccacctttcttattctcgtgttaggagggcacgtttatggactttttaatttccatgtgccatattgtccactaccggcagtagccaaagctagctgtttcagtcccacagaagagacagtgctctgccatgatgacagggcactgctagggctggtttttcttgtttttcccttttggcagtgtggacttcaggaactagatgtatatgcacaaggaattgagtttacactaaaactaggaaatggagttttcaatctatgttcttgcctcttcatacttttatctattttttgtcatcctgccttatactgggctaacaatgagataaaataaaaatacctttgaatactcttttccctttcatgcatttaaagccatggaggaactagaccattagctgttgccgtcacatgcttagacaccagtttacttagcgtgttatgaccttcctcacccatactaccaaatttaaatgggtcccgacttcaccctctggaaggaagtaaactcttctctccccatggtttcagagcagttttaacctgcaagcaccatctctgtatgtgctcttactaaattatacagttcttgagagggattgcatcttggtgtttttgtatttccacctcacccccagcacatagcccagtctcttgcacaaattaagtacttaatgtgtgttgagctaaattgaataaaggattattagcattagcatattttgtgccttggttgtataagctggttgtttgttttgttacctttgcaaatatttatgattatcacccccccacatactaaattgtttttaaaagttttgcctttccttcagatactaccccaggcaatttgctgtagataatgtgatagccggaatcctggagagtcg

SEQ ID NO: 164413 - DNA, 1151 bp, Homo Sapiens
ccctagcacttccttacatcatctgctcaagtgaaatagcattctgtacagactggaaaagtaagagcagttgttaaaatggaacagagcacaaacatgtcagacacagctgaaagaatggaaatagactggtagagagaggaaggcactgagccacatgaaggtatgtgcgtaggttttgttcagtggaaatagactggtagagagaggaaggcactgaaccacatgaaggtatgtgtgtaggttttgttcagtggaaatagactggtagagagaggaaggcagtgaatcacatgaaggtacgtgtgtaggttttgttcagtgacttcttcagtgtctcagccagctgagcaaataaagacactacataggcatagttcatgttcaaagaatgagagtaatataaactaattaatattcacactacctcttctaactggttaagtatcattatctcaatttggcagatagaaaaaagaggtagaaagattaagtgacttgcttacagctacagagagaatatttgtcaccagattatcactccagaaagtctagcactttgttcagacaaacagaccacaccttattaggaagatataaaacgcatgataattacacttgggaaaacaatacaattaaggaatggggaacaaaaaggtagtttagggggatataaaactatgaataagtagcttaaaaattcaatcaataaagttgtgttacaacacctgggggaacagcatgcagctactcaattggacaaatattttcaaagcaacaagagtgctatgggtcagagtacagggattgtgtgggaaggtcaacaggaatttatcactttggtcatgcagaaagatttgcctccaaagttctgatttgtaataaattcttcttggctttagaaactaaaatgtaggctatgaaatgtgtcagattcaggagatagagaccaatgaaacacaaaacaaataagggcttaataacgatgcaagtgctataagattatggtaaaaaataaaataagtatatgaaaagggcacgcatgaagaattgaaagaattcatccttggtaaattaggctaggtcttgtggcaaaggcacccaacgctaatgaagaagagtaaatgatatttgactgtcacacgacctga

SEQ ID NO: 164414 - DNA, 666 bp, Homo Sapiens
tccgcttattaaccatttcttacatccttgtgggttacaaacattgaaaggaaacaccaaaacgtatgcagttaattcctcaattctttcccttagtatagcactttttaaattacaaaaccacacttacatgtattctatctcactggatccccacaacatcactgtgaggtgggaagatcaggaattacaaaccaccgcttacagatgaagcaataagcttacagcagccaaatgccttgctcaaacacagacggcgatggatagcaccaagactcaaatccaggtctccagacaccaatgccaacaccctttccattacatcatctggctcaagtgaaatagcattctgtacagactggaaaagtaagagcagttgttaaaatggaacagagcacaaacatgtcagacacagctgaaagaatagaaatagatctggtagagagaggaaggcactgagccacatgaaggtatgtgcgtaggttttgttcagtggaaatagactggtagagagaggaaggcactgaaccacatgaaggtatgtgtgtaggtttggttcagtggaaatagactggtagagagaggaaggagtgaatcacatgaaggtagtgtgtaggttagtcagagcttcttcatgttcagcagctgagcaataaagacctaata

SEQ ID NO: 164415 - DNA, 683 bp, Homo Sapiens
  misc_feature (575)..(575): n is a, c, g, or t
  misc_feature (584)..(584): n is a, c, g, or t
  misc_feature (597)..(597): n is a, c, g, or t
  misc_feature (653)..(653): n is a, c, g, or t
  misc_feature (667)..(667): n is a, c, g, or t
atcgctctctaccatgtatctgttaaagtttcattaattgaagcccaagtttactttttactgtacatacttattttctaattggatttgaaatcagcatgattttgtttgacaaagcaaagtttaagattgaggtcagaaatactttaatggagcaaagacacataccaactttacatgacggtgtgagaaatagtcctataaactggtctcttcatcatttatgctctcactttagatatccaaatattaaaaggcaggctgacctgtatcacacagaattaaggcagtaattttctgcttcagtagatcaagggtagggctaaggcatcctgtggtaattctgattcacagctagatttgggaaacacaaagttagggaatggctatatgtgatttgctagttggagcagtcaaagtcttagctatccagagttgtgaatttgaatcatggcactaggtcaggggtgctatggattgaaatgaccttagttctcaaggagtgatttgtcctcatttgtcaaatgaggaatgagacacttaccatcatctcaggttgtttcttaaagaccctnaataccaantaccattttgttnaaaaacttaccaggggggccctatttttgaattgcttttaaggatgttgggcccangttatgtatttttncttcctttagtgtagg

SEQ ID NO: 164416 - DNA, 905 bp, Homo Sapiens
agctaaaactgagcgatttaggacatcaatgctgagcagcttcctgggagggaacatcttaatgaacctggtactagagaaggacagactcgtctaatcagagatggggagaaagtcgaagcctatcagtggagtgttagtgaagggaggtggataaaaattggtgatgttgttggctcatctggtgctaatcagcaaacatctggaaaagttttatatgaagggaaagaatttgattatgttttctcaattgatgtcaatgaaggtggaccatcatataaattgccatataataccagtgatgacccttggttaactgcatacaacttcttacagaagaatgatttgaatcctatgtttctggatcaagtagctaaatttattattgataacacaaaaggtcaaatgctgggacttgggaatcccagcttttcagatccatttacaggtggtggtcggtatgttccgggctcttcgggatcttctaacacactacccacagcagatccttttacaggtgctggtcgttatgtaccaggttctgcaagtatgggaactaccatggccggagttgatccatttacagggaatagtgcctaccgatcagctgcatctaaaacaatgaatatttatttccctaaaaaagaggctgtcacatttgaccaagcaaaccctacacaaatattagatattgtctttcctgcacttgacattcttcgggtgtcaattaaacaccccagtgtgaatgagaacttctgcaatgaaaagggagggggctccaattcagcagtcatcttatcaatcttcctgaacccctaaagggaaagcccagcaaaaccagcctggctttgctcctcagggactttttttgcaaattgtttttggttggcccaaggcaaggaaac

SEQ ID NO: 164417 - DNA, 2317 bp, Homo Sapiens
  misc_feature (51)..(59): n is a, c, g, or t
  misc_feature (175)..(175): n is a, c, g, or t
  misc_feature (241)..(241): n is a, c, g, or t
gaattttttcccttttttccccttaaaggggcttttaataaaaaaaagggnnnnnnnnntgcccctggttggatttcccattcccctcctttttggtggttccaagtggaagcccattgtttacttctttccgttggccccaggggggttcacttattaaagaaaagatccagtnccagttttctggggcacatggcctaaaacaggaagatggaagcatcagaggattaaaaacttttcnccacagaaatgtgggcaagaagacacttccctgagccagcagaagggacaggtgcagcagcattccacacccagcgcagaggacagcagagccctcgatgtcccacttctgcttccgttccctttctagaagattgaaaaaaaggtcaaaaccacatgcctgtggagaaagtgcgacatgtttagaaatactggtagggaaccaggagtaagaaaagctttaccagcttttactacaaatggatgaaagacatcaggatcccaccaccgcaaggtaaagtgacttcccttttctggaacccctgtggcacaggagtaccaattttcctttccaacgaactggatttctggataggcattttggctgtatgtggacagataagaccacagtccttagcccaatcccagctatacagtcaccccaatttccacaaatgatgtgatggtaccgtataatcctgtaattgggaaatttcacatttttcctgtcctaatctcagaggtgggagaagcaagtctagaacatctccaggctcagactaaacgagagtacttggactgcaaccaagtaatcactgcaaagtagttccaagcagcaagaaataccagattctcatggaggctactatagggtacagaataacaacatgaaagcaatcaaccctgtataaataatgggttgctcggcatttattttttaattaaagaaatgccagtgtcatcaagaaacttgctgaaaactgtgctgtaacaataacaaacggccagtgagcctgctacaccattttgcccatatgcctattgtaactgtctgatgtcaagagacaatgcaaaagcctctgttttcacaggccctattatattaactctgacttacaactgtacctctctagagaaaaaacagaaaataaggaacaaagggaaggcagttttactagtgagaagatgcaaatcaaaagcaaactggaaagcaagagcaatagtaagggtgagatgagggactggagttgagactgcttgagaaatctggctgtgtagctttggtttgggggactgaggaagaggctggacatataaagtgcaatctacattggtaataaatggtcatccctttcttctgactcctcccccagctggtcatcccccacaccacgatatgctgcaggcacatttcgaggtctagaacggcagacaaagtcacagccatctgctaccaggttgccaagatcctgccagaaggctaagtggggaaactgctccattcctttggctcccactaccagtcgctggtataggaaccccccaacaacataaacagcaaccagtgatgcaaacgtgacaagtaagatggaacccacactaaggtgggagatctctggtgaacaggccaggctgctatccatctcaaagaggtagaaacaatcttggactttgccaacgctcctcagacacagggttaaaattgtccgctagggtgtgtcgattgcaggagatcatcaaccactgcacgacgctgctccttgccacagtggttgtcatattcatcaccccctttatagatcagcatgatccaattacttccgttgaagatgtgagtctcgttgagtctccctaccactgtctccttcccattacttttgttgatttgcaccaggcctgccccagaagtgtggttgccagcttcccggcacaccctgaagatgtagatgtatgtgtctgaaccctggcccacagtgctctcaaagcttttattaaacagtggtttcagcctcttcactagagccaactctttctctgactctttacccttttctcactaccaagtcgcaagttttttcttctgtctgccaggattctctcactgccacagccaggagtagtagtagcagtccagtcctccagcagctgtagaaagggaacatcgtgtcgtgggaaactggagtagccaaagctcagaatccccagtgaatacccttctggggatgggagacggggccagctaggggccggccgcagaccccggtcccagagctagtttcagaggccagcgttccccctagcgcctcgctgtgcccca

SEQ ID NO: 164418 - DNA, 683 bp, Homo Sapiens
  misc_feature (28)..(29): n is a, c, g, or t
  misc_feature (35)..(35): n is a, c, g, or t
  misc_feature (102)..(102): n is a, c, g, or t
  misc_feature (156)..(156): n is a, c, g, or t
aaaatgcctatcagaaatcagttcgtgnnaaaagnaaaatggtactcctgtgcacaggggttccagaaaggaaagtcacttacccttgcggtggtgggatcntgatgtctttcatccatttgtagtaaaagctggtaaagcttttcttactctggnttccctaccagtatttctaaacatgtcgcactttctccacaggcatgtggttttgaccttttttccaattcttctagaaagggaacggaagcagaagtgggacatcgagggctctgctgtcctctgcgctgggtgtggaatgctgctgcacctgtcccttctgctggctcagggaagtgtcttcttgcccacatttctgtggggaaaggtttttaatcctctgatgcttccatcttcctgtttaggccatgtgcccagaaacctggactgatctttctttaatagtgaacccctgggccactgaagagtaacatggctccactggacacaaaagagggatggaatcaacaggcagggggccttttataagccttaggaaaagaaaatgaaactatttcatctttggacttttcaatactattggagtgattttttttctttctaaacagggaaaataatgttacaaaagcatcttttttgttatttgtttgcatccctcccccacaccctggtgttttaaaatgaag

SEQ ID NO: 164419 - DNA, 869 bp, Homo Sapiens
gtactctcgtttagtctgagcctggagatgttctagacttgcttctcccacctctgagaataggacaggaaaaatgtgaaatttcccaattacaggattatacggtaccatcacatcatttgtggaaattggggtgactgtatagctgggattgggctaaggactgtggtcttatctgtccacatacagccaaaatgcctatccagaaatccagttcgttggaaaggaaaattggtactcctgtgccacaggggttccagaaaagggaagtcactttaccttgcggtggtgggatcctgatgtctttcatccatttgtagtaaaagctggtaaagcttttcttactcctggttccctaccagtatttctaaacatgtcgcactttctccacaggcatgtggttttgacctttttttcaatcttctagaaagggaacggaagcagaagtgggacatcgagggctctgctgtcctctgcgctgggtgtggaatgctgctgcacctgtcccttctgctggctcagggaagtgtcttcttgcccacatttctgtggggaaaggtttttaatcctctgatgcttccatcttcctgtttaggccatgtgcccagaaacctggactgatctttctttaatagtgaacccctgggccactgaaaagtaacatggctccactggacacaaaagagggatggaatcaacaggcaggggggccttttataagccttaggaaaagaaaatgaaactatttcatctttggacttttcaatactattggagtgattttttttctttctaaacagggaaaaatatgttaccaaaagccatcctttttggtattttggttggcattccctccccccacaccctgg

SEQ ID NO: 164420 - DNA, 867 bp, Homo Sapiens
gaacgctggcctctgaaactagctctgggaccggggtctgcggccggcccctagctggccccgtctcccatccccagaagggtattcactggggattctgagctttggctactccagtttcccacgacacgatgttccctttctacagctgctggaggactggactgctactactactcctggctgtggcagtgagagaatcctggcagacagaagaaaaaacttgcgacttggtaggagaaaagggtaaagagtcagagaaagagttggctctagtgaagaggctgaaaccactgtttaataaaagctttgagagcactgtgggccagggttcagacacatacatctacatcttcagggtgtgccgggaagctggcaaccacacttctggggcaggcctggtgcaaatcaacaaaagtaatgggaaggagacagtggtagggagactcaacgagactcacatcttcaacggaagtaattggatcatgctgatctataaagggggtgatgaatatgacaaccactgtgggcaaggagcagcgtcgtgcagtggtgatgatctcctgcaatcgacacaccctagcggacaattttaaccctgtgtctgaggaagcgtggcaaagtccaagattgtttctacctctttgagatggatagcagcctggcctgttcaccaaagatctcccacctcaatgtgggttccatcttactttggccgtttgcatcacgggttgctgcttatggtggtgggggggctccctattccaaccgaacgggtaaatgggaagcccaaggggatgggagcccgtttccccccactttaaccctttctgggggcagggaatctctggggaaacccggggaaat

SEQ ID NO: 164421 - DNA, 671 bp, Homo Sapiens
ccgaggattactcatccctcctgaataatgactctaatacgtgcactacaaatcctcatttaaatgcactaagtacagacagcgcttgccgcagagaagctgctctggaggcagctgtcttaaataaagaagagtaaacttatgttttatagagggtgaaggatgctggaagggtaaggatttaggaatatctggagagaaagagagcctgcagttatgtacattttgtcctttccgtaagagaaaaatgaggactttggaaattcagatccctctttgatatcagagatttaaacaacacatttttagttttaaccagttgtagtcaaaatgctacaataaaacaaaaaagagaaagaaaatgaagagcattggactcccgcacttaaaatgaagtacacataaagtttaaactggttatgacaaaagcctatagttgtgtttcttgaactataaagaaaacaaatttaggcagtctttaagtatatatagcttaaaatataatttttagcatttggcaccatatgtatgccattatatttgattttgcattactgtttcacaatgaagctttctttaaggctttgatttttatgattatgaaagaaataaggcacaaccacagtttttctttcttaaatttcatcactgttgatgtggttcttttgtgt

SEQ ID NO: 164422 - DNA, 523 bp, Homo Sapiens
agtgcacagcccctttacaaagcgccaggcttttaccccatcttcaaccatgatggaggtgttccttcaggagaagtcacctgcagtggctacctccacagctgcacctccacctccgtcttctcctctgccaagcaaatccacatcggctccacagatgtcgcctggatcttcagacaaccagtcctctagccctcagccggctcagcagaaactgaaacagcagaagaaaaaagcctccttgacttctaagattcctgctctggctgtggagatgcctggctcagcagatatctcagggctaaacctgcagtttggggcattgcagtttgggtcagagcctgtcctttctgattatgagtccacccccaccacgagcgcctcttcaagccaggctccaagtagcctgtataacagcacggccagtgaatcatcctctacaatttcatctaaccagagtcaggagtctggttatcagagcggcccaattcagtcgacaacctatacctccaaaataatgcct

SEQ ID NO: 164423 - DNA, 422 bp, Homo Sapiens
ctccaccgctccagactaattgaacacaattttgttagaatggagtcttgatatgtcgctcaggctgttcttgaactcctaaggctcaggcagtcctcccacttcaacctcccaaagtgctaagattacaggtgtaagctaccatgcccagcctctaaatgtgatgagaaatacatagcctcaaattttattattccccaacttcttgaattcagcttatttgattaggggaaatacatgtgggaaggtaaccaactagctgcccctcttcttcacttcaggacacattctccaccccctccccctgctagcctcttgacagtaatgctccaatgctttaaagattcaagtcactttccatcttctcaccatactgcaccagtgatggggattgtgtcgtcgagcccatgtcccaagaggag

SEQ ID NO: 164424 - DNA, 1108 bp, Homo Sapiens
cgggggcgccgaggcagaggtggctctggtaggcgaggaggaaggttttctgctcaaggaatgggaacctttaacccagctgattatgcagagccagccaatactgatgataactatggcaatagcagcggcaatacgtggaacaacactggccactttgaaccagatgatgggacgagtgcatggaggactgcaacagaggagtgggggactgaagattggaatgaagatctttctgagaccaagatcttcactgcctctaatgtgtcctcagtgcctctgcctgcggagaatgtgacaatcactgctggtgcagagaacttgaccttgctgttctgctggggaagacaccatctacaatggagaatgattcatctaatctggatccgtctcaggctccttctctggcccagcctctggtgttcagtaattcgaagcagactgccatatcacagcctgcttcagggaacacattttctcatcacagtatggtgagcatgttagggaaaggatttggtgatgtcggtgaagctaaaggcggcagtactacaggctcccagttcttggagcaattcaagactgcccaagccctggctcagttggcagctcagcattctcagtctggaagcaccaccacctcctcttgggacatgggctcgacgacacaatccccatcactggtgcagtatgatttgaagaacccaagtgattcagcagtgcacagcccctttacaaagcgccaggcttttaccccatcttcaaccatgatggaggtgttccttcaggagaagtcacctgcagtggctacctccacagctgcacctccacctccgtcttctcctctgccaagcaaatccacatcggctccacagatgtcgcctggatcttcagacaaccagtcctctagccctcagccggctcagcagaaactgaaacagcagaagaaaaaagcctccttgacttctaagattcctgctctggctgtggagatgcctggctcagcagatatctcagggctaaacctgcagtttggggcattgcagtttgggtcagagcctgtcctttctgattatgagctccagaatgccccgaggtaccgagcacgatc

SEQ ID NO: 164425 - DNA, 822 bp, Homo Sapiens
  misc_feature (572)..(572): n is a, c, g, or t
  misc_feature (592)..(592): n is a, c, g, or t
  misc_feature (634)..(694): n is a, c, g, or t
  misc_feature (777)..(777): n is a, c, g, or t
  misc_feature (799)..(799): n is a, c, g, or t
  misc_feature (807)..(807): n is a, c, g, or t
tatgttcttactcttagggtccatctttaattatgttaaatattaataaaagtacagcgtaactgcgattcacttaacataccttacaggactaagggagtacaacttaacacggtcacaacttttgagaacaaaaaggaacttcaataccatgttgtgagaaatgctccaatttgctttggttttgaatggcaggctcgagaaccaccgcccagaacggaacctattctgtcagcaagagccgagcctcgaatgagaggaagcagaggcagccgaagtgccctctggagaaaggcccctggagggaaaaaccatgtctggatggcattgagtggcacagaagggatgggactgcatatattaaaaagatccgcataataaaccaaataatattggaaataataccttcagtaatacttctgtaagaagcagaattacaccacatgttattcacatgcataggagtgcataagaaaaatcccttgttgtaattatggttggtgtggaatagtaaaatatgtactgaaaatgacaagttaattggcagagaaattaatctataaaagggttgngtccagagcggaggagcctnattagcaactgaacagaacccactcagaagacgcactcaccnnnnnnnnnnnnnnnnnnnnnnnnnnnnnnnnnnnnnnnnnnnnnnnnnnnnnnnnnnnnnactgaagtgatctctccctaaagcatccttgtgctcaggccagatttccctgctggcggctgctcccagtgccggctatgagnaaggtggggacggtcctgcagnggggaagntcaggacacacgctc

SEQ ID NO: 164426 - DNA, 898 bp, Homo Sapiens
  misc_feature (649)..(649): n is a, c, g, or t
  misc_feature (658)..(660): n is a, c, g, or t
  misc_feature (729)..(729): n is a, c, g, or t
  misc_feature (846)..(846): n is a, c, g, or t
  misc_feature (855)..(855): n is a, c, g, or t
  misc_feature (859)..(859): n is a, c, g, or t
  misc_feature (866)..(866): n is a, c, g, or t
  misc_feature (878)..(878): n is a, c, g, or t
agctgaacttgggctgagcgtggcgtgttgagatttggaatgaggtttctaagagccgtgttcttcatggaattttccaggccacttggcagcttggtttaccgatggatgggctagagatcttgtcgtttcttggaagtcacagggaagattgaagagaacgcttgagcatccttggcaacagcccaggtgggacttggatgaagctttgcactcaagtattgtcaagggaagcttcctgtgaaccaaagttctcaggccaaggtctcgcccaccaaagccagaaagtgcaagcacccgtccacccagctctaacttgtatgtgtgagacagaccaggcttcgggggtaggaggatctgcagttgttcagccgtctttctgctggtgttgtctttctgccatcagagaagggacacacagcccgttcaaaggtgtgcagagggctctgagcgccaggatggccagggctgtttttgctactgaaggagcgtgtgtcctgaactcccacttgcagggacagtccccaccttctctatagccggcactgggagcagccgccagcagggaaatctggcctgagcacaaggatgctttagggagagatcacttcagtgtgtgtgtatatttatttgcagcacagtgcgcgcngtgtgtgtnnngtacgcgcacgtgtgggtgagtgcgtcttctgagtgggttctgttcaattgctaatgaggctactccgntctggacacaacccttttatagattaaattctctgccaattaactggtcattttagtacatatttactattcacaccaacctaattacacagggattttctatgcctccatgcatgngaatactgngggnaatctgnttctacggaagnattacggaaggatatttcca

SEQ ID NO: 164427 - DNA, 648 bp, Homo Sapiens
  misc_feature (266)..(316): n is a, c, g, or t
  misc_feature (415)..(415): n is a, c, g, or t
  misc_feature (426)..(426): n is a, c, g, or t
  misc_feature (487)..(487): n is a, c, g, or t
  misc_feature (550)..(550): n is a, c, g, or t
  misc_feature (604)..(604): n is a, c, g, or t
  misc_feature (606)..(606): n is a, c, g, or t
acggatagcggatctgcagttgttcagccgtctttctgctggtgttgtctttctgccatcagagaagggacacacagcccgttcgaaggtgtgcagagggctctgagcgccaggatggccagggctgcttttgctactgaaggagcgtgtgtcctgaactcccacttgcagggacagtccccaccttctctatagccggcactggacagccgccagcagggaaatctggcctgagcacaaggatgctttagggagagatcacttcnnnnnnnnnnnnnnnnnnnnnnnnnnnnnnnnnnnnnnnnnnnnnnnnnnnacgcgcacgtgtgggtgagtgccgtcttctgagtgggtctgtcagttgctaatgaggctcctccgtctggacacaaccctttatagattaattctctgncaattaactgncattttcagtcatattttactattccacaccaaccataattacaacaagggattttcttgngcactcctatgcatgtgaataacatgtggggaattctgcttcttacagaagtattactgaagnattattccaatattattgggttatatgcggactttttatatatgcagatccgtntncgcggtaccggctcgaatcgaatcatggcatagtgttcctgg

SEQ ID NO: 164428 - DNA, 558 bp, Homo Sapiens
  misc_feature (515)..(515): n is a, c, g, or t
agatccatcttcgtcatcttcatcatcatctgcagcattaattacaactggtggatgcgtggggctaggaacattttcggaactttctactttcataacgctccgcagctgaggggaaggattggactggacagacaatttgttctgctgaactgaaagttggctagccttcacttcctcttctggtgactcaggcacagtgggcaacacagttttgctcggaggtaggaaaaggccatcaacatatcgtcctctattgtgatggaaagcgcagtttaatttttgacatcctgttggctgattttcccaataacaaggaatttcactgcgttttttatcaatctccatgtgccgaaacctgcacacctgtcgaaaacagcgccctccttgccataatgtgcaaacagtttcatttcctattgcagcttcacagtgacggaatgggcagctgtcgcctttggtacatgtggaatagaagaaaaaatagcagtcttctccttgattaggcatgctgngtagattcttagatcagaagtggcttcttgaaacaagccactg

SEQ ID NO: 164429 - DNA, 557 bp, Homo Sapiens
  misc_feature (518)..(518): n is a, c, g, or t
  misc_feature (543)..(543): n is a, c, g, or t
cattcttaaagagatttaattatttgaagtgcataaaaggggagggtacatttaaacctctgctatatcacaaactgctgtttttgttgttgttttattaaagacccaccagttttactcatcttcaggtttatggctatagaatgtggggaaaacaaaaattggcaacagaataggaaaaggtaagcaaaagtctggtcaccagaatgtcttctccactgcagaacagacccctttaaaaaagaaaagcaaggaaaatagctatgggctatccacagccagtaatgatagctacagttagaaagaaatgagaaaggaaaccaggaggcagagtctgggaattcacaagtctcctctcaagacatatactaaacccggacctctgtgaggattaattttccttagatttccttccaacgtcttaaccctaaaccaagttcccctgtcaattcaaatataataaaggcagcattccacaaggaagactgatttgaggattgaagtggatttgcccacantttgagaaagctttattttaaagancccgggttttaaaa

SEQ ID NO: 164430 - DNA, 777 bp, Homo Sapiens
actcgttagagcgctgagctgtctaagaactatcactaagacatcagaactcacagtgaacaaaggcagaggaaggggaccaaatcagctcataaactcatgactctaagtttccagtggaacaaagaacacattgaaaaacatttttggatccttcatgttggagagaaatggaatgtgaccagaattcatggttctatatttaccactgtctaaaagtcacaaaacaatatctaattttttcatggtttctaatgcagttacagttttgttcttaggtcacagtacaagactgcatgcatactttacacaaatatcaaacacagaacgattgtaacacagatacctcagggttgtctaaagacacagcttctctttttgtggtggggtggggaaggagaatggtggtggccatttccacacacagcctgttgtgtgctcagcacggctggatgcggatcccaagcactcgctgactgactcacagaagaggacagaagctgctgaggagcgcagcggagttcaaagagcaggctccaaccgggggctgggatgacggacacacagcctcgattccagggggaaaaagtcttagtcgatactaattaaaaagtgttaatgatttttgaaaatcagattacatctataaaagatgaaaagcaaacacttaaaacaatctaacgggggaacataaaataataaaaaatcaaatgcagatgggatttcacaaagaggagatttgaatcttttggtctaaatcaggtgtagaaatgaacc

SEQ ID NO: 164431 - DNA, 904 bp, Homo Sapiens
  misc_feature (538)..(680): n is a, c, g, or t
  misc_feature (697)..(732): n is a, c, g, or t
  misc_feature (744)..(756): n is a, c, g, or t
aaacttttgattgttttcaatttcttcttttatgttcacaccaccacattcccattcactttgattttctacatgtaattaccttcttttgtttatcattagatttgatggggccaaagttgagatagaatagagggtgatgacggtaagagcaagtgtcccatgaatgtgatttcctgggttctcactgtctttgcaccacgtctaggaagaatcttcttgatagctctcccacaccatcagtggccctcataactggagtagagttcctggttgcttttcataagagggagagttactttctttgtatctctgcaagcagagatttctctttggttttgaggttgaagtgtctttggcccatttgtaagtccccatccctaccctacacaaagtaaaagcagaagatagataaaaaatgatgtaattgcagctggtaggatgtctggtgccaatccaggaagtgagagccatttcttttgtaccggatttaatgactttgaactgtgctgtaaataaataatacagctggaccttnnnnnnnnnnnnnnnnnnnnnnnnnnnnnnnnnnnnnnnnnnnnnnnnnnnnnnnnnnnnnnnnnnnnnnnnnnnnnnnnnnnnnnnnnnnnnnnnnnnnnnnnnnnnnnnnnnnnnnnnnnnnnnnnnnnnnnnnnnnnnnncacacgaaccctaaacnnnnnnnnnnnnnnnnnnnnnnnnnnnnnnnnnnnntttttgttgggnnnnnnnnnnnnnacaaaaaaaactttttaaacaaccttctcgtgggggcgggcgggggcccaataaaaggaaaaagagaaagtgggcgctcctttcgtgttccccccaagaaaaacacgtcgcaaaaagaaaaaacagggttgtgtaatctccacacaac

SEQ ID NO: 164432 - DNA, 665 bp, Homo Sapiens
  misc_feature (52)..(62): n is a, c, g, or t
ccacagtttttctttcttaaatttcatcactgtgatgtggttctttgtgttnnnnnnnnnnngtgcaactatcaaaactaaaaaattatagagtaatatggccgttctgctgattttaaatatacaatacatcatacatactttacaagcaagttaaatggagataaagttgaaatcatagaagatgcaaatgacctttcaaaatcaacacaatgtgttctgaaactttcgtgactaataccatgcatctgtgatcaatgaactatgtggttttgaatcggatgtagaccattagtactactacttgagctaaacttctgcatggttcataatttttaaagtgtgtagttaatatgcatgttatcgtcctttcttccattcttaacagtatgtgcccatttgcaaaacaaaaatgctaataatcagtaatagtcctataaaagatgttaactctgtttagtcattgactgatcttgctctaaccttaaaattttgtgattattgacctctgttgcatttattctaaagccccccaaaaattatctagccgtttcgaatatcaacattaccctggtgtattcactgctgtatgcattattgttctttgttgctgttttatgccttcatattagcaaatatgaaattctgtgaaaaaaaccctttga

SEQ ID NO: 164433 - DNA, 311 bp, Homo Sapiens
aaatctgatacacacagatttcattgtcatattcaacaaaaccaagtcttccttaaaactgtgatcctgataggctgaagatagagtaatggactgttagttcctcatgccaaaaatacatgggtctgtcatacaaaggcttcattctctgcctgtcgtcagtaacttgagagccttttgtagattctggacagcagtgcttacatcttcatactgcaaagcactgccagcatatttgcagtacttctgagctctagcaaagtcttctggagtaagacgaacatacccctacagccatttaggtagggtac

SEQ ID NO: 164434 - DNA, 492 bp, Homo Sapiens
  misc_feature (87)..(100): n is a, c, g, or t
  misc_feature (109)..(224): n is a, c, g, or t
ccccgggttttcttgggaaacacttttgcccatttctctttccttttggggccccgcccccaaaaaaaagttttaaaaaattttttnnnnnnnnnnnnnncggccaaannnnnnnnnnnnnnnnnnnnnnnnnnnnnnnnnnnnnnnnnnnnnnnnnnnnnnnnnnnnnnnnnnnnnnnnnnnnnnnnnnnnnnnnnnnnnnnnnnnnnnnnnnnnnnnnnnnnagaatattctggctatctttattaaaagttacatttataattttatagcaaagtaatatcatctgtttgtccaaacattacagattttaaaaaattcccctaatgtatgtaaatacaaagcttattcccagtacacattttatagaggtgtgttttcattttttgaagcagggttcaatggacatttttagggtcttgctaacatcagccctatatactcagagacgattgaatctagtaaatggacaatgaaaactggttgaggctg

SEQ ID NO: 164435 - DNA, 546 bp, Homo Sapiens
cgggcggtgaattgtgagtacaaaccttaaatccaaaggctcttctcagagccaaccactttgtccgtgaaaagggctgtaatcctttgagacgcattagaccactaaactgcactgatccaaatagacatttgaaatagtggcatacagttccctcgatgcttcatttaaatttccaaatttaagcgctccctcaggttttcgcctagggctgggcctccctacgctgttctccatatggtttaggtggctttgttttgctgttcaggccctctgctgctttcttgtacattgttctcgttatctaaactcctggccacttaattgtaccctgcttaacccatcctcttgttttctggctcaacgctctttcatgtggtggcctgcattttaggtcttaactgcacaggctttcaacgccttggttttgcctttccttgatgtttatttgaccttgcccgaggggccagcgcttttgatctgcatcaggctgccttactccactagtgttttgagacccagctacttgccggcgacggtcggtgc

SEQ ID NO: 164436 - DNA, 543 bp, Homo Sapiens
tattactgtttttactcttaaagatttgagaggtcaggcatggttggctctcttatgaactccaaacctgcttcctggaatcctctactccagtaccactagttctcatacatttctaaaagtgaacttgtttccttagctcttcttttttggtcttctaatgtacctatttatctttctgtattttctattgcagtaactgaaaatatcatccctaccatgttacaagtcaaaaatctaggagtctgaagattactctaggcccctgcatcttcctcacccctcatgttcagtcagcatgtcccatcagatcttcttgctgctagccccatgtgtcctaagttcccaggaaaccctcccattccccattcatccctcaaggaagggacgatcaagtgtcattagacatttgaagagaaaatctatagcatgaaaaagataaacaaaagtaaactaatacacaaattgatcctgaagataattttaaaaaaactcttaagtagtagtttcagatttgagattatattgcccataaaaataaaa

SEQ ID NO: 164437 - DNA, 379 bp, Homo Sapiens
  misc_feature (322)..(323): n is a, c, g, or t
tgaaacacattcctagtcttttgatcctgacttcttatctgggctgctgtctctctttccttcaggtggaaaggaccccttggtaccatctcaagcagtaggaaaggacctgctcttacatatattgatggtcctcatgcaaaactctcaattcttaattagtcatgtctcagctcaagggatatcagacaggaatgaaacacacttgaaaatgagattgacctgagagattttttttcccataatctctcgatcaccttaacttggaaacaataatcaagttaacttctactgttacattacggatatacaagagttcacnncctccttaactgataacacggggagatccatctagaagtcagcacctgcaggcatg

SEQ ID NO: 164438 - DNA, 937 bp, Homo Sapiens
ttatctctgtcttgagttatctcgtagagacaccacttcttctcaatatcaaatgacatatttagttaggaaacagaagtaaactggcattgtggactctatgatattttaaagattaatattattcattactaaactaattaggctaattgccttctcagaaatgtagatttgaatatgctgtagatgttgacagtttatacccacatagctgatgctgcaattggagtttaatcagcaattctatgatgctttcacattcaaccttcaaattcaggcattctttctgggcaaaagcatcagcgatgttactgagtttcaaccttgccctccccaaggggttttcagctgacagcagggcctagtggcaacagtcctgagataggagttgaaggcccaggtcagtgagtcccaaagtgcccttcttttaatagcagaatgagaatcccccaggcccaattcagggagccttggaatctgcatttccacaaggtgattctgatgtaaaagcactgatcaagattttatcttctttatcctgggtcagccaagataaagtatataatctcttacaccttgatttgcaagtctctatggtggaataatgatatttgtatctccttttctcctaggaatattaaagagacaacattagtgaatatatatttaaaagtaaaaatctcagagtttgagagaacagcgtaacgtggtagtaaaataacaggttagcattagaaaaacttggttctagaacccagtcagccacctactcactgaacttgagtctcgattttcacatcttcaaaaaaagagattaatacctacttcccagagttaggttaaaggagatagtatgtgtataaaatttgtcttatgattaccacactgtagatatcaataaacagtagatattactaagtacagagtataatggtac

SEQ ID NO: 164439 - DNA, 1006 bp, Homo Sapiens
ctcatagtcgatcttgagtatcccctcttagtacatcagcccttggagaatgtttcccaagttacatcacatgctctttatctcttagagataattactggcctttccagtactctcttcccatcttcatctcaaatggtaacactctttaatgtgtgtctttgatctttgggctgttgtactaatctgaaatccaaaagccatctccgtcattgactctcccagcccttgaggtccttcctgtaaatacatgacctggggaagtgaagggttataaagtcacattccaccctacgggggatgacagaagactgggggagttaatggttggaccctatgacaacacagttgttttggaggaacttaggactggtaccacctataaagtaaatgtttttggaatgtttgatggaggagaaagctcaccacttgttggacaagaaatgacaaccctttccgacacaactgttatgccaattttatcttctgggatggagtgtctcaccagagctgaggcagacattgtgttgcaggtggatggatcatggagcatcggccgggcaaattttagaaccgtgaggagtttcatttctcgtattgtggaagtctttgacattggccccaaaagagtacaaattgctcttgctcagtatagtggggatcccagaacagagtggcagttaaatgcacacagagacaagaagagcttgttgcaagctgtggcaaacttgccgtacaaaggaggcaatactctcacaggcatggctttgaatttcattcgccaacagaacttcaggacccaagctggcatgagacctcgagctcgaaaaattggtgtgctcattactgatggaaaatcacaagacgatgcttgaagcaccttcaaagaaactcaaggatgagggagtggagctgtttgctattggtattaaaaatgctgatgaagtcgaattaaagatgattgcaactgatcctgatgatacccatgcatacaatgtgagcaggg

SEQ ID NO: 164440 - DNA, 677 bp, Homo Sapiens
tgcacacgccgagtatccaaacggtccctcccccatggctgattgccatgcagcgatatggaccacccccatcgtatcccaacctgaaaatccctggactttaattgcacccatgaatgtggctaggcgaggagctggagtggctgttcttaatggaaaactgtttgtatgtggtggctttgatggttctcatgccatcagttgtgtggaaatgtatgatccaactagaaatgaatggaagatgatgggaaatatgacttcaccaaggagcaatgctgggattgcaactgtagggaacaccatttatgcagtgggaggattcgatggcaatgaatttctgaatacggtggaagtctataaccttgagtcaaatgaatggagcccctatacaaagattttccagttttaacaaatttaagaccctctcaaactaacaggcttagtgatgtaattatggttagcagaggtacacttgtgaataaagaaggtgggtgggtatagatgttgctaacagcaacacaaagcttttgcatattgcatactattaaacatgctgtacatactttttgggtttatttggaaaggaatgcaaagatgaaggtctgttttgtgtacttttaagactttggttattttactttttggaaaagaataaaccaagaattgattgggcacat

SEQ ID NO: 164441 - DNA, 1507 bp, Homo Sapiens
  misc_feature (566)..(655): n is a, c, g, or t
  misc_feature (749)..(749): n is a, c, g, or t
  misc_feature (813)..(822): n is a, c, g, or t
  misc_feature (971)..(971): n is a, c, g, or t
tgctggaggtgatctagaggatcttcaaaagtgcactcttctatatctacatggaaagaagtgagacacctcagctcttcactgtgttgccagagaagagaacagccactgttggaggggccatgatgggatcaacccacatttatgacatgtccacggttatgagccggaagggcccggctcctgagctgcaaggtgtggaagtggcgtggcgcctgaagagttggagctggatcctatggccatgacccagaagtatgaggagcatgtgcgggagcagcaggctcaagtagagaaggaggacttcagtgacatggtggctgagcacgctgccaaacagaagcaaaaaaaacggaaagctcagccccaggacagccgtgggggcagcaagaaatataaggagttcaagttttaggtcccctcacactagccctttttttggccctacgtctggatgcctgggcttcacacaagaaccacctctcccgcagttcccaaggacttgtcatttcatgttcttattttagacctgttttgtaaataaagctgtttcccaaggaaagagnnnnnnnnnnnnnnnnnnnnnnnnnnnnnnnnnnnnnnnnnnnnnnnnnnnnnnnnnnnnnnnnnnnnnnnnnnnnnnnnnnnnnnnnnnccttgtccgggcgcccccggccccggaaaaagtttatctaaaccatttcttttcggcgccggcggccccgagacacgaaagaggaaaccgggcncatggccggtttctcctagcgaaatcccggagcccgggactaagggttttgggtttcgccaccnnnnnnnnnncacccccgggggcaaccgcgaaccgttttttgaaataaaaaccccaaactgcgaattcgggggaggcccatttaacctggtaaacccgatcaccaaaaaggaaacccccaaagcccacaaccccccgaattttccaaaatatttcaggnccccgcgcccccccgggcccttgtgtattcgccaaaaaaaagcgggggggaagaaatttctccaattataaacacatatctccgggaccccgcaacggcgcgggaaacaagcgccattaccccacctatcacggcacaatgtgggaatgaaaaccccgtggaaatctctcgcccatacgcggtgctatatcggaacccaacccttgtggctccctcctttgccgccaaatataaacaatattagacgccccctgggcgcccaaaacaacccgggaagccccaaaagaaacaaatataacctattttttgcgccccacgggctccacattctcaaaaactggggggagagattccccacccccacggctctaggggttggggcccccacaacacaaaaatatctcttattccaaacccctcttccggggaaaaaggggaaccaggttttcttcttttgttacacaccacaacaaaccttcggccgaaattatatgatttacacgccctgtcagccgaaacgcgcattgtcctatccc

SEQ ID NO: 164442 - DNA, 741 bp, Homo Sapiens
acgcgctgtcacatcgtgcatctccacgacatcgggccgagccaccagctgcttgagttcagccacagtgaagcggttcattcggcgcaacttcatcttgaattcaaggggggcattggctgcatcgtcctggaaagccggctctggttccgtgcctggaggcagctcttcagggacagtggggatggggtaagggtatggctcaactccaggtggctcagccttttcagggagggagaaaaagttttcgggggctacttcctcatcactgtcgtcttcttcctgcgtgatctgctttgtcacctgcagggcagcactcttggcagcagccttgatagcagagggcgacggagtggtggttgtggtgcccacaacaggggcaagagaggaagtcttggtcttagaagccagtctggagggcttagtatcaggggagccatccgagggtttgcgggagaaggcatggggcaggagcaacctgttagtctctttcacagtcaggtttttaggttggggaagcaaggcagacaaaccagtcccctcactggatccctgaaggatagttttcttctttgtgggttcatcttcctcagaatctgaatctcccttatgcaactccggcgccgcgatcttcacgggctctttcctcttctttggcttgggaagccccagcgggggaccggcaccgccaattggagggggcagattgaggccagggcctcggggcgagggcaacccccc

SEQ ID NO: 164443 - DNA, 1349 bp, Homo Sapiens
cggacgaggctcgtccctgggccagtcagcgtcagagactgaggaggacacagtgtccgtatctaaaaaggagaaaaaccggaagcgtaggaaccgaaagaagaagaaaaagccccagcgggtgcgaggggtgtcctctgagagctctggggaccgggagaaagactcaacccggtcccgtggctctgattccccagcagctgatgttgagattgagtatgtgactgaagaacctgaaatttacgagcccaactttatcttctttaagaggatctttgaggcttttaagctcactgatgatgtgaagaaggagaaagagaaggagccagagaaacttgacaaactggagaactctgcagcccccaagaagaagggatttgaagaggagcacaaggacagtgatgatgacagcagtgatgacgagcaggaaaagaagccagaagcccccaagctgtccaagaagaagttgcgccgaatgaaccgcttcactgtggctgaactcaagcagctggtggctcggcccgatgtcgtggagatgcacgatgtgacagcgcaggaccctaagctcttggttcacctcaaggccactcggaactctgtgcctgtgccacgccactggtgttttaagcgcaaatacctgcagggcaaacggggcattgagaagccccccttcgagctgccagacttcatcaaacgcacaggcatccaggagatgcgagaggccctgcaggagaaggaagaacagaagaccatgaagtcaaaaatgcgagagaaagttcggcctaagatgggcaaaattgacatcgactaccagaaactgcatgatgccttcttcaagtggcagaccaagccaaagctgaccatccatggggacctgtactatgaggggaaggagttcgagacacgactgaaggagaagaagccaggagatctgtctgatgagctaaggatttccttggggatgccagtaggaccaaatgcccacaaggtccctcccccatggctgattgccatgcagcgatatggaccaccccccatcgtatcccaacctgaaaatccctgggctgaactcgcccatccctgagagctgttccttttgggtaccatgcctggtggctgggggcaaaccctccaggggaatgagactgcggaaaccgcttctactgggggacgtggtttcgcgaccccatggctggcctgaaatttcccgatccaggaactggagggaagaaacgaaaagttggcctcgggactccctccgcgccggggaaactcgggccacccatccctgactgataaaaacctccctccaaaagtaaaaaggtaacacagcggcacccaacgttggt

SEQ ID NO: 164444 - DNA, 1014 bp, Homo Sapiens
gcagtgatgacgagcaggaaaagaagccagaagcccccaagctgtccaagaagaagttgcgccgaatgaaccgcttcactgtggctgaactcaagcagctggtggctcggcccgatgtcgtggagatgcacgatgtgacagcgcaggaccctaagctcttggttcacctcaaggccactcggaactctgtgcctgtgccacgccactggtgttttaagcgcaaatacctgcagggcaaacggggcattgagaagccccccttcgagctgccagacttcatcaaacgcacaggcatccaggagatgcgagaggccctgcaggagaaggaagaacagaagaccatgaagtcaaaaatgcgagagaaagttcggcctaagatgggcaaaattgacatcgactaccagaaactgcatgatgccttcttcaagtggcagaccaagccaaagctgaccatccatggggacctgtactatgaggggaaggagttcgagacacgactgaaggagaagaagccaggagatctgtctgatgagctaaggatttccttggggatgccagtaggaccaaatgcccacaaggtccctcccccatggctgattgccatgcagcgatatggaccacccccatcgtatcccaacctgaaaatccctgggctgaactcgcccatccctgagagctgttcctttgggtaccatgctggtggctggggcaaacctccagtggatgagactgggaaaccgctctatggggacgtgtttggaaccaatgctgctgaatttcagaccaagactgaggaagaagagattgatcggaccccttggggggaactggaaccatctgatgaagaatcctcagaagaagaggaagaggaagaagtgatgaagaccaaccagatgagacaagcctttattacccccctgcagacagtggcccttatcaactccctggaaggcttttcatccatgccctggctgggattgggagaccccctggaacttcattggaacctgaagg

SEQ ID NO: 164445 - DNA, 883 bp, Homo Sapiens
ggtgaggggaaggagttcgagacacgactgaaggagaagaagccaggagatctgtctgatgagctaaggatttccttggggatgccagtaggaccaaatgcccacaaggtccctcccccatggctgattgccatgcagcgatatggaccacccccatcgtatcccaacctgaaaatccctgggctgaactcgcccatccctgagagctgttcctttgggtaccatgctggtggctggggcaaacctccagtggatgagactgggaaaccgctctatggggacgtgtttggaaccaatgctgctgaatttcagaccaagactgaggaagaagagattgatcggaccccttggggggaactggaaccatctgatgaagaatcctcagaagaagaggaagaggaagaaagtgatgaagacaaaccagatgagacaggctttattacccctgcagacagtggccttatcactcctggaggcttttcatcagtgcctgctggaatggagacccctgaactcattgagctgaggaagaagaagattgaggaggcgatggacggaagtgagacacctcagctcttcactgtgttgccagagaagagaacagccactgttggaggggccatgatgggatcaacccacatttatgacatgtccacggttatgagccggaagggcccggctcctgagctgcaaggtgtggaaaatggcgctggcgcctgaagagttgggagctggatcctatgggccatggccccaaaagtattgagggagcatggtgccggggaggcagccaggcctccaagttaggagaaaggggaggacttcccggtggaccttggggggggcttgaagccaacccttgccccaaaaccgggaaaagccc

SEQ ID NO: 164446 - DNA, 1072 bp, Homo Sapiens
  misc_feature (699)..(699): n is a, c, g, or t
  misc_feature (751)..(751): n is a, c, g, or t
ttgagaagccccccttcgagctgccagacttcatcaaacgcacaggcatccaggagatgcgagaggccctgcaggagaaggaagaacagaagaccatgaagtcaaaaatgcgagagaaagttcggcctaagatgggcaaaattgacatcgactaccagaaactgcatgatgccttcttcaagtggcagaccaagccaaagctgaccatccatggggacctgtactatgaggggaaggagttcgagacacgactgaaggagaagaagccaggagatctgtctgatgagctaaggatttccttggggatgccagtaggaccaaatgcccacaaggtccctcccccatggctgattgccatgcagcgatatggaccacccccatcgtatcccaacctgaaaatccctgggctgaactcgcccatccctgagagctgttcctttgggtaccatgctggtggctggggcaaacctccagtggatgagactgggaaaccgctctatggggacgtgtttggaaccaatgctgctgaatttcagaccaagactgaggaagaagagattgatcggaccccttggggggaactggaaccatctgatgaagatcctcagaagaagaggaagaggaagaaagtgatgaagacaaaccagatgagacaggctttattacccctgcagacagtggccttatcactcctggagngcttttcatcagtgcctgctggaatggagacccctgaactcattgagctgangaaagaagaagattgaggaagcgatggacggaagtgagacacctcagctcttcactgtgttgccaaaagaaaaaacagccactgtttggaggggccatgatgggatcaacccacatttatgacatgttccacgtttatgagccgggagggccccggctcctgagctgcaagttgtggaaagtgccgctggcccccctgaaaagtttgaacctggaatcctatgggccctgacccccaaaagttttgaaggaccttgtggccgggaaacacccaggcctccaagttaaaagaaaggggggaactttccagggggaacttggg

SEQ ID NO: 164447 - DNA, 904 bp, Homo Sapiens
gccttggccttggctttcctatggcccacccaccaaatttggggccccccgcctcctctccgtgtgggtgagccagtggcactgtcagaggaggagcggccgaagttggctcagcagcaggcggcattgctgatgcagcaggaggagcgtgccaagcagcagggagatcattcgctgaaggaacatgagctcttggagcagcagaagcgggcagctgtgttactggagcaggaacgacagcaggagattgccaagatgggcaccccagtccctcggcccccacaagaacatgggccagattggtgtgcgcactcctctgggtcctcgagctgctccagtgggcccagtgggccccactcctacagttttgcccatgggagcccctgttccccggcctcgtggtcccccaccgccccctggagatgagaacagagagatggatgacccctctgtgggccccaagatcccccaggctttggagaagatcctgcagctgaaggagagccgccaggaagagatgaattctcagcaggaggaagaggaaatggaaacagatgctcgctcgtccctgggccagtcagcgtcagagactgaggaggacacagtgtccgtatctaaaaaggagaaaaaccggaagcgtaggaaccgaaagaagaagaaaaaaccccagcgggttgccgaggggtgtcctctgaaaaactctcgggggaacccggaagaaaaaactcaaccccgggccccgggggctctgaattcccccagcaacctgaaggggtgaaaatttgagtatgtggaccggaagaaaccctgaaaatttaccgagccccaacctttattcttcctttaaaaagggacctttggaaggctttttaaacctcccctggatggatgggtgaaaaaaggg

SEQ ID NO: 164448 - DNA, 876 bp, Homo Sapiens
gattgccatgcagcgatatggaccacccccatcgtatcccaacctgaaaatccctgggctgaactcgcccatccctgagagctgttcctttgggtaccatgctggtggctggggcaaacctccagtggatgagactgggaaaccgctctatggggacgtgtttggaaccaatgctgctgaatttcagaccaagactgaggaagaagagattgatcggaccccttggggggaactggaaccatctgatgaagaatcctcagaagaagaggaagaggaagaaagtgatgaagacaaaccagatgagacaggctttattacccctgcagacagtggccttatcactcctggaggcttttcatcagtgcctgctggaatggagacccctgaactcattgagctgaggaagaagaagattgaggaggcgatggacggaagtgagacacctcagctcttcactgtgttgccagagaagagaacagccactgttggaggggccatgatgggatcaacccacatttatgacatgtccacggttatgagccggaagggcccggctcctgagctgcaaggtgtggaagtggcgctggcgcctgaagagttggagctggatcctatggccatgacccagaagtatgaggagcatgtgcgggagcagcaggctcaagtagagaaggaggacttcagtgacatggtggctgagcacgctgccaaacagaaagcaaaaaaacggaaaagtcagccccaggaccgcccgtgcgggcagcaagaaatataagggaggtccaagttttaggtccccctctacactaacccccttttttttggccctaccatctgggatgccccggggtccttcccccaaacaaaaccaccctc

SEQ ID NO: 164449 - DNA, 514 bp, Homo Sapiens
aaacaaaggatatacctgacagactacttctggaaaaggttttctcaaaggcccaaggattcaagcaaagggaagtggaatcttgtggtgaacagtaccttgtctggatgtggtgcctggtaaccatctctcagcaatggattatagtttaatcatggcctgagcagaaatactgaaagaccctgagacctggatgatgtctttgagccaccaaaccaagcagccttgtagccactcctcctttggactgtttcttttgtgagagactaaacttatttttaagccagttgatttaggatgctctattactaataactgaagacattctaattggtacagactgaaacctttataggagttatccagttcagaagtagacttgaggtaagtcatgtatggtaagctgacgatatagagaattataattctgtaaattttgacgaaaatagatttgagcattagaaatcaacttgaaacaataaaatgtatgctcggtcgaaccgggatccgtcag

SEQ ID NO: 164450 - DNA, 831 bp, Homo Sapiens
gttagattgtgtgtgcctttagttaccttacctctgaatattaattctattttgactcgatcgtagcgttactcacgttcaaggtaaacacgttccacactggccccaagccaggcgcactgtgttttactgattgatttgaagatgatagagagcctagggggatgagtctattggactcaaaggttacattttgtttttccatttaatttaataatcaacaaaacgacaaagtcagtttaatatctttcttctgctgagtcttcaggacgttagctagtctttcaaaagccattgctacaaaagtgcaaatttctcatttcctgtgggtctctagaaactctctcaatatttaaagccaaacaaatccatctttactgagagacagaaactaaaaaattcagagttaattcactattaaaaacagcaaggccctgctatttcccaagaataaagaaatttaaaattctcattgtaagaagtatgaacttgaagctagaattggtttatttctggcagctacttacaatattaagaactttactttttaaatttgagacaatttcacaggaaagcaagaaattagtctttgtgaaatgtttttacaactaacttggaatatactgcaagtcactagtaagtagagacacatttaagataaaatgattaataaaacaattggtaattctgaataaggatctgaataaatccagatcacagactgttcctttaccaatatgtaaaagaatgtgcaaaattcgtaaaaatatacccaaaaatttaccagctacagagaacaaagaatggagttcaaccttacactataacatc

SEQ ID NO: 164451 - DNA, 503 bp, Homo Sapiens
aaggaatactatttgctcaaagtagaataaaagggaaggatgctctaattaaacattttattaaaattaaactctctatatgaaaggtatgaaatttaatctggaaacctagatagattttcaaattcagataaaatgggttgacaacctataagcaggtaatattacagcaaagaaaatgtaggcaattacagtgacattcccaataagagggtgccccacattaattcctaacactggtggttagcagcccaaagtaaaccaaaccaaaataaagacctttcacatttcatataaaattagaaaaaaagtaacgagataaataaatacactaaagtttaagtattttaactttttaacttacatggctaaagtagcatttatgaatacctataatagtcaaaggcctaatttatcttaactagatattctgaagacaaaaattctaggagcaaaattaaattccatccgatcttgaaaacttacaaattgttaatcatata

SEQ ID NO: 164452 - DNA, 927 bp, Homo Sapiens
ccctttatgtatacggaagtcgctaaactacaaaacatgtccatttgaagtttttagacatctctgtatcatagaagcaaacaaacagcatcagttcctcagttctctgtgtgactgattattaaacaacctgtagacattgagcatgattacattagataaagcaggcaggtctagagttgtcacaataatcaaagaggtctaatggcaccagtcaaaagaggtcccaaagcttacatcagtaagagagaaaaataaaaattttttatttggtttataagtatctttggtgctgaaagttcaactttatgactggatataaaaagtcaggagttaagagtgtcatgcagcagcactgatttaatgactggagatagaacaaacagatgtttgaacaaagactgacattcttaacaggttttattatattgggtggaatgctctaaattcatgaacgcttttggaaaatcttcaattctcaaccccttaaaaaagtatcctgaaccaggaagaaaaaacaagagacagaaataatgatctggacagatacaaaacaggatgctttagttcctcccatatcccaactgccatctggtgatagagttctcagaaagcaggatatctttaatattcatcaggcagaatctcaccagtgcaaagaaccaacattgatctggtgcctccgctcactctctgcagaccattttggattcctaagatgtaattatacatttcacatgcatttgtgagataaaataaacattatgtttacatatatcccacatgagtcattcacgcctaaaggttttctaaatactgtgtgtggcactagaaacttcatgctgtatcaagtcagtgtcagtattaagctactggactctataatgaaatattatagatagacatttactgaaaaccaatataacc

SEQ ID NO: 164453 - DNA, 1971 bp, Homo Sapiens
  misc_feature (361)..(396): n is a, c, g, or t
  misc_feature (1077)..(1085): n is a, c, g, or t
  misc_feature (1129)..(1171): n is a, c, g, or t
  misc_feature (1299)..(1354): n is a, c, g, or t
  misc_feature (1412)..(1446): n is a, c, g, or t
  misc_feature (1545)..(1545): n is a, c, g, or t
  misc_feature (1669)..(1669): n is a, c, g, or t
  misc_feature (1671)..(1671): n is a, c, g, or t
  misc_feature (1809)..(1809): n is a, c, g, or t
ccttgattctgcaatagtcgactctatgaggatacccttactgtttcactcttaaggagagctgcgcgtcgaaccgtctgtccgatggcgcagaccttaggtgaggccacccccctccatcctgggggaagcgcccgcgaaaaccgtggagagaatccgccgcccgggtctgctgagaggcccggagagggactctgtccccggggagccatcgccttcagtgtgcagggacggcaccgaggagtctgagccgggggcgcgggcgccttccgcagagacctgcgcccacaggtgctgtcttagtggactgggacgtgaacctttcgctctccttctggactgggagaagggaggcttgggnnnnnnnnnnnnnnnnnnnnnnnnnnnnnnnnnnnnaaagatctcctcagggtcggacttcattttgtactgtgggctgtgctggccctttcaaggtttttcaagagttggttttgcgtttccaacctcggagaattccaggcactccccttccccctccgctgacatacttgtataagcggtcatcgttgcgtcatggggcaggcgtggggagcttcctgtcgccttgcgtgggtgtggggcctgggaggaggtcctggggcgtgcacccgccctgggcagtggggaggagagtggcctgagttacttcacccccgcgtgctgctggttaatgtcccgcgtctctgcaccttcgggtgggagcggggactgatctactttcacattctcaagtttttctcatctgcattagaggtgcccagtaggttcccaggttccagcgtgcccctccctcagacacacggacacaatcagccgagaagttcctggtctgaatcacgagaatgtggaggggtggggggtgtcagtggaaaggcataaggctgagctgagaccagttgctggtgaaactgggccaatctggggaggggaacatccttgccagggagtttctgagggtctgctttgtttacctttcgtgcggtggattctttttaactccgtctacctggcgttttgttagaaatgtcagataggaaaataaaaaccatttgagtnnnnnnnnngaaatgacgagaagaacaacttcaacttaaagaatgcaagaagnnnnnnnnnnnnnnnnnnnnnnnnnnnnnnnnnnnnnnnnnnncgagagagctatcgtgtcgggaccctcggtctccacactgggaaaacccgaataatttggcgacccgcccctctcgcctcctaaaaaaaacgtttctccaaaaccaccctgaatttgggcggggcgcnnnnnnnnnnnnnnnnnnnnnnnnnnnnnnnnnnnnnnnnnnnnnnnnnnnnnnnnacacaaggaaaactccggggccaatggagaatacccgaggccccgtcgtgcctttatnnnnnnnnnnnnnnnnnnnnnnnnnnnnnnnnnnngcgcgggtgacaatcaaccacacccgagaggtgcgttctctccgcaagccaacaaaaatcgccctcccgcgcgggtgagagcactcccctcccccaggnggcgtgtgcgtaattctcgtgtgtgcggagaccccgctctaatcaccacgagaggagagagagttcccatacgaggagggcgcgccatgcttactatattgttagtttgagatcaactgtgacngngccgcccctgcacaggcgcagcgggggttaccacccatccctcatcggtgacagtcctaacagccatgcacttagagaatctcatcctaatagcataagacaagctggtctctggcggcgcgcgtcccccctttcgtnatacgtctactcgctccgctaacacaccaccgcgcgctctctcagattattgacccccccgctcccgatatcacacccgccccgcatgtacgcgcgcgttactacaaccaccccccgtatgtgagcgcgggcctactttttgtatacacataccgagcggag

SEQ ID NO: 164454 - DNA, 423 bp, Homo Sapiens
  misc_feature (70)..(70): n is a, c, g, or t
  misc_feature (216)..(216): n is a, c, g, or t
  misc_feature (399)..(399): n is a, c, g, or t
aagaaaaatggccctgaagttaacttcaccccccgcgtgctgcctggttaaatgtccccgcgtctcctgncaccttcgggtgggaagcggggactgaatcctactttcacattcctcaagtttttcctcatctgcattagaggtgccccagtaggttccccaggttcccagcgtgcccctccctcagacacacggacacaatcagcccgagaagtnccctggtctgaatcacgagaatgtggaggggtggggggtgtcagtggaaaggcataaggctgagctgagaccagttgctggtgaaactgggccaatctggggaggggaacatccttgccagggagtttctgagggtctgctttgtttacctttcgtgcggtggattctttttaactccgtctncctggcgttttgttagaaatgtca

SEQ ID NO: 164455 - DNA, 657 bp, Homo Sapiens
gatgatttaaagtatttactcagtacccaagtttgcaagtaaaaattagcatagaatggagtgtaccaaattaacaatcaggagagtggattctctcctgttatcctggaccagtttttatgaaaggattcctgaaatgaaatccatatattccatgtagactggaaaaactcatgtcctaatcctttctgtactgttgaaaccacttcattggacatgttgcaatagcaaaacccccagttagattagtgtttacacattttctcagttatttaatatttaatgttttccttaatactcaagtgatgtttgtctctagtgttctaatgtagcacaaatcctatgtaaaatcatactatgtatttttgacattaatgttgaaatcaaatatatgcacaagtctttaattttgtgtaatgtgttaagtgctgttcatttaagttattgaaaatgagaataaaatgttgagcttctttaaaagtaacacactatgcaagcatgtgtactttttatatctctcatgtttagtttttataacaccatatccaggttgctatctcacatagtagtcctttaacatattgtattagcagtgcaatgtggactaagctgcttcactttccctaacaagcttcagatcgacatactgccgaacgg

SEQ ID NO: 164456 - DNA, 1459 bp, Homo Sapiens
  misc_feature (785)..(807): n is a, c, g, or t
  misc_feature (884)..(884): n is a, c, g, or t
  misc_feature (1085)..(1145): n is a, c, g, or t
ccctccatggtgttagtccagaagtgaatgaactattgatggaagcccagctgctccaggtatcccttcctgaaattcaggaactttaccagactttacttgcaaagccaagccctgctcagcagactgaccgaagctcaccagtgagacccagcagtgagaagaatgactgttgccgagggaagcgagatggaattaatcagtcttgagagaaaactgaagagacgcctggaaagagagggcctctccagtgagcggtgggaacgagttaagaaaatgcggacccccaaaaagaagaaaatcaaactgagccaccccaaggacatgaacaatttcaagttagagagagagcgtagctatgaattagttcgttctgctgaaactcattccctgccctcagacacatcctattccgaacaggaagactctgaggatgaagatgccatctgcccagctgtgagctgcctgcagccagaaggagatgaggtggactgggtccagtgtgatggcagctgcaatcagtggtttcatcaggtctgtgttggtgtctccccagagatggcagagaaagaagactacatctgtgtgcgctgtactgtgaaggacgcaccaagccgaaagtaaaaacacaaaaacagatacccccctacttaatgtaattcaggactccaaccaagaggatttcttcaaatctcagcaaagctacaggactggtactcaagccagcctgtaaacggtgctatttctattccttatgggatcatttttccaggactctttgaagnnnnnnnnnnnnnnnnnnnnnnntttttgacactttttgcattttttccttaagagctatttgtggttgttgaggtttgaaaagctgactgttttttttngcaggggttcccaccaatttggaaggcattgaagcttgcaccttttcatgtacagcattaaaattttacctctctctgggatttaccagcttaagagtccaactcacttccagtgcccaaaagggcacccaccagaaattccagtaaatcctcatttgaggaagctctcccttgtttactctgttaccacattggggaaannnnnnnnnnnnnnnnnnnnnnnnnnnnnnnnnnnnnnnnnnnnnnnnnnnnnnnnnnnnnttcttcctggtagactaggtttattaatctgagcaataacttctatgttggtttcagtggctggaattaaaacaaaacaaaacaaacttccaaacagcgtgttggtgctttagcgattgattgatgtacagaacacaaatgtctagtttctagtgtcactgatgaactagtgatgtagaaaagagacttctctgtaagtaattgccacagctgtattttggctttctccctgtcccttcctttctcccctattttttggtagcttgtatcaaatgttacagtttatattgtggaataaatccttcgtcctaaca

SEQ ID NO: 164457 - DNA, 590 bp, Homo Sapiens
aagggaacagaacacaagccacgtcctggtctgtagccaggtgtccgtgtactgcataatggaggaagaggattacagggagattttcacttcagcctttagtccaaccaaaacttaaaagacttacagagaacagcctcaggaggttaggggacagaagtgtggtactgcaggaagacaagaggggtaaacgtatccagcagaatgtaaggataagaaacacccacatgaattcttagaatacagaggaacaagaaggaataattcctgtgccatatgcggaccagggaatagggagagtggagcacagtgggttagccactaaatggcttcagtgagaattctgaaaactgttccagtataattttggagtaaatccttgctcctggacaggtcaaagactgtgctttttaaatgtcattagaaggtaacagctttttgcatcctgcttccagatgatttcccttttggttaaaaaccagaaatagtataaacctcacaggatgaaagaacagtcttttgatacaggtgaggtggagatctagatgaacttacatagtaagtgaggagtacatttgttggtcttctca

SEQ ID NO: 164458 - DNA, 753 bp, Homo Sapiens
  misc_feature (265)..(275): n is a, c, g, or t
  misc_feature (415)..(443): n is a, c, g, or t
  misc_feature (463)..(634): n is a, c, g, or t
cgggtgtaaagtgccatgactgaataatcttcaattgcatagattctagagtaagtttaatttgaaataaaggtgcttcacacatggtggtggttgaacattgattcttttatacttaaatagatgaaaatgttttgtggactgatacattttatcttactgaatatgaattgtttatgtatctgtactgtcaaatagcctttttgaaactcaggaaagacaaaggttcaattacaccacttttgtcaataagcaaaccaggtannnnnnnnnnnctcctgttgtctggatatggcaatagattttttaaattgctgtgagaacccatatatgaaaagagaggagttgaattgtgtgtgccttttatgtcttgagatttatatgtggaaaagacgacatctacttcaaactgtannnnnnnnnnnnnnnnnnnnnnnnnnnnngggaaggggggaagaacggnnnnnnnnnnnnnnnnnnnnnnnnnnnnnnnnnnnnnnnnnnnnnnnnnnnnnnnnnnnnnnnnnnnnnnnnnnnnnnnnnnnnnnnnnnnnnnnnnnnnnnnnnnnnnnnnnnnnnnnnnnnnnnnnnnnnnnnnnnnnnnnnnnnnnnnnnnnnnnnnnnnnnnnnnnnnaagtaaagacggatccctccctggacacggggatccgccccggcttgggcctccccgaaatggctggggaattacagggcggggagcccaccacccccccggggcgggtaatttttccc

SEQ ID NO: 164459 - DNA, 394 bp, Homo Sapiens
  misc_feature (99)..(110): n is a, c, g, or t
gcctaaattagagtcaaagcaggaggaatagagaggcactgacaaattagatacagtaatcccattgtatcagtggttgggggggatacattacaagannnnnnnnnnnnagtaactgcagatagtactgaaccctatatacactcttttttcctatatgtgctatgttttttcctatatgtatgtacctgtgataaagtttaatttttattttaacaataataaaatagaacaattatagtactgtattatagtaaaaagttatatgaatgtagtctctttctctctcaaaatatcttattgtatataaaccacataaatcaaaaccacagatgggggagactgtgtgtatttggaaagtagaagttgaagggtgtgatgatcgaatgaccgc

SEQ ID NO: 164460 - DNA, 331 bp, Homo Sapiens
acaataaatacagtgaaaactacaatcaatacctaactcttcaatgcccagacaccaaagaacatctgctagcatcaacactatccaggaaaacatgacctcaccaaatgaactaaataagacaccaggggccaatcctgtagaaacagagatatgtgaccttccagacaaagaaatcaaaatagctgtgttgaggaaactcaaagaaattcaagataacacagggaaggaattcataattctattagataagtttaacaaagagatggaaataatttaaaagaatcaagcagaaattctggagccaaaaaatgtaattggcatgccaaag

SEQ ID NO: 164461 - DNA, 516 bp, Homo Sapiens
aatgtcaaccatagactgttggacatgtctgtccttgataatatatggttgcttgagactgtgcaggagagtactgctgctgtacactgacagactgttggtttgaatcccaaacactataattctgtccctgaactgggccgggggccggcactggcaagacagcaacgctggagtcttggtgtactacaccatcactctgggccacatactgggaactggaaacttccacaggagctgccacatgtggcaccactggtactggtggaggggcagaaaggggttctgtagaatgtcccaccaagggctgagcatgatcataaggagcaggagaacacactgggtccatgctgggtgtgggcaggagcacctttccagcattagggttgctgggatccacataggcctgcatgggataacctggtgggtaaccagcaaagggatgatgcggggcattataaccaagagagtcatagggcagtggtgatgtcattcccaggttctgcatctgttgct

SEQ ID NO: 164462 - DNA, 474 bp, Homo Sapiens
cgggtccgagagatgtgctctcaattggcagacctggatgatgagctagatggcatgggtgctattggcagagacactgatagcctccagtcccaaatcgaggatgtccggctattccttaacaaaattcacgtcctcaaattagacatagaggcctctgaagcagagtgtcgacatatgctagaagaagaggggactctggatttgttaggtctcaaaagggagctagaagccctgaacaaacagtgtggcaaactgacagagagggggaaagctcgtcaggaacagctggaactgacactaggccgtgtagaggacttctacaggaaattgaaaggactcaatgacgcgaccacagcagcagaggaggcagaggccctccagcgggtagtggggaccgaagtggaaatcatcaaccaacaattagcagattttaaaatgtttcagaaagaacaagtggatcctcttcagatt

SEQ ID NO: 164463 - DNA, 432 bp, Homo Sapiens
taagatcacacagctagtgcagttaccccctctcagtaattatgtttggcaaatatgaaatacaaggatctggcaaggttaggaagaggttaagaatatcagtgacagtactctgaggcatctgggcatgtcagatgaagatttattattcagaaaagttaagtcagctgttgcagggatcagttgtttaattcctggaaaatgtttttcattttgctgcaaatctatatctgacctgctgaggaaatcgtttggtgaaatgaatccagaaagcagagaaaatgcttcattactttaaatagcagcattaagcccattatagcctctgaattgtcccttccttgagtttgctaatgcttccaacttagtcatttgaagcccaagagtctaattttatatgccctgccctgtgagccttgcgtgggctgtgag

SEQ ID NO: 164464 - DNA, 865 bp, Homo Sapiens
acccacgaaaggaattggggaagaaggaggaggagcttgaagtcagctttgagcctcccaagtggaaggctcccagggtgctgagcttctctctgaaatccaaagtcctcaacgaaagtgtcagctttgatgtgcttcctgcctttaatgcactgggtcagctgagttctggctccacaccccagccccgaggtttatgcagggctcattgatctgtataaatcctcggacctcccgggaggagagttttcttacctctttcacagtcctgcagcgaaacttcattcgctcccggcccaccaaactaaaggatttaattcgcctggtgaagcactggtacaaagagtgtgaaaggaaactgaagccaaaggggtctttgcccccaaagtatgccttggagctgctcaccatctatgcctgggagcaggggagtggagtgccggattttgacactgcagaaggtttccggacagtcctggagctggtcacacaatatcagcagctctgcatcttctggaaggtcaattacaactttgaagatgagaccgtgaggaagtttctactgagccagttgcagaaaaccaggcctgtgatcttggacccagccgaacccacaggtgacgtgggtggaggggaccgttggtgttggcatcttctggcaaaagaagcaaaggaatggttatcctctccctgcttcaaggatgggactggaaacccaataccaccttggaaagtgccggtaaaagtcatctaaaggaggcgttgtctggaaatagccctgtaacaggcttgaatcaaagaacttctcctactgtagcaacctgaaattaactcagacacaaataaaggaaacccagctcacagg

SEQ ID NO: 164465 - DNA, 245 bp, Homo Sapiens
tcttacttccgggctttctggcacttctccttgtttaagacttagtttgatgtcaggcctctcttccctttcttttcgatcactttcttggaaagacaatttgtcttggatagcatttttgaagcttttataaatgtgaattaaatcggggtattcctgcatgttgacctcgctgaacagtgcttccaaaactgacaggttaaatgtcttctccagttcactgagaacattgtacaccactcttt

SEQ ID NO: 164466 - DNA, 827 bp, Homo Sapiens
gggcagccacactgcacgcaggctgggccgactgaggggctcagaggccaggctctgaggcccacgcagggcctagggtgggaagatggcaggtgggggcggcgacctgagcaccaggaggctgaatgaatgtatttcaccagtagcaaatgagatgaaccatcttcctgcacacagccacgatttgcaaaggatgttcacggaagaccagggtgtagatgacaggctgctctatgacattgtattcaagcacttcaaaagaaataaggtggagatttcaaatgcaataaaaaagacatttccattcctcgagggcctccgtgatcgtgatctcatcacaaataaaatgtttgaagattctcaagattcttgtagaaacctggtccctgtacagagagtggtgtacaatgttcttagtgaactggagaagacatttaacctgccagttctggaagcactgttcagcgatgtcaacatgcaggaataccccgatttaattcacatttataaaggctttgaaaatgtaatccatgacaaattgcctctccaagaaagtgaagaagaagagagggaggagaggtctggcctccaactaagtcttgaacaaggaactggtgaaaactcttttcgaagcctgacttggccaccttcgggttcccatctcatgctggtacaaccccacctgaagatggactctcagagcaaccctgtgaaacagaacagataatgcaaagagaaaagatacagcagtgacaaagatgatccgctaggaagccaacagacaatgaccatgtgctcacaaggctgagcagcagagtctgcgaaca

SEQ ID NO: 164467 - DNA, 535 bp, Homo Sapiens
  misc_feature (87)..(120): n is a, c, g, or t
gtaacctgtgaggtaggacatgatagtgttttattgggccccttttactttatgaattgggaaaattaaatttgcatgtagtttgtnnnnnnnnnnnnnnnnnnnnnnnnnnnnnnnnnnttgattgagattatttcagcagccagaagtgtgggacaggcagggcagttattcctccttctcagtttggaaactgaagctcagagagtaaacttgtcagtgacacagttattcaagaagttgtcttcagttgagagatatgtttttcacctgtagcttctggtattggaggagtacctttttagactaaacaaattacggttaaaattataaaggtatttttggagtacctggaaaaaatcagcattttgcttttctagttccatttagtaggaaggcaggaaagtttggtatacctgaattacatgtgagttatttctatttttctaaaaattcttataaattgtgtaaggtaaaaacgactacttcttgttttatggtaaatatagtatcctttcaagccactgctgtacag

SEQ ID NO: 164468 - DNA, 1144 bp, Homo Sapiens
tagcacttcttacttctcaaaatagagagtaataagctcaatcaagcaacgtccatcaccaatttaaactgagtgaaaaggaagtgacctgttacaaatgacaacaatcaggatatgcaccctgcagaagtgctagcctcagtacgtctaatgagttacaggcacccactgcaccaaaaggtcccctggtcccattccagaacccctgacaatgtccacctctagactagtgtttgaaaaactcagaattctttttgaactaagaagctggctgccttaacatcagcggcaaaaccaatccaatcaggaagtaggaatttgttggaaaattcatagatatgcataatttatgatccctgatatgatgtggtagttttcagatgtggatagtgtttgtcatccttaggtttgctggtaaaatgtattctgctgtagctgggctagagatccacacagctggtccacagcacagcacagccagctgaatgaatagacaggacatgaaagtgtttgcttttcaaagaactgctaaaaccaaaggcagtgtacagaaggctggtgacctgaaccttcattcaggaggaacactactcctcaggtttccttctctcctctatgcgccaaatttaagacaccttaattggtacttcgcactcacgacacacactatcataccatgaagatactcattaaagatactgcacgtatctatgatgagaatgctgcagctccttgctttagaactgtctgcacctaagcaattcaaggggcacagatgctggagcttcacacaaagtccttgtatctttaaactacctcacatcaaacagaggaaaggatgacaccccgacttcccaggaaggcagaatgtgttctcagaagcaaccaatctactccaaactcaacttcaaaaatgacaggagaaacattacattaaataagagcatagaaataacatttcactgtggaatgctcagtggttaaaagtgttacagtgtttcacgttttagcaaaccttactcttacaggccttctaattcgcttgatttctgtaaagttctttgcactacttattgtaatctatttttattgcacatttttaaccagaaccatttcactgcatgtctgccctagctctctcttc

SEQ ID NO: 164469 - DNA, 742 bp, Homo Sapiens
gaagaaactgaagaagaaaatacaacgtatactggaccagaagtttcagatccaatgagttccacctacatagaggaattgggtaaaagagaagtcacaattcctccaaaatatagggaactattggctaaaaaggaagggatcacagggcctcctgcagactcttcgaaacccatagggccagatgatgctatagacgccttgtcatctgacttcacctgtgggtcgcctacagctgctggaaagaaaactgaaaaagaggaatctacagaagttttaaaagctcagtcagcagggacagtcagaagtgctgctccaccccaagagaagaaaagaaaggtggagaaggatacaatgagtgatcaagcactcgaggctctgtcggcttcactgggcacccggcaagcagaacctgagctcgacctccgctcaattaaggaagccgatgaggcaaaagctaaagaagaaaaactagagaagtgtggtgaggatgatgaaacaatcccatctgagtacagattaaaaccagccacggataaagatggaaaaccactattgccagagcctgaagaaaaacccaagcctcggagtgaatcagaactcattgatgaactttcagaagattttgaccggtctgaatgtaaagagaaaccatctaagccaactgaaaagacagaagaatctaaggccgctgctccagctcctgtgtcggaggctgtgtgtcgaccttccatgtgtagca

SEQ ID NO: 164470 - DNA, 556 bp, Homo Sapiens
ctgagctacagcccagaagccagacatgcctgtcttagctgacctgtttttggtccacttttgcccttccatgactaataaggaagatatgtgtgtatttcatacacacacaaggacctggattaaaaatccaaaaagtgattctcttctatgatttatttcagaagattttgaccggtctgaatgtaaagagaaaccatctaagccaactgaaaggacagaagaatctaaggccgctgctccagctcctgtgtcggaggctgtgtgtcggacctccatgtgtagtatacagtcagcaccccctgagccggctaccttgaagggcacagtgccagatgatgctgtagaagccttggctgatagcctggggaaagaggaagcagatccagaagatggaaaacctgtgatggataaagtcaaggagaaggccaaagaagaagaccgtgaaaagctaggtgcaagcacacatgaatccatccctccatgcttatagatcccgacgacgtcagcgatcagaatagtggaagcctgtcctgctaagtcagtctaaggccac

SEQ ID NO: 164471 - DNA, 879 bp, Homo Sapiens
ttcaatttctacaccatggttcaagccgctgtggacctctgctttctcttcccctagtcagatgccatttcttccatgttttcctgcttggctgcatctctgcatctgaggttttcctgacctttactgacttgttacggggtactcggtactttttaggtatcagtgagatttcgatgtgatgttctttatgacatttgggtgtctagagttacttgggaagaccaagttcgatcattgctctttgatcaataaaatacattttttcgctctgtgaggaatgtattttacttatgaatggtttttaatattttaggctgttgccaaaatggttcaacagtgctgtacttatgttgaggaaatcacagaccttcctatcaaacttcgattaattgatactctacgaatggttaccgaaggcaagatttatgttgaaattgagcgtgcgcgacgtgactaaaacattagcaactataaaagaacaaaatggtgatgtgaaagaggcagcctccattttacaggagttacaggtggaaacctacgggtcaatggaaaagaaagagcgagtggaatttattttggagcaaatgaggctctgcctagctgtgaaggattacattcgaacacaaatcatcagcaagaaaattaacaccaaatttttccaggaagaaaatacagagaaattaaagttgaagtactataatttaatgattcagctggatcaacatgagggatcctatttgtctatttgtaagcactacagagcaatatatgatactccctgtatacaggcagaaagtgaaaaatggcagcaggctctgaagagtgttgtactctatgttatcctggctccttttgacaatgaacagtcagatttgg

SEQ ID NO: 164472 - DNA, 876 bp, Homo Sapiens
  misc_feature (12)..(12): n is a, c, g, or t
ttcctacggccnattgcgcagcatttcatctggccaggacactggctgtccacctggcactggtccctgacagagtgccgagctggtggaaatgttaatgttcactggtgggcaggaaccctccttatctccaggctgcctcccaacctcaggaggccacaagattagcagaaagccacgttgagtcagccagtaacatggagcaactgacaagggaaactgaggactattccaaacaagccctctcactggtgcgcaaggccctgcatgaaggagtcggaagcggaagcggtagcccggacggtgctgtggtgcaagggcttgtggaaaaattggagaaaaccaagtccctggcccagcagttgacaagggaggccactcaagcggaaattgaagcagataggtcttatcagcacagtctccgcctcctggattcagtgtctcggcttcagggagtcagtgatcagtcctttcaggtggaagaagcaaagaggatcaaacaaaaagcggattcactctcaagcctggtaaccaggcatatggatgagtccaagcgtacacagaagaatctgggaaactggaaagaagaagcacagcagctcttacagaatggaaaaagtgggagagagaaatcagatcagctgctttcccgtgccaatcttgctaaaagcagagcacaagaagcactgagtatgggcaatgccactttttatgaagttgagagcatccttaaaaacctcagagagtttgacctgcaggtggacaacagaaaagcagaagctgaagaagccatgaagagactctcctacatcagccagaaggtttcagatgccagtgacaagacccagcaagcagaaagagcctgggagcctgctt

SEQ ID NO: 164473 - DNA, 695 bp, Homo Sapiens
tacagcacctagtatgcgtgtcaatccagctccttcctttccagctctccttccacttccctcatctcactcttcagagaggccagtcccttttccatggccaaggctccatctgctgtcacattggcttccaagttcagactcccaatctcctgttcaatctcactggagatttccagggcctccccggccccattctttgccctctgtgcatcagcagcagcgctccccagggctctttctgcttgctgggtcttgtcactggcatctgaaaccttctggctgatgtaggagagtctcttcatggcttcttcagcttctgcttttctgttgtccacctgcaggtcaaactctctgaggtttttaaggatgctctcaacttcataaaaagtggcattgcccatactcagtgcttcttgtgctctgcttttagcaagattggcacgggaaagcagctgatctgatttctctctcccactttttccattctgtaagagctgctgtgcttcttctttgccagtttcccagattctttctctgtacgcttgaactcatccatatgcactggttatccaggccatgagagtgaataccgcatttttgtttgatcctctttgcttcttccacctgtaaggactgatcactgacttcactgaagcacgagacactttgcatccagacgggaatcctcgaga

SEQ ID NO: 164474 - DNA, 702 bp, Homo Sapiens
cagttctggttcagcctggagctcggggcacacgccagtcttctctgctcctgtgcctgagactagtggtgaatgccgaacagcagcaggctgtaggaggagggcggcggctagcgggcctaggcgacaacctcaagtgctgcagcgcgggctgtgccaccttctgctctctgcccaatgataaggagggttcctgcccccaggtgaacattaactttccccagctcggcctctgtcgggaccagtgccaggtggacagccagtgtcctggccagatgaaatgctgccgcaatggctgtgggaaggtgtcctgtgtcactcccaatttctgagctccagccaccaccaggctgagcagtgaggagagaaagtttctgcctggccctgcatctggttccagcccacctgccctcccctttttcgggactctgtattccctcttgggctgaccacagcttctccctttcccaaccaataaagtaaccactttcagcagtagataggaaatggctcagttattcaatatcaatttgagcaaatgttgtatactatgaaaaacaattacaaagatcatgtagaacaagtgaaatatgaaaactgaaaggtatcagaaatgagaaaatatgaaatatatactgtttacagctatatgaaatatgtacatatatatatggagcgagagcgcgagacaaaagagaaatg

SEQ ID NO: 164475 - DNA, 904 bp, Homo Sapiens
  misc_feature (124)..(147): n is a, c, g, or t
agatgcatcaagtaacagactctcatactcctcgtcataaggatgtgcaagttcagaaccatccagtggtcaagtgaatagtcagttgaactgttcagtgaatggttccagttcttaccacagnnnnnnnnnnnnnnnnnnnnnnnncgacgacgacgacaacattgacgacgatgatggtgataacgaccatgaggctttaggggttggagataattctataccaacaatatatttttcacatactgttgagcctaagagggtccgaataaatactggaaagaataccactttaaaattcagtgaaaagaaagaagaagccaaacgtaaacgaaagaacagcactggcagtggccactctgcccaggagctgccgaccatcaggacgcctgcagacatttacagagcctttgttgatgttgtgaatggagaatatgtccctcgcaaatccatcctgaagtctcgaagtagagagaatagtgtgtgtagcgacactagtgaaagcagtgctgctgaatttgatgataggcggggagttttgaggagtatcagctgcgaagaagccacttgcagtgacaccagtgagagcattttggaagaggaaccacaagaaaatcaaaagaaacttttgcccttatcagtaacacctgaggctttttctggaactgttatagaaaaagaatttgtatcaccttccttaacaccacccccagccattgctcatcccgcactacccactattccagaacgaaaggaagttctgttggaagcatctgaagaaactggaaagagggtttcaaagtttaaagctgccagattgcaacagaaagactaggccctgtctaggaaatgggaatttacatcctagaacctagttgtacatttgtaaagagtatctatagca

SEQ ID NO: 164476 - DNA, 486 bp, Homo Sapiens
cggtaccctcgtcttttgataggcatgtacaggaaagaacttggattgtcatcccgtaatactcactcatcaaatctctaaatgttgttttatcatgtgtcatcagattgtccataattgctctccaactgaaagagataaggattacaacatgtaattatgttgttactgttaaagaacagtattctaactttccaggggagtagctgatttcatcagactgtgaggtgcatcatgctgaatacaaataagagggcaacttactgattaacacaagaggcatccatctgaaagaaactgggatccataaagaggtcaaaagcttcttttttccaagctctccgtgtgtactgatacccactaagactgctgagcagctggacacaagctcgataactaggggcattatgtgcactacaaggaagaaaaaccaccttaacctacgtgtcctaactttaatcatcctatcaaaagacgagggtaccg

SEQ ID NO: 164477 - DNA, 692 bp, Homo Sapiens
aacatctcgaacattaatgacatactggaagcataagcagtgaattggaaagtctgaaggtaaatcttaatatctttctgttgggtgcagcaggaagaaaaaaccttcaggattttgctgcttgtggaatagacagaatgaattatgacagctacttggctcagactggtaaatcccccgcaggagtgaatcttttatcatttgcatatgatctagaagcaaaagcagacagtttgcccccaggaaatttgaggaactccctgaaaagagatgcacaaactattaaaacaattcaccagcaacgagtccttcctatagaacaatcactgagcactctataccaaagcgtcaagatacttcaacgcacagggaatggattgttggagagagtaactaggattctagcttctctggattttgctcagaacttcatcacaaacaatacttcctctgttattattgaggaaactaagaagtatgggagaacaataataggatattttgaacattatctgcagtggatcgagttctctgaagtaagtgaaaggacattgatgtgcaggaccaagacttctggggcttcccaccaggtcagaggacagccacctcctggtcccctttgctcacctttgccatatgcagttcttccatttgcttcccacccccttcttcagatcagtgtagaaattgaa

SEQ ID NO: 164478 - DNA, 927 bp, Homo Sapiens
gggaagctttcaggagccacgcccaatggagaggctgccaaatctcctcccaccatctgccagcctgacgccacggggagcagcctgctgaggctgagagacacagaaagtggctgggatgacactgctgtggtcaatgacctctcatccacatcatcgggcactgaatcaggtcctcagtctcctctgacaccagatggtaaacggaatcccaaaggcattaagaagttctggggaaaaatccgaagaactcagtcaggaaatttctacactgacacgctggggatggcagagtttcgacgaggtgggctccgggcaaccgcagggccaagactctctaggaccagggactccaagggacagaaaagtgacgccaatgccccctttgcccagtggagcacagagcgtgtgtgtgcatggctggaggactttggcctggctcagtatgtgatctttgccaggcagtgggtatcttctggccacaccttattgacagccacccctcaggacatggaaaaggagctaggaattaagcacccactccacaggaagaagcttgttttagcagtgaaagccatcaacaccaaacaggaggagaagtctgcactgctagaccacatttgggtgacaaggtggcttgatgatattggcttaccccagtacaaagaccagtttcatgaatctagggttgacggacgaatgctgcaatacctaactgtgaacgatttactcttcttaaaagtcaccagccaactacatcatctcagcatcaaatgtgccattcacgtgctgcatgtcaacaagttcaacccccactgcctgcaccggcggccagctgatgagagtacctttctccttcagaagttgtacagtggtccaagcacagggtgatggagtggttacgatctgtggacctggcagagtatg

SEQ ID NO: 164479 - DNA, 514 bp, Homo Sapiens
agctcctaaattgctgggattacaggtgtgagccaccgtacctggccatattaagttttttgagagaattagaaaactgggtttcctcaactccaagatgttatcagttgtaaaatgtacccgtatgttttataccactaagaaagaaaaataagcctccaattaagcaacatgccatcaattgtaaaatataaccagaggggggagaaaagtagtgtttagctgggatacctccctactccctgaaaaacaagtcagggttttattagtaaatgaaaatgggagaatggatatttggtggcagtcatgataaccatttcatttctatatcattattaacctcttaaaatatccatcttaagtacattatggcaaagcttcttaaaatggtggcattggaatctcaagaaagtctcttctcatcctactccttacacagttgaaattaattgttgctgcctcctttctgtatctttttctttggctatcatttcttatccttttaatcaataaa

SEQ ID NO: 164480 - DNA, 546 bp, Homo Sapiens
taacaattccaatacaagtgccaatagtggggcagtctgaaaatcatctttactaggtttgtcttctgttgtatttgctagtaaaggagcagtgagaacatgcatacagtgcttgtagaagaaacccagaaattcagtcttttctgttttattggcagtggctagcatgttctctgggtcaactaaagttcgaagcaggcccataagctggactgctcctccaagttcaggatctgtatcacaaatcatatgttctataatgaggttgatgagcaaaatatcatcatcattctgttgtgcctcctgcatgacaaactctcgtaccatggatggattatattcaaccaagtatgagaatatatcagtagcagcacttcgcacctgtgtatcatccatgccaaggatgacttctaaagctggtaatatgcccatgtttgacaaagtcttgaaaaaagcatctctgttttgaggctgtagcgtttgggaaaacgcacaaaattcttttaaaaagttaaccaattcctgtcttttttcctcatcttccct

SEQ ID NO: 164481 - DNA, 356 bp, Homo Sapiens
ccctagcacccttcctgtacccctagcaaccttcctgtacccctaccaaccttcctgtacccctagcaaccttcctgtacccctagcaaccttcctgtacccctagcaaccttcctgtacccctagcaaccttcctgtacccctagcaaccttcctctacccctagcaaccttcctgtacccctagcaaccttcctgtacccctagcaaccttcctgtacccctagcaaccttccttacccctagcaaccttccttgatgctgccaaacatgcccataagttttgtaacacagaagatgaggagactatgtatctgcggagacctgaaggcattgaacgacagtcaggaaggtggc

SEQ ID NO: 164482 - DNA, 402 bp, Homo Sapiens
tacactgactgctgaaatacagcaaagattttgcatttgccaacatcttgggactggagaaatgttcatggtatcaattttgtcagtcctgttcgaaaccaagcatcctgtggccagctgctactcatttgcttctatgggaatgctagaagcgagatatccgtatactaaccaacaattctcagaccccaatcctaagccctcaggaggttgtgtcttataaccagtatgctcaaggctgtgaaggcggcttcccataccttattgcaggaaagtacgcccaagattttgggctggtggaagaagcttgcttcccctacacaggcactgattctccatgcaaaatgaaggaaggttgctaggggtaaggaaggttgctaggggtaaggaaggttgctaggg

SEQ ID NO: 164483 - DNA, 557 bp, Homo Sapiens
  misc_feature (523)..(524): n is a, c, g, or t
cggggcaccggctggggtgagaatggctacttccgcatccgcagaggaactgatgagtgtgcaattgagagcatagcagtggcagccacaccaattcctaaattgtagggtatgccttccagtatttcataatgatctgcatcagttgtaaaggggaattggtatattcacagactgtagactttcagcagcaatctcagaagcttacaaatagatttccatgaagatatttgtcttcagaattaaaactgcccttaattttaatatacctttcaatcggccactggccatttttttctaagtattcaattaagtgggaattttctggaagatggtcagctatgaagtaatagagtttgcttaatcatttgtaattcaaacatgctatattttttaaaatcaatgtgaaaacatagacttatttttaaattgtaccaatcacaagaaaataatggcaataattatcaaaacttttaaaatagatgctcatatttttaaaataaagttttaaaaataactaccnnaaccaataaacaaaaaacaaaataaaccttgtc

SEQ ID NO: 164484 - DNA, 774 bp, Homo Sapiens
gggtctcaccgctagcccgcagcgctcggcttcctggtaattcttcacctcttttctcagctccctgcagcatgggtgctgggccctccttgctgctcgccgccctcctgctgcttctctccggcgacggcgccgtgcgctgcgacacacctgccaactgcacctatcttgacctgctgggcacctgggtcttccaggtgggctccagcggttcccagcgcgatgtcaactgctcggttatgggaccacaagaaaaaaaagtagtggtgtaccttcagaagctggatacagcatatgatgaccttggcaattctggccatttcaccatcatttacaaccaaggctttgagattgtgttgaatgactacaagtggtttgccttttttaaggatgtcactgattttatcagtcatttgttcatgcagctgggaactgtggggatatatgatttgccacatctgaggaacaaactggttattaaatagagcatctgttgagggactcttttaaaaccacagccatgaacagacgttggggctaagagacagagcagcctgcgacagtgtggacctacctgtagcagctagcaaaggcctctagcagctacagtccctttctggagtctttatttgcatgcaaaatgcaaaaggagtcctgggtgacctaccttcaaaggcagctgcccctcctggacaactccccttgggaaaacagtaaaacatccttttttggaaatgtgaaacaaaccagaagactaacacagggagaaaaggg

SEQ ID NO: 164485 - DNA, 966 bp, Homo Sapiens
  misc_feature (880)..(880): n is a, c, g, or t
  misc_feature (888)..(888): n is a, c, g, or t
cctaagtcaggggcccagggattattccttagggaaaaacaggtttaggggccaatgtttccacttttcctacacagggtccggggggggccaaaggaattggtcttagcaatcttctcggaggggccgagggggcgccagcaagggatggggcccagtgagattaaggagagggggtatattgttccttttattaaaaaactgaacggtgaagtccacccaagattttgcatcttcagaatgcttttttcctttctcctgtgtagtctctggttgttcacattccaaaatgatgtttactgttttccaagggagtgttcaggagggcagctgccttggaggtaggtcaccaggactcctttgcattttgcatgcaaataaagactccagaagggactgtagctgctagaggcctttgctagctgctacaggtaggtccacactgtcgcaggctgctctgtctcttagccccaacgtctgttcatggctgtggttttaaaagagtccctcaacagatgctctatttaataaccagtttgttcctcagatgtggcaaatcatatatccccacagttcccagctgcatgaacaaatgactgataaaatcagtgacatccttaaaaaaggcaaaccacttgtagtcattcaacacaatctcaaagccttggttgtaaatgatggtgaaatggccagaattgccaaggtcatcatatgctgtatccagcttctgaaggtacaccactacttttttttcttgtggtcccataaccgagcagttgacatcgcgctgggaaccgctggagcccacctggaagacccaggtgcccagcaggtcaagataggtgcagttggcaggtgtgtcgcagcgcacggcgccgtncgccgcangtagaagcagcaggagggcggcgagcagcaaggaaggcccagaacccatgctgcagggagctgagaaaagaggtgaag

SEQ ID NO: 164486 - DNA, 1049 bp, Homo Sapiens
cagcgctcggcttcctggtaattcttcacctcttttctcagctccctgcagcatgggtgctgggccctccttgctgctcgccgccctcctgctgcttctctccggcgacggcgccgtgcgctgcgacacacctgccaactgcacctatcttgacctgctgggcacctgggtcttccaggtgggctccagcggttcccagcgcgatgtcaactgctcggttatgggaccacaagaaaaaaaagtagtggtgtaccttcagaagctggatacagcatatgatgaccttggcaattctggccatttcaccatcatttacaaccaaggctttgagattgtgttgaatgactacaagtggtttgccttttttaagtataaagaagagggcagcaaggtgaccacttactgcaacgagacaatgactgggtgggtgcatgatgtgttgggccggaactgggcttgtttcaccggaaagaaggtgggaactgcctctgagaatgtgtatgtcaacacagcacaccttaagaattctcaggaaaagtattctaataggctctacaagtatgatcacaactttgcgaaagctatcaatgccattcagaagtcttggactgcaactacatacatggaaatatgagactcttaccctgggagatatgattaggagaagtggtggccacagtcgaaaaatcccaaagcccaaacctgcaccactgactgcctgaaatacagcaaaagattttgcatttgccaacatcttgggactggagaaatgttcatggtatccattttgtcagtcctgttcgaaaacaagcatcctgtggcagctgctactcatttgcttctatgggtatgctaaaagcgaggaatccgtatactaacccaccaattcctcagaaccccaatcctaagccctccagaagtttgggtcttggtaccccgtatgctccaaggctgtgaaagggggcttccccatacccttattgccaggaaagtaccccccagattttggggctggtggaagaaagttggcttcccctaacacgggactg

SEQ ID NO: 164487 - DNA, 1099 bp, Homo Sapiens
  misc_feature (41)..(41): n is a, c, g, or t
  misc_feature (45)..(45): n is a, c, g, or t
  misc_feature (50)..(50): n is a, c, g, or t
  misc_feature (68)..(68): n is a, c, g, or t
  misc_feature (80)..(80): n is a, c, g, or t
  misc_feature (87)..(87): n is a, c, g, or t
  misc_feature (183)..(183): n is a, c, g, or t
aatgcactacaagtggtttgcccttttttaaggtataaagnaagnagggncagcaaggtgaccacttnactgcaacgagnacaatgnactgggtgggtgcatgatgtgttgggcccgaactgggcttgtttcaccggaaagaaggtgggaactgcctctgaggaatgtgtatgtcaacacagncacaccttaaggaattctcaggaaaagtattctaatagggctctacaagtatgatcacaactttgtgaaagctatcaatgccattcagaagtcttggactgcaactacatacatggaatatgagactcttaccctgggagatatgattagggagaagtggtggccacagtcgaaaaatcccaaggcccaaacctgcaccactgactgctgaaatacagcaaaagattttgcatttgccaacatcttgggactggagaaatgttcatggtatcaattttgtcagtcctgttcgaaaccaagcatcctgtggcagctgctactcatttgcttctatgggtatgctagaagcgagaatccgtatactaaccaacaattctcagaccccaatcctaagccctcaggaggttgtgtcttgtagccagtatgctcaagtctgtgaaggcggcttcccataccttattgcaggaaagtacgcccaagattttgggctggtggaagaagcttgcttcccctacacaggcactgattctccatgcaaaatgaaggaagactgctttcgttattactcctctgagtaccactatgtaggaggtttctatggaggctgcaatgaagccctgatgaagcttgagttggtccatcatgggcccatggcagttgcttttgaagtatatgatgacttcctccactacaaaaaggggatctaccacacacgggtctaagagaccctttcaaccctttgagctgactaatcatgctggtctgcttgtgggctatggcactgactcagcctctgggatggattactggattgttaaaaacagctggggcacggcctggggtgaaatggctactttcgggatccgcaaaggaactgatgaatgtcccatttgaaaacgttaacatggccagcccc

SEQ ID NO: 164488 - DNA, 1121 bp, Homo Sapiens
ggtggccacagtcgaaaaatcccaaggcccaaacctgcaccactgactgctgaaattcgaaaccaagcatcctgtggcagctgctactcatttgcttctatgggtatgctagaagcgagaatccgtatactaaccaacaattctcagaccccaatcctaagccctcaggaggttgtgtcttgtagccagtatgctcaaggctgtgaaggcggcttcccataccttattgcaggaaagtacgcccaagattttgggctggtggaagaagcttgcttcccctacacaggcactgattctccatgcaaaatgaaggaagactgctttcgttattactcctctgagtaccactatgtaggaggtttctatggaggctgcaatgaagccctgatgaagcttgagttggtccatcatgggcccatggcagttgcttttgaagtatatgatgacttcctccactacaaaaaggggatctaccaccacactggtctaagagaccctttcaacccctttgagctgactaatcatgctgttctgcttgtgggctatggcactgactcagcctctgggatggattactggattgttaaaaacagctggggcaccggctggggtgagaatggctacttccggatccgcagaggaactgatgagtgtgcaactgagagcatagcagtggcagccacaccaattcctaaattgtagggtatgccctccagtatttcataatgatctgcatcagttgtaacaggggacatcggtatattcacagactgtagactttcagcagcaatctcagaagcttacaaatagatttccatggaagatatttgtcttccaaaattaaaactgcccttaattttaatatacctttcaatcggccactggccatgttttttctaagtattccattaagtggcgaattttcttggaagatggtcagctatgaagtaatagagtttgctttaatcatttgtaattcaaaacatgctatatttttaaaatccattgtgaaaacctagacttatttttcaattgtcccatcaccaggaaatcatgggcataattatcaaactttaacatgattgctcctatttaaaataaagtttaaactaccaaaaacc

SEQ ID NO: 164489 - DNA, 885 bp, Homo Sapiens
  misc_feature (297)..(307): n is a, c, g, or t
  misc_feature (344)..(355): n is a, c, g, or t
ggtgaaacttgcatgttgcctggattgatttcttctttccctctatccaaaggagcttggtaagtgccttactgcagcgtgtctcctggcacgctgggccctccgggaggagagctgcagatttcgagtatgtcgcttgtcattcaaggtctctgtgaatcctctagctgggttcccttttttacagaaactcacaaatggagattgcaaagtcttggggaactccacgtgttagttggcatcccagtttcttaaacaaatagtatcacctgcttcccatagccatatctcactgtnnnnnnnnnnnttaataaactgttacttatatttaagaaagtgaggannnnnnnnnnnnaaagataaaagcatggtcagatgctgcaaggattttacataaatgccatatttatggtttccttcctgagaacagtcttgctcttgccatgttctttgatttaggctggtagtaaacacatttcatctgctgcttcaaaaagtacttactttttaaaccatcaacattacttttctttcttaaggcaaggcatgcataagagtcatttgagaccatgtgtcccatctcaagccacagagcaactcacggggtacttcacaccttacctagtcagagtgcttatatatagctttattttggtacgattgagactaaagactgatcatggttgtatgtaaggaaaacattcttttgaacagaaatagtgtaattaaaaataattgaaagtgttaaatgtgaacttgagctgtttgaccagtcacatttttgtattgttactgtacgtgtatctggggcttctccgtttgttaatactttttctgtatttgttgctgtatttttggcataactttattataaaaagcatctcc

SEQ ID NO: 164490 - DNA, 831 bp, Homo Sapiens
gactcactgaagtcttgccaaacatcacttgagcaggaaccctttgtaatatgctgtgcaatgagaggacgatcctttggaagggagctcaatctgggagaatgaggtggaaaacactggggagttctatgcctttgcagaccctcaagtcaccccggattactggtcagagaagctggctgtgccatggcccaaaaccagcagcattctcccttggcttctgttgctgcactgaggctgccggggacacagaaggatttagttttctttacaagtaagcactttggtgggaaagcattgcaaaagttgtcaacagaaaatcattaaaaccctgaagaacaaggtgtgagggtcacaggcaaacagttatcagcatatgattcaaacactggtttgtcctcaccacagagcttggaaggttcagaaaacttccaagagagatgatcagacactcacgttccatccactgaagggcacagaacagtaggaactaagttggccctgttaagcaggcacatgcagccatgtccgatccacggatgtgcttttattctttaagaggatcatctagaatcctcagaaatgttatcttagcagccctgagatcatgccctcaataactctgccaagggaagaggggagaaaccacagacctagagatgagtcaggatgcccactttgtgccttggggtttgctaggggggctaagctgctaactgggctgtgccttattggtgacactgaattatggcaaagccactagaagcacaaagtgttggtgcaatcactgacatctcaaaagtatatcctgaaaatagaaatgaacagatt

SEQ ID NO: 164491 - DNA, 1598 bp, Homo Sapiens
gggagccggagccggagccacagcggggagggtggcctggcggcctggagccggacgtgtccggggcgtccccgcagaccggggcagcaggtcgtccgggggcccaccatgctggtgactgcctaccttgcttttgtaggcctcctggcctcctgcctggggctggaactgtcaagatgccgggctaaaccccctacctctataaactctaccagcattactacttcctggaaggtcaaattgccatcctctatgtctgtggccttgcctctacagtcctctttggcctagtggcctcctcccttgtggattggctgggtcgcaagaattcttgtgtcctcttctccctgacttactcactatgctgcttaaccaaactctctcaagactactttgtgctgctagtggggcgagcacttggtgggctgtccacagccctgctcttctcagccttcgaggcctggtatatccatgagcacggggaacggcatgacttccctgctgagtggatcccagctacctttgctcgagctgccttctggaaccatgtgctggctgtagtggcaggtgtggcagctgaggctgtagccagctggatagggctggggcctgtagcgccctttgtggctgccatccctctcctggctctggcaggggccttggcccttcgaaactggggggagaactatgaccggcagcgtgccttctcaaggacctgtgctggaggcctgcgctgcctcctgtcggaccgccgcgtgctgctgttgggcaccatacaagctctatttgagagtgtcatcttcatctttgtcttcctctggacacctgtgctggacccacacggggcccctctgggcattatcttctccagcttcatggcagccagcctgcttggctcttccctgtaccgtatcgccacctccaagaggtaccaccttcagcccatgcacctgctgtcccttgctgtgctcatcgtcgtcttctctctcttcatgttgactttctctaccagcccaggccaggagagtccggtggagtccttcatagcctttctacttattgagttggcttgtggattatactttcccagcatgagcttcctacggagaaaggtgatccctgagacagagcaggctggtgtactcaactggttccgggtacctctgcactcactggcttgcctagggctccttgtcctccatgacagtgatcgaaaaacaggcactcggaatatgttcagcatttgctctgctgtcatggtgatggctctgctggcagtggtgggactcttcaccgtggtaaggcatgatgctgagctgcgggtaccttcacctactgaggagccctatgcccctgagctgtaaccccactccaggacaagatagctgggacagactcttgaattccagctatccgggattgtacagatctctctgtgactgactttgtgactgtcctgtggtttctcctgccattgctttgtgtttgggaggacatgatgggggtgatggactggaaagaaggtgccaaaagttccctctgtgttactcccatttagaaaataaacacttttaaatgatacccaggaccgccgcaag

SEQ ID NO: 164492 - DNA, 1778 bp, Homo Sapiens
  misc_feature (1228)..(1236): n is a, c, g, or t
  misc_feature (1317)..(1385): n is a, c, g, or t
  misc_feature (1665)..(1698): n is a, c, g, or t
acggactccttctcctcccccacgtcggcgctcaccttctcctagaagataatataatccaatacagaggagatactctccttctccacctccaaagagaagaacggcttcacctcctccccctcctaaacgaagagcatcaccatctccaccaccaaagcggcgggtctcccattctccacctcccaaacaaagaagctccccagtcaccaagagacgttcaccttcattatcatccaagcataggaaagggtcttccccaagccgctctacccgggaggcccgatcaccacaaccaaacaaacggcattcgccctcaccacggcctcgagctcctcagacctcctcaagtcctccacccgttcgaagaggagcgtcgtcatcaccccaaagaaggcagtccccgtctccaagtactaggcccattaggagagtctccaggactccggaacctaaaaagataaaaaaggctgcttccccaagcccacagtctgtaagaagggtctcatcctcccgatctgtctccgggtctcctgagccagcagctaaaaagcccccagcacctccatcccccgtccagtctcagtcaccgtctacaaactggtcaccagctgtaccggtcaaaaaggccaaaagcccaacaccgagcccatcaccgccaagaaattcagatcaggaaggaggtggacacagacacacgaagaacacaagaaggaccaagaaaacacaaaacacggcataagaagcacaagaagcacaaaaaacacaagaaggcacaaggctgtggctgcagctgctgcagctgctgtgacccctgcagccattgcagctgcctacaatcacatttagcacagcaagagccagtggcagcgccagagccgaagaaggagactgaaagtgaagctgaagataaccttgatgatttagaaaagcacctgcgtgaaaaggcccgaagatcaatgaggaaggcccaagtgtccccacagtcttagggggaaatgtttgttatgatgtaaattttatttggtttgtacgcagttcaatttcaaaattgctaaaatgtgtttgagctttagactataacatttgttgtaataattgctaggttgaagttcaacatgtaaaaaaagggggcatggatttacattgcaaaaggtgtccacagtgtattagtgacattctttcattgacagctgacataattcattgagtgaaatattttaagccnnnnnnnnnttccctttttaaaaaagggggtttaaatactgttggcatttttatggttcctttaaatgccctagctattcccagaggggnnnnnnnnnnnnnnnnnnnnnnnnnnnnnnnnnnnnnnnnnnnnnnnnnnnnnnnnnnnnnnnnnnnnngagtcttagctcccatttaagttatgcttctgaccttgtatggtctgtaagcttgcccagaaataagaccactgttttgaactaccacaaaagtataaatgaatattttaatgccacaatctttcctgttgcctgtggagtctctgctgaaatgaatcaggattcgagctctaggatgagacagaaaatgaaagcatgttgtttgccaggacactgtgggtttatattgatgtgtaacaagttgatttggaacactggactctccatctgttaattctgnnnnnnnnnnnnnnnnnnnnnnnnnnnnnnnnnngtaaaaagcaatgagctagtccccagaaagggacctttcagttacatacaaatttgttttaatgaaatggtcatggctcc

SEQ ID NO: 164493 - DNA, 873 bp, Homo Sapiens
  misc_feature (741)..(741): n is a, c, g, or t
gggaggggcggggcgagcgcgggacaaagggaagcgaagccggagctgcgggcgctttttctgcccgcggtgtctcagattcattcttaaggaactgagaacttaatcttccaaaatgtcaaaaagaccatcttatgccccacctcccaccccagctcctgcaacacaaatgcccagcacaccagggtttgtgggatacaatccatacagtcatctcgcctacaacaactacaggctgggagggaacccgggcaccaacagccgggtcacggcatcctctggtatcacgattccaaaacccccaaagccaccagataagccgctgatgccctacatgaggtacagcagaaaggtctgggaccaagtaaaggcttccaaccctgacctaaagttgtgggagattggcaagattattggtggcatgtggcgagatctcactgatgaagaaaaacaagaatatttaaacgaatacgaagcagaaaagatagagtacaatgaatctatgaaggcctatcataattcccccgcgtaccttgcttacataaatgcaaaaagtcgtgcagaagctgctttagaggaagaaagtcgacagagacaatctcgcatggagaaaggagaaccgtacatgagcattcagctctgctgaagatccagatgattatgatgatggcttttcaatgaagcatacagccaccgccccgtttccagagaaaccaccgcctcatcagggaaattcttaantgagagtggggtggccagacgttccggtcagttgtccccacaagctaaaattgccgtccctccaacggccaggtccagtcctttacgggttcctccagcgaaaactagaacgctgaacttccttcaagagag

SEQ ID NO: 164494 - DNA, 474 bp, Homo Sapiens
ccttcctgtacgagaactgggtggtgggaaaagtggggcttgtttttcctttctttgtattcactgtaggtgtgaaatgtttgacaatttgacagtctgtgacatggttcacagatgtggttcctgcatgttatcagggcttggccaggttcaggcaggcctgcaggctgtccctacaacgggcagattgaagtgtgcacagatgtccgtgacagggctgtgaccagcctgtgatcaggctgtgaccaggttgctgcctggaccaggcagagctttgtcccataataggggtgctgccagggagtctggcacctggagcacagccactggcttggacatgagccatcaaacagcatggaataaaaatagaactgcttcagccggagaggagacaggctgagctccttgctgggaggcctttaaaacaagaacaggcttcattgatctgagactaggtaaggaagattgctaggg

SEQ ID NO: 164495 - DNA, 674 bp, Homo Sapiens
  misc_feature (377)..(393): n is a, c, g, or t
ctgtacttgctggagagaacggttatcaaatcccatccactgcccatgtaaaataaataccattcagaaaagcgtggcatggatggccatacttctgatgggtttataactgtagattgcatacgatcccaacgtgaagcctgaaatacgacattcaacgtcaggctcattccaggctactgctgtggctacttttgtaattcagccagtggggcgttttaggctaacgtatattgcctctaagctgataagcattttcctgatcccaggccccttctaaaattgaacacacacgttcagctggggacacctagatggaaggaagggaaagaggagaacccgaagtgaaggaaaagtcaccaagaacagtttcgtgnnnnnnnnnnnnnnnnnctctcaagaattaagaatgttgagttgcttgaatggagcttgggcaggaaaaagaccataactctcactcacgtgaaggttactgatacccaggaggtaaaagaagtatttaacatgctctaaagaagggtaaccagagtaatggggcgaaaccaagggaggacgtcctggaatgtaatattagaaataaacttccaaacagggaagtgtccatctgagtgtgaaatgggtttatcagaacagtgcatgccagtttcagtgacattgtaaggaagtttagg

SEQ ID NO: 164496 - DNA, 466 bp, Homo Sapiens
cccttcaccttcctgtacaaaaccagaatcctctcacctggcagaaatctttctctccagatgctgcaaagccagcacagatcatcttctctgtgatccctcctggatgggcagaataaaagaagaggggctgaagcggatgctgcttgatatcatttacatgacctattttcaaaaataacaactggcattaatgtttatgcaacaaaaatatgcttacctgcactgatgcttccccatccggtcacagcacagatctccgaggaaaatagaggctctgcgctgtgtgggagacatactggcctcaccaccgagttgtactccagaggaaagcttagttgtattagggcaatgtcagagtcataacttagtgtgttaaagtcttcatgcactattatgtgtttggcccttctcacctgtatcggtggcaagtaagcaattacacgtaagaagttgtcggggggat

SEQ ID NO: 164497 - DNA, 504 bp, Homo Sapiens
  misc_feature (428)..(462): n is a, c, g, or t
ctcctgattcataggggagcccacattgatgttcgtaacaaaaagggaaatacgccactttggctggcatccaatggaggtcattttgatgttgtgcagttgcttagtgcaagcaggtgctgatgtggatgcagcagataaccggaaaatcacacctcttatgtcagcatttcgcaagggtcatgtaaaagttgttcaatatttggtaaaggaagtaaatcagttcccttctgatatagaatgcatgagatacatagcaacaattacagataaggaactgttgaaaaaatgtcatcaatgtgtcgaaaccattgtgaaggctaaagaccagcaagctgcagaagcaaataagaatgcgagtattcttttaaaggaacttgatctggaaaagtcaagagaagagagcagaaagcaggctcttgctgctnnnnnnnnnnnnnnnnnnnnnnnnnnnnnnnnnnncataagaggtacagtaaaggatacacggaagtacactgaagt

SEQ ID NO: 164498 - DNA, 1234 bp, Homo Sapiens
  misc_feature (131)..(223): n is a, c, g, or t
  misc_feature (297)..(297): n is a, c, g, or t
  misc_feature (302)..(302): n is a, c, g, or t
  misc_feature (1013)..(1013): n is a, c, g, or t
atgtgtcgaaaccattgtgaaggctaaagaccagcaagctgcagaagcaaataagaatgcgagtattcttttaaaggaacttgatctggaaaagtcaagagaagagagcagaaagcaggctcttgctgctnnnnnnnnnnnnnnnnnnnnnnnnnnnnnnnnnnnnnnnnnnnnnnnnnnnnnnnnnnnnnnnnnnnnnnnnnnnnnnnnnnnnnnnnnnnnnttcggaactaccagaggatgaagatgaagaggagaatgatgaagatgtggagcaagaagttcccatagaacctnctagngcaaccaccaccactacgattggaatctctgcaacatctgcaacattcacaaatgtgtttgggaaaaaaagggccaatgtggtgacaactcccagcaccaatcggaaaaataagaagaacaaaacaaaagaaacccctcctacagcacatttaattttaccagaacaacatatgtctttagcccaacaaaaggcagataaaaataaaataaatggagaacctagaggtggtggtgcaggtgggaatagtgattcagataacttggacagcacagactgcaacaggtgagagtagcagtggtggtaaaagccaagagttaaattttgtgatggatgtgaattcctctaaatacccctcactgctccttcattcccaagaagaaaagacaagtactgctacttccaaaactcagacacgacttgaaggtgaaatgactcctaattccttgtcaaccggctacaagacagtgtcattgccattaagctctccaaacataaagctgaatctcactagccctaaaaggggtcagaaaagagaagaagggtggaaagaagttgtacgaaggtcaaagaaattgtctgttccagcctcagtggtgtcgaggataatgggaagaggaggatgcaacatcactgcaatacaggatgtcactggtgcccatattgatgtggatcaacaaaaagataagaatggcgagagaatgatcacaantaaggggtggcacagaatcaacaagatatgcagttcaactaatcaatgcactcatacaagatcctgctaaggaactggaagacttgattcctaaaaatcatatcagaacacctgccagcaccaaatcaattcatgctaacttctcatctggagtaggtaccacagcagcttccagtaaaaatgcatttcctttgggtgctccaactcttgtaacttcacat

SEQ ID NO: 164499 - DNA, 424 bp, Homo Sapiens
aaagcccaagccctagctttccccagtgaaggactagactaggggccccacgctcaactggtagtgccccaaaagccctggcagctgtagagccgcgaacctcccccaaacctccctcaccacacaggaccctgagtgaggaggaggagctggaaacctggggtgggttggccaaaggagaacctcaggctcctggcctggcccagctccttcctgcccaaggtagcttagcccatccagactggtcctgaagtctgtccctccattggcatgaagtctgcccctcagcagtccggcctcacaggctgtactttcatggtgctctctaccttctggcccccatcccaggaacattcgtgagtgaattcgcaagcatactagcatgtgatattagggagtttgcaataaattattgatgctgatg

SEQ ID NO: 164500 - DNA, 392 bp, Homo Sapiens
  misc_feature (23)..(23): n is a, c, g, or t
  misc_feature (49)..(49): n is a, c, g, or t
  misc_feature (70)..(70): n is a, c, g, or t
gaagctgggaatcaagccccagnaacttgaaggttcctccctttggccnaacccaacccccaggtttccnagctccctccctccctcactcagggtccctgcgcggtgagggaggtgtggggaggttcgcggctcctacagctgcccaggcttgtgggcactaccagttaagcgtgaggcccccagtcagtccttcactggggaaagcttccaaggacttgggctttcactgcagtatcttcagacaggtcgggataagggatgaggcctttgccttggggggctgcccttcctccgtagcatcgaggagctgctgcaggtaacaggaggtgccaagcagtacgtggcctgtgatattagggagtttgcaataaattattgaggctgatgta

SEQ ID NO: 164501 - DNA, 472 bp, Homo Sapiens
  misc_feature (33)..(33): n is a, c, g, or t
tccttcacttcagggttcctgcacggttgaggnaagttgtggggaaggttcgcggctctacagctgcccaggcttgtgggcactaccagttaagcgtgaggcccccagtcagtccttcactggggaaagcttccaaggacttgggctttcactgcagtatcttcagacaggtcgggataagggatgaggcctctgcccttggggggctgcccttcctccgtagcatcgaggagctgctgcaggtaacaggaggtgccaagcagtaccgctgctgtggcctgcatgctgaagagggcccagcggaaagcttccttcatgatgcgcttggccccacagcagtgcagatcataggaaagggagtatgtatcataaaaagtcgccttcacgttcaggcagccaatgaagtcctgtgggttcagcttgtacagatcaaacgttacacgggccacatcaatcttcttggcaggcttat

SEQ ID NO: 164502 - DNA, 812 bp, Homo Sapiens
ggtgtctaggatacagtgtgaaaattaaaaagtttagagggcagatgcaattgtggcaagtgacctgccaataaaccaggtgcagctatagaagctggcataggtatatccttaatggtgctttctccctgggcttgtctttttgttgtttttttccccctatattcagagctccttgagaagtgataaacacctccagctttctaacatcctccccacaccatctcaccatatccatctcccagcatccatctgcattcagctaagggcgggaaactgacctagtgcctgtgttgcagaccatttctgaggtctccaccatccaaggaggcacagccgtcattactgtcctccatgccttcagcagcccccctcacagctaaggtacataccaccccttctgccgcgcctccacccctggcaccaaggtcttctgctgcttatgtctaaagggatcacctatatttaactgcctcagtgacctaacctctttcttctcatgtgccagatgttaagatgaaggaggaatacaacacatactcaagcctcagcctgtttagttgttttcactggggctcgcttttctgggacggtatttattatcagactggcaagcctaactccataggtttacaggaagtagggatatttttataaaacaattgtgtcctccccacattttgctatgttaatatttgcttctaacaatttgcagctggttcacctttttctcctttgtcctctaagttgaaggctttgtttggaggggacagagcacaggaaacagccctttgacgtcctgtaaattattg

SEQ ID NO: 164503 - DNA, 1210 bp, Homo Sapiens
tggcaatcttggagcaaggctttgacccacccatcattatttttgtcaaccagaagaagggctgcgacgtgttggccaaatccctggagaagatggggtacaatgcttgcacactgcacggtggaaaaggccaggagcagcgagagtttgcgttgtccaacctcaaggctggggccaaggatattttggtggctacagatgtggctggtcgtggtattgacatccaagatgtgtctatggttgtcaactatgatatggccaaaaatattgaagattacatccaccgcattggccgcacgggacgagcaggcaagagtggggtggccatcaccttcctcacaaaagaggactctgctgtgttctacggagctgaagcaagctatcctggaaagcccagtgtcttcctgtccccccgaactagccaaccacccagatgcccagcataagccaggcaccatcctcaccaagaagcgccgggaagagaccatctttgcctgacacagcactcttcctgtgggctgagggcatctccaaagctgcctgatgcctgtttttcagaaccctcacatccctctttccaggtcctcactcttgggatatgggggcttaggaaaacaatccaactccctagcccagaccctcaggtcaggaggcctgcgtgtggggctgcaaaaggagaggacgacgctgtcggaggcagggagagcaaattaccacagcttcttggcccagttctgcccttctttgctttgggattgcactgggccatcagctcatgccaggctatgggggcagccagttggcattgctccccagactgaacagaaacctggccgccggatgggacctcctttggcacagacttgactgtgtaactgcataaactgcagtagcatcattgccctagatgccccaggagacctggcaccatgaggattacagacagtggaatcttactgtcatctggacagctgttttcctgtttggatggtaaaggaagttgagagtctttagacctgtgcacagccccacaccaaggggtgctgtatgctctaggcatcccctcccccaggggattttctaagtagatggggggacacggtgaactggctgtgtccatctttgtcactgagtgaaatctctgttttctattctctgagaagataagtttgtatgttctgagaataaatacatgaatattaagactgtt

SEQ ID NO: 164504 - DNA, 545 bp, Homo Sapiens
ggatctgaggtgagttgggggtatctatattaggggtagggtattacagaagataattggcttgatgtcctagaagttctttgatccagaggtgggtgcagctgaaagtaaacagaatggattgccagttacatgtatgcctgcccagttccctttttatttgcagaagctgtgagttttgttcacaattaggttcctaggagcaaaacctcaaggattgatttattgttttcaactccaaggcacactgttaataaacgagcagggtgttttctctcttccttactaatatatggagtttcgaagaataaaatatgagagcaatatttaaattctcaggaattgacttatactcttgagaatgaattcagtttcaatcaagtttacattatgttgcttaaaaaaatagaaattattctttatcttgcaaagaattgaaaccacatgaaatgacttatgggggatggtgagctgtgactgctttgctgaccattttggatgtcattgtaaataaaggtttctatttaaaattggagcctaaagag

SEQ ID NO: 164505 - DNA, 1389 bp, Homo Sapiens
cgttcggagtggacctcatcaatgagcttgtggagaactttggcagatgtcccaagtggtctggtcggcaagcctttgtctttgtctgccagactgtcattgaggatgactgccttcccatggaccagtttgctgtgcatctcatgccgcatctgctaaccttagcaaatgacagggttcctaacgtgcgagtgctgcttgcaaagacattaagacaaactctactagaaaaagactatttcttggcctctgccagctgccaccaggaggctgtggagcagaccatcatggctcttcagatggaccgtgacagcgatgtcaagtattttgcaagcatccaccctgccagtaccaaaatctccgaagatgccatgagcacagcgtcctcaacctactagaaggcttgaatctcggtgtctttcctgcttccatgagagccgaggttcagtgggcattcgcacacgcatgtgacctgggatagctttcgggggaggagagaccttcctctcctgcggacttcattgcaggtgcaagttgcctacaccctataccagggatttcaagagtcatgagaaagtacagtaaacactattatcttatcttgactttaaggggaaataatttctcagaggattataattgtcaccgaagccttaaatccttctgtcttcctgactgaatgaaacttgaattggcagagcattttccttacggaagggatgagattcccagagacctgcattgctttctcctggttttatttaacaatcgacaaatgaaattcttacagcctgaaggcagacgtgtgcccagatgtgaaagagaccttcagtatcagccctaactcttctctcccaggaaggacttgctgggctctgtggccagctgtccagcccagccctgtgtgtgaatcgtttgtgacgtgtgcaaatgggaaaggaggggtttttacatctcctaaaggacctgatgccaacacaagtaggattgacttaaactcttaagcgcagcatattgctgtacacatgtacagaatggttgctgagtgtctgtgtctgattttttcatgctggtcatgacctgaaggaaatttattagacgtataatgtatgtctggtgtttctaacttgatcatgatcagctctgaggtgcaacttcttcacatactgtacatacctgtgaccactcttgggagtgctgcagtctttaatcatgctgtttaaactgttgtggcacaagttctcttgtccaaataaaatttattaataagatctatagagagagatatatacacttttgattgttttctagatgtctaccaataaatgcaatttgtgacctgtattaatgatttaaagtggggaaactagattaaaatatttgtctttt

SEQ ID NO: 164506 - DNA, 1390 bp, Homo Sapiens
ggggctggagccgcggctgacgggcccgcggtctgggcgtgagtgcagggaagtggagtatttgctgggccgggtaccatggacgtgggcgaacttctgagctaccagcccaataggggcacaaaacgtccccgggatgatgaagaggaggagcagaagatgcgtcggaaacaaactggtactcgagaacgcggccgctatcgggaagaagaaatgactgtggtggaggaagcggatgatgacaaaaaaaggctgctgcagattattgacagagatggggaagaggaagaggaagaggaggagccattggatgaaagctcagtgaagaaaatgatcctcacatttgaaaagagatcatataaaaaccaagaattgcggattaagtttccagacaatccagagaagttcatggaatccgagctggacctaaatgacatcattcaggagatgcacgtggtggccaccatgccagacctgtaccaccttctggtggagctgaatgctgtacagtcgcttctcggcttgctcggacacgataatacagatgtgtccatagctgtggtcgatttgcttcaggaattaacagatatagacacccctccatgagagtgaagagggagcagaagtgctcatcgatgctctggtggatgggcaggtggtagcactgctggtacagaatctggagcgcctggatgagtctgtgaaagaaggaggcagatggcgtccacaacactctggctattgtggaaaacatggctgagttccggcctgagatgtgtacagagggtgcccagcagggtcttctacagtggctgttgaagaggctgaaggcaaagatgccttttgatgccaacaaactgtattgcagtgaagtgctggccatattgctccaggacaatgatgaaaacagggaattgcttggggagctggatggaatcgatgtgcttcttcagcagttatccgtgtttaaaagacacaatcccagcacggctgaggagcaggagatgatggagaatctgtttgattccctctgctcctgtctaatgcttagttccaatcgtgagcgcttcctgaagggcgagggtcttcagctgatgaatctcatgctcagggaacaagaagatctcccggagcagtgccctgaaagtgctggaccatgccatgattggccccgaaggcacagacaactgccataagtttgttgacattcttggcttacgaaccatctttgcccctctttatgaaatctcccaggaagatcaagaaagtgggaaccactgagcaaggaacactgaagagcatgtctgttcgatcctggcttccctcctgcggaacctgagagggcagcagcggacccggcttctgataaattcacctgagatgacagtaa

SEQ ID NO: 164507 - DNA, 748 bp, Homo Sapiens
tcgataagggccaacacttctctacaaaatttgtttgttctcattgccagttaaatacagagttttactttcatagcttaacaatgaagggtcatacactgaagccaatacatatacctagcatttcagtctaagcttgtccacgtacatagctgaagtcaattacaaggtttggcctagaaatgctaggggaacttctttgtagtttttacaggtattaaacttcatcttgcacactgaagtcatcatacatacagggcaaaatcagagcttttatatttgcgtttattcttcatttaactttttaaaacactactatagtttattaaaacaaaaacaagagcaagtagtgagcatattatgattacagtccttcactcattcactactgcacattaaatgccagcagtgagtgttattcactggcccattaagaggtctgacactgaacaccacctctgggatgatgttcatcatcctcatatgcttctccattgtagtggcgccgtctttcctgatttggatcaaagtccaccagttctacttggtccatctcatcagtctcttccacttccttcctctcgggtaggagtttttccagcaaagacagtttatcaggagagagaaagccattctcaggaaagtttaccttaaattcgatgattaggcgacccttttcatatggtctacgataaattggcatgccttcatttagtacacacttgatatctccatgcttgacaatccc

SEQ ID NO: 164508 - DNA, 1586 bp, Homo Sapiens
ggggcgcccgggttcggctacaaaagacgacggctgcggcgcgccgggcggaactttccagaacgctcggtgagaggcggaggagcggtaactaccccggctgcgcacagctcggcgctccttcccgctccctcacacaccggcctcagcccgcaccggcagtagaagatggtgaaagaaacaacttactacgatgttttgggggtcaaacccaatgctactcaggaagaattgaaaaaggcttataggaaactggctttgaagtaccatcctgataagaacccaaatgaaggagagaagtttaaacagatttctcaagcttacgaagttctctctgatgcaaagaaaagggaattatatgacaaaggaggagaacaggcaattaaagagggtggagcaggtggcggttttggctcccccatggacatctttgatatgttttttggaggaggaggaaggatgcagagagaaaggagaggtaaaaatgttgtacatcagctctcagtaaccctagaagacttatataatggtgcaacaagaaaactggctctgcaaaagaatgtgatttgtgacaaatgtgaaggtagaggaggtaagaaaggagcagtagagtgctgtcccaattgccgaggtactggaatgcaaataagaattcatcagataggacctggaatggttcagcaaattcagtctgtgtgcatggagtgccagggccatggggagcggatcagtcctaaagatagatgtaaaagctgcaacggaaggaagatagttcgagagaagaaaattttagaagttcatattgacaaaggcatgaaagatggccagaagataacattccatggtgaaggagaccaagaaccaggactggagccaggcgatattatcattgtgttagatcagaaggaccatgctgtttttactcgacgaggagaagaccttttcatgtgtatggacatacagctcgttgaagcactgtgtggcttccagaagccaatatctactcttgacaaccgaaccatcgtcatcacctctcatccaggtcagattgtcaagcatggagatatcaagtgtgtactaaatgaaggcatgccaatttatcgtagaccatatgaaaagggtcgcctaatcatcgaatttaaggtaaactttcctgagaatggctttctctctcctgataaactgtctttgctggaaaaactcctacccgagaggaaggaagtggaagagactgatgagatggaccaagtagaactggtggactttgatccaaatcaggaaagacggcgccactacaatggagaagcatatgaggatgatgaacatcatcccagaggtggtgttcagtgtcagacctcttaatgggccagtgaataacactcactgctgggcatttaatgtgcaagtagtgaatggagtgaaaggactggtaatcttaataaggctcactacttggctcttgggttttgggttttaataaacctatagtaagggtttataaaaaggttaaaatggaaggaataaaccgcaaaaattaaaaagctcctggattttggcccccggaagggaatggatggacctttcag

SEQ ID NO: 164509 - DNA, 1120 bp, Homo Sapiens
tttcctctcgctccgcaacatagagcaagccggctacaggtttatagagtcgggcggacaagacactcccgcaccggccgttgccaagccggcgcggtgtttcttggtgttgccaatacccccgccgtgtctcggtgtcgtcatcataaacacacgtggcgcccagcggaggagacccgctcgttggtcgcccgaaaaaaaacaaagccccgccgcccattaaggagcgggggtcaaaatctccccctcgggtcatcttcccacgccggcatttcctttacatcgccaggggcggcgcccggctccttttcggaagggtgagtacgggcctccccgatgggggagggtccgggcacggttctggccccctttattgcaaagaaaggatgggtccatggaacacagctattgccccatgtggccattttcattgccctctgttttccgcaagccgggcgttagagggcccggaggttttgttgttctttttggtatatttggcgtgtattcttccattgcactttttataacactactatagtttattaaaacaaaaacaaggagcaagtagtgagcatattatgattacagtccttcactcattcactactgcacattaaatgccagcagtgagtggttattcactggcccattaagaggtctgacactgaacaccacctctgggatgatgttcatcatcctcatatgcttctccattgtagtggcgccgtctttcctgatttggatcaaagtccaccagttctacttggtccatctcatcagtctcttccacttccttcctctcgggtaggagtttttccagcaaagacagtttatcaggagagagaaagccattctcaggaaagtttaccttaaattcgatgattaggcgacccttttcatatggtctacgataaattggcatgccttcatttagtacacacttgatatctccatgcttgacaatctgacctggatgagaggtgatgacgatggttcggttgtcaagagtagatattggcttctggaagccacacagtgcttcaacgagctgtatgtccatacacatgaaaaggtcttctcctcgtcgagtaaaaacagcatggtccttctgatctcc

SEQ ID NO: 164510 - DNA, 832 bp, Homo Sapiens
  misc_feature (383)..(397): n is a, c, g, or t
  misc_feature (695)..(720): n is a, c, g, or t
ggcatgttagttcgacatcatcatcttttcttgaagtatgatgcatattgcattattttatttgcaaactaggaattgcagtctgaggatcatttagaagggcaagttcaagaggatatgaagatttgagaactttttaactattcattgactaaaaatgaacattaatgttaaagacttaagactttaacctgctggcagtcccaaatgaaattatgcaactttgatatcatattccttgatttaaattggcttttgtgattgagtgaaactttataaagcatatggtcagttatttaattaaaaaggcaaaacctgaaccaccttctgcacttaaagaagtctaacagtacaaatacactatctatcttagatagatatannnnnnnnnnnnnnnaaatattgtactatttatggtggtggggctttcttactaatacacaaataaatttaatcatttcaaaggcattctatttggtttagaagttgattcccaggagtgccatatttcagctactgtatttcctttttcttgtaatgtaaggcagctcaggataccatggtgctatcatttttgtatccaagttttttggcacagggatgtgaccactgtcagatcactgttcttttctttctttttgggattgaaaagccctatactacaatttgaagtaaatttttgtttttcctaaaannnnnnnnnnnnnnnnnnnnnnnnnnaacacacaccaatcaacaccaccaatccaacacaaacataacaaatatcacaccctacctacctcccaaaaaccataaaaacacctttaacaaaaaacacctacacgctcca

SEQ ID NO: 164511 - DNA, 774 bp, Homo Sapiens
agggattgtggtcttaacagaacatcatgactaaaagttgatccttgctcttggtgcacatttaagattttaccggttttgggaaatacccaagtcttccttgtctctcaggaaaaacacatgttaaattcatcctgtactaactacagatagaagaaaaacagtattaacatgtgtattacagcactgcagttcactttctggatttgtgacacacaaacacatcatgcattctaagaagttaattttattagtgtcactagtgatgttaattaaaaaacttatagcaagtgctcaaaactttctaaatattgtaatcactatgttttaaagacagagtggactgttacaaatgattttgcaaaatacaaaaatagatatacttccactgaatgctttaatcatttttccgggcactctcatcttttggttcttcctcatctgagtacacagtgggctcctccccctccttcagcagtttgcccacgtgatgatacttgaaagtgaactgagactcccagtcactcagagtctcctgctgggcagcagtgaggtcagaaaggtcatcgtactcatccttcagtgcttccttatccaggcaaaatgtggcaaggcccctggatgcatctcttccagcaaagaccccatacggcccctcgggcccgtagaatttgcggcctttggtcacatcgaacaccttgccgttgatggccatgagtatgcgcgggtcctggacgccgtcgaagcgccgcagctcggcgggggtgaagtcgc

SEQ ID NO: 164512 - DNA, 1240 bp, Homo Sapiens
ggcagcgcgggccggccccggaggctctcggcgagcgcggcgcggtaacaagtgggcgaggatgccgtacgagatcaagaaggtgttcgccagcctcccgcaggtggagaggggcgtctccaagatcatcggcggcgaccctaagggcaacaattttctgtacaccaatggaaagtgcgtcatcctaaggaacatcgacaacccagcccttgctgacatctacacagagcacgcccatcaggtggtggtggccaagtatgcgcccagcggattctacattgcctccggagatgtgtctgggaagctgaggatctgggataccacgcagaaggagcacctgttgaagtatgagtaccagcctttcgctgggaagatcaaagacattgcttggactgaagacagtaagaggatcgccgtggtcggggaaggaagggagaagtttggagcagtcttcctctgggatagtggctcttctgtgggcgagattacaggacacaacaaagtcatcaacagcgtggacatcaagcagagccggccataccggctggccacgggaagcgatgataactgcgcggcattctttgagggacccccattcaagttcaagttcacaattggcgaccacagccgctttgtcaactgtgtgcgattctctcctgatgggaacagatttgccacagccagtgctgacggccagatatacatctatgacgggaagactggggagaaggtgtgcgccgctgggcggaagcaaggcccacgacggtgggatttacgcaattagttggagtcccgacagcacccatttgctttctgcttctggggacaaaacttccaagatttgggacgtcagcgtgaactccgtggtcagcacatttcccatgggctccacggttctggaccagcagctgggctgcctatggcagaaggaccacctgctcagtgtctccctgtccgggtacatcaactatctggacagaaacaaccccagcaaggcccctgcacgtcatcaagggtcacagtaaatcgatccagtgtctgacggtgcataaaaacggcggcaagtcctacatttactctgggagccacgacgaacacattaattactgggattcagagacgggggagaacgacttccttcgctgggaaaggccacaacgataccaggtgtccaggatgaccgtggatgacatcggggcagctcatcaactgcagaatggcgtgacatcgggtggccgat

SEQ ID NO: 164513 - DNA, 1323 bp, Homo Sapiens
ggacgcgtgggtcgacccacgcgtcggtctatcgagggtcacagtaaatcgatccagtgtctgacggtgcataaaaacggcggcaagtcctacatttactctgggagccacgacggacacattaattactgggattcagagacgggggagaacgactccttcgctgggaaaggccacacgaaccaggtgtccaggatgaccgtggatgagtcggggcagctcatcagctgcagcatggacgacaccgtgcggtacaccagcctcatgctgcgggactacagcggacaaggagttgtgaaactggacgttcagccaaagtgcgtagccgtcggccccgggggatacgccgtggtcgtgtgcattggacagattgtcctgctgaaggatcagaggaagtgcttcagcatcgacaaccccggctacgagcccgaagttgtggcagtgcaccccggcggggacacggtggcaattgggggtgtggacggcaacgtccgcctgtattccatcctgggcaccacgctgaaggatgagggcaagctcctagaggccaagggccccgtgaccgacgtggcctactcccacgacggcgccttcctcgcggtgtgcgacgccagcaaggtggtcacagtgttcagcgttgctgacggctactcggagaacaatgttttttatggacaccatgcaaaaatcgtctgcctggcctggtccccagacaatgaacactttgcctccggtggcatggacatgatggtgtatgtttggaccctgagtgacccggaaaccagagtcaagatccaagatgcacaccggctgcaccatgtcagcagcctggcctggctggacgagcacacgctggtcacgacctcccatgatgcctctgtcaaggagtggacaatcacctactgaggagccccacccccgcctctggatggaccgaatcagggactagagtttaactgcagcggaacatgtcatttctctatttctgtgacgcgcccccatgcccccaccccaccacaagaggcaggagggcccagtcatgaccctcgtctctgcagggtgtctgtacacgttcttctgaaagctttagacagtaacagtttgcacatgaaaaataaagcgagcacctaaacaatgtgctggagcctaactaaaacccacagcccaacccaacccttgagaatgcgaaacactcccaaagggcagaaaccctccaaaggcccccaggagccccctgggcccccgcccgccgggttcctcaactattctggtccaggggggaggtctggcaaccggccggaaattggagcccgtggggggggc

SEQ ID NO: 164514 - DNA, 542 bp, Homo Sapiens
  misc_feature (383)..(399): n is a, c, g, or t
tacgtagttgaaatatctagctaacttggtctttttcgttgtttgtttttactcctttccctcactttctccagtgctcaactgttagatattaatcttggcaaactgcttaatcttgtggattttgtagatggtttcaaatgactgaactgcattcagatttacgagtgaaaggaaaaattgcattagttggttgcatgaacttcgaagggcagatattactgcacaaactgccatctcgcttcatttttttaactatgcatttgagtacagactaatttttaaaatatgctaaactggaagattaaacagatgtgggccaaactgttctggatcaggaaagtcatactgttccacttttcaagttgggctgtcccccccgnnnnnnnnnnnnnnnnnatatgtacagatgataatagggtgtggaatgtcgtcagtggcaaacatttcacagatttttattttgtttctgtcttcaacatttttgacactgtgctaatagttatattcagtacatgaaaagatactactgtgttgaaagc

SEQ ID NO: 164515 - DNA, 710 bp, Homo Sapiens
gtgacaggaaaattatacaagctggcttggctatcgtgaccagtatagatgctgagagcacagctcaatataatgattgttaaaaaataaagaaaacacaacatgttcctggtaggctgtacggactacctgccccatctgtggaagcccttactccttacaatgaagaaactccaaatactttgacagctcctcggtgttcaacctggtacagagctggctgaccaggctccatgaaatctcccatctccatcctgcacctccttgacaccatctcgatctacacagaaccagtcctaaaattatatctcaaatatatcattttcaattcagatggaacacacctgtattttaggattaatcttgctttccgccaaatcctttatgggcaggaatgtccccatccccagtaccttctacttgacccagatccatgcaggagctgagagtacaaggacaatttcacagcttgaagggccccaagactatacaagctgttaaaaaagaaacctcaaaagcctcaatgactcaacaggctttggttccttctctatattcttcaccagctaagaaacctttctgtgagttccttgtcaccagcggcaccacaaaacttctcctcatagtatggggacatggtaagcaatacacaggctctttggtataaacacatctgttaacatgtttttttcaacaagcaaatatgtagc

SEQ ID NO: 164516 - DNA, 370 bp, Homo Sapiens
cctagctaacttcgttacaaccttccttacccctacaaccttcctacttgacccagatccatgcaggagctgagagtacaaggacaatttcacagcttgaagggccccaagactatacaagctgttaaaaaagaaacctcaaaagcctcaatgactcaacaggctttggttccttctctatattcttcaccagctaagaaacctttctgtgagttccttgtcaccagcggcaccacaaaacttctcctcatagtatggggacatggtaagcaatacaacaggctctttggtataaacacatctgttaacatgtttttttcaacaagcaaatattttactaggaatgtcaactatgtacagaagtgtcaag

SEQ ID NO: 164517 - DNA, 984 bp, Homo Sapiens
ggggccgcccccgcctggagtccgacgtggaagttgctggctgactgggcttgcgaggaaaccgcctcggagctgcagccgaaggccaaggaatcactgaagatcggcgagggaggacagggggttcatcatgggtggctttttctcaagtatattttccagtctgtttggaactcgggaaatgagaattttaattttgggattagatggagcaggaaaaaccacaattttgtacagattacaagtgggagaagttgttactactatacctaccattggatttaatgtagagacggtgacgtacaaaaaccttaaattccaagtctgggatttaggaggacagacaagtatcaggccatactggagatgttactattcaaacacagatgcagtcatttatgtagtagacagttgtgaccgagaccgaattggcatttccaaatcagagttagttgccatgttggaggaagaagagctgagaaaagccattttagtggtgtttgcaaataaacaggacatggaacaggccatgacttcctcagagatggcaaattcacttgggttacctgccttgaaggaccgaaaatggcagatattcaaaacgtcagcaaccaaaggcaccggccttgatgaggcaatggaatggttagttgaaacattaaaaagcagacagtaattcagtccattcttctcccctgaaatgaagactacatcacctctctccctttggaaacagtcaagtgtacttcacactactagatgttaaaactatatgattattggcatatactgactgactgcaatatttgtagtaaatagggaaaataagtatttagttggagggataatttgatcgaatcacctgaatgttctatgtaatgtaaaatattcttttcttgctttcttgtgttaaggtatatattctatttgtatggaattcttattcaaatacagttctattaaagagtatactcctattggatg

SEQ ID NO: 164518 - DNA, 1071 bp, Homo Sapiens
ctgctggcccttaagcgcctggaataatcagaataaaaaccctccagaagattctctctggcccaaaatccgggttccattaaaagttgtgaggactgctgaaaactagttaagtaaccgtttcttcccttatgatgaaatcgagacagaagctgttctggccattgatgatgatatcattatgctgacctctgacgagctgccatttggttatgaggtctggcgggaatttcctgaccggttggtgggctacccgggtcgtctgcatctctgggaccatgagatgaataagtggaagtatgagtctgagtggacgaatgaagtgtccatggtgctcacttggggcagctttttatcacaagtattttaattacctgtatacctacaaaatgcctggggatatcaagaactgggtagatgctcatatgaactgtgaagatattgccatgaacttcctggtggccaacgtcacgggaaaagcagttatcaaggtaaccccacgaaagaaattcaagtgtcctgagtgcacagccatagatgggctttcactagaccaaacacacatggtggagaggtcagagtgcatcaacaagtttgcttcagtcttcgggaccatgcctctcaaggtggtggaacaccgagctgaccctgtcctgtacaaagatgactttcctgagaagctgaagagcttccccaacattggcagcttatgaaacgtgtcattggtggaggtctgaatgtgaggctgggacagagggagagaacaaggcctcccagcactctgatgtcagagtagtaggttaagggtggaaggttgacctacttggatcttggcatgcacccacctaacccactttctcaagaacaagaacctagaatgaatatccaagcacctcgagctatgcaacctctgttcttgtatttcttatgatctctgatgggttcttctcgaaaatgccaagtggaagactttgtggcatgctccagatttaaatccagctgaggctccctttgttttcagttccatgtaacaatctggaaggaaacttcacggacaggaaggttgtaggg

SEQ ID NO: 164519 - DNA, 238 bp, Homo Sapiens
gccggtcccctagcacttcttacaccttaactgctctcaccttagatcttcttttcagactttagctcctctttgtcattcttaaatttaaaggctctaatccccaatccatactctgatctctaaatcaacctgtctttctagtctgagtctctcccatttccaccaatcctgttcctgaccaagctcagttcttaacatccagaaaggctcttagaaacactggattcttcccata

SEQ ID NO: 164520 - DNA, 354 bp, Homo Sapiens
caaccttcctgtacatcagggtgagatgcagaaaaccaaagaaaagattgtgggcatctggagagaaaatacagactacctgtagaaaaccagccagatggtgacttctgtgtcaacaatgaaagccaggaaacagtgaaatttatcttcatcatgttaagagaaaaaggaacttattatgaaagcttacctgaggtgacactttttaaaaagctactaaaaacattttccgacaaaagcagagtttccacttacaaaaggatgtccttgaggtggaaggaaaatgatctcagatggagaatcagatgcaagaaggaacactgaacgaaattgctaaagccttcactgaagaag

SEQ ID NO: 164521 - DNA, 290 bp, Homo Sapiens
  misc_feature (215)..(227): n is a, c, g, or t
ccacttcctgtacgatctttagcacatggggaaaatttagtatcagagaggccagctgtacagtcatgtgttggttagagggctagaggacacagcaccatttataactcactgcttccaatcaaatctgttacccctccaccttgtggcagggactctgtgactcccagtctcctcagaagtagaaaggtaagttgtaagttgttgttcttcgnnnnnnnnnnnnngggacagggtcttgctcttgtcacccatacttcaatgcagtggtgccatcatagggcactgta

SEQ ID NO: 164522 - DNA, 459 bp, Homo Sapiens
cttcctgtactgaggagagcagccagaaaagtagaagcaaaacaaggaaagtgtctttcttcagcacctagaacagcccaggcaatggtaggtcctaaaaaaagcacttgctgaatgattgagtaaacgacatgtgcaactgatgtcaaaaaagatgggaactgaaaaagaccatataatttagtaaaatgaagatttattgttatctttgataagtgtactttcagtgaaggcacagaagcaaaatcctgactgcagaagagataaggggatatgtttatttggaaacagtgagtataggtaactcttttaaggacatgaaacaggagggcatgaataaaaaggaagacataaatagctggaaggaaaagagactgtggttttaagatacaagaaataagagcgagtctgatctagtcgagaaagaaaatcgtgagacgcagttgtaggtaagaagtc

SEQ ID NO: 164523 - DNA, 1011 bp, Homo Sapiens
ttagagcattcatcataccttcctagtactggaggaatcctttgcctcctattgatctggcagacattgaagatttaagtgaagacaccctgacagaagcaacacttcagggcaggaatgaaggggctgaggttgacatggagtcctgatgtaaggagccgaagcagtgggattggctgatttgaggagatgtctctaagtgaattctcgtattcttaagggaaaagttattttccatacttgaagttatatttccaaacctgagaaatgaagaaagattgttctgacattaaatacctacagttactactgaacctcttaataaggatttgtcaaggatagagtacagttgtaggggaagtattttatgtatgcattcttagagcaaaaagttttgtttaaattctagaattgaaggtactgatcttataaaaagaaattctagcagttttagaaataggtgggaaaaactcaaatattcctcctatctgcaccaaaaagtttatttgtggtatataaaatgaatattgttttataataacttgttaataaagtactttctaatacattctattgactctgttagttgaacaaatagctgacttgaacatctatgcaaacttaagatgggcgggattgttgtaaaagctattgttttaaaagagctttctaaatgtaaagtagtgataatttcaattagggtagcgtgtttgcaaagcttccaatatttgatgtcggttaagctctactatgggcaactgaagatggataaagaaaaatgaaaactgaatcggtgcctgcttcccccgtgttttcccaggattagaggaaaaaatttatggtataatcagcttctttggttggaattgcttcgaggcatggtttcaattccttggtacttttagacctgtaagttttcaacactgacagccactttaaaaaatctttgccatgggcctcactcttgagaagatctcatttaattaggtctgaaagatggaccttgagata

SEQ ID NO: 164524 - DNA, 642 bp, Homo Sapiens
  misc_feature (80)..(80): n is a, c, g, or t
  misc_feature (160)..(169): n is a, c, g, or t
  misc_feature (174)..(174): n is a, c, g, or t
  misc_feature (185)..(185): n is a, c, g, or t
  misc_feature (209)..(260): n is a, c, g, or t
  misc_feature (296)..(296): n is a, c, g, or t
  misc_feature (298)..(299): n is a, c, g, or t
  misc_feature (301)..(301): n is a, c, g, or t
  misc_feature (304)..(307): n is a, c, g, or t
  misc_feature (310)..(314): n is a, c, g, or t
  misc_feature (316)..(318): n is a, c, g, or t
  misc_feature (456)..(456): n is a, c, g, or t
accaaccccccttttttcttgtccccggggtttcttcttgggaacaaccactttttggccccggttgccctcctccccgnggggggccgcgggcccccccacaaagaagggttttagaaagaatttttttaaagggcccgaggggcgggccccccaaaannnnnnnnnngtgtntggggggtgtnttggggtcgccgggtgttttggtnnnnnnnnnnnnnnnnnnnnnnnnnnnnnnnnnnnnnnnnnnnnnnnnnnnntgtgtttttggggtgttgtgtgtttttggtggtttntnntntgnnnngtnnnnntnnnttgcttgtaaattgtgctttaatttctgcaatcagatatgatgcagtgagatacaagtataaactttcattgtgcatccagaaaataaaaagcacaagtatacaggtttagctcaacagcttattcccttataaaganaaaaaaagttttgaattaaagctagtttatcttcagtgtaaaaacttggaggtataaacaaactcaagatattatatacagtaaattaatttacatttccaaacttgcacagtacagcattttaaacaaagtaaatggtctcatttcagctctcactgttaagcataatccacatcccaatctccc

SEQ ID NO: 164525 - DNA, 939 bp, Homo Sapiens
ggcactctgctctgctactatgatcccaattcagatgctgacagtgaaaccgtgaaggcagcaaaggtgtggaaactcgcagaggtcctggtgggtgagcagcagcagtgccaggatgccaagagccagcagaaggagcagatgttgctgctggagaagaagagtgctgcttactcccaggtgcttctccgctgcctcactttgctgcagaggcttcttcaagaacaccggctgaagactcaatccgagctagaccgcatcaatgcccagtacctggaagtcaagtgcggtgctatgatccttaagctgaggatggaggagctaaagattttgtccgacacttacactgttgagaaagtggaagttcatcgtctgattagggaccgtttggagggagccattcacctacaggagcaggacatggagaactcaagacaggtcctgaactcctatgaggtccttggggaggagtttgacaggctggtgaaagagtacaccgtactcaagcaggcaacagagaacaagcggtgggccctccaggagttcagcaaggtctaccgttgagctctggcagggccaggagacatggcttctgcatagctgctgcctcctaatcttcctgctagtgggaccaccttcacctggggctgccttcagtacaagggagtgtggaaatgcttacgcttgaaacactgcagtcatttaggcactctcctggtttctctttattttttatgactgggcctcttctggaaaatctagcaaggagatttatataatttttatgcatagctgtgtgtcagtgtcagccctgtattgtatttgattatctcctgaataaagttatgatattatatcttaggattttagtcattttccttgggcaaagattgaaaaagaacattgaaggctatatgggtaaggagcggggaactgagt

SEQ ID NO: 164526 - DNA, 566 bp, Homo Sapiens
ggtaagtaattatgtaggatccatcaaagcagtattgtaggcttttgaattgtcccagtggatccgggaccccatttcactgtctctcttgatcgtgttaatgatgcaatcagagttcaagacaggccccatgaagtctgactgcactgggatggagaaatgaatttcttcccactgaaggaaactctttctcattcgcagccaagacgggagtgccactgttcctctcttcactcctgagatactgcttctggaagcgggtgtcacttcctctctagtacctcttctcttctctgaagtgtgtgactatctcctagtgtttaaatttggcagttactcgccatgtatgtcagcatagaaaaggaaatgtttttaccttatctcctgtatgtatgatagaacttaaaagaaatgtgcatttgttttcatacgccccgagcagagaaaatcctcttcatagattaaatgtgctgactgtggacaggagggaaataaaaaccctctacatattgaaaggcaccaaatgtaatatctgacactgttaagatgcccaaaagagcaaagtt

SEQ ID NO: 164527 - DNA, 654 bp, Homo Sapiens
atcccctaccttacagggctgggggacctgctcggtactggcctcctggcactctgctttttcactgactggctactgaagagcaaggcagagctgggtggcatctcagaactggcatctggacctccctaactgggccccgctggtcccatttgctcattagaatttcctctcacatcagtgggatacagaattcagtttctcccttgccaggtccttgggatggttgacccctgcctctgcagtagccttttgtgagtctgctaaggtagctctcacacacctcggctctggggttgatacctgagcctgcaatagagccctgaaatcaagagcatggcttgagtgtgtgaatatgatgtgtgcacatgcttaatgagcgtgcaagtgtgcacacgtttgtggagaggagggtgttctggcctgagaagctaaagaagaggcatgtccagtatgctttgcagggtgtgtttgctcttttccatgcccatgcaacccagattggggtggagcaggaaggagctcttttctgttaccaaacctcagaactcttgagctgtggcttacttgctgtcttcaccaggttcaagctccgtgggccacactgctgctgtgccaagcaggtgtacagcctccccaggatggggcctcata

SEQ ID NO: 164528 - DNA, 459 bp, Homo Sapiens
  misc_feature (13)..(13): n is a, c, g, or t
  misc_feature (27)..(27): n is a, c, g, or t
  misc_feature (34)..(34): n is a, c, g, or t
  misc_feature (80)..(80): n is a, c, g, or t
  misc_feature (184)..(184): n is a, c, g, or t
gaccctgcaaaanaaccctgaaaatcnaagaacnaggcttgagtgtgtgaaatatgatgtgtgcaacatgccttaaatgnaccgtgcaagtgtgccacacgtttgtggaaaggagggtgttctggcctgagaaggtaaagaagaggcatgtccagtatgctttgcagggtgtgtttgctctttnccatgcccatgcaacccagattggggtggagcaggaaggagctcttttctgttaccaagcctcagaactcttgagctgtggcttacttgctgtcttcaccaggttcaagctccgtgggccacactgctgctgtgccaagaaggtgtacagcctccccaggatggggcctcatacaacccttcatctgcactcaacatttaatcgtgtccttgctgtctttttattttcctttttgtttgttagcaaaaacctctatttagatttcaataatcaga

SEQ ID NO: 164529 - DNA, 644 bp, Homo Sapiens
aggcttgggccctgctgaaggatggggctgggcttccggtctgagtctaccatgtgtgtcatacccaggagctggctgctcttcgtgccgcagggcggatgctctaggtgcctgttcgtagcgtggtctgctgtcgtaagacagaggggctggctcttcaaaacgtggaaagtaccctcgttctgaggactcttcgggatgctgtctggagtcaaggtcttgagagtgctgattatcaaaaggtggccgagatgggtagggctgtttgtcatcataatatgaccactgttcttcatacatggggacgcgatcttcgtatcgcagacgatgttcatagtttcgagaaaactggtccgtatagcttgaggactcgtatctgtatgtgggctgctcgaggtctctgctggcttgtttctctacgtatgggagttggggttcataggtcagattaggctctttgtctggcctgtgccctgggtgactaacggctggctgtttcaaaacatggttctgcctcatcatttcctcgggatatggatcctttctatacacctgttgagaggctggcttaaatccaggggagtctattctatgaattggtgtgctgcgcatgtggtgagtaaggaagtcgtaggggtacgagc

SEQ ID NO: 164530 - DNA, 810 bp, Homo Sapiens
  misc_feature (683)..(735): n is a, c, g, or t
cccacttgaaagcacaccagcggacgcacacaggagaaaagccttacagatgctcatgggaagggtgtgagtggcgttttgcaagaagtgatgagttaaccaggcacttccgaaagcacaccggggccaagccttttaaatgctcccactgtgacaggtgtttttccaggtctgaccacctggccctgcacatgaagaggcacctctgagggagcagagaggtggatcctgtaggctaaaaggcttccaggctgagagccggccgtggaaggagggatgcgtgttccagccaaagcatgccgttctgcaccctacccagttgcctccagggcctctccttggaaggtcttttgagggctaaaaaggtcctgtaagaagcggcatagcacccgtggtgcatggtatgtgggtgaccctggactcgccactggtacccgcccttccgagcggcgcctaagcctttgccgtgagcatgcacactgagaatgctaatggttgggttgattgtatgttgaggatctattactgaccgtatgatgaggccaactttttttccttgtggttagcaagactgcaagagatggaaaaaaagtagtttgaatgttttgtgtgtaaggagtataccatgagatgagatgaccaccaatcatttccttggggggagggggtgtctgcaccttagnnnnnnnnnnnnnnnnnnnnnnnnnnnnnnnnnnnnnnnnnnnnnnnnnnnnntcttggagggtggcgtgggaactcagacaccagatggcgactggtgtggggagcgagagcctctctcctcctgtt

SEQ ID NO: 164531 - DNA, 625 bp, Homo Sapiens
  misc_feature (27)..(27): n is a, c, g, or t
  misc_feature (40)..(40): n is a, c, g, or t
  misc_feature (53)..(53): n is a, c, g, or t
  misc_feature (71)..(71): n is a, c, g, or t
  misc_feature (101)..(101): n is a, c, g, or t
  misc_feature (110)..(110): n is a, c, g, or t
gaatccccggggatccccctaaatacnggaaaaccccccnaaagcatacttgnatcaggccccctaccctnaaaacacacaaagcattccttgattattgnaagcaaatnggtcttcacccttgttttctttgaagactggtattattcacttaagaaaaaaaaccaaaatgcagaataccatattttagatgaatctatcctataattgctagcctcaaggcacaagtaatatccttgctagatactttttcttattcaaagaaaagataaagaatggtgaatggaaggaaattcactttaaaataattgtagattgcactcctgccctatcaagcttagtagaagtgcaaagtattgaaacctaatgggggatgcccttttcccactttttttgcttgtttaattttagagtgacaaaactcagatccagcttgtggatgctcttggggaaacagctccagagcccccaactctggcctactgtggagaccagaaaggatcttcataggacacaccccaagatgaagtcataggcacgtttccataactccctgttcccaaggtttggataacctatgctcatttagcaggaacactacactacgtgcttgttgctggcgatc

SEQ ID NO: 164532 - DNA, 648 bp, Homo Sapiens
  misc_feature (522)..(522): n is a, c, g, or t
  misc_feature (529)..(529): n is a, c, g, or t
  misc_feature (536)..(536): n is a, c, g, or t
  misc_feature (554)..(554): n is a, c, g, or t
  misc_feature (566)..(566): n is a, c, g, or t
  misc_feature (588)..(588): n is a, c, g, or t
  misc_feature (602)..(602): n is a, c, g, or t
  misc_feature (607)..(607): n is a, c, g, or t
  misc_feature (612)..(612): n is a, c, g, or t
  misc_feature (636)..(636): n is a, c, g, or t
tatttgaaccgcaaggggataaaaaagtggatgcataacatcagagatgcctgcagggatcacatggaagggtatcattacagatatgaaatcaatgcggaccccagattaacgaacctcagttctaactcggatgtctgagaaatattagaggacagaccaaggacaactctgcatgagatgtagacttaagctttatccctactaggcttgctccactttcatcctccactatagatacaacggactttgactaaaagcagtgaaggggatttgcttccttgttatgtaaagtttctcggtgtgttctgttaatgtaagacgatgaacagttgtgtatagtgttttaccctcttctttttcttggaactcctcaacacgtatggagggatttttcaggtttcagcatgaacatgggcttcttgctgtctgtctctctctcagtacagttcaaggtgtagcaagtgtacccacacagataggcatttcaacaaaagctgcctcaactttttcgaggaaaantactttntttcatnaaatatcagtttttattncttcatgtaccntaggtgtggggaaataattgcntcccttaactggcngcagncgttngcgggtcttcaaattacccctggngcaccggggcac

SEQ ID NO: 164533 - DNA, 747 bp, Homo Sapiens
ctctctccctgtcacacactggaccccactggctgagaatctgggggtgaggaggacaagaaggagaggaaaatgtttccttgtgcctgctcctgtacttgtcctcagcttgggcttcttcctcctccatcacctgaaacactggacctgggggtagccccgccccagcccctcagtcacccccacttcccacttgcagtcttgtagctagaacttctctaagcctatacgtttctgtgaagtaaatattgggattggggggaaagaaggaagcaacggcccatagccttggggttggacatctctagtgtagctgccacattgatttttctataatcacttggggtttgtacatttttggggggagagacacagatttttacactaatatatggacctagcttgaggcaattttaatcccctgcactaggcaggtaataataaaggttgagttttccacaactgtgtgagtgggttccttgggaatttggtaactctgcctcctgcacctccctctgaacccacttcccaacccacttcccatcttccttttttcctgcctcctcattccatttcccatcacctgttttgcccagcattgtgttctgtttctggataatccaggcctttgcctgctgggacctcaggagatgcatgaatgtctgagtgcatgaaccttctcaactcagaggggtgctctggtggaggcctggaaggaatgcagccagccataaggatccgctgata

SEQ ID NO: 164534 - DNA, 971 bp, Homo Sapiens
ggcctgggtggcgaattcggcacgaggggtcatcgagaacgcgggggagttcttccgggaccagggccggcaggtgtacctgtcccggccgcctgcctgcccgcagggcctatatgagctgatgcttcggtgctggagccgggagtctgagcagcgaccacccttttcccagctgcatcggttcctggcagaggatgcactcaacacggtgtgaatcacacatccagctgcccctccctcagggagcgatccaggggaagccagtgacactaaaacaagaggacacaatggcacctctgcccttcccctcccgacagcccatcacctctaatagaggcagtgagactgcaggtgggctgggcccacccagggagctgatgccccttctccccttcctggacacactctcatgtccccttcctgttcttccttcctagaagcccctgtcgcccacccagctggtcctgtggatgggatcctctccaccctcctctagccatcccttggggaagggtggggagaaatataggatagacactggacatggcccattggagcacctgggccccactggacaacactgattcctggagaggtggctgcgcccccagcttctctctccctgtcacacactggaccccactggctgagaatctgggggtgaggaagacaagaaggagaggaaaatgtttccttgtgcctgctcctgtacttgtcctcagcttgggcttcttcctcctccatcacctgaaacactggacctgggggtagccccgccccagccctcagtcacccccacttcccacttgcagtcttgtagctagaacttctctaagcctatacgtttctgtggagtaaatattggggatttggggggaaaagaggggagcaacggccccatagccctggggggttgggacatcttctagtggtaggctgcccccatttgattttttcctaataatccccct

SEQ ID NO: 164535 - DNA, 444 bp, Homo Sapiens
aacattaaacaattttaataaaagtttctgtacaatgctaagcagttttatttacacatagaaaatgtaataggagtagtgtttgaaattacagaactccttaaaatttcaatggcaggtaaatctggaaaaaataacagcattccattcacaaatattttcaagcaataaatatgtatttataaatagtgtaaatttacatcaagattagaaacaaaaatcacaaatctgaagtttattccttagtctatgtgcaatccattacctttgtgacttggctgttaattttttaaattttatttaggaaccaaaagtgtaaccatcatggtctcaaaacaagacagaaaaacataaaagcagtaaaaaagtgtcttacctaacttttcacattacaaaaaagttgaccaaagaaagacttacaattgctaactaccttacaaagaa

SEQ ID NO: 164536 - DNA, 399 bp, Homo Sapiens
acctctcacacctctatcgtcaattaatgggaaactgttatgggaacctgataccgcgcgacaacttgctccttcccatccgctgtctcataaacaggttaccgcgcagtttcagtagctcccaggtcctgcctctttaactcatgacccgcacaaaccttctacacaatgcaatgcatctgaaagttttgatacttctaacctcctctctttgttggctgcaattgtttaagaatcatggatttattttttgtaactctttggctattgtccttgtgtatcctgacagcgccatgtgtgtcagcccatgtcaatcaagatgggtgattatgaaatgccagacttctaaaataaatgttttggaattcaatgggtaaataaatgctgctttggggatat

SEQ ID NO: 164537 - DNA, 1073 bp, Homo Sapiens
gcgctcaaataagagagaagcagctggctttcctcaagtggtctctgtcatagaatgtcacagcgttcaatctcaggatatctctagctgtcatcgtgtaagaaaaaatgtatcccaggaaaacatgtgttctgcttctgctgctttcaagtccagcaaaatcagcctgcaagttgataactctttgataacaaaatatgaaaatgcatttcagcaccgtgatcactgctgccaaggaacaggacactctgtggaaaaaagcagctgtaaagtgagttacacatcacaggaaagggaacttgatgggaaagaaacgaatggcaaccttccaggagataagatcagaaacaaaatggtagcaggcttgttaaatagtggaatttcaaacaaaaccattcacacctccagtagcatcaaactcagtgaggaagggctggaaggaaaggagcaggatgtatccaaagaaactgtattttgtaagtataacatctctgatcatgctatacaagaactaaaccagactgtaaacattccaggtcctgaaaaagtgttggaccagtctcctactgttatgttctccagttttaaaaatgtaaaatcagttgaaacactcgatcagaaggcagatgaagtccttgactgtcagagtaaccaaaacagaccagatgaatgcaaaagtgaaggtcagtcagccaaggagatgctaagtagtgaccagagagagactgtcaccgagcctcacggggaggtaaaccacaaccaaaaggatctgctggtcagctcaggcagtaataactcactaccttgtggtagtccaaagaaatgcaatttgaaaggagcctttgtcaagatgtctggttgtgatgagtccacagaaggtatggtagacatcgtctacacggactgtagtaataagcttgcagaaggtgtgctggacgtgaaggcatctaatctactggattgtggtgcaaggcaagagaaactggcatttcaagaggactccaggagtaccttgtctcggagagaactggatgctgcacatacaggaaccactggtcaggatcagaagatga

SEQ ID NO: 164538 - DNA, 453 bp, Homo Sapiens
aagcagacccaactggtaccccgacaaccttggagggctgaacctttgctgactgggcaatcccttctccaggagttatgacctgtttttgaggggacacagctatcatgtgaccccctttcacagtcacatactgcgggagtggtgactggcaggcagctcctgttgcgggcacgtgaggggcttcaccaggttcctgtttgatgatcacttttgtgaaagctccaagtcctcctgttataggtttggggctttgaaccttagggtgactcccaattgggcaaagaggtggcatagatgcaaacaaagaatcgctcctgcttgacagtagatgttacaaaactacttccatgaattcttaggaacacggggaacctgttctcttgggagacctgagaagccgtggagatcttgtttgtaggacttcctgtacaggaaggtgtagggggggat

SEQ ID NO: 164539 - DNA, 661 bp, Homo Sapiens
ggcagtcttccttggcaaggcttaaaggctgacacattaaaggagaggtatcagaaaattggagatacaaaacgggctacaccaatagaagtgttatgtgaaaattttccagaaatggcaacatatcttcgttatgtaagaaggctagatttttttgaaaaaccagactatgactacttaagaaagctttttactgacttgtttgatcgaaaaggatatatgtttgattatgaatatgactggattggtaaacagctgcctactccagtgggtgcagttcagcaagatcctgctctgtcatcaaacagagaagcacatcaacacagagataagatgcaacaatccaaaaaccaggttgtaagttctacaaatggagagttaaacacagatgaccccaccgcaggacgttcaaatgcacccatcacagcccctactgaagtagaagtgatggatgaaaccaagtgctgctgttttttcaaacgaaggaaaaggaaaaccatacagcgccacaaatgactctggacacagacagatcctggggagttacttaatgttcatctgctgtttgtgataaatcatctctgatgacacgatatttcagatcctctaaacaagcaatcaccattgggcatctcttttcatctgatatagccgagaatat

SEQ ID NO: 164540 - DNA, 407 bp, Homo Sapiens
agaggatcccagccacctgaacatccttcatattacaagaagaatcttgtgcagacatggtcggacacagggcacaccctgatgttcccatgcttctggaggtccttagatgtaatcacttcacaaagtgctatacagtttagattccgactctgcaggaaccgtgactgaatggatcgggtctgggggatggtattcatcctgttgtatctctggaccagctcatccttggagggcatcctgtgctgtccttttcccattcctgcagtttggtgtaggatgcacttgaccagcccattgcgcaggatcgaatgccagttctcaatgtgggacccatggaaggcaaaggtgctgccatagagcttcatcgcggtccggaaccgagcctccttggcaggtgggctacg

SEQ ID NO: 164541 - DNA, 1169 bp, Homo Sapiens
  misc_feature (32)..(32): n is a, c, g, or t
  misc_feature (115)..(115): n is a, c, g, or t
  misc_feature (128)..(128): n is a, c, g, or t
  misc_feature (153)..(153): n is a, c, g, or t
taattccccttccaggggggcagccttccagncttggctggttaccttgaaaccactttttatgaaggggcaggatgggattcctgggggtaaccaggggggtggtacgaggggnctggggccccccntcagttttgtgtaaacctgagttcncgatcaccacgcatgatttccttctgtatcttggggtcctgagtattaatgttggcatcgcccacctgaccatcctcatatacaaagaagaatcttgtgcagacatggtcggacacagggcacacccagatgttcccatgcttctggaggtccttagatgtaatcacttcacaaagtgctatacagtttagattccgactctgcaggaaccgtgactgaatggatcgggtctgggggatggtattcatcctgttgtatctctggaccagctcatccttggagggcatcctgtgctgtccttttcccattcctgcagtttggtgtaggatgcattgaccagcccattgcgcaggatcgaatgccagttctcaatgtgggacccacctgctgagaggtagtttgacaatgtgtgacctgttgctagagatgatccactgcaggagaggatgggccaggggatccaacttgtccatctgtttcttgatttccaaatatgagccctgggtcatctcccgaatagacatcacactatccagagctttctgaagccgctcataattcttcttcttagggttaaaggccagagtcttgggatcagtggggtccaccacagagggataaggctcaaagatgatgctctttctaggggactctaaagctgccctacacatggccaccagcagatccaccacctctgctccagtggccacctcctctgcagctccagacatgacgcccagtgtgtagaaggagaaaacgcatagttcacgagtacagacagctggcttcagcatagatccattttggaagacatgctgctcatcacacaccacacagtactcattcaatgttggaatcctctgttctgcatacttcatgatctgaacgaggaatccatactccagagtgggaatgttccttgcagtgaccactgacctgggggctgggagggtagccaaacacttccactttggggttcttcatggtacaggagatggaacggttcatgagcgccc

SEQ ID NO: 164542 - DNA, 316 bp, Homo Sapiens
tactaggaacaacttagaattaaaatggccacgatgaggaaactttaaataaaactgtttatttatgggacacattagaaaagaaaggatcgaaaacgccacaaaaacaacgggatgcattttaaatcggtatgcagaggcatctaaaggattatacaaatctaaaattgcctaaaagattctttacaaaacgcaaatgaaaggctcatgcagcacatgaacctggattgctccttctctgtctcttctttgcctcgatgctttgagtacagtaacccttttgctcagttaccttttctccttgaggctaatgaaa

SEQ ID NO: 164543 - DNA, 686 bp, Homo Sapiens
ccttcctactgatacataggaagggacacacttcctgtaggcactcagtgttagacgatgattgtggttatgcttgcaaagtcttgtgcttatctttttgtttttacttaaaaagctaatttttaaagattgtagggcttgtattttacttgaataattgatatcttcctgtgtaatgatttgtgagatgagaattaatatttgactagttagaattaattaaatggtaagggaacacagggtactcttaggttaaataatgtatgcaaatagagtctattttcaactaatatggccacaggagccttttgagattcattgatattaaacacaattaatgaaattttaaattgttaacagaattgagaacttgaacaacacttttagtactgcagcatttttgtgccctaaagtatgtaatgatttataaatgtgccatacatacactacaacataacatttgctttgttatgcattttatttctctggggacaccattgcactgcagtgcacacatatttataaacatttgttatattttcggaaacttgctaatatttattaagtcatagacttttctggaggacttaaaaattcactaaaaatctgattatgtcttaaatgttcagtttatctttggtttattaaaataaacaaaaaatctaagattaaacaccagtagatac

SEQ ID NO: 164544 - DNA, 521 bp, Homo Sapiens
ccccctaaacttcctgtactgataaggaacatagaaaacgctctgcagaatgtgcatagccttggagttgttacacgagctgtacgtaagagtgatagacgaatgccattacactgtgcttggagatgcttttaaggaatgctttgtgagtagaccacatcccaagccaaagcagttttcaagttttgaaaaaagagcaaagatattctgtgcccgacagaactgcagccatgactggggaatccatgtgaagtacaagacatttgagattccagttataaaaattgaaagttttgtggtggaggatattgcaactggagttcagacactgtactcgaagtggaaggactttcattttgagaagataccatttgatccagcagaaatgtccaaatgatatcaggtcctcaatcttcagctacagggaatgagtaactttgagtggagaagaaacaaacatagtgggtataatcatggatcgcttgtacccctgtgaaaatatattttttaaaaataaaaaa

SEQ ID NO: 164545 - DNA, 994 bp, Homo Sapiens
ccctagcacttccttacgttctcaactttattccccatcccagtggtggctcttctgtacagtggagaaagaagggggaccccaccagggctatggagagacagtagaggcaggactgaaccgtcagcaaagactaaaaggatgacctgaggctggcaaccacaaaaccaagaagccagcgggggctgccccttccaagtctcaccaatgacccagagcaggttccagagcccaaaggcccaaaagtgcaattcccaaaagccaaggtctgggagccatcaaggagctcccagagatccagcgacgctcagagggcaagggtgtctttgatgagcctgcgcatggtggtggtgactgaggtgcccagggcatcagtgatctggaaggagatcttgtacaggtagggctgcacgtcccgcaagcctgtgtcaaacacgttatccacctccgactgtgtgggcatcttgggcaagtactcatgccgattcatcacctccacgatgttgatgatcttctcgcagagtttctcacccaccttctcccggcagatctgccgctcctgctccgtgccagggctaccacatgcaccttgaccgtccacacttcccaggggatgcactcgtctgagaagggccagcgagacttctgcttctggtagaactccaaggacatctgccccagcccatcgccaccagagtggcgcagggcatccttgaactccccaacaaccttgcgcagggcacgatccagttcctcagaagagacacgcacataagtgaagtcgatgaagtcacagtcaacatcctgggtgcccacggtgccaatggagtaggtgccctccttcttgtagtggaacttgcctgtgctgcggtgcagaagcaccgtgtgcagcacagccagcatggcctcctccacctgccgcccctccaccgacacctccagcacctccgagcgacagttcatcctgcacccagtaacccacaccaaggtgtgc

SEQ ID NO: 164546 - DNA, 982 bp, Homo Sapiens
gcctccgacccaggtggtctggagcctgccgggagagtggtggcatctgagaggctggtcgtggactgtggttgggggaggtgggagctgttttaaccgtgtgccccctctcctgtgccggcgtgggcatcccccggggcagtggaacgcgggcgctcctccagcttccgagtccagccagcctgggcgcggggcgccgcccccgagacacccgaggagtccgttcctccctggttacgtggactgtggagctggtctcttgtggctcagcgccgtgcggaggttgaagcgtacctgcggaggtcgcaccagggcgtgaggaggaggaggaagggcatgagccgagcttgaggaatccgtgctccaaactctacactcaagggtggcccttgggtagggtgaagatcccctgtctttatcctagttccacaccttggtgtgggttactgggtgcaggatgaactctcgctcggaggtgctggaggtgtcggtggaggggcggcaggtggaggaggccatgctggctgtgctgcacacggcgcttctgcaccgcaccacaggcacagtccactaccagaaggagggcacttactccattggcatcgtggggaacccagtatgcttcactgcggacttcctcgacttcccttcatgtgccgcgtcccttcttgaggaattggcaaccctgcctcttccctcggttcgttgccctaccccccttgtttcccctttgtccgtctttctgctcgccccccgttgctctgcatctccctgtttcctctctcccatcccttcccatcacccgtattcctttccctccttttgcccttcccttcccctctttcatttcatcgcgcttccaccgcgctcctccatatcccctggtctccctgctttcttgccctcgctccttttggtcgcctcgatattcctccgttccgcccctctcgttccatctccgtgtctcactatgtatccacca

SEQ ID NO: 164547 - DNA, 1039 bp, Homo Sapiens
  misc_feature (889)..(899): n is a, c, g, or t
gggtggcgaattccgcacgagggtggcatctgagaggctggtcgtggactgtggttgggggaggtgggagctgttttaaccgtgtgccccctctcctgtgccggcgtgggcatcccccggggcagtggaacgcgggcgctcctccagcttccgagtccagccagcctgggcgcggggcgccgcccccgagacacccgaggagtccgttcctccctggttacgtggactgtggagctggtctcttgtggcctcagcgccgtgcggaggttgaagcgtacctgcggaggtcgcaccagggcgtgaggaggaggaggaagggcatgagccgagcttgaggaatccgtgctccaaactctacactcaagggtggcccttgggtagggtgaagatcccctgtctttatcctagttccacaccttggtgtgggttactgggtgcaggatgaactgtcgctcggaggtgctggaggtgtcggtggaggggcggcaggtggaggaggccatgctggctgtgctgcacacggtgcttctgcaccgcagcacaggcaagttccactacaagaaggagggcacctactccattggcaccgtgggcacccaggatgttgactgtgacttcatcgacttcacttatgggcgtgtctcttctgaggaactggatcgtgccctgcgcaaggttgttggggagttcaaggatgcactgcgcaactctggtggcgatgggctggggcaaaagtccttggaagtcctaccaaaagaagaattctcgctggcccatcttcagacgagggcatccccctgggaaaggtggaccggcccacggtgcctggtggggaaacccttgggccacgggagcaaggaagcgggaaaatcctgcccggggagaaaannnnnnnnnnnagcaacaccctggcgccaaaaaattcttccaccatctcccggggaatggggatgtcacctcggggccggggagcaccttttgcccaaaatgttgcccccacacacatatttgtggaaggggggggctaaaaccgcgtata

SEQ ID NO: 164548 - DNA, 918 bp, Homo Sapiens
ccccccctgcaccttcctgttcctagcaaccttccctaccaagcacccaaacagaggatttagaactagcagggtggacatcatctggttgtttctacttttctctgcctagcacaaaattgggagaaaactggagcctccatccgcagtcacacgtgtacagatctggggattcggatgtaggctttttctaacttctctctcagaagcttctacagaaacccttccatctgtagcctcaagggcccacctccaagggaaggcttaggcaatgatcctgtttctaccaacactgcaccttatcccaggaacctgccctagacctccagagaccatattttctctccctccatttctacccagacctccaggcctccttctggaatcatagaaccgtacaattggaaggaattttagaggttttctagttggagttgtgtccaacagaattcattaacaccagcctgggcttgtttttcctcctccctctggacttttttcatcttttcctccacctcaaaaaatacttacacacagattcttcttgtacaggcatcaaaaccaactcctctgcccctaaggctgtgtccctgtggtctccagccacccctaccccagtcactcgccccttcctcatctctggaaatttggccaggcagtcccagaagactctggagtgacctcctttgccttaaaagcccacagataggcatgccccccgcccctgaatgagcagaagaagactgtatggtgatagggaaaagaaatgaaggtgactttcatggaagtttcatttctttttccccaattggaccaactgcctgtaacttttgggcctgggctgcaagggaccaatatttgggttactctcggaaccctttaaaaattaccggaactggggtcctaacagaaattctt

SEQ ID NO: 164549 - DNA, 352 bp, Homo Sapiens
ttcgcggccgcgtcgaccacggctgcggatgctgctcaaggccaagatggacgccgagcaggatcccaatgtacaggtggatcatctgaatctcctgaaacagtttgaacacctggaccctcagaaccagcatacattcgaggcccgcgacctggagctgctgatccagacggccacccgggaccttgcccagtacgacgcagcccatcatgaagagttcaagcgctacgagatgcttaaggaacacgagagacggcgttatctggagtcactgggagaggagcagagaaaggaggcggagaggaaactggatgctgcaacagctgccgtcgacgcggccgcgaatttagta

SEQ ID NO: 164550 - DNA, 900 bp, Homo Sapiens
accacactgccatgcctccctctgggccccgaggaaccctccttccgttgccgctgctgctgctgctcctgcttcgcgccgtgctggctgtccccctggagcgaggggcgcccaacaaggaggagacccctgcgactgagagtcccgacacaggcctgtactaccaccggtacctccaggaggtcatcgatgtactggagacggatgggcatttccgagagaagctgcaggctgccaatgcggaggacatcaagagcgggaagctgagccgagagctggactttgtcagccaccacgtccgcaccaagctggatgagctcaagcgacaggaggtgtcacggctgcggatgctgctcaaggccaagatggacgccgagcaggatcccaatgtacaggtggatcatctgaatctcctgaaacagtttgaacacctggaccctcagaaccagcatacattcgaggcccgcgacctggagctgctgatccagacggccacccgggaccttgcccagtacgacgcagcccatcatgaagagttcaagcgctacgagatgcttaaggaacacgagagacggcgttatctggagtcactgggagaggagcagagaaaggaggcggagaggaagctggaagagcaacagcgccggcaccgcgagcaccctaaagtcaacgtgccctggcagccaaagcccagttgaaagggaggtggtgggaagaaacttggatgggaactgggaacccccaaccaaggttttaaaccccccaaagaacccttcctttcaataacgtgggatggataattcccaaacgggttggaatggggggggcccctggggaaatggaaacccaggggaaaaacctgggaaaaaggggaaatctttccttttatcaccacgaaat

SEQ ID NO: 164551 - DNA, 571 bp, Homo Sapiens
ccctacaaccttcctgtacttctataaacaaatcctgtacattaataattttgttacggatcaaggattggagaaacacacacacaagacgcaccaaccgattctgcatatatttatccttaatctgttcacaagtagagatgcaatttgatatataaaggtgaataaattcaggaggtagatcaacagctgtagattagtcgaatttacaacttccattgaatgtaaagacatgtccatattgaccaggacagagaaatactcagtgatctggcttgactgcattaatttcagcaacatttctatagcgactaaagggttgttttccacaaggtcaggaagtttggctggggtgaggccaatatggtagacaagtatgaggtctttttccacctcaccaagtagctgtgtttgttggggagacggataaggggcttttgaaggctttggccattattcgtttgatctccacaccagtgctattcttaacacacatcgatatatcccactggatcgcgtgctcaggctccgtggggtttaaccaagcaagtacatcctcacaaatgtggag

SEQ ID NO: 164552 - DNA, 391 bp, Homo Sapiens
ccctgagcaccttcctgtacttggatatcgaaatttgaatctctttaagttattcagacttgtacacaaacttggaggatttgataatattgaaagtggagctgtttggaaacaagtctaccaagatcttggaatccctgtcttaaattcagctgcaggatacaatgttaaatgtgcttataaaaaatacttatatggttttgaggagtactgtagatcagccaacattgaatttcagatggcattgccagagaaagttgttaacaagcaatgtaaggagtgtgaaaatgtaaaagaaataaaagttaaggaggaaaatgaaacagagatcaaagaaataaagatggaggaggaaggaggaaggttggtagcggtacgaaggttgctacgg

SEQ ID NO: 164553 - DNA, 1823 bp, Homo Sapiens
gtgctggaggtggaatcaaattctcctgcagcactggcaggtcttagaccacacagtgattatataattggagcagatacagtcatgaatgagtctgaagatctattcagccttatcgaaacacatgaagcaaaaccattgaaactgtatgtgtacaacacagacactgataactgtcgagaagtgattattacaccaaattctgcatggggtggagaaggcagcctaggatgtggcattggatatggttatttgcatcgaatacctacacgcccatttgaggaaggaaagaaaatttctcttccaggacaaatggctggtacacctattacacctcttaaagatgggtttacagaggtccagctgtcctcagttaatcccccgtctttgtcaccaccaggaactacaggaattgaacagagtctgactggactttctattagctcaactccaccagctgtcagtagtgttctcagtacaggtgtaccaacagtaccgttattgccaccacaagtaaaccagtccctcacttctgtgccaccaatgaatccagctactacattaccaggtctgatgcctttaccagcaggactgcccaacctccccaacctcaacctcaacctcccagcaccacacatcatgccagggcgttgccttaccagaacttgtaaacccaggtctgccacctcttccttccatgcctccccgaaacttacctggcattgcacctctccccctgccatccgagttcctcccgtcattccccttgggttccagagaagctcttctgcagcaagctcaggagagctgctgtcttccctcccgcccaccagcaacgcaccctctgaccctgccacaactactgcaaaggcagacgctgcctcctcactcactgtggatgtgacgccccccactgccaaggcccccaccaccgttgaggacagagtcggcgactccaccccagtcagcgagaagcctgtttctgcggctgtggatgccaatgcttctgagtcaccttaactttgaaccattctttggaattggcgtggtatatttaaccacgggagcgtgtctggaaacgcaaactatcattaatttcatactagtttgtaccgtatctgtaggcatcctgtaaataattccaaggggaaaactaaaacgaggacgtgggttgtatcctgccaggttgagtggggctcacacgctagggtgagatgtcagaaagcgcttgtattttaaacaaccaaaaagaattgtaagggtggcttgctgccaggcttgcactgccgttcctgggggtgtgcatcttcggaaaaggtggtgccggggcgtccactaggtttcctgtccccctgctgctccttccgtaagaaaatgaaatattctatgcctaatactcacacgcaacatttcttgtactttgtaagtcgtttgcgagaatgcagaccacctcactaaactgtaaacggtaaagagatttttacttttggtctccgtgagtcgcatctctactaaggtttacacaggaattccacctgaagacttgtgttaaagttctacagcgcgcactgttaactgaacgtctttttcttcagcctatacgcggatccttgttttgagctctcagaatcactcagacaacattttgtaactgctgctgttgctttctacatacaccttataaagtgacatttcaaaagaaataaggtgccacagttttaaaccagaaggtggcactctgtggctccttgtagtattatagctatactgggaaagcatagatacagcaataaagtacaggaaggtaaggaaaggttgctagg

SEQ ID NO: 164554 - DNA, 568 bp, Homo Sapiens
  misc_feature (66)..(66): n is a, c, g, or t
  misc_feature (71)..(71): n is a, c, g, or t
  misc_feature (85)..(85): n is a, c, g, or t
  misc_feature (150)..(150): n is a, c, g, or t
  misc_feature (185)..(185): n is a, c, g, or t
  misc_feature (222)..(222): n is a, c, g, or t
  misc_feature (290)..(290): n is a, c, g, or t
  misc_feature (332)..(333): n is a, c, g, or t
  misc_feature (471)..(471): n is a, c, g, or t
  misc_feature (488)..(488): n is a, c, g, or t
  misc_feature (536)..(536): n is a, c, g, or t
  misc_feature (540)..(540): n is a, c, g, or t
ctgatcgacggatcaagggttccccggtgatgtcatctttcatgggctcttttggagggttgaacnggggngtggtaggaacggncactggttggggtgaatcagccttcctgtgactcttcggatcagcagagagctgggatgctgaantcaatcacagaatcaagcttctctttcctcttctncatgaggtcatcgagcatttctgcctgcctcacagtncgagggaagccatccggaagaaaaccatttttgcacaagggggtctccaaattcttctcaatgagctncactaccatttcatcaccaccaacaccactagtggtgctggnngtgatgggagaaactattggatggtgaagcgggagagcttgagggtgagctacaaaagatatgaaggactggaatttttactgaacgtggaagcatagaggctgctgctcaactggggaatgtgccaaagtagaaganactttaggaactaaagncaacaagttttcactggtgaggccaaagaagaagttcaacgtttaaanttanaatatgcttccctaaagcggagggatgg

SEQ ID NO: 164555 - DNA, 790 bp, Homo Sapiens
gcgaactggtggcagtgagagacttcggcggacatggctcccagcgtgccagcggcagaacccgagtatcctaaaggcatccgggccgtgctgctggggcctcccggggccggtaaagggacccaggcacccagattggctgaaaacttctgtgtctgccatttagctactggggacatgctgagggccatggtggcttctggctcagagctaggaaaaaagctgaaggcaactatggatgctgggaaactggtgagtgatgaaatggtagtggagctcattgagaagaatttggagacccccttgtgcaaaaatggttttcttctggatggcttccctcggactgtgaggcaggcagaaatgctcgatgaccttcatggagaagaggaaagagaagcttgattctgtgattgaattcagcatcccagactctctgctgatccgaagaatcacaggaaggctgattcaccccaagagtggccgttcctaccacgaggagttcaaccctccaaaagagcccatgaaagatgacatcaccggggaacccttgatccgtcgatcagatgataatgagaaaggccttgaaaatccgcctgcaagcctaccacactcaaaccacccactcataagagtactacaggaaaccgggggatccactccgccatcgattgcatcccagacccccgatgtcgtgttcgcagcatcctagcagccttctccaaagccaccatgtaaagacttgggttatgttatctaatgttgggttccagaaggcaattcttttccatcc

SEQ ID NO: 164556 - DNA, 976 bp, Homo Sapiens
ctcccagcgtgccagcggcagaacccgagtatcctaaaggcatccgggccgtgctgctggggcctcccggggccggtaaagggacccagttggagaaactgaagtttgaatggcttgttctctaggctacatagcaagtaatttacagagcttgcatctgaatgactccaaagctcctgctctttctgctgctatctactgccccaggcacccagattggctgaaaacttctgtgtctgccatttagctactggggacatgctgagggccatggtggcttctggctcagagctaggaaaaaagctgaaggcaactatggatgctgggaaactggtgagtgatgaaatggtagtggagctcattgagaagaatttggagacccccttgtgcaaaaatggttttcttctggatggcttccctcggactgtgaggcaggcagaaatgctcgatgacctcatggagaagaggaaagagaagcttgattctgtgattgaattcagcatcccagactctctgctgatccgaagaatcacaggaaggctgattcaccccaagagtggccgttcctaccacgaggagttcaaccctccaaaagagcccatgaaagatgacatcaccggggaacccttgatccgtcgatcagatgataatgaaaaggccttgaaaatccgcctgcaagcctaccacactcaaaccaccccactcatagagtactacaggaaacgggggatccactccgccatcgatgcatcccagacccccgatgtcgtgttcgcaagcatcctagcagccttctccaaagccacatgtaaagacttggttatgtttatctaatgttgggtccaagaaggaatttctttccatccctgtgaggcaatgggtgggaatgataggacaggcaaagagaagcttcctcaggctagcaaaaatatcatttgatgtattgattaaaaaagcactggctgtgactgtacac

SEQ ID NO: 164557 - DNA, 2474 bp, Homo Sapiens
  misc_feature (1918)..(2071): n is a, c, g, or t
ccacgcgtcggcgaactggtggcagtgagagacttcggcggacatggctcccagcgtgccagcggcagaacccgagtatcctaaaggcatccgggccgtgctgcgtggggcctcccggggccggtaaagggacccaggcacccagattggctgaaaacttctgtgtctgccatttagctactggggacatgctgagggccatggtggcttctggctcagagctaggaaaaaagctgaaggcaactatggatgctgggaaactggtgagtgatgaaatggtagtggagctcattgagaagaattggagacccccttgtgcaaacaatggttttcttctggatggcttccctcggactgtgaggcaggcagaaatgctcgatgacctcatggagaagaggaaagagaagcttgattctgtgattgaagttcagcatcccagactctctgctgatccgaagaatcacaggaaggctgattcaccccaagagtggccgttcctaccacgaggagttcaaccctccaaaagagcccatgaaagatgacatcaccggggaacccttgatccgtcgatcaggatgataatgaaaaggccttgaaaatccgcctgcaagcctaccacactcaaaagcaccccactcatagagtactacaggaaacgggggatccactccgccatcgatgcatcccagaaccccgatgtcgtgttcgcaagcatcctagcagccttctccaaagccacatcctagtatcagaaggccaggcgagactgcaacactgctcatcaccccgcggcgtgatccctgctcttaggtgctgggcagaggggaagggtggtcagggtgaggatggtgagggagggctggtgaggggctcagaggaatacttggaacaacagcagtgttattgtagtgtggcagtttcttttatacataggtgagagtttttaaagtgtaagggaaaaattaattttttaaaaaacaccatgcttggagggtgggggtagaaatagacacaatattatttctaaggaatcgggttttcatttactctggactggtgaaaatattttttaaagccagtgctctaagacctcagcttttatctcagaaccccatgggttccagaccaagagtacaggaaatcaaattgttgtcctgtctgtctatagcttggaacagggagctttgattactgactccggttccacacactgtaagatcaaaaaaccatctccacatttgaaagagatgtaaggtgtattcatagggatggtggctcaacaaatcaagcaaactggaatcaaggggagggggaagggaatgaaatggaaagggaggctgattcccttcccctgacttaccactaatttactaggctacctactctcatgagtaacctctcacagctacccagcacatgccacaatcctatgctcttgccttcttttatctgcactgtgtgaagggactcttttaaataaatgagcaagtgtcctaagctatgtcatccaaagattgtcctttccattctcaaatcctgtgactgggatcactcaacagcactgtgatgtattattttcaatgaggtgcctttcttaactgaccaaatgctgccttgtttggcccctaaatcaataaaatatgttaaaatttgtatcccctgttgtggcattttttttagataatctaagctagaaaaatgacattgaattctggacctggctggaaggaaaagaagccctttcttgtcactggcagctgtgtggtagggaggtccaagtatgtgcatatgagataagcctgcaacctcttgaccttcagctcctatgcaggcttctcttgagcccagagacaaggcagcttggtctagtggagatagcactgtgcttggagttcaggggacctaggacaaatcccannnnnnnnnnnnnnnnnnnnnnnnnnnnnnnnnnnnnnnnnnnnnnnnnnnnnnnnnnnnnnnnnnnnnnnnnnnnnnnnnnnnnnnnnnnnnnnnnnnnnnnnnnnnnnnnnnnnnnnnnnnnnnnnnnnnnnnnnnnnnnnnnnnnnnnnnnggatccagatatacacagaaagatatctggcttcctgccaggctggataactgttgaatggacacttgtccatagtctagaaagccagtgcttctaatccttaagccagatcttgactaccttttcagttgcttctttaacactcttgtgtggcttctctgtgtgtcctagtttaaattcatttcctctccagcaaaagtgagcttagataatttctccaaactaaagctctcatgttttggaagggctgcctttgcaagtgaggtttctgagaaatgacttgtgttcccaaaacaagagggagctgggctggaagcaccactaattcttctttaggcatcttgttacagagagaggcagggtcttcactgacatattaaatccctgttccctggaacagccc

SEQ ID NO: 164558 - DNA, 602 bp, Homo Sapiens
cccacctgtcctccccgtacgagcccaaagcgaagcggacagtgataaaaatgcaaccatcttggaactaaggagccagctgcagatcagcaacaaccggaccctggaactgcaggggctgattaatgatttacagagagagagggaaaatttgagacaggaaattgagaaattccaaaagcaggctttagaggcatctaataggattcaggaatcaaagaatcagtgtactcaggtggtacaggaaagagagagccttctggtgaaaatcaaagtcctggagcaagacaaggcaaggctgcagaggctggaggatgagctgaatcgtgcaaaatcaactctagaggcagaaaccagggtgaaacagcgcctggagtgtgagaaacagcaaattcagaatgacctgaatcagtggaagactcaatattcccgcaaggaggaggctattaggaagatagaatcggaaagagaaaagagtgagagagagaagaacagtcttaggagtgagatcgaaagactccaagcagagatcaagagaattgaagagaggtgcaggcgtaagctggaggattctaccagttggctactcgggatcctctaga

SEQ ID NO: 164559 - DNA, 429 bp, Homo Sapiens
  misc_feature (326)..(326): n is a, c, g, or t
gggcaggggtttgggtgtgggggcacacaaagcaagcaccatctgggattggcacactggcagagccagtgtgttggggtatgtgctgcacttcccagggagaaaacctgtcagaactttccatacgagtatatcagaacacacccttccaaggtatgtatgctctgttgttcctgtcctgtcttcactgagcgcagggctggaggcctcttagacattctccttggtcctcgttcagctgcccactgtagtatccacagtgcccgagttctcgctggttttggcaattaaacctccttcctactggtttagactacacttacaancaaggaaaatgcccctcgtgtgaccatagattgagatttataccacataccacacatagccacagaaacatcatcttgaaataaagaagagttttggacaaaa

SEQ ID NO: 164560 - DNA, 1498 bp, Homo Sapiens
  misc_feature (1485)..(1485): n is a, c, g, or t
gtcgaccaggacccgcacagcaagcacctgtacacgcccgacatgttcacgcacgggatccagagcgccgcgcacttcgtcatgttcttcgcgccctggtgtggacactgccagcggctgcagccgacttggaatgacctgggagacaaatacaacagcatggaagatgccaaagtctatgtggctaaagtggactgcacggcccactccgacgtgtgctccgcccagggggtgcgaggataccccaccttaaagcttctcaagccaggccaagaagctgtgaagtaccagggtcctcgggacttccagacactggaaaactggatgctgcagacactggacgaggagccagtgacaccagagccggaagtggaaccgcccagtgcccccgagctcaagcaagggctgtatgagctctcagcaagcaactttgagctgcacgttgcacaaggcgaccactttatcaagttcttcgctccgtggtgtggtcactgcaaagccctggctccaacctgggagcagctggctctgggccttgaacattccgaaactgtcaagattggcaaggttgattgtacacagcactatgaactctgctccggaaaccaggttcgtggctatcccactcttctctggttccgagatgggaaaaaggtggatcagtacaagggaaagcgggatttggagtcactgagggagtacgtggagtcgcagctgcagcgcacagagactggagcgacggagaccgtcacgccctcagaggccccggtgctggcagctgagcccgaggctgacaagggcactgtgttggcactcactgaaaataacttcgatgacaccattgcagaaggaataaccttcatcaagttttatgctccatggtgtggtcattgtaagactctggctcctacttgggaggaactctctaaaaaggaattccctggtctggcgggggtcaagatcgccgaagtagactgcactgctgaacggaatatctgcagcaagtattcggtacgaggctaccccacgttattgcttttccaaggagggaagaaagtcagtgagcacagtggaggcagagaccttgactcgttacaccgctttgtcctgagccaagcgaaagacgaactttaagaacacagttgggaggtcacctctcctgcccagctcccgcacccttcgtttaagagttcagtcccacagaggccactggggttccaagtgggtggctgttcagaaagcagaacatactaagcgtgaggtatcttctttgtgtgtgtgttttccaagccaacacactctacagattctttattaagttaagtttctctaagtaaatgtgtaactcatggtcactgtgtaaacattttcagtggcgatatatccccttgtgagcttctcttgatgaaatttacatggtttccttgtgagactaaaatagcgttgagggaaatgaaattgctggactatttgtggctcctgagntgagtgattttgg

SEQ ID NO: 164561 - DNA, 1507 bp, Homo Sapiens
  misc_feature (1414)..(1414): n is a, c, g, or t
gaaaaagaaaagattccttctctatgggaaggtgaatggacagcatcagtcaatgtcaaggatgttcttatagctggaaacttgaattctcacagtaactggatattcaggccttgtaagagttgaatacctgccaggtggcctggaagaataccttaattgcaaaacaacaccgtgtctgctccagtcctaatttgaacacagacacaacaactgctgaagccgggaaagcataacagtagcttgcagggaaggcccgaggctgctgcagaggagcactgagtactgtagcttttgaggcctcagtcacagcagcgggcctggaagttttcacctcattttagttttccttgaataaaaccagaaacttctgaaagtttaggattaactgaatgtattatctcctggaacgttatgtttgtttcctttttatcagagaggagcagatacatgcctggctgcagccccttgacagctcattttctgattgtttcactaaatgagtttgctctctgataagacaactttctttttgctctgtctaatcctttgttattctttcagcttaaagcttttcaagccaggccaagaagctgtgaagtaccagggtcctcgggacttccagacactggaaaactggatgctgcagacactgaacgaggagccagtgacaccagagccgggaagtggaaccgcccagtgcccccgagctcaagcaagggctgtatgagctctcagcaagcaactttgagctgcacgttgcacaaggcgaccactttatcaagttcttcgctccgtggtgtggtcactgcaaagccctggctccaacctgggagcagctggctctgggccttgaacattccgaaactgtcaagattggcaaggttgattgtacacagcactatgaactctgctccggaaaccaggttcgtggctatcccactcttctctggttccgagatgggaaaaaggtggatcagtacaagggaaagcgggatttggagtcactgagggagtacgtggagtcgcagctgcagcgcacagagactggagcgacggagaccgtcacgccctcagaggccccggtgctggcagctgagcccgaggctgacaagggcactgtgttggcactcactgaaaataacttcgatgacaccattgcagaaggaataaccttcatcaagttttatgctccatggtgtggtcattgtaagactctggctcctacttgggaggaactctctaaaaaggaattccctggtctggcgggggtcaagatcgccgaagtagactgcactgctgaacggaatatctgcagcaagtattccggtacgaggctaccccacgttattgctttttccaaggaggaaagaaagtcagtgagcacaggtggaggcagagaacttggactcgntaacaccgcttttgttcctgagcccaagccaaagacgaaactttagggaccccagttgggaaggtcaccttctccttgtcccaggttccccga

SEQ ID NO: 164562 - DNA, 867 bp, Homo Sapiens
  misc_feature (312)..(322): n is a, c, g, or t
  misc_feature (485)..(496): n is a, c, g, or t
ccatccacttctccaggaggagtttgacaacatggtcacacagttgcaaagtgcacaaagctcaaggcacagagtagaagaaagttgtgaactgatgggggaaagttctagcaaaagcagagttagcattttcctttaacaagactttctaatgctaaacaaagaccaactcttttaaaaggggttgttttggttgtgggtgaaaaatactgtactgtaatgatctgcttggttttaaagcaaaagagatcctgacatgtgaaaccaatacaccaaaatgccaagtccacaaatgaacaaaacaagtgcttnnnnnnnnnnnttcttctgctcttatatttgtggaggaagctgctgattggtggctgtcagatttcacttagaaatggtcactttctgagatgctttttcctcacagaatctgtagataaactcattaaaagattgtcccatttcaaaatcacccccaagtctagcagcaacgnnnnnnnnnnnnagttttggttttaaaattacaaaccaagtaagaagtccaacatcctcttccatgaacagcttggtgacagagctcctgagtgtgtgcagcccccactgtgctctgaatacagtctctgcagctccagtgtgtcctcttttcaggaaggaaagcatattcaatacattcactatctgtaccccctggaacttgcacttgctgacgagctattataagccaactcatccccagctctcttccgggactggtcaccccttgtaaaaccattctgtataagttctctttgaaatttctgatcttgagcagcatattcagaaagttcagattccaccgccggagggagaatgtttggaataaattcgaacatagac

SEQ ID NO: 164563 - DNA, 418 bp, Homo Sapiens
caaccttcctgtactgtgtaggtgcagccagatccaggctttgcaatttgctgatgtaattgtgttatttggtgccagactaaattggattttacattttggactgcctccaagatatcagccagatgtgaagtttatccaggttgatatctgtgcagaagaattggggaataatgtaaagcccgctgttactttgctaggaaacatacatgctgtcactaagcagcttttagaggaacttgataaaacaccatggcagtatcctccagagagcaagtggtggaaaactctgagagaaaaaatgaagagcaatgaagctgcatccaaggaactagcttctaaaaaatccctgcctatgaattattacacagtattctaccatgttcaagaacaactacctagagactgtttcgtggta

SEQ ID NO: 164564 - DNA, 873 bp, Homo Sapiens
agataagcccccgcggggcggagatttctaccttctgcactgactccccatcagaagatcgagttttatgcatcacagttaacatgtcagctggccctccaggcccccgcccccatcccgtccacgttgctgtgtcgtgaggtgcagcgggtcaccctgtggcccgtcctgtgacccatatttagccgtgtttgggactccgtgtcttcaatggtttgttagttgccattacaactttgtctgggtagagtttttgagtttttgcagttcagtatccctctgtctattcacacttcgtgttagtggtaactcagtttgtctttaaatagttacagaagggatacgtcatttgttaatgcttttgtgaagtgagttaaacgagctttctgtattttaatgctttagtgtttcagttttataagtgaagattttattttaaaaaccagtgggaaagagtggggggtttctttttatgtctgggtcattcaggcagtacatctgaattaagctgaatgtagacaaataaagaaaaacaaaactgcgcccgtcttaggcctgggtgtctgacccaccagcagtgcaatgggcaggtttccccactctattcctgctcttgggaaagcagcgtgggccatcaggatggtccctggtccttagagagggtccagttcaggcttctagacattttactcatgctcagcgaaggctggttcctggtcccctgggctgtgtagacccggtgtcccaccaggctccaggctcccaacatctacagaggggcttacagcgcacattctggtcttggggaacccattcaaaataggcttttctggtccccggatctggtgtagtctaagtaccagtgatttccct

SEQ ID NO: 164565 - DNA, 516 bp, Homo Sapiens
ctaatactttattggttacctctaggcctgtgtgcggctgggtgggcttgggggagggcgtcactattcagcttctaggtggaggcatgaaaaggccttggctagccctccagggtcccaaactgtggagtttggaggggcaggtctggcctttcctgggtcagcatagggcacccaggtgggggcacaggtggacacccagcacaggcacctaggcaggggcacaagctcactatccgttagccagcctaattgtgtttggagaaatattccttgctgtcatccacgttggggcttaatcgtgtcactgccaggcttcacagcagcgggacaaatttccccatgctcgtctgtgtacgggaaggcctggaccagccgcagagcctcatccacggagcgtcccacaggaaaatcataaaagtgatctggcaaggaaacccttgccatcgattaaaagaggccctgtaggaaatgcctcaagtgttttaacacgcgtaatcctcaaaaaaggttggt

SEQ ID NO: 164566 - DNA, 892 bp, Homo Sapiens
gaccgctccgctcgtccgctccctcccccgcgccgtgcacgtcttggttcgggccgggcataaaaggcttcgcggcccagggctcacttggcgctgagaacgcgggtccacgcgtgtgatcgtccgtgcgtctagcctttgcccacgcagctttcagtcatggcctccggtaacgcgcgcatcggaaagccagcccctgacttcaaggccacagcggtggttgatggcgccttcaaagaggtgaagctgtcggactacaaagggaagtacgtggtcctctttttctaccctctggacttcacttttgtgtgccccaccgagatcatcgcgttcagcaaccgtgcagaggacttccgcaagctgggctgtgaagtgctgggcgtctcggtggactctcagttcacccacctggcttggatcaacaccccccggaaagagggaggcttgggccccctgaacatccccctgcttgctgacgtgaccagacgcttgtctgaggattactggcgtgctgaaaacagatgagggcattgcctacaggggcctctttatcatcgatggcaagggtgtccttcgccagatcactgttaatgatttgcctgtgggacgctccgtggatgaggctctgcgggtggtccaggccttcccgtacacagacgagcatggggaaagcttgtcccgctgggcgggaagcctggcagtgacacgactaaaccccaaccggggatgacggcgaggaatattttctccctaacacatttgaggcggggttaccccataggcgcccctgtggccgccgggcgaagagggggacgaagtggggagggcacacacctgtgaacccgcaaggcgagaaggttacgccctattcgcaccacatccggctcaaccc

SEQ ID NO: 164567 - DNA, 908 bp, Homo Sapiens
cgccgtgcacgtcttggttcgggccgggcataaaaggcttcgcggcccagggctcacttggcgctgagaacgcgggtccacgcgtgtgatcgtccgtgcgtctagcctttgcccacgcagctttcagtcatggcctccggtaacgcgcgcatcggaaagccagcccctgacttcaaggccacagcggtggttgatggcgccttcaaagaggtgaagctgtcggactacaaagggaagtacgtggtcctctttttctaccctctggacttcacttttgtgtgccccaccgagatcatcgcgttcagcaaccgtgcagaggacttccgcaagctgggctgtgaagtgctgggcgtctcggtggactctcagttcacccacctggcttggatcaacaccccccggaaagagggaggcttgggccccctgaacatccccctgcttgctgacgtgaccagacgcttgtctgaggattacggcgtgctgaaaacagatgagggcattgcctacaggggcctctttatcatcgatggcaagggtgtccttcgccagatcactgttaatgatttgcctgtgggacgctccgtggatgaggctctgcggctggtccaggccttccagtacacagacgagcatggggaagtttgtcccgctggctggaagcctggcagtgacacgattaagcccaacgtggatgacagcaaggaatatttctccaaacacaattaggctggctaacggatagtgagcttgtgcccctgcctaggtgcctgtgctgggtgtccacctgtgccccccacctggggtgccctatgctgacccaggaaaggccagacctggcccctccaaactccacagtatgggaaccctggaagggctaggccaaagccctttctcatgccctccacccc

SEQ ID NO: 164568 - DNA, 907 bp, Homo Sapiens
  misc_feature (627)..(627): n is a, c, g, or t
  misc_feature (739)..(739): n is a, c, g, or t
  misc_feature (763)..(763): n is a, c, g, or t
  misc_feature (776)..(776): n is a, c, g, or t
  misc_feature (805)..(805): n is a, c, g, or t
gaccgctccgctcgtccgctccctcccccgcgccgtgcacgtcttggttcgggccgggcataaaaggcttcgcggcccagggctcacttggcgctgagaacgcgggtccacgcgtgtgatcgtccgtgcgtctagcctttgcccacgcagctttcagtcatggcctccggtaacgcgcgcatcggaaagccagcccctgacttcaaggccacagcggtggttgatggcgccttcaaagaggtgaagctgtcggactacaaagggaagtacgtggtcctctttttctaccctctggacttcacttttgtgtgccccaccgagatcatcgcgttcagaaccgtgcagaggacttccgcaagctgggctgtgaagtgctgggcgtctcggtggactctcagttcacccacctggcttggatcaacaccccccggaaagagggaggcttgggcccctgaacatccccctgcttgctgacgtgaccagacgcttgtctgaggattacggcgtgctgaaaacagatgagggcattgcctacaggggcctctttatcatcgatggcaagggtgtccttcgccagatcactgttaatgatttgcctgtgggacgctccgtggattgaggctctgncggcttggtccaggccttccagtgacaaaagacgagcatgggggaagttttgtcccgctggctggaagcctggcagtgacacgattaagcccaacgtggatgacagcaaggnaatatttctcccaacacaatttangctgggctacggnattagtgaagcttgtgccccctgccctangtgccctggtggctggggggtccaccctgtggccccccaccctgggggggcccctaatggctggacccccagggaaaaagggccagaaccttggcccccctc

SEQ ID NO: 164569 - DNA, 827 bp, Homo Sapiens
gggacttcacttttgtgtgccccaccgagatcatcgcgttcagcaaccgtgcagaggacttccgcaagctgggctgtgaagtgctgggcgtctcggtggactctcagttcacccacctggcttggatcaacaccccccggaaagagggaggcttgggccccctgaacatccccctgcttgctgacgtgaccagacgcttgtctgacgattacggcgtgctgaaaacagatgagggcattgcctacaggggcctctttatcatcgatggcaagggtgtccttcgccagatcactgttaatgatttgcctgtgggacgctccgtggatgaggctctgcggctggtccaggccttccagtacacagacgagcatggggaagtttgtcccgctggctggaagcctggcagtgacacgattaagcccaacgtggatgacagcaaggaatatttctccaaacacaattacgctggctaacggatagtgagcttgtgcccctgcctaggtgcctgtgctgggtgtccacctgtgcccccaccctgagtgccctatgctgacccaaggaaaggccagacctgccccctccaaactccacagtatggggaccctgggagggctaagcccaaggcccttctcatgccctccaacctaaaaagctgaaataagggacgcccctcccccaaggcccaccccaaccggtacacaggggcttaggaggtaaccacataaaagtcattagcgggaaagggtgcgcctcttatgcggcaaaacggacccagggtttttttcgcggctaaaaaggccgacgccctttggccggcccgcccttcg

SEQ ID NO: 164570 - DNA, 1012 bp, Homo Sapiens
  misc_feature (865)..(880): n is a, c, g, or t
  misc_feature (908)..(953): n is a, c, g, or t
ggacgcgtgggcgaccacgcgtccggttcagcaaccgtgcagaggacttccgcaagctgggctgtgaagtgctgggcgtctcggtggactctcagttcacccacctggcttggatcaacaccccccggaaagagggaggcttgggccccctgaacatccccctgcttgctgacgtgaccagacgcttgtctgaggattacggcgtgctgaaaacagatgagggcattgcctacaggggcctctttatcatcgatggcaagggtgtccttcgccaaaatcactgttaaatgatttgcctgtgggacgctccgtggatgaggctctgcggctggtcccaggccttccagtacacagacgagcatggggaagtttgtcccgctggctggaagcctggcagtgacacgattaagcccaacgtggatgacagcaaggaatatttctccaaacacaattaggctggctaacggatagtgagcttgtgcccctgcctaggtgcctgtgctgggtgtccacctgtgcccccacctgggtgccctatgctgacccaggaaaggccagacctgcccctccaaactccacagtatgggaccctggagggctaggccaaggccttctcatgcctccacctagaagctgaatagtgacgccctcccccaagcccacccagccgcacacaggcctagaggtaaccaataaagtattagggaaaggtgaacattaccggatcggggccacaacggactatagggcgcggcgccacggctcaccgtcaccccatcttccatcatgaaacccaccgacccgcggctccgtccccccccgcaacaactaatctacgcgccttttttttgttatagtggggcgnnnnnnnnnnnnnnnnaaaaaaatttttcaaaaaaattttggtnnnnnnnnnnnnnnnnnnnnnnnnnnnnnnnnnnnnnnnnnnnnnnccatactccggccccccccagaaaaaaccccggggacgaaaaaacaagggggcggggag

SEQ ID NO: 164571 - DNA, 1015 bp, Homo Sapiens
  misc_feature (706)..(706): n is a, c, g, or t
  misc_feature (801)..(801): n is a, c, g, or t
caggctggtacggtccgaattccgggatatcgtcgacccacgcgtcggtgctgggcgtctcggtggactctcagttcacccacctggcttggatcaacaccccccggaaagagggaggcttgggccccctgaacatccccctgcttgctgacgtgaccagacgcttgtctgaggattacggcgtgctgaaaacagatgagggcattgcctacaggggcctctttatcatcgatggcaagggtgtccttcgccagatcactgttaatgatttgcctgtgggacgctccgcggatgaggctctgcggctggtccaggccttccagtacacagacgagcatggggaagtttgtcccgctggctggaagcctggcagtgacacgattaagcccaacgtggatgacagcaaggaatatttctccaaacacaattacgctggctaacggatagtgagcttgtgcccctgcctaggtgcctgtgctgggtgtccacctgtgcccccacctgggtgccctatgctgacccaggaaaggccagacctgcccctccaaactccacagtatgggaccctggagggctaagccaaggccttctcatgcctccacctagaagctggaatagttgacgccctcccccaagcccaaccagcccccacacaggcccttaaaaggaaaccaattaacataattacgggaaaaagggggccctntccctcatcctctcccatactccataccttcatttttgtcccggccggccctcgggcccctccgaaagaagctttttttaagaacccattccgtnttgggcggcgcgcggggcccccattaaggcgcaaagcggcacccatggggccactaaacctgggtcctccatagggaaaaatcccgggggcccagggaactaaggggctttgggaaattcctctccccaaataaataaacaagcctcccggggggacaaaaccctaaggggctcccggcaaacaaaattccccaaaaggggggagttcccggag

SEQ ID NO: 164572 - DNA, 913 bp, Homo Sapiens
gggcacgtcttggttcgggccgggcataaaaggcttcgcggcccagggctcacttggcgctgagaacgcgggtccacgcgtgtgatcgtccgtgcgtctagcctttgcccacgcagctttcagtcatggcctccggtaacgcgcgcatcggaaagccagcccctgacttcaaggccacagcggtggttgatggcgccttcaaagaggtgaagctgtcggactacaaagggaagtacgtggtcctctttttctaccctctggacttcacttttgtgtgccccaccgagatcatcgcgttcagcaaccgtgcagaggacttccgcaagctgggctgtgaagtgctgggcgtctcggtggactctcagttcacccacctggcttggatcaacaccccccggaaagagggaggcttgggcccccctgaaacatccccctgcttgctggacgtgaccaaaacgctttgtctggaggattaccggcgtgcttgaaaaacagatgaaagggcattggccctaccaggggggccctcctttttattcatccgcatgggccaaaaggggtgggttccctttccgccccaagaatccacctggggttaaattggaatctctggccttggggggggaacacccttcccccggggaattgaaaggctttctgtccggccttggggcccacagggcccttccccgttacacccttaaccgagacccttgggtcggaaatttttgggcccccccctctgggcctggaaaaaacccggggccagcgggacaccttatttcaaggcccccaacggggggaattgtaatcccccccgcgaatttttttcctccaaaaaccccaaatttaagggtggggcctaaaccgggaaaagggggagcctttggtgccccccctgccctaaaggcgt

SEQ ID NO: 164573 - DNA, 512 bp, Homo Sapiens
  misc_feature (387)..(387): n is a, c, g, or t
  misc_feature (432)..(432): n is a, c, g, or t
  misc_feature (479)..(479): n is a, c, g, or t
  misc_feature (496)..(496): n is a, c, g, or t
gcataaaaggcttcgcggcccagggctcacttggcgctgagaacgcgggtccacgcgtgtgatcgtccgtgcgtctagcctttgcccacgcagctttcagtcatggcctccggtaacgcgcgcatcggaaagccagcccctgacttcaaggccacagcggtggttgatggcgccttcaaagaggtgaagctgtcggactacaaagggaagtacgtggtcctctttttctaccctctggacttcacttttgtgtgccccaccgagatcatcgcgttcagcaaccgtgcagaggacttccgcaagctgggctgtgaagtgctggggcgtctcggtggactctcagtttcaaccacctgggctttggattcaacaaccccccggaaaagnaggggaaggctttgggccccctggaaacattccccttggctttgnttgaacgttgaaccagacggttgtttttaagggatttacgggcgttngttggaaaaaccagatnaaggggcatttcctta

SEQ ID NO: 164574 - DNA, 685 bp, Homo Sapiens
tactgaagaaatttcaatcaaccctcagaggaaaagcaacctaagcctacctttcctcctaaagcatttagctgcacagagtaactgaactttttcgaaacaagccctagattgactccatcagacatattttcctggactcagggctcccaagagggccagactacttcaccactctgcagaggacactgggcgggccacacctgattccagcccactccaactttacacttctccctctcccacccagaggggtaatgcctggtactgaattcccaaggcagcttccaatcaatggtgaaaatgatacatgggatataagctgctaccagcgcaattaaggtgagcactgtgtctcctcttcaaaggtgggatcaacagatgaggtacagagccgctgttgctatggcagtcactgatgacaaagccagggccatgggggcccttccattctccaaaacaataaaatcactcctagatcctatctaaaaggcaatgccactctccaaatgtacaaggaaagtgcttcagagcctctgccttgcgctccttttctgcaagtgaacaaagccaggaaagctgctctctgcattcggtaagtgtgctgtgaagttctttgggtcccagtctcctgggggctctataggctcaggagactagaggctgggtctacaggagtctgttc

SEQ ID NO: 164575 - DNA, 423 bp, Homo Sapiens
aacgaaaagcagatcatcctggaccttgctgtctataggtatatggatacctctttaatcgatgttgatgtgcaaccaacttacgtgcgagtaatgatcaaaggaaagccatttcagcttgtccttcctgcagaagtgaaacccgatagtagttctgctaaaagatctcagacaacgggtcatttggtcatctgcatgcccaaggtaggagaagtaatcacaggtggtcagcgagcattcaaatctatgaaaactacctcggacaggagcagagaacaaacaaatacaagaagcaagcacatggagaaactagaagtagaccctagcaagcactcattccctgatgtgactaacatagttcaagagaaaaacacacacccagaagacgacctgaacccaaaattataccaagtaaggaaggtt

SEQ ID NO: 164576 - DNA, 486 bp, Homo Sapiens
cggcatcgtatgtgtattccagcactttacagaaaaggcgggtggctctgacaagagcctttggtttctgggactcgggatcactgacggatttgactagtaatcatttcacttgcccttggccttatggtggctctccgtcttcttaggcagcaatacggcctggatgttgggcaggacaccgccctgcgcgatggtcacgcgacctagaagcttatttagctcctcgtcgttgcggatggctagctgcaggtggcgcgggatgatgcgggtcttcttattgtcgcgagccgcgttgccagctagctctaagatctcggccgtcagatattccagcaccgctgccaggtacacgtggagcgccggccccgactcgttcggagtagttgcctttgcggaggaggcggtgcacacggccaactggaaactgaagagcggccctggaagaacgcggttgagcttttacccaggctttgcagcgtgctt

SEQ ID NO: 164577 - DNA, 1238 bp, Homo Sapiens
  misc_feature (148)..(183): n is a, c, g, or t
  misc_feature (296)..(296): n is a, c, g, or t
tatctgagctcccggaaacgctatcaaacccaaaggctcttttcagagcccccctaccgtttcaaaggaagagctaacctcactgcttgtaggtagaaggaaaaaaggcactaagaaaatgtcttctgaggctgatctggtgtctcannnnnnnnnnnnnnnnnnnnnnnnnnnnnnnnnnnncaaagcttctcatttcagagagatgccaggatcctaagtgcctgccaaacttaccaattctaaggaataagtggatggatggcattactgattcctacattactgattgattnctcatccgcaaattgttttattaaaaacattctacatcatgtgtggggagataaggaggataaaatgaagagaaagaatattattgaggggaagttcttctgaatacaaaatgtgtttaattttttaaataagtattacattcacagggttcaaactatttgaagtaaagagattatatataaagaatccatccctcaacttacccaggtggtcacttttctttttcttgtgtatctgcccagtattcattcctgctgatatcagtcaataatgaatgatacgtgttttcttcacttttttcattcttgtcaggtagcagactgtgtagacttttctgcacttgcccttttcataacaatctatcttggagaactttccctatgagaacatacagagcttcctgtacacagttgcatgtactgcattatgcaaatgcattatattttatgtaacctgtccactgttggtaggcacttgagttgttttagtcttttgctatcaaacagttctgggatgattaaccctgatttactgcaaaattgaaattgctctgctattctgctggaatggtggtaagtgaactgaaaattccagtcactcttgggctagactcaacgttcttaaaaactatgtggccatcaccaaattagttattttgaaccttaatttcttcacctctaaaatggaggtaatacttaccttaagtggctatgagaatgaagatcatgtgtatgaattgttggtgctctaaagaacagcacaaataaaattattttcaaatttaattttaattgaactatgtgtaatttcttaattttgaaataattttatttgtaatgtgcataatcttatttaatgtataatgtatacattgtaatagaaacagatttcccaaattccagcctggcatgaggtaataaaaggtaatgcaaagggagagg

SEQ ID NO: 164578 - DNA, 140 bp, Homo Sapiens
gcggccgcctactactactatacggctgcgagaagacgacagaaggggcacctgtgaactcaaaaggctcttttcagagccacccacgttttcaaataaaagagttgttaatgctggccactctcagtccagcgttcccc

SEQ ID NO: 164579 - DNA, 570 bp, Homo Sapiens
ggggactttcccgatcgccaggcaggagtttctctcggtgactactatcgctgtcatgtctggtcgtggcaagcaaggaggcaaggcccgcgccaaggccaagtcgcgctcgtcccgcgctggccttcagttcccggtagggcgagtgcatcgcctgctgcgcaaaggcaactacgcggagcgagtgggagccggcgcgcccgtctacatggctgcggtcctcgagtatctgaccgccgagatcctggagctggcgggcaacgcggctcgggacaacaagaagacgcgcatcatccctcgtcacctccagctggccatccgcaacgacgaggaactgaacaagctgctgggcaaagtcaccatcgcccagggcggcgtcttgcctaacatccaggccgtactgctccctaagaagacggagagtcaccacaaggcaaagggcaagtgaggctgacgtccggcccaagtgggcccagcccggcccgcgtctcgaaggggcacctgtgaactcaaaaggctcttttcagagccacccacgttttcaaataaaagagttgttaatgctgaaaa

SEQ ID NO: 164580 - DNA, 411 bp, Homo Sapiens
gcgagccgcgtctgaaagtcctgggctaagcaccacgccgggggggtaccagacaccccggctgcagctgccgagggcctcactcaccttcagggccgccggctcgtcggcctgtgactgcccacctcggccctgcgtcagagcggaaggccaagtcttccagaaggtgctgcggcctccccgcagccccttgaggcgactcgggatggggcggctgagtcacgaacgccgaggcggccaggtgcggcgccgcggccagccccccggcaggctcgggtcttccgcgccacggaggtccccgaagagcgcccaagccgcatccggaaggcccgaaccctaccggaaggcggacggcggacagggcagggccgagagccgacgcggcaggcggtgcgggacaggagcgggggc

SEQ ID NO: 164581 - DNA, 1076 bp, Homo Sapiens
  misc_feature (670)..(854): n is a, c, g, or t
  misc_feature (909)..(918): n is a, c, g, or t
  misc_feature (950)..(1013): n is a, c, g, or t
ggggcggccgtaaagagtttgtagaggcagttcgggtgcggtacgttgcattccggtaccggacgccgagagcggtttgtctccgtctctggagttgtaggcgagaggtgatcatgtccggtcgcgggaaacagggcggcaaagtgcgagcaaaggccaaatcccgctcctcccgcgcgggcctgcagttcccggtgggccgagtgcacagactgctgcgcaaagggaactacgcggagcgagtgggcgccggggcgccggtgtacctggcggcggtgttggagtaccttacggcggagatcctggagctggctggcaacgccgcgcgtgacaacaagaagaccaggataattccccgccacctgcagctcgccatccgcaacgacgaggagttaaacaagctgctgggcaaagtgaccatcgctcagggcggcgtcctgcccaacatccaggccgtgctgctgcccaagaagacggagagtcagaagacgaagagcaaatgaccctgacgccgccctcagggagctggctcccccagcaaaggcccttttcatggtcgtcccgcaatgcttttgaatgtgctggatgtcatggagggccggtgacatctagcggggaggtgggcggcgagggtcccggcgggagccaataaagttggtgaaaatcgttnnnnnnnnnnnnnnnnnnnnnnnnnnnnnnnnnnnnnnnnnnnnnnnnnnnnnnnnnnnnnnnnnnnnnnnnnnnnnnnnnnnnnnnnnnnnnnnnnnnnnnnnnnnnnnnnnnnnnnnnnnnnnnnnnnnnnnnnnnnnnnnnnnnnnnnnnnnnnnnnnnnnnnnnnnnnnnnnnnnnnnnnntttttttgtgggcccccccgccccaaaaaaatttttaaaaactctcttttggggnnnnnnnnnnggaagaaaagaatttgggacccactctttttnnnnnnnnnnnnnnnnnnnnnnnnnnnnnnnnnnnnnnnnnnnnnnnnnnnnnnnnnnnnnnnncccctctttcaaaaaaatagaaagggggtgtggaagggtttatgcgtccatcccaaaagggaa

SEQ ID NO: 164582 - DNA, 1588 bp, Homo Sapiens
  misc_feature (415)..(426): n is a, c, g, or t
  misc_feature (665)..(674): n is a, c, g, or t
  misc_feature (688)..(688): n is a, c, g, or t
ttatttccgcggggggttttcgcaatcccacacaggccccccctttttttgggggagaaaaagggggcctctttcccccaatagttcttgcgggccccaagaaaaaaacccctctttttataatggggaaatttttttgccagaacccacggtcttttttgttgtccgaaattttaaaagttggtgcccccagggcgggacccgggggggccccctttaaaattctcccgagtattattcgggagaggcttcttcgccccttttgagggcgttccccccctggtcttggaattaaagaggattcccccccggtttaaaattggagcccccctccccacggaaaattctcccccccttttgtcgggggaatttttggttttcccaagaaaaaacccggttttcccggggtttttgnnnnnnnnnnnngcggggggcccggcttttttttcgctatattttcggggtgggagaggaaaatttccccaagagcccccctttacggtctcaagtgaacccccaggggtttttttctcttagggggaaaaaccaggttaatgggtcccatggtttccccttttcccttaacgggggccccggcggcgcccaaaaaggaatgggttttagaaaagcttcttcgaggggccgagggcggcccgaccaagggnnnnnnnnnnccttctagggttcnacgtttggagatcataaatacttttaatatcagataaatccttaagaaattgccttctgtacttgatgaccacacgggagccttgctagagtcaagagaacttgtcactagtaattatgaagacacctttacggtgagcgttattaaaaccctactagaggttttgggtgggactcaagagcaaggggtggccacctgtggacgagggttccctgttgttaacagaacacgttgcccacctcgcaagtatgcagcccaatcagtccccagggtctcggttcccgttgcgcccttccccatggccactgcgctcattcatgagcatagggtgatcaggcctccgccctataaagaactgcaggaacagtgcggctcttttctcgagatggtaggtggctctgaaaagagcctttatgtccatcaaaggggccccgggggcggcgggcggcctcacttgcccttggccttgtggtgactctccgtcttcttaggcagaagcacggcctggatgttaggaaggacgccaccctgagcaatggtcacccggcccagcagcttgttgagctcctcgtcgttgcggatggccagctgcaagtggcgcgggatgatgcgagtcttcttgttgtcgcgagccgcgttgccggcaagctccaggatctcggcagtcaagtactcgaacaccgccgccagatacaccggcgcgccggccccaacccgctccgaatagttgcccttacggagcaaccggtgcacgcggcccaccgggaactgcagaccagcgcgagaagagcgcgacttagccttggcgcgagccttgccaccctgcttaccacgaccagacatttccgagtcaaggaaaaaagacaacggcaaccgaaaagcgagactaaaaacaagccc

SEQ ID NO: 164583 - DNA, 424 bp, Homo Sapiens
aaatgtgacatggaggccaagaggaaggtgcagaaggagcaggccgataagtggctcgagagcacggaatccgatttttcgaaactagtgctaaatccagtatgaatgtggatgaggcttttagttccctggcccgggacatcttgctcaagtcaggaggccggagatcaggaaacggcaacaagcctcccagtactgacctgaaaacttgtgacaagaagaacaccaacaagtgctccctgggctgaggaccctttcttgcctccccaccccggaagctgaacctgagggagacaacggcagagggagtgagcaggggagaaatagcagaggggcttggagggtcacataggtagatggtaaagagaatgaggagaaacaaggagaaaagggaaaagcagaaagggttcagaaaatgagacgg

SEQ ID NO: 164584 - DNA, 617 bp, Homo Sapiens
  misc_feature (70)..(70): n is a, c, g, or t
  misc_feature (299)..(426): n is a, c, g, or t
tttccaaacttatctaaaacctagtttaatgtggatgaggcttttagttcctttgcctggaacatctgcntcatgtcagaaggccggagatcaggaaacggcaacaagcttccatttactgacctgaaaacttgtgacaagaagaacaccaacaagtgctccctgggctgaggaccctttcttgcctccccaccccggaagctgaacctgagggagacaacggcagagggagtgagcaggggagaaatagcagaggggcttggagggtcacataggtagatggtaaagagaatgaggannnnnnnnnnnnnnnnnnnnnnnnnnnnnnnnnnnnnnnnnnnnnnnnnnnnnnnnnnnnnnnnnnnnnnnnnnnnnnnnnnnnnnnnnnnnnnnnnnnnnnnnnnnnnnnnnnnnnnnnnnnnnnnngagatgcctcaggcttcagaccttacctgggttttcagggcaaacataaatgtaaatacactgatttattctgttactagatcaggttttagggtcctgcaaaaggctagctcggcactacactagggaatttgctcctgttctgtcacttgtcatggtctttcttggtattaaaggccaccatttgcaca

SEQ ID NO: 164585 - DNA, 1019 bp, Homo Sapiens
gggggtgtccgccatggccaaagcctacgaccacctcttcaagttgctgctgatcggggactcgggggtgggcaagacttgtctgatcattcgctttgcagaggacaacttcaacaacacttacatctccaccatcggaattgatttcaagatccgcactgtggatatagaggggaagaagatcaaactacaagtctgggacacggctggccaagagcggttcaagacaataactactgcctactaccgtggagccatgggcattatcctagtatacgacatcacggatgagaaatctttcgagaatattcagaactggatgaaaagcatcaaggagaatgcctcggctggggtggagcgcctcttgctggggaacaaatgtgacatggaggccaagaggaaggtgcagaaggagcaggccgataagttggctcgagagcatggaatccgatttttcgaaactagtgctaaatccagtatgaatgtggatgaggcttttagttccctggcccgggacatcttgctcaagtcaggaggccggagatcaggaaacggcaacaagcctcccagtactgacctgaaaacttgtgacaagaagaacaccaacaagtgctccctgggctgaggaccctttcttgcctccccaccccggaagctgaacctgagggagacaacggcagagggagtgagcaggggagaaatagcagaggggcttggagggtcacataggtagatggtaacagagaatgcaggacaacaccaggagacacacagggaacaagcagaaaggacacaccacgcgaagagagacggacagggacgaagggacacggacctgaacttgacggacagtgaaagaaggccaggaggctaggacgagagggaggcaggaaagcgacggagagatgcctcaggcttcagaccttacctgggtttcagggcaaaacattaatgtaaatacactggattatctgttactagatcaggtttagggtcctgcaaaaggctaccggactacc

SEQ ID NO: 164586 - DNA, 728 bp, Homo Sapiens
tgatatatattatagccgatggcagtattaagtaaggtcgtggattatgatttgatcagccgtatagaattatgatgtacgtcactatgttgagattcttgtcatggccgacttctcgagagtcaaacagcatgactagagcgcatggctcaggcgtgcactccccgaacttccccactatacaggtggtagtgcaaccatttctccatccagttcaaactcttctgtcccatccgttgaaaaaagataagttagtggtttccatggagactcttcaaggcaggatggatagagtttccccacagtgcatcgaaaatctctccccaagtcccacagtacacgttcagatatatgctgccgcagagaccaccggtcaagttccaggtcatattggtaggtgacatatttagctcgctcatttaagtgggtttctcgcataaacacacatagagaatttgagatcacaacagctctaacacaggggtcagagtacctcttagcagggatgttggctgccattctccactcatttttattcacatcataaatttccacagttactgaagacccatctacagtgccagaggggagtcttatgccggaattggtagcaatatgcaaccctccaatatagaaaattttatcaccaaaagctgcagctgaagcaaaggacctactagtctgtctcatggccatttctacccatgagtcagacttggaaaataaca

SEQ ID NO: 164587 - DNA, 433 bp, Homo Sapiens
agctcgctcctagcacttcttaccctacaaccttccgtacttcaatcccaaccttaaaacccagatgccaaagaaatcttcctaatgtcacctatcccacattggtctcctatttcctagaattcccaaagccattaactattgcttgtgtccacagtcttaaccccttgacaatactcatctactgtaactttggtgtttgtctctatacctggtaggatagagcttacagctttatttttatttgaatagccttttcacagaacctgagtcatgaacaagcactaacccgattctctgaggccatttaagtttatagtctgaaacaccaacacaaaaacctcactcatttactttctaggccttcaaactagaaacacaggtcttacctttagacattttatagtacaggaagtgctaggggtgccggcta

SEQ ID NO: 164588 - DNA, 382 bp, Homo Sapiens
ctgttgcgaggaatgctgaggcttctgcattcttcacgtagttctcgagccttggttttcagctccatcagctcctttaagcacttctctgtattggttattctagttatacattcttctaaatttttttcaaagtttccaacttctttgcctttggtttgaatgtcctcccgtagttcagagtaatttgatcgtctgaagccttcttctctcagctcgtcaaaatcattctccatccagctttgttccattgctggtgaggaactgcgttcctttggaggaggagaggcgctctgcgttttagagtttccagtttttctgttctgttttttccccatctttgtgattttatctacttttggtctttgatgatggtgatgta

SEQ ID NO: 164589 - DNA, 661 bp, Homo Sapiens
gttattacgacacagaacacaaatagcttaaaacacaccatagtgtttatctccacaaaacagacaccagacaccgacatgagcacatctggcctggccagctgactcagaaccatcatataagaccagtacatctgcagaggaggccacagcggacccattctctctctcctaactcatataataaatattattatagattttcttagcaaactaggggacaacttacagaccccacctctcccagtcagccagtgtctgcagggtttcaggatttggggtaggaaacagaagatctcacacatgtcgtgctgattttaaataaggcatctgtctctgagacacctgggagagcacagccaccttcctcacggtgcctgcctgtctcttccggaagtcgcctctgcttgccacatgatgctggtgtaaccacaaaagatccaggacttctcgatgactgcagaagtacaggtgctccttacacacgagtacaggcgctcccacagacaatggtaaagattttcacttggggaacaggagtgtgaggtttgttaccgcctgcgacctacacctggccgactccaggggaaaccgcgggagtcgctgcagggagcacctggtctgctctcctcctcctcctccaccgcctatccagtgcccc

SEQ ID NO: 164590 - DNA, 1199 bp, Homo Sapiens
  misc_feature (802)..(802): n is a, c, g, or t
gggagtggtcgctgtggtttcagctccctccacactgggataggcagagtatgagcattggcacatgctgttttcctggaacaaacagggaagcagagactttcaaggaacaaggaaatgcatactatgccaagaaagattacaatgaagcttataattattatacaaaagccatagatatgtgtcctaaaaatgctagctattatggtaatcgagcagccaccttgatgatgcttggaaggttccgggaagctcttggagatgcacaacagtcagtgaggttggatgacagttttgtccggggacatctacgagagggcaagtgccacctctctctggggaatgccatggcagcatgtcgcagcttccagagagccctagaactggatcataaaaatgctcaggcacaacaagagttcaagaatgctaatgcagtcatggaatatgagaaaatagcagaaacagattttgagaagcgagattttcggaaggttgttttctgcatggaccgtgccctacaatttgcccctgcctgccatcgcttcaaaatcctcaaggcagaatgtttagcaatgctgggtcgttatccagaagcacagtctgtggctagtgacattctacgaatggattccaccaatgcagatgctctgtatgtacgaggtctttgcctttattacgaagattgtattgagaaggcagttcagtttttcgtacaggctctcaggatggctccctgaccacgagaaggcctgcattgcctgcagaaatgccaaagcactcaaagcaaagaaagaagatgggnaataaagcatttaaggaaggaaattacaaactagcatatgaactgtacacagaagccctggggatagaccccaacaatataaaaacaaatgctaaactctactgtaatcggggtacggttaattccaagcttaggaaactagatgatgcaatagaagactgcacaaatgcagtgaagcttgatgacacttacataaaagcctacttgagaagagctcagtgttacatggacacagaacagtatgaagaagcagtacgagactatgaaaaagtataccagacagagaaaacaaaagaacacaaacagctcctaaaaaatgcgcagctggaactgaagaagagtaagaggaaagattactacaagattctaggagtggacaagaatggctctgaggacg

SEQ ID NO: 164591 - DNA, 691 bp, Homo Sapiens
gggggtcccggcggtaagatggcggctgccgcggagtgcgatgtggtaatggcggcgaccgagccggagctgctcgacgaccaagaggcgaagagggaagcagagactttcaaggaacaaggaaatgcatactatgccaagaaagattacaatgaagcttataattattatacaaaagccatagatatgtgtcctaaaaatgctagctattatggtaatcgagcagccaccttgatgatgcttggaaggttccgggaagctcttggagatgcacaacagtcagtgaggttggatgacagttttgtccggggacatctacgagagggcaagtgccacctctctctggggaatgccatggcagcatgtcgcagcttccagagagcccctagaactggatcataaaaatgctcaggcacaacaagagttcaagaatgctaatgcagtcatggaatatgagaaaatagcagaaacagattttgagaaccgagattttcggaaggttgttttctgcatggaccccgccctagaatttgcccctgcctggccatcccttcaaaatccctcaagggcagaatgcttaccaatgctgggctcgttatccagaaagcacagtcctgtgggttaatgaacttttcttacaaatggaattccccccaatgccaaaggcccccggaaagggaaccaagggccc

SEQ ID NO: 164592 - DNA, 1332 bp, Homo Sapiens
  misc_feature (1259)..(1259): n is a, c, g, or t
cctgatcgtcgaccacgcgtcgacagtatgtgctgacagccctggctgctcgtgccaagcttcgagcctggaatgatgtagatgccctattcaccacaaagaactggctgggctataccaagaagagagcacccattggcttccatcgggttgtcgaaattttgcacaagaacaatgcccctgtgcagatattacaggagtatgtcaatctgatggaagtatgtggacacgaagttgaacttagccactaagttcaagtgccatgatgtcgtcattgatacctaccgggacctgaaggatcgtcaacagttgctagcatacaggagtaaggtagataaaggatcagcagaggaggagaagattgatgctcttctcagcagctcgcaaattcgatggaagaattaagtggcattgactaccttgaagcctgcctcatttcctcctctcctgcctgtgaaagcagagagagctcttctttgggagagctgcggcatcacatcgcttgggcccattacccatgggcagtgccagctactcttgacacagataacttcagactgatcttctgtccaaggaacatcatctgaggatcgagatctaaagctttgagtcatgagaatgattctctccacctggtgctcatatgaaggtgggagtgatttctagattgggcccctactgggtaagatctcacttggtctgagaaaagtgactgctccagaaaggaagaggtatgggagtcatagggtgtgctactgcattccactcagctaattatgatccaggacttggcgctggacattggcagttctgctctgaatgaagtcagaacagaaccaaaatggcctcaggaaggaatgccagtgtttcccaagacctcctggagatgcactcacaccagactgcacagacccctccacattatgccacacacggcctagacgttgtgtttcctcagccattttccctctgctgccccagtttactctgtccaaaaccctaaggttcttctctcacgtgaacacagacgaccgtgcttgggtgatgagacatcccctttatctcttcctctactgctggccaagacccgtcactttataagaagctcagatgcagcagtgctggagagctctctctttatgcaaaaatctcatttccccaggagctttcagaagtttcacctgggctaaattcagcagcatttctgttaggatatttagatggaggttttattttcacacctggattcttgctctgtnaccaatatttgcccccctttctgtgactgaactgggtttttctgacatgcctagaactcctaataaaggtatt

SEQ ID NO: 164593 - DNA, 860 bp, Homo Sapiens
aaggaaccgctttacgagaaggccgcctttgttcggcctgcatttcagcgcatgtgtccaggatgtcctaaaattcgactcaggagtactgtagaggtcgttctgattgtacatgagcaccggcgaccccatgtgtcactgctgcagctgggaacaactttctgcaaactacctggtggtgaacttaacccaggagaagatgaacttgaaggactaaaacgcttaatgacagagatactgggtcgtcaggatggagttttgcaagactgggtcattgacgattgcattggtaactggtggagaccaaattttgaacctcctcagtatccatatattccgccgcatattacaaagcctaaggaacataagaagttgtttctggttcagcttcaagaaaaagccttgtttgcagtccctaaaaattacaagctggtagctgcaccattgtttgaattgtatgacaatgcaccaggatatggacccatcatttctagtctccctcagctgttgagcaggttcaattttatttacaactgaattcctgcgcagtggagaagtaaaagaagccgcttgtctctgtgagcacagctatatacagtgtagaataaatgtggtagaaaagtttttggtttatctcttttgcgatccctaaagtgccacctttctatggtttgaatagtaaaattaatatgaagaactagatagtggtgtaaacaaatgtgataatgtttatttactttcggttctgctcatacttttttgtacaacattgaaagaaacatggacttttttcatgtgaatgttctcattacaccttcctaaaattcttagaaaagacaacagaaagtagagatacaagg

SEQ ID NO: 164594 - DNA, 925 bp, Homo Sapiens
tttcttcccccccatttaatttctcccactgtaatattagctggtgctccacagagaccaagccggctttctttttacttcttccatggccgcaggaattcagttgtaaattaaaattgaacctgctcaccagctgagggaggactagaaatgatgggtccatatccttggtgcattgtcatacaattcaaaacaatggtgcagctaccaggcttgtaaattttaagggactgcaaacaaggctttttcttgaagctgaaccagaaacaacttcttatgttccttaggctttgtaatatgtgcaggaatatatggatactgaggaggttcaaaatttggtctccaccagttaccaatgcaatcgtcaatgacccagtcttgcaaaactccatcctgacgacccagtatctctgtcattaagcgttttagtccttcaacttcatcttctcctgggttaagttcaccaccaggtagtttgaagaaagttgttcccagctgcagcagtaacacatggggtagccggtgctcatgtacaatcagaaccccttctacagtcctcctcattccaattttatcaaattcttccctcatgcgctgaaatctggctgcaacagagctgtccttctcgtagaggggctcttttgtaccaaaagtataattggtaagagggtacaggttgatggtgcgctccagggtgaggggcttcgtctgctggatgtacttgttgccgaactgagtgaccccccggggccagccggtctgcgagcgattgggcggtaccacagacatgctggcgagctccggcgctgacggcgagcagaaagtggcaggcagggtagactttccccgtgcgggaagcggttatctgcaatcccctcagcggctactgcccgccattaacaggacagcgcaagaggaggagccc

SEQ ID NO: 164595 - DNA, 454 bp, Homo Sapiens
gtgcggtcccacaaatgaacactactgtgtagaccggttgttaattggtttctcatcatctaagtaacttccagttccgttggagctgggaagataggtcagattgtcttagtcaagatcctgaaagtcccaaaccgaagtttgtaagagaagttctagaaaaatgtatgaggttgtcttaccatcagcgtatattagatattgttcctcctaccttctcagctctgtgtcctgcaaacccaacctgcatttacaagtatggagatgaaagtagcaattctcttcctggacattctgttgccctctgtttagctgttgcctttaaaagtaaggcaaccaatgatgaaatcttcagcattctgaaagatgtaccaaatcctaaccaggatgatgacgacgatgaaggattcagttttaacccattgaaaatagaagtctttgtacagactctgct

SEQ ID NO: 164596 - DNA, 357 bp, Homo Sapiens
tatgctgactggttcgagcatgcaggcagctcttgtgattgacagcagccccactccccagacgtgagttggcagcaggtatcggaggagggacagctgctgacattatcacaggggacatctctcttcaaggcttgtgggtctggcaggctgaggtagagctggggccttctccatccagggcacctggtggggcccctgttcacaggtacccttctgcgtgtcacacgtaaaccccgcgggacagcagtgtatgtggtcctcacagcacacagcctgggtaagaagggcagcagccccaggcccccgactgtagacggcagcaggtatagccatctgggcagctcacctccatgt

SEQ ID NO: 164597 - DNA, 999 bp, Homo Sapiens
gaggataacatgttcccagctataaggactatatccatgacgtgttattggcacgaatgagtgttaaatatggagcatatagcatgaggtgactttcattgtcctaacctgagacagtattcctatattactctgtattgatcctgctagtccaagaatggacatgaagtgaacctatcgaggtgactgggataggaaggtgcttgctatattagccagcacagcatattagttcctatatggagccctccattgtctgagtctgcagtgatctgtaggaaggcagctggtcaataatcatgtagtacaatggcttggaattgtaaccactatggttattgattgtcctgtgttgtttcaggcatacttaggtatgtccctggggaaaaagaaaaccattcagctgagagttgctaaccatgttcttttggttagaaataatggttcattttttgcccctggttggaatagtctctaaaaggctctggtgactgaattgaacatgagtccgcatgctgttttctttcaaaaggtatcaaaacggaaagcctctctaaggggaagacctttcaactccattcagaagacaacatttagtaaggaggatggcggaggttactagtaattttcagatgtcttgggctttttctgccaacaaaacccaaaatcaaattagagttggtgaaagctttcttcagtgtttttagaagaggccatcttgaatctgtagaataccatttacacatcaacttcaccctatgctcatttcgtattttgagcttaaatggagtcctctgaagggggggtagtcgtgattctggtggcaaaactagaacttttaacttgtaaaatgacaaatattaaatggacctttttgtcagttgaggatttagattgattcttttatctgaggagcgtatgttcctcagatgttgcgtagagacctttacgttttcatctactttaagattgctctcttggcaattaggggatttgggg

SEQ ID NO: 164598 - DNA, 1160 bp, Homo Sapiens
  misc_feature (881)..(881): n is a, c, g, or t
gctgctgcccaaggaccgcggagtcggacgcaggcagaccatgtggaccctggtgagctgggtggccttaacagcagggctggtggctggaacgcggtgcccagatggtcagttctgccctgtggcctgctgcctggaccccggaggagccagctacagctgctgccgtccccttctggacaaatggcccacaacactgagcaggcatctgggtggcccctgccaggttgatgcccactgctctgccggccactcctgcatctttaccgtctcagggacttccagttgctgccccttcccagaggccgtggcatgcggggatggccatcactgctgcccacggggcttccactgcagtgcagacgggcgatcctgcttccaaagatcaggtaacaactccgtgggtgccatccagtgccctgatagtcagttcgaatgcccggacttctccacgtgctgtgttatggtcgatggctcctgggggtgctgccccatgccccaggcttcctgctgtgaagacagggtgcactgctgtccgcacggtgccttctgcgacctggttcacacccgctgcatcacacccacgggcacccaccccctggcaaagaagctccctgcccagaggactaacagggcagtggccttgtccagctcggtcatgtgtccggacgcacggtcccggtgccctgatggttctacctgctgtgagctgcccagtgggaagtatggctgctgcccaatgcccaacgccacctgctgctccgatcacctgcactgctgcccccaagacactgtgtgtgacctgatccagagtaagtgcctctccaaggagaacgctaccacggacctcctcactaagctgcctgcgcacacagtggggngatgtgaaatgtgacatggaggtgagctgcccagatggctatacctgctgccgtctacagtcgggggcctggggctgctgcccttttacccaggctgtgtgctgtgaggaccacatacactgctggtcccgcgggggtttacgtgtgacacccagaaagggtacctgtgaacaggggccccaacaagtgcccctggatgggaaaaggccccagcttcacttcagcctggcagaaccacaaggccttggaagaaaggatggcccccctgggaataatgtc

SEQ ID NO: 164599 - DNA, 617 bp, Homo Sapiens
ggctcgatcctgcgagaaggaagtggtctctgcccagcctgggcaccttcctggcccgtagccctcacgtgggtgtgaaggacgtggagtgtgggaaaggacacttctgccatgataaccagacctgctgccgagacaaccgacagggctgggcctgctgtccctaccgccagggcgtctgttgtgctgatcggcgccactgctgtcctgctggcttccgctgcgcagccaggggtaccaagtgtttgcgcagggaggccccgcgctgggacgcccctttgagggacccagccttgagacagctgctgtgagggacagtactgaagactctgcagccctcgggaccccactcggagggtgccctctgctcaggcctccctagcacctccccctaaccaaattctccctggaccccattctgagctccccatcaccatgggaggtggggcctcaatctaaggccttccctgtcagaagggggttgtggcaaaagccacattacaagctgccatcccctccccgtttcagtggaccctgtggccaggtgcttttccctatccacaggggtgtttgtgtgtgtgcgcgtgtgcgtttcaataaagtttgtacactttctt

SEQ ID NO: 164600 - DNA, 982 bp, Homo Sapiens
agcagcccccaaggccccccggacttgttagaccggcagccaggttatagcccttttggggcaggttccccttcccatgtcaccatttcaacatcccccccactgtgtgcgccgggcaggtttagggagaggttccgtggtagcgttctccttggaaaaggcacttattctggatcaggtcacacacagtgtcttgggggcagcagtgcaggtgatcggagcagcagttggcgttgggcattggcagcagccatacttccccactgggcagctcacagcaggtagaaccatcagggcaccgggaccgtgcgtccggacacatgaccgagctggacaaggccactgccctgttagtcctctgggcagggagcttctttgccagggggtgggtgcccgtgggtgtgatgcagcgggtgtgaaccaggtcgcagaaggcaccgtgcggacagcagtgcaccctgtcttcacagcaggaagcctggggcatggggcagcacccccaggagccatcgaccataacacagcacgtggagaagtccgggcattcgaactgactatcagggcactggatggcacccacggagttgttacctgatctttggaagcaggatcgcccgtctgcactgcagtggaagccccgtgggcagcagtgatggccatccccgcatgccacggcctctgggaaggggcagcaactggaagtccctgagacggtaaagatgcaggagtggccggcagagcagtgggcatcaacctggcaggggccacccagatgcctgctcagtgttgtgggccatttgtccagaaggggacggcagcagctgtagctggctcctccggggtccaggcagcaggccacagggcagaactgaccatctgggcaccgcgttccagccaccagccctgctgttaaggccacccagctcaccagggtccacatggtctgcctgcgtccgactccgcggtccttgggcagcagccc

SEQ ID NO: 164601 - DNA, 1189 bp, Homo Sapiens
atgagcatgtcccctgtgataatgtcagcagctgtccctcctccgatacctgctgccactcacgtctggggagtggggctgctgtccaatcccagaggctgtctgctgctcggaccaccagcactgctgcccccagggctacacgtgtgtagctgaggggcagtgtcagcgaggaagtgagatcgtggctggactggagaagatgcctgcccgccgggcgtccttatcccaccccagagagatcggctgtgaccagcacaccagctgcccggtggggcagacctgctgcccgagcctgggtgggagctgggcctgctgccagttgccccatgctgtgtgctgctaggatcgccagcactgctgcctggctggctacacctgcaacgtgaaggatcgatcctgccagaaggaagtggtctctgcccagcctgccaccttcctggcccgcaagcctcacgtgggtgtgaatgacgtggagcgtggggaaggacccttccgccatgataaccagacctgctgccgagccaacccacagggcctgggcctgcttgtccctaccgcccaggcgtctggttgtgcttgaccggcgccccctgcctgccctgctggctttccgctgcgccacgcacgcggcaccaagtgtctcccgccagggacgcccccgcgcgcggggacgcccccttcgaagccaaccccacccctttgcaaaaactgcctcgctgaccgacccgcactggaaacacatatgaaatgcgctccgccaaccctccttctcgcgggccacacccgaccgctccgaggtggacctcccaactccacacctctaaggcgccccatactcccgcgcgtaacgtccccccgtccggcgtttgtgtccgtgcgtctcggactcggcaaaccgagaccgcccgcgtatcctccgccactacccgcctgtggcgaccagtgtgtggcatcactcgggtcgtgccacgcaccgagcgcctgcgtccaattcgcgacgcgcagctgcatacccccgccgccagaggcccggccctgtgtcctatccctcctgcaccgcccccctgtggaaatgcgcttaatagcggactacggactgccgctcacccagttcgcattctgcgtaacgagcgcaaccgcataccccggcagtgcccacgacacaccactgccgccgagttcgaag

SEQ ID NO: 164602 - DNA, 418 bp, Homo Sapiens
  misc_feature (299)..(299): n is a, c, g, or t
  misc_feature (345)..(345): n is a, c, g, or t
  misc_feature (351)..(351): n is a, c, g, or t
  misc_feature (356)..(356): n is a, c, g, or t
  misc_feature (362)..(362): n is a, c, g, or t
  misc_feature (401)..(401): n is a, c, g, or t
ggtgataatgtcagcagctgtccctcctccgatacctgctgccaactcacgtctggggagtggggctgctgtccaatcccagaggctgtctgctgctcggaccaccagcactgctgcccccaggctaacacgtgtgtagctgaggggcagtgtcagcgaggaagcgagatcgtggctggactggagaagatgcctgcccgccgggtttccttatcccaccccagagacatcggctgtgaccagcacaccagctgcccggttgggagaacctgcttgcccgagcctggggttgggagctnggcctgcttgccagttgccccatgcttgtgtgcttgcgaggatcgncagcantgttncccggntgggtaacaacttgcaaacgtgaagggttcgattctgtngagaagggaagttggtt

SEQ ID NO: 164603 - DNA, 1162 bp, Homo Sapiens
  misc_feature (1034)..(1049): n is a, c, g, or t
gaacatgagatttcttattacacacaatccaaccaatgcgaccttaaacaaatttatagaggaacttaagaagtatggagttaccacaatagtaagagtatgtgaagcaacttatgacactactcttgtggagaaagaaggtatccatgttcttgattggccttttgatgatggtgcaccaccatccaaccagattgttgatgactggttaagtcttgtgaaaattaagtttcgtgaagaacctggttgttgtattgctgttcattgcgttgcaggccttgggagagctccagtacttgttgccctagcattaattgaaggtggaatgaaatacgaagatgcagtacaattcataagacaaaagcggcgtggagcttttaacagcaagcaacttctgtatttggagaagtatcgtcctaaaatgcggctgcgtttcaaagattccaacggtcatagaaacaactgttgcattcaataaaattggggtgcctaatgctactggaagtggaacttgagatagggcctaatttgttatacatattagccaacatgttggcttagtaagtctaatgaagcttccataggagtattgaaaggcagttttaccaggcctcaagctagacagatttggcaacctctgtatttgggttacagtcaacctatttggatacttggcaaaagattcttgctgtcagcatataaaatgtgcttgtcatttgtatcaattgacctttccccaaatcatgcagtattgagttatgacttgttaaatctattcccatgccagaatcttatcaatacataagaaatttaggaagattaggtgccaaaatacccagcacaatacttgtatatttttagtaccatacagaagtaaaatcccaggaactatgaacactagaccttatgtggtttattccttcaatcatttcaaacattgaaagtagggcctacatggttatttgcctgctcactttatgtttacatctccccacattcataccaatatacgtcaggtttgcttaaccattgannnnnnnnnnnnnnnnaccaagtcttacaggggattattttacgtggtttccctggtatctccactttgtggctggtattaaaaacacaccctcccatttttggaaaaaatcctaccgtttgaacaaag

SEQ ID NO: 164604 - DNA, 791 bp, Homo Sapiens
tgggtgcgcgcccattcagtccaaagaagggcccagatccaagggagaccattggaatgccctttaattttgttcccaccaaagagttaggtgttcattaaagttggcttccaccatacttctttctaattgtgggtaacctccagtactttcttaagttccctctataaatttgtttaaggttcgcatggttgggattgtgtgtaataagaaatctcatgttcttgtaggtgatttccacaggagctgggcgtttcattcgagccatgttaatttagttaaaaaacactcaatagggttatgaaataattaaaaaaattgaatacagaaatgatgcaaagaaactgaagtctacttcaatatactccacttgaaattctcagtgctttgagtatgaagttgtaagtaatgataagtgaaatgaacctcctaacaagaagcagcaattcttcaatccagtaatactgaggccaacagaaaagaagtgcactgaggtttaccccatccaggtcagaactcttgtaaaatgctctgtggatttcaattcaacacttctgtgtccaggataaccactcttatgggggcttcttggtggagcagtaatcagtttctacagttcacttgtctgcatagaggtcgtgctgtgcctggcagtaatctccactgcccttcagaaactccataaatgtgtgaccaagaacaccacagaattgaggaatatgtttactcattggtgaagaaattgaccggcataatctagaacagccggtcccgaggcggcggcgacacag

SEQ ID NO: 164605 - DNA, 426 bp, Homo Sapiens
tgtgcctgtgctggcgtcgactccagtggttatgtgaatcccaactatacaggaagaatacgccttgatattcagtggtactggccaagttactgttgcagcgttgtcatcaaccaagctcaggctcagcgatgctgggcagtatctctgccaggctggggatgattccaatagtaacaagaagaatgctgacctccaagtgctaaagcccgagcccgagctggtttatgaagacctgaggggctcagtgaccttccactgtgccctgggccctgaggtggcaaacgtggccaaatttctgtgccgacagagcagtggggaaaactgtgacgtggtcgtcaacaccctggggaagagggccccagcctttgagggcaggatcctgctcaacccccaggacaaggatggctcattcagtgtggtgat

SEQ ID NO: 164606 - DNA, 903 bp, Homo Sapiens
  misc_feature (618)..(636): n is a, c, g, or t
  misc_feature (696)..(802): n is a, c, g, or t
tctgtgaggagcacttagggagggcaggaaggcaggcagcccacagaaggaagtttctggactcatgcaattctccctgtacagcactcagtttcagtataacctcaaaatcctccaggaactctggtcagttctacacagcaccatcatacccccttttctgggatgatctgcaaaatgtctttggaggcaattctgaaagaacagtttcaaaattggtctaagtaatattaatactagcatcactacagtaagtacatgatttcccaagggtatcattttaaaggataatcatttgatctatgaattatgataaatttgttttaaaaagcattaaagtttatttttaaattacacaaaaagcactgtttaaacaatggttataactagtgaacattaagaaatcttgcaggcaggtggatgggattgaaatactctttcttgattttatagtttaagggccaaattgagcactgtttatgtctgcatcagctaccattaaaaactttgaggctgctggacactcagtaaggaatcagaagttttttaaaaagatgcaaatgaatggaatgtgtcatttcaaagcctgtttggtaaaggagaatggatgacccaccnnnnnnnnnnnnnnnnnnngagagagggtcttgttctgtcaccaaggctgctcctgagttcaagtgatcctcccacttnnnnnnnnnnnnnnnnnnnnnnnnnnnnnnnnnnnnnnnnnnnnnnnnnnnnnnnnnnnnnnnnnnnnnnnnnnnnnnnnnnnnnnnnnnnnnnnnnnnnnnnnnnncaattttgttcttggctctttctctgtccagtttcaaaaattcaccaagggttaattcttcaaactgcttcttgacagaaaggaaagcgcaaccggacgaa

SEQ ID NO: 164607 - DNA, 1603 bp, Homo Sapiens
  misc_feature (730)..(746): n is a, c, g, or t
  misc_feature (1246)..(1254): n is a, c, g, or t
  misc_feature (1260)..(1269): n is a, c, g, or t
  misc_feature (1325)..(1333): n is a, c, g, or t
ggggacatgccccgcggcgcgccattaaccgccagatttgaatcgccggacccgttggcagaggtggcggcggcggcatgggtgccccgacgttgccccctgcctggcagccctttctcaaggaccaccgcatctctacattcaagaactggcccttcttggagggctgcgcctgcaccccggagcggatggccgaggctggcttcatccactgccccactgagaacgagccagacttggcccagtgtttcttctgcttcaaggagctggaaggctgggagccagatgacgaccccatagaggaacataaaaagcattcgtccggttgcgctttcctttctgtcaagaagcagtttgaagaattaacccttggtgaatttttgaaactggacagagaaagagccaagaacaaaattgcaaaggaaaccaacaataagaagaaagaatttgaggaaactgcgaagaaagtgcgccgtgccatcgagcagctggctgccatggattgaggcctctggccggagctgcctggtcccagagtggctgcaccacttccagggtttattccctggtgccaccagccttcctgtgggccccttagcaatgtcttaggaaaggagatcaacattttcaaattagatgtttcaactgtgctccttagtttaggtcttgaaagtggcaccagaggtgcttctgcctgtgcagcgggtgctgctggtaacagtggctgctnnnnnnnnnnnnnnnnntactgggggctcattttgctgtttgattcccggggcttaccagggggagaagtgagggaggaagaaggcagtgtcccttttgctagagctgacagcttggttcgcgtgggcagagccttccacagtgaatgtgtctggacctcatgttgttgaggctgtcacagtcctgagtgtggacttggcaggtgcctgttgaatctgagctgcaggttccttatctgtcacacctgtgcctcctcaaaggacagtttttttgttcgctgcgcctaaaagctttttttaaacctgccaaatgcgcgacccgccgcgcgatgagagaatggagacggactccctgtctcctcaactgactgacaacatggctttcttattttcctcccatagaaaaatccccggggggcaccccactacttttaaaactcccccaaaggggcttctgggggctttttggggccttttaaccagggggctcccgggccgccccaatttttaataaaaannnnnnnnnaacgannnnnnnnnnggagagtggggtgccaatttatataaagcgcactcccggccccatgaggggggatnnnnnnnnnaaacacccctggtaaaaaacctcaatagcctccggaacgcgtctacccaccactttggcgcccccgcgggggaataacaattctgcccccggggcgaaaaaacgcgggggggaagaacacaaggggtcactattatgggcaccccctttaaaaaagcaaaccggggtggagctaccccaccccccgaatttttgccctcacacccaaaacacaatcttttccctataaacaacctcccttaaatagaactaaaagcgccttcctctttct

SEQ ID NO: 164608 - DNA, 1230 bp, Homo Sapiens
  misc_feature (753)..(763): n is a, c, g, or t
  misc_feature (766)..(766): n is a, c, g, or t
  misc_feature (772)..(788): n is a, c, g, or t
  misc_feature (1030)..(1030): n is a, c, g, or t
  misc_feature (1036)..(1084): n is a, c, g, or t
  misc_feature (1164)..(1164): n is a, c, g, or t
ggggcccacctggcagccgccttgggatgtgcggagctcagtgccagcccggtcccggccaagcggagtgtgagcccggcgcctccaacgcaacaccccgcgccctcgccggctcccccgccgtgcggatcggagccagccggttgttgccatggcattcgccagctggtggtacaagacgcatgtcagtgaaaaaaccagtgaatcgccttccaaaccaggagaaaagaaaggatcagatgagaaaaaagcagcaagcctcggcagcagtcaatcctccagaacctatgctggtggaacagcctcggccaccaaggtgtcagcttcctctggtgcaaccagcaagtcttccagtatgaatcccacagaaaccaaggctgtaaaaacagaacctgagaagaagtcacagtcaaccaagctgtctgtggttcatgagaaaaaatcccaagaaggaaagccaaaagaacacacagagccaaaaagcctacccaagcaggcatcagatacaggaagtaacgatgctcacaataaaaaagcagtttccagatcagctgaacagcagccatcagagaaatcaacagaaccaaagactaaaccacaagacatgatttctgctggtggagagagtgttgctggtatcactgcaatatctggcaagccgggtggaccaaaaatataataattcggacaccacacctggcggccgccacgcctcaagttcactctgccgcagggatcagagtcacgtaaacnnnnnnnnnnntcngcgccnnnnnnnnnnnnnnnnnacgtgcggcccggggagagcggggcgtcgggcggggtcgggctgccgggcgccgcgcccgcccgcgctgcgggccgcgggagtcgcggctggctggcggcgctgcgcccgcggcccccccgcggcgggagcgcgcgtcgcgccaggagcacgcccgccgggaggggccagaagcaggacccggaggaggcggcgcgtcagtgtgacggcgggcggcggtgtctgtcggggtagaggttaggnaggagnnnnnnnnnnnnnnnnnnnnnnnnnnnnnnnnnnnnnnnnnnnnnnnnntgcggacccgccaccgcgactgcgacggcggccggccgctccgagtgcccgccggcgccaattgcgcgcgtagcggtcgngtgactgccaagcgaatgatatgtcgctctatgtctgtggatgactggcgacgaggatctggaggc

SEQ ID NO: 164609 - DNA, 715 bp, Homo Sapiens
  misc_feature (97)..(160): n is a, c, g, or t
  misc_feature (505)..(517): n is a, c, g, or t
ggggcacattggggctcggtggtctggtggtcccttcggtcttggccctatctgtcctttgtttttgtgatttactatcaatcatcacgaaccagtnnnnnnnnnnnnnnnnnnnnnnnnnnnnnnnnnnnnnnnnnnnnnnnnnnnnnnnnnnnnnnnntctcactgcttttcagtcttctctgtacttcatttttgtgaaaaagtgaaaatcagcatataatctttatgtaaaaatgctcaccaagcactgcagactttggagttagggattcagcagctcgttccagtgaaaaggaggagtgaagctggggaagttagtatctaagaggggcaagctgattgcatgtgcatttatacctatgcctttaaaacattcccataaaaagtattaataaagaaatttccattccacactagtactgatgaaaaggtggttgattttgccttgtgataattatcaaaggatagtttttcatccttagattttattcacatgagagannnnnnnnnnnnnctctgttgacttaggaacacatcataaattcacaccaactgacacgttgctgacgtctgtacttgacataaccatttttattcatacaggaagcattaaatataaaagatggtcagttttgaagagcaaagggtgctgaaatgacttgtacggttggctggtgctttctcaaatggattgccatagttcattactagt

SEQ ID NO: 164610 - DNA, 1287 bp, Homo Sapiens
agggccgggggccacaaaagccggaacgccggagccgggagccaggccaggttggcccttccgtccagcaaaaagtgcaatcttccccagggagcctggaacccatccatgggccttcaggctctaagttcctctttttccggtcagggggctgctgatctggtttctcctcctcggaacaggtgaccctctgtcccggagggattttcagggttctcacccatcctctgtaaacatctgatggcgggagttgactcctccttggccttcaggccctgggctgaggagcagagatccttcgtgggacttccttccggggaattgtctttttttcggatgttaacctgcaaagagaagcggtgtcggggccagatgcccccccacacccactgcatgtagctgaagagcacgatgacgctgaggaaggtgaagttgctggcaacacctatgaaggcgcaggtcatcgggaagttgtatagcaggtatctgagcccagtgaagtgcgcgtggatgcggaggtaggctccatacagctggatgcgcttgctgtggatctcaatgatcgctccagtggtcggcacgtacgagttctctctatagtctgcgtagagttccacctccagcagctgcttctgctctgcaaagccaaatagcaggaggctagagaagaccagtgtgtccagcatctggagcaggtctgagcggtaatgcagcatcaccgaacgcgaagaagtggagatgattcggccacctctggtgtagcaggaaatggtgaccaagaacatgcccaaatcttgattcacaggggactctggcagctcaagactctaaggtaacacgatacggctgtccatacatcagcacccgatcacgtccacccttagtcagcgagacattggcaacagggaaggagcagagtgaggtggtggaggaatcacagtcggtcctgtagtagaaatgcacagggctgaggtggctgactgtcggcatataggaatagtagaaggagccatagaggaagacagacacccagagcaaaaggaggatggtgcagaagagcaccccaaactgcagcagcagcctgcgggcacggcctgccaagacttggcccacctcctgggcccacagtaaggcaggtactggagggtcgttgaccatggccgggagagcagggtgtctggccccaggttcaggccttgcgttcctagctgctctgccacctggacgccacccctggccatgggatgcagcagctggtggttcctcctctttgtccggtcctttgat

SEQ ID NO: 164611 - DNA, 891 bp, Homo Sapiens
acctcgcggtacccctagatagggcgcccaaagcaagaaagaaggaccctgagtaagatgaagacccttctggacattctggacaggacccctcgaagccggtgctcccctgaagaccttcgcaaaagtgtgagatccccctggagaaactcaagaatgacatggcggtgcccactcccccaccgcccccggtgccaccgaccaaacagcagtacctatgccagccgctcctggatgccgtcctggccaacatccgctcacctgtcttcaaccattcactgtaccgcacattcgttccagccatgaccgccattcacggcccacccatcacggccccagtggtgtgcacccggaagcgcaggcttgaggatgatgagcggcagagcatccccagtgtgctccagggtgaggtggccaggctggaccccaagttcctggtaaacctggacccttctcactgcagcaacaatggcactgtccacctgatctgcaagctggatgacaaggacctcccaagtgtgccaccactggagctcagtgtgcccgctgactatcctgcccaaagcccgctgtggatagaccggcagtggcagtacgacgccaaccccttcctccagtcggtgcaccgctgcatgacctccaggctgctgcagcttcccggacaagcactcggtcaccgccttgctcaagcacctgggcccagagcgtccaccaggcctgcctctcagccgcctagccaagactgcaagggtatggcccgcaagcctcatcggggccaaggaccacacgcctcctgttcagaacactctaggctgtggggttccctagagagcctgcgagtaaaggctaccttacctgctttcatcttctgcctgccggacctgcaaacga

SEQ ID NO: 164612 - DNA, 776 bp, Homo Sapiens
ccacccatctgaacaaaggtgagcgggccatgcacccttccagctgtgcacagggatgtgctgaaggtgcaggaggcagtgcgtcagggccttggtggctggggtaggtggagaagcccgctgcccccaccatcctgcggtcacccctggactcgtattggatcctggccactgtgctagagtcagcacaagggaccaggtggctggctgcctgagagagaaaataagtcacagtggaaagagtttttactgctgcaaaaacctaaagtggggggagatctcagcaattctgacaacagtatacatttagcgacctttctgagacagcctggggaaaatgcatctatcactgtcctcttgatttggaaaaataaatccgatgcataaagccttggacaagggtgtgtgagcagggatgataagtagagtggggggtgtgtagaggcctggtctcctccggacggtgcccctcccaactgcagagctgccctcctgtaagccggctcccgagccagctgccaacaaggcccccactgcctccctggagacccacttcatccccctcttcagcagaggtcctgaggcaggggggtggagatctgctgggtttgctgcttcatgaatttgggccttcggaggtcatgaacacatgcagggcagtcacaggggttgtgggagacacggaagggatgctttacccatcacaaatgggtctttccaatgtgggtatttgtggctggcgcacagataaaagtagacacaatactccttggtgg

SEQ ID NO: 164613 - DNA, 583 bp, Homo Sapiens
taccttaacagtgtcaaaaagcaggctgtacgggtcggaatcccgggatatcgtcgaccacgcgtcgctactgcatgccctgccactgaaggaggacttggaggagtgggtcaccattgggcgcctcttcagcttcctgtaccagagcagccctgaccaggttatagatgtggctcccgagcttctgcgtatctgcagcctcattctggctgacaacaagatcccaccagacaccaaggccgcactgttgctgctcctgacgttcctggccaaacagcacaccgacagctttcaagcagctctgggctcactgcctgttgacaaggctcaggagctccaggctgtactgggcctctcctagactgcaggctgcagccagtccagagagaatagagcctgcccaggccttaagaccacctctcagcccagttcagttctgccttaccaaagattctgagactcatacccatttggagccagccccacttgctgccttacagggctgtccctgaggctggatctgttacaaatgagtcatgacatcatactgtaataaaagcagcttgttttctgcttgaacaat

SEQ ID NO: 164614 - DNA, 1624 bp, Homo Sapiens
  misc_feature (65)..(66): n is a, c, g, or t
  misc_feature (121)..(121): n is a, c, g, or t
  misc_feature (142)..(142): n is a, c, g, or t
  misc_feature (150)..(150): n is a, c, g, or t
  misc_feature (231)..(231): n is a, c, g, or t
gttgtgccttcagttatggaaggggaggcaggctcccttcccttttctgttttgacgatgagagnntgatgggggaagaagagggaggagctttcatgggatgaggatggtggaagaagangggatgacttcagagatctcnagggtacnagcgtggagaatgctttcttcgatgagaaggaagacacctgtgctgccgtgggggagatctctgtgaacaccagtgtggcnttccttccatacatggaaagtgtctttgaagaagtatttaaactgctggagtgccctcacctgaatgtgcggaaggcagcccatgaggctctgggtcagttttgctgtgcactgcacaaggcctgtcaaagctgcccctcggaacccaacactgctgctttgcaggctgccctggcccgagtcgtgccatcctacatgcaggcagtgaacagggagcgggaacgccaggtggtgatggccgtgctggaggccctgacaggggtgctccgcagctgtgggaccctcacactgaagccccctgggcgcctcgctgagctctgtggcgtgctcaaggctgtgctgcagaggaagacagcctgtcaggatactgacgaggaggaggaagaggaagatgatgatcaggctgaatacgacgccatgttgctggagcacgctggagaggccatccctgccctggcagccgcggctgggggagactcctttgccccattctttgccggtttcctgccattattggtgtgcaagacaaaacagggctgcacagtggcagagaagtcctttgcagtggggaccttggcagagactattcagggcctgggtgctgcctcagcccagtttgtgtctcggctgctccctgtgctgttgagcaccgcccaagaggcagaccccgaggtgcgaagcaatgccatcttcgggatgggcgtgctggcagagcatgggggccaccctgcccaggaacacttccccaagctgctggggctcctttttcccctcctggcgcgggagcgacatgatcgtgtccgtgacaacatctgtggggcacttgcccgcctgttgatggccagtcccaccaggaaaccagagccccaggtgctggctgccctactgcatgccctgccactgaaggaggacttggaggagtgggtcaccattgggcgcctcttcagcttcctgtaccagagcagccctgaccaggttatagatgtggctcccgagcttctgcgtatctgcagcctcattctggctgacaacaagatcccaccagacaccaaggccgcactgttgctgctcctgacgttcctggccaaacagcacaccgacagctttcaagcagctctgggctcactgcctgttgacaaggctcaggagctccaagctgtactgggcctctcctagactgcaggctgcagccagtccagagagaatagagcctgcccaggccttaagaccacctctcagcccagttcagttctgccttaccaaagattctgagactcatacccatttggagccagccccacttgctgccttacagggctgtcccctgaggctggatctgttacaaatgagtcatgacatcatactggaataaagcagctggttttcggcttgg

SEQ ID NO: 164615 - DNA, 643 bp, Homo Sapiens
tgtttccctttgtctgtgactgggtgggccagcatgcagcttctgattttaaagaggcatctagggaattgtcaggcaccctacaggaaggcctgccatgctgtgcccaactgtttcactggagcaagaaagagatctcataggacggagggggaaatggtttccctccaagcttgggtcagtgtgttaactgcttatcagctattcagacatctccatggtttctccatgaaactctgtggtttcatcattccttcttagttgacctgcacagcttggttagacctagatttaaccctaaggtaagatgctggggtatagaacgctaagaattttcccccaaggactcttgcttccttaagcccttctggcttcgtttatggtcttcattaaaagtataagcctaactttgtcgctagtcctaaggagaaacctttaaccacaaagtttttatcattgaagacaatattgaacaaccccctattttgtggggattgagaaggggtgaatagaggcttgagactttcctttgtgtggtaggacttggaggagaaatcccctggactttcactaaccctctgacatactccccacacccagttgatggctttccgtaataaacaagactggcgatgtcctttgt

SEQ ID NO: 164616 - DNA, 1210 bp, Homo Sapiens
  misc_feature (1092)..(1092): n is a, c, g, or t
  misc_feature (1118)..(1118): n is a, c, g, or t
  misc_feature (1168)..(1168): n is a, c, g, or t
  misc_feature (1174)..(1174): n is a, c, g, or t
  misc_feature (1187)..(1187): n is a, c, g, or t
aaaagatggcggtcttggcacctctaattgctctcgtgtattcggtgccgcgactttcacgatggctcgcccaaccttactaccttctgtcggccctgctctctgctgccttcctactcgtgaggaaactgccgccgctctgccacggtctgcccacccaacgcgaagacggtaacccgtgtgactttgactggagagaagtggagatcctgatgtttctcagtgccatcgtgatgatgaagaaccgcagatccatgttcctgatgacgtgcaaaccccccctatacatgggccctgagtatatcaagtacttcaatgataaaaccattgatgaggaactagaacgggacaagagggtcacttggattgtggagttctttgccaattggtctaatgactgccaatcatttgcccctatctatgctgacctctcccttaaatacaactgtacaggactaaattttgggaaggtggatgttggacgctatactgatgttagtacgcggtacaaagtgagcacatcacccctcaccaagcaactccctaccctgatcctgttccaaggtggcaaggaggcaatgcggcggccacagattgacaagaaaggacgggctgtctcatggaccttctctgaggagaatgtgatccgagaatttaacttaaatgagctataccagcgggccaagaaactatcaaaggctggagacaatatccctgaggagcagcctgtggcttcaacccccaccacagtgtcagatggggaaaacaagaaggataaataagatcctcactttggcagtgcttcctctcctgtcaattccaggctctttccataaccacaagcctgaggctgcagccttttatttatgttttccctttggctgtgactgggtggggcagcatgcagcttctgatcttaaagaggcatctagggaattgtcaggcaccctacaggaaggcctgccatggctgtggacaactgtttcactggagcaagaaagagatctcataggacggagggggaaatggtttccctccaagcttgggttagtgtgttaactgcttatcagctattcagacatctccatggtntctccatgaaactctgtgggtttcancattccttcttagttggacctgcacagcttgggttaggacctaggatttnaacccngaagggtcaagangctgggggtattaggaacgctaa

SEQ ID NO: 164617 - DNA, 786 bp, Homo Sapiens
aaaagatggcggtcttggcacctctaattgctctcgtgtattcggtgccgcgactttcacgatggctcgcccaaccttactaccttctgtcggccctgctctctgctgccttcctactcgtgaggaaactgccgccgctctgccacggtctgcccacccaacgcgaagacggtaacccgtgtgactttgactggagagaagtggagatcctgatgtttctcagtgccattgtgatgatgaagaaccgcagatccatcactgtggagcaacatataggcaacattttcatgtttagtaaagtggccaacacaattcttttcttccgcttggatattcgcatgggcctactttacatcacactctgcatagtgttcctgatgacgtgcaaaccccccctatatatgggccctgagtatatcaagtacttcaatgataaaaccattgatgaggaactagaacgggacaagagggtcacttggattgtggagttctttgccaattggtctaatgactgccaatcatttgcccctatctatgctgacctctcccttaaatacaactgtacagggctaaattttggggaaggtggatgttggacgctatactgatgttagtacgcggtaaaaagtgagcacatcacccctcaccaagcaactccctaccctgatccctgttccaaggtgggcaagaggcaatgcggcggccacagattgacaagaaaggacggggctgtctcatgggacttcctctgagggagaatgttgatccgcagaattttaacttaat

SEQ ID NO: 164618 - DNA, 1017 bp, Homo Sapiens
  misc_feature (27)..(27): n is a, c, g, or t
  misc_feature (34)..(34): n is a, c, g, or t
  misc_feature (82)..(82): n is a, c, g, or t
ccatcccagacatggtcacctctgtgnaaaatcnccaggtattcttagggtctagagccaccccagaaacctggcctggtancaagtatactccaggccaatccagtgcctcttccatgtggaaatcctggtctaacacttcttcttcttctcgttttggctgctgtagtaaaggaatcttatctttatactctgtttctttatgatgttcatgcatcataaccatatcagacttcacgggaattggaatgttggcctctggtggtatggttctgaacatatctggagctacattctgggtacaggtcatgaaagaaactgcatgcttggcttccatgtaatacataatgtataagttgcacatttcatcactagacgtgccaccaatgtgtgtggcttctgtccttccttcaccagtgaatacacatcttgcagccagtaggtcaccaaaacttacatcaactggatgccccacagggtagaaagccctgtggcagctgaagggctctgccgtccaatcagtgtccactgtccatttcttactctgtatccacttactaccttacctaaatggtgagtgtgaactctataggcaaagacatgcattggataatttttataatggcatgaaatgtcagaattcaccactttttctcctgctgggataacagtgtcaacagacatcataaggtacatgccagcaattaaaggctgtggcagacgtgtgaggtgtaaggacacaccagaacagtccttgttattatctctaaaagcactaatatccccatagtgtacctgtagtacaaagtatttacttccagtctctcctccaactctgaatccaacacctttggggagccgggtagggggagcatttctcgcccaggcatacagaatattggctttatcagtacaggttccttcatcacaaaaccagtaacttccagtggatgaaggcatattgcatccaaaaagtaacatgtgatggacagtatccatgctggctcgaggcttgcc

SEQ ID NO: 164619 - DNA, 371 bp, Homo Sapiens
  misc_feature (91)..(101): n is a, c, g, or t
  misc_feature (304)..(304): n is a, c, g, or t
  misc_feature (309)..(309): n is a, c, g, or t
  misc_feature (324)..(324): n is a, c, g, or t
cttgctacactattggtgacttttattttaaccctatgagacttactgaaatcagtacattatggtcacataatttaaagcttggttggcnnnnnnnnnnnctttgctgataattcaaattctgtactttggcaagcaaaagaggtacaacatcaccttggagttttacaatttaataatgcatactttaaaattcatgataaatcatggaaccccactatactcactaattcaactattgatttctttttgagcaactgactttatgatttatccttaaaagtaaggaagtataccagaaggncaaanggataaatccacccntaaatactagagtctaagttattttcctgaaaaggtggaaaagggga

SEQ ID NO: 164620 - DNA, 1052 bp, Homo Sapiens
gggggagctagcggccgccgccatgtcccaccagaccggctatccaagcacagtgaagatgttaaagagatctttgccagagccagaaatggaaagtcacagacttctgaaaatatctattgaaaatgagcaacttgtgattggatcatatagtcagccttcagattcctgggataaggattatgattcctttgttttacccctgttggaggcacaaaccaacccatgctatatattattccaggttagattctccagaatgccccagggatatgaatggatattcattgcatggtctccagatcattctcatgttcgtcaaaaaatgttgtatgcagcaacaagagcaactctgaagaaggaatttggaggtggccacattaaagatgaagtatttggaacagtaaaggaagatgtatcattacatggatataaaaaatacttgctgtcacaatcttcccctgccccactgactgcagctgaggaagaactacgacagattaaaatcaatgaggtacagactgacgtgggtgtggacactaagcatcaaacactacaaggagtagcatttcccatttctcgagaagcctttcaggctttggaaaaattgaataatagacagctcaactatgtgcagttggaaatagatataaaaaatgaacattataatttttggccaacacaacaaatacagaactgaaagatttgccaaagaggattccccaaggattcagctcgttaccatttctttctgtataaacattcccatgaaggagactatttagagtccatagttgttatttattcaatgcctggatacacatgcagtataagagagcggatgctgtattctagctgcaagagccgtctgctagaaattgtagaaagacaactacaaatggatgtaattagaacagatcgagatagacaatggggatgagttgactgcagacttcctttatgaagaagtacatcccaagcagcatgcacacaagcaaagttttgcaaaatcaaaaggtcctgcaggaaaaagaggaattcgaagactaata

SEQ ID NO: 164621 - DNA, 541 bp, Homo Sapiens
tcttgaactggaaaacaaccccatcatctgtggtaatagatgcctgtccatgagatccacagtcactgctgggtcctgacactcgggcccatgccacataccaccacccagcttgcaggagaacaggctcatcaaacatcattgcatatttttctctagcagcacagtcataagccaatacatcagtctctgcaagaaggtcaccatcagtttcatgatctcctccatcaggacccaattcaaacagcttaattttagcagtatattctcctctacctccaaacagaccaagaccaccaagtaaaatatcagtgtcggcactgaaacgtatagcttctactgaatgggcagaataaccccagcctcctccatgactttcaaacctgtttaccacactataatcttctttagaataaaccttcattactgcttgagtctcttcctctgtacttgcaacacccatttttaagtcctgcatagctgccaaggtatcaagacaacctaaaatgtgcgaagctgcatgagatcggtagtaaggaag

SEQ ID NO: 164622 - DNA, 786 bp, Homo Sapiens
ggaagactactgagaagaaggagctatgtgaattaaaacccaaatttcaggaacacatcattcaagcccctaagccagtagaagcaataaaaagaccaagcccagatgaaccaatgacaaatttggaattaaaaatatctgcctccctaaaacaagcacttgataaacttaaactgtcatcagggaatgaagaaaataagaaagaagaagacaatgatgaaattaagattgggacctcatgtaagaatggagggtgttcaaagacataccagggtctagagagtctagaagaagtctgtgtatatcattctggagtacctattttccatgaggggatgaaatactggagctgttgtagaagaaaaacttctgattttaatacattcttagcccaagagggctgtacaaaagggaaacacatgtggactaaaaaagatgctgggaaaaaagttgttccatgtagacatgactggcatcagactggaggtgaagttaccatttcagtatatgctaaaaactcacttccagaacttagccgaatagaagcaaatagcacattgttaaatgggcatattgtatttgaaggagaaaaggaatttgatcaaaatgtgaaattatgggggtgtgatttgatgtaaagccaagttatgtaactatgactgcaacaaagattgaaatcactatggagaaaagctgaaaccgaagcagtgggcaagccttgaactgcctgcagctaaaaagcaggaaaaacaaaaagatgacacaacagattgagtgggagatgta

SEQ ID NO: 164623 - DNA, 615 bp, Homo Sapiens
atagattcatcttggtcctcatcagcgccactcttgtctctcagtatggcctggacttgcccctgcatttaccctcatcctgctgagccatctctatgcactgcgcaattccatcagtgattcggggtcctcccaaggctccctatgactgctgaagtttgaattcttagcagtatgattccttttcttgtaagctgagcagcttaggaaagattggccatgttgatattttccagtgtctaattctcatcgtgttcttttccattccagacttccctgtctctttcccagagctctgttcctcttctcactgtttctggaaggcagttgcactcaaaagtgaagtcaccagtctgccgacaggtgcctccattgacacaaggcgagggtgcacagggcacatacaggaatagtttatgctgtacagcataaactattcatgattggagagtttcaggggaaaggtttacattttctgaaactgtatttggtatgtgactcaatgtggtatttcagtcttgttagtcacttacatgactgacgtttgcaaggatttattgccaagtaaaatttgaccagagtgcactgagaatagctacataaggggaaatctct

SEQ ID NO: 164624 - DNA, 923 bp, Homo Sapiens
cgcgtagcccacctgctaaatttcgagtttctggttaggtggctaggataggtttataagacttccttacttacctatgactgctgaagtttgaattccttagcagtatgattccttttcttgtaagctgagcagcttaggaaagattggccatgttgctgtgcaaaaagaggtaaacttaatttatactcaaagcatgcttgaatttgaaactagggcttccactcttccaaagttggattgtcactacctcaggcatgtgtcccgaagggctcatgtctctgttgtactcaaagttcaaatggagcccagcaagccagatctcctttacttctaagttccctcaacagtttctcctctgctttagagactgccttgaaaatattcttgtcctgctgttgtgttttggctttggaatgatgtgatgcagctcaatgggtcctacccccaagttgatcagagtaagaaacagctgggaaagtcagtgccaattcaagttcatcatcctccttacagggattctgattcagagggctcaggtggggcctggaatgtgtttgttaacatgactcagatgtgcagtcagttaggggacccgctgataccatcgaccttatagtttatgggatgattctgttttgctgataaagaaactgaggcatagacagtctgtaacttgcccaagttccccttgctgtaagtcctggagccagatctcaggtggagcagactcttccccatccccattccacattttccaattcagctgggtcaattatatcaaagtacgtgtttctctccccctataactcatatctgaaacaaggagacttgtcattcacttctttcatctaatacaatttctcacaaaatgctgcgagcatcatattctgggctctcactattaaacggagatgcttttc

SEQ ID NO: 164625 - DNA, 580 bp, Homo Sapiens
ctataaatagagaaatggggttagccatagaggttaaaactacctggttatcccatataataacacaaactgggtcttggatacacagttgtatttaatgttttacgatctagcctttccagtacaggcactttctgagaaacctttgtcctcacttgaggcattttgttgtcgggtttttgtgtttgtttttgtgggtatttgcctcattccacccctgagctttcaggtagacagacgtgattcaaaactctgttctaaggtgtttattgtagtggagtaatgggtttgcagtgataagtcatacttttccaccgaaagggagggcttgggaatccctgagattagctaaagttaagttgttggaagaattccttgattggaaattgtacctttgtgttttgttgctctgtttcctgaaaataactcggggatgctcctggtttgtccatctactgctttgattccttggatcccacccattctttcactttaagaaaaaacaaataattgttgcagaggtctctgtattttgcagctgcccttttgtaagaagcacttttcccaaataaaacaatta

SEQ ID NO: 164626 - DNA, 429 bp, Homo Sapiens
gatggtggggaacaatctgaaagatacacagttacagcaaattgtagacaaaaccataataaatgcagataaggatggagatggaagaatatcctttgaagaattctgtgctgttgtaggtggcctagatatccacaaaaagatggtggtagatgtgtgactcttatcagagagtaccacccaacacttttgctttcttctccatctctgaagatctgctcaagacgtccagcaatgctctctgtgtatttaaatggaagtatttttctctgtgaagccacattttccaacatgagcctcatgaagccaactaagtgttattgaactgtaattctctcaataactcagtgtagcactttaaagtccgaaggacagcaacatgaaaagagcatatcaagtggtgtagaaagatgaccgggatcctctagg

SEQ ID NO: 164627 - DNA, 405 bp, Homo Sapiens
acacttccttacagtacatatagatataaaataaatgtggcactcttctttattgcttctttatggatgtctttcccagatgaaaagaccctgctggggaatagttcatcgacttgttatctctttgtacacagattactcctaagtaatagcaggaccttcacaccaggaaattatttgctaaatatttcccactgtctcacagcttgatctgtcaatttcttcccagacgtaaaacatctgggctggtacagcaaaacacagaaaattcaaagagatgtccccaagatgcagaagaggacagctgtcctcaggagtctgtcacgggccagctgggggcattcatatttcccaagacccttttccagctgcatctcaccatagcttttatatgactgaaaaaat

SEQ ID NO: 164628 - DNA, 821 bp, Homo Sapiens
  misc_feature (429)..(429): n is a, c, g, or t
accttcctgtacgagagaaaatcagaagaatttggaaagtgtcatgaattggcaacagtactggaaagatgagattggttcccagccatttacttgctattttaatcaacatcaaaggtcttgatgattacccctctttatttctgagaactcaggaagcatctccggcaggggttatccttaataggcccccgatctcagggttttaagaatcacattgggaaaaccgacagatggataaaaaataattaccacacagtaccagatgatgtgcttctgcatcgcactcatgatgagattgtcctcctgcattgcttcctctggcccctggtgacatttgtggtgggcgttctcattgtggtcctgaccatctgtgccaagagcttggcggtcaaggcggaagccatgaagaagcgcaagttctcttanaggggaaggaggcttgtagaaagcaaagtacagaagctgtactcatcggcacgcgtccacctgcggaacctgtgtttcctggcgcaggagatggacaaggccacgacagggctctgagaagctcatccctcagtggcacagaaacaggcaccactgggagacttggaccctcaaaagctggtatccaatctgctggtagcattggctaaaagggttcaaggatccttagcctggatgggaagtaaactattttcagaaaaacccttaattaggaaggtttcattttttcttttccaaaaggtaacccggtattatttaattttgggaaccagggggggagtttattaccaaaacacccctttaattggaattttttgagggcccaaaccttt

SEQ ID NO: 164629 - DNA, 536 bp, Homo Sapiens
gtcctcatataccatacagatataaacattcttgtagacactgtttgggctctgtcatacttgacagatggaggtaatgaacagatacagatggttattgattcaggagttgtgccctttcttgtgccccttctgagccatcaggaagtcaaagttcaaacagcagccctcagagcagttggcaacatagtgactggcaccgacgagcagacccaggttgttctcaattgtgatgtcctgtcacacttcccaaatctcttatcacacccaaaagagaagataaataaggaagcagtgtggttcctttccaacataacagcaggcaaccagcaacaagttcaagctgtaatagatgctggattaattcctatgataattcatcagcttgctaagggggactttggaacacaaaaagaagctgcttgggcaatcagcaacttaacaataagtggcagaaaagatcaggttgagtaccttgtacagcagaatgtaataccaccgttctgtaatttactgtcagtgaaagattctcaagt

SEQ ID NO: 164630 - DNA, 1206 bp, Homo Sapiens
ggggtcagtcagtctgacggtcagtggatcggtgggtttatctcaaggcctgagtagccggtaacaaacgagggttcccgggattggaccgacgcagccatgcctctgcgacttgatatcaaaagaaagctaactgctagatctgatcgagttaagagtgtggatctgcatcctacagagccatggatgttggcaagtctttacaatggcagtgtgtgtgtttggaatcatgaaacacagacactggtgaagacatttgaagtatgtgatcttcctgttcgagctgcaaagtttgttgcaaggaagaattgggttgtgacaggagcggatgacatgcagattagagtgttcaattacaatactctggagagagttcatatgtttgaagcacactcagactacattcgctgtattgctgttcatccaacccagcctttcattctaactagcagtgatgacatgcttattaagctctgggactgggataaaaaatggtcttgctcacaagtgtttgaaggacacacccattatgttatgcagattgtgatcaaccccaaagataacaatcagtttgccagtgcctctttggacaggactatcaaggtgtggcagttgggctcttcgtcaccaaacttcactttggaaggacatgagaaaggcgtgaattgcattgattactacagtggtggggacaagccatacctcatttcaggtgcagatgaccgtcttgttaaaatatgggattatcagaataaaacatgtgtgcagacactggaaggacatgcccaaaatgtgtcttgtgccagctttcatcctgagttgccaatcattatcacaggttcagaagatggaacagtacgtatttggcattcaagcacctaccggcttgagagcacactgaattatggaatggagagggtatggtgcgtggccagtctaagagggtcaaacaatgtcgctttgggctatgatgaaaggagcatcattggtaaagctgggtcggaaggaacctgccatgtccatgaatgccaatggaaagataatttgggccagcattcagagtcccgcaagccaacctaaaagcattgggaaatgctggaattaaagatggggaacgaatgcccctggcaataaaggatatggggcagttgtgaaatatccccctccaacatttccgcacaatccctaatgggggggttgtgggga

SEQ ID NO: 164631 - DNA, 511 bp, Homo Sapiens
cgccatgagactcgtttatgaatgggtagagccacagaacgtatagagttaaccaaagtgctcttctctagaatctttacacctcctgtgtggttacaagttaactttgtaagtagcgtaccttccttccttaatatatctagcttcctgtgccctttcatagatattcgattaatttttacattttaaacaagtggaatatttccttaaggggttttgtttcaaactattctgtcatcggtctctaactaacctcagaaactgcagattgggtatgatgatagaaattgaatttttccttgtagttattgtgataaagtatgaaaaattttagaaagtctataccatgttctttcgttaaagatatgctttatacaagaatgttgcagtaccttatttctgggaaattttgtagccagaaataaaatgacaattcctagagagccactgacatccaaaaaattcatactaacgcattcaggttcaatctaaagtaaggaaggtgctaggg

SEQ ID NO: 164632 - DNA, 845 bp, Homo Sapiens
gcccagtagccacgtagcagaagtctgaagccatgccagccctggtgcggctctcccctctacacatttggggtactggatagggtgaagttaggggagaaaattgtggagtctttccagccacagggcagagggaggtggaggagctgggctgcttttcccagcagtattagtgtcccccaggacaggggaccttttccacattacatcactgccccatcccaccttacaacactctggcccctctgcttggtccccttttcccccaggcaggaggcaatcccaggggcctgcctgatagaggcatttcctgtccctgtctcctcctgcatctcctttatcctgtactgccaccctctattccctattctgtgttggactttgaaggccccaagcccagccataagcactgagttcccccttaagcacacctccacaccctccccacaagcaaagcacaaattttggggtccatgtagcatgggccacgtaggaggctcctgacttgccaggggcccagcctcagcatacccaccgagcagctgccagcctgggctgagggtgggcatgaggcaggagtcagcacttggacctagggatgtgaggttttctgtgccccaagtttgtaggaaggtggggcactactgctggggcccacagacacagccagctgggcaaaaggggagggtctaagcccagccaaagagaatgaaggacctttttggctttctccctttcctgccccccagccatggagcctggaactttccggcttttgcttgggaaatggaaaataaaacctttgggaaatgaaatttggggcccaagggggcctccccccaggt

SEQ ID NO: 164633 - DNA, 494 bp, Homo Sapiens
  misc_feature (219)..(229): n is a, c, g, or t
  misc_feature (306)..(434): n is a, c, g, or t
acgcttcgagctcggcacccctcctgggctcaagcaatcctcttacctcagcaactaggactacaggcacatgccaccacgcttggccttctaatttatttctgtgtcaacaaaataaaactcaggcctaggaatagcttggttcagaaatcacagagggacttagtattccattaatacaaatggaaacattaagttcatcatcagatgataaaaggnnnnnnnnnnncctgatactcatctcaaaagacgcagaaaagacattatgcataaatccagtaccgtattattatttcaaatttaaannnnnnnnnnnnnnnnnnnnnnnnnnnnnnnnnnnnnnnnnnnnnnnnnnnnnnnnnnnnnnnnnnnnnnnnnnnnnnnnnnnnnnnnnnnnnnnnnnnnnnnnnnnnnnnnnnnnnnnnnnnnnnnnnatcataaattacttctgacatctagtaacaaatggtggcttcacaggaccgacactgact

SEQ ID NO: 164634 - DNA, 938 bp, Homo Sapiens
atcccccagccctcacatacctcaacaagaagccagagatctgcttaaaaagctgctgaaaaggaaatgctgcttctcgtcctgggagctggtcctggggacgctggagaagttcaagctcatccattctttagacacattaactgggaagaacttctggctcgaaaggtggagcccccctgtaaacctctgtggcaatctgaagaggatgtaagtcagtttgattccaagtttacacgtcagacacctgtcgacagcccagatgactcaactctcagtgaaagtgccaatcaggtctttctgggttttacatatgtggctccatctgtacttgaaagtgtgaaagaaaagttttcctttgaaccaaaaatccgatcacctcgaagatttattggcagcccacgaacacctgtcagcccagtcaaattttctcctggggatttctggggaagaggtgcttcggccagcacagcaaatcctcagacacctgtggaatacccaatggaaacaagtggcatagagcagatggatgtgacaatgagtggggaagcatcggcaccacttccaatacgacagccgaactctgggccatacaaaaaacaagcttttcccatgatctccaaagcggccagagcacctgcgtatgaatctatgacagagcaatgcttttaatgaatttaaggcaaaaaaggtggatgagggagatgtgtgagcatcctgcaaggtgaaacgactcaaaatgacgagttatcagagagtcaatgtcattacatagaacacttcagacacaggaaaagataaacgtggattttaaatgagatcgagtcaatggtgcaataagagaaacgttcaggcagaatagtagtgctgaactcttgaggcacatcaattaattggattcctcgcgacatcgttctcaaccttatcaggatttcatg

SEQ ID NO: 164635 - DNA, 291 bp, Homo Sapiens
ccctagcaccttccttacaaatgtatatacaaacatacaataatgctcatcatgtcagctcttccaagcctagtaaaatgctcatgtcccttatggaaaaacaagtcattcttgcttggagagatacctcttcaaaatccctcttccaaccttgaaagaatacttgcaactccaaggaggggtatctagctttcttaacctttggagggtccagccatcccaaaggcctcagtttcagagtagccatgatctaaagcagtttcacacagagataagtttccttgctcaata

SEQ ID NO: 164636 - DNA, 1365 bp, Homo Sapiens
gttccttccggtttcaaggccaggcacccatggcaaaatataagagcctaaaaacctttcctgaaatgtctctgggcttgaaaaccacactgggccaaccagggttccacaaccactctctttttgatcactgggagacaccaaaaatgctgatagagaagctggttctgagtccacccaggccaaaatcctgacaccctcgttagagtccaggtctgtggtattcagttgaaacactagaaaatgaaagacacgtccatccgtgcccacgctctgcaccaccacgggctgctccaagaccttggcatcattcccatagaggagccgggcctgagccagggcactgccaaaagcaaacaggatcatcttggcccgcagctgatctggttgaaggcggtgtggtcgtaaattggctttgtccagtaagtacagggtatggggataggggtaaggatagccttcctggaatcctgtgtcatttttcacatcataaatattgcattcatgaagatcgatgatgggtgatatggggtagaaggtctctagaacatgattcttagtagcttcaatctcctctctggaggcgatggtgggcagaggatccttagtgctcagtcgggctccaccagaaccacggacttgaaggagaagagactctcggttccaggtagcagaaaacgtggagttttggacacagatcctcctggccagagaaggatgcttgagaatctgagatttacacagctgtattaggttgtccacgatgaccgggcagtaggtctctctcttggggatttcctcagtggtctgccagagacgggcgtgagagatcacattcagaacgcactcgtcttggttctctatgtggttccttggatcatcaacaaggctaagcactttctcgggaaggccttctattaacttggtcttggtgagccagagggcctgctttacaccctcgagaaggcggcaacggtggtgaaagatatagcaggcctggtctttgtacagcggatgctcgtgaagagggggcgagcggtagaaccttgggtccttgtagccgcggtcccagggcggaaagatcggccgcgccagccagggcacgaagtgcatcttccccgcaaaggtgatgggctccagtccagggatctcgtacaccctatccaggggaggaggctccgacttccgcgtggagcgcacgccccactcatacgccccgcgtctcggggccccaaagcccccaaggccgagctgcccggagccagctagcgcccgccttgcgggcccggacgccaactgccataccgatctgatagcctcaagacctccacctggaccccgccatgttgccgcgcgcagggcctg

SEQ ID NO: 164637 - DNA, 1242 bp, Homo Sapiens
ggcggggtccaggtggaggtcttgaggctatcagatcggtgtaaagcaggccctctggctcaccaagaccaagttaatagaaggccttcccgagaaagtgcttagccttgttgatgatccaaggaaccacatagagaaccaagacgagtgcgttctgaatgtgatctctcacgcccgtctctggcagaccactgaggaaatccccaagagagagacctactgcccggtcatcgtggacaacctaatacagctgtgtaaatctcagattctcaagcatccttctctggccaggaggatctgtgtccaaaactccacgttttctgctacctggaaccgaggcagggatgttcagagaacacaggtgttctaactggtggaatcctggagcaggaaaaccagctacggaatgatctgggatttcaggacatctgcttggtcaggatttgtgtatagacttcctggcaatgagtcagctttgcagagagtctcttctccttcaagtccgtggttctggtggagcccgactgagcactaaggatcctctgaccaccatcgcctccagagaggagattgaagctactaagaatcatgttctagagaccttctaccccatatcacccatcatcgatcttcatgaatgcaatatttatgatgtgaaaaatgacacaggattccaggaaggctatccttacccctatccccataccctgtacttactggacaaagccaatttacgaccacaccgccttcaaccagatcagctgcgggccaagatgatcctgtttgcttttggcagtgccctggctcaggcccggctcctctatgggaatgatgccaaggtcttggagcagcccgtggtggtgcagagcgtgggcacggatggacgtgtcttccatttcctagtgtttcaactgaataccacagacctggactctaacgagggtgtcaagaatttggcctgggtggactcagaccagctcctctatcagcatttttggtgtctcccagtgatcaaaaagagagtggttgtggaacctgttggcccagttggtttcaagccagagacattcagaaagtttttagctctatatttgcatggtgctgcgtgagcggaggacccctctgaatcctgaaacccctcttgcctctcttccacggaagagggcctgggccccgtggagcctcagtgcccgtttggcctgctgtctcgctgacaataaagagcccttgcgttgcaccgaa

SEQ ID NO: 164638 - DNA, 758 bp, Homo Sapiens
  misc_feature (69)..(98): n is a, c, g, or t
  misc_feature (651)..(667): n is a, c, g, or t
aaagacgctgaggattgagagggtcaaagttattttattgatcaactgaataaatatacataaatgttnnnnnnnnnnnnnnnnnnnnnnnnnnnnnnccccattccagatcctgggtgtttggctgacctacagatacaggaaccagaaagacccccgcgcgaatcctagtgcattcctttgatgagaaaacaaggaagatttcctttcgtattatgatcttgttcactttctgtaattttctgttaagctccatttgccagtttaaggaaggaaacactatctggaaaagtaccttattgatagtggaattatatatttttactctatgtttctctacatgtttttttctttccgttgctgaaaaatatttgaaacttgtggtctctgaagctcggtggcacctggaatttactgtattcattgtcgggcactgtccactgtggcctttcttagcatttttacctggcagaaaaactttgtatggtaccactgtgttggttatatggtgaatctgaacgtacatctcactggtataattatatgtagcactgtgctgtgtagatagttcctactggaaaaagagtggaaatttattaaaatcagaaagtatgagatcctgttatgttaagggaaatccaaattcccaannnnnnnnnnnnnnnnnaggaaagattgttgtggtaaaaagtgttagtataaaaatgataatttacttgtagtcttttatgattacaccaatgtattctagaaatagt

SEQ ID NO: 164639 - DNA, 605 bp, Homo Sapiens
atcctgttatgttaagggaaatccaaattcccaatttttttggtctttttaggaaagatgtgttgtggtaaaaagtgttagtataaaaatgataatttacttgtagtcttttatgattacaccaatgtattctagaaatagttatgtcttaggaaattgtggtttaatttttgacttttacaggtaagtgcaaaggagaagtggtttcatgaaatgttctaatgtataataacatttaccttcagcctccatcagaatggaacgagttttgagtaatcaggaagtatatctatatgatcttgatattgttttataataatttgaagtctaaaagactgcatttttaaacaagttagtattaatgcgttggcccacgtagcaaaaagatatttgattatcttaaaaattgttaaataccgttttcatgaaagttctcagtattgtaacagcaacttgtcaaacctaagcatatttgaatatgatctcccataatttgaaattgaaatcgtattgtgtggctctgtatattctgttaaaaaattaaaggacagaaacctttctttgtgtatgcatgtttgaattaaaagaaagtaatggaagaattg

SEQ ID NO: 164640 - DNA, 342 bp, Homo Sapiens
tactctcagcactccgtcagtgttgccatgactatttttattatcattattaatgattacttagatcaattatttagcagtggactaatggaagctacagagcagggaagggaagcagatctagggaggaaggcagttttgatttgaggaggtttgcacatgtagagaagcatactggagaagcatatccagagggcgaaagatatctctccattgtgcatctgcctcttttgacgctggaagacacatgtcttactccccaaagggagcccggcactgggagccttcttgatgatctcaaaaataatagctattcaagaaatcaccaggactctgcaccgt

SEQ ID NO: 164641 - DNA, 930 bp, Homo Sapiens
gcctgggtggcgtttccggcacgaggcagccaagctccaagtcaatatagccaacagagcagcagctacgggcagcagagttcattccgacaggaccaccccagtagcatgggtgtttatgggcaggagtctggaggattttccggaccaggagagaaccggagcatgagtggccctgataaccggggcaggggaagagggggatttgatcgtggaggcatgagcagaggtgggcggggaggaggacgcggtggaatgggcagcgctggagagcgaggtggcttcaataagcctggtggacccatggatgaaggaccagatcttgatctaggcccacctgtagatccagatgaagactctgacaacagtgcaatttatgtacaaggattaaatgacagtgtgactctagatgatctggcagacttctttaagcagtgtggggttgttaagatgaacaagagaactgggcaacccatgatccacatctacctggacaaggaaacaggaaagcccaaaggcgatgccacagtgtcctatgaagacccacccactgccaaggctgccgtggaatggtttgatgggaaagattttcaagggagcaaacttaaagtctcccttgctcggaagaagcctccaatgaacagtatgcggggtggtctgccaccccgtgagggcagaggcatgccaccaccactccgtggaggtccaggaggcccaggaggtcctgggggacccatgggtcgcatggggaggccgtggaagagatagaggaggcttccctccaagaggaaccccgggggttccccaggggaaccccctccgggagtgggaaaacgtgtccgacaatctacaccgggcacaacgggacatctgtcccccgtcgcggggattgttgggagcaacacaaatttttttgtgcgtgggcagcac

SEQ ID NO: 164642 - DNA, 1560 bp, Homo Sapiens
ggggagagggaaagcgagagggagacggacgttgagagaacgaggaggaaggagagaaaatggcgtccacggattacagtacctatagccaagctgcagcgcagcagggctacagtgcttacaccgcccagcccactcaaggatatgcacagaccacccaggcatatgggcaacaaagctatggaacctatggacagcccactgatgtcagctatacccaggctcagaccactgcaacctatgggcagaccgcctatgcaacttcttatggacagcctcccactggttatactactccaactgccccccaggcatacagccagcctgtccaggggtatggcactggtgcttatgataccaccactgctacagtcaccaccacccaggcctcctatgcagctcagtctgcatatggcactcagcctgcttatccagcctatgggcagcagccagcagccactgcacctacaagaccgcaggatggaaacaagcccactgagactagtcaacctcaatctagcacagggggttacaaccagcccagcctaggatatggacagagtaactacagttatccccaggtacctgggagctaccccatgcagccagtcactgcacctccatcctaccctcctaccagctattcctctacacagccgactagttatgatcagagcagttactctcagcagaacacctatgggcaaccgagcagctatggacagcagagtagctatggtcaacaaagcagctatgggcagcagcctcccactagttacccaccccaaactggatcctacagccaagctccaagtcaatatagccaacagagcagcagctacgggcagcagagttcattccgacaggaccaccccagtagcatgggtgtttatgggcaggagtctggaggattttccggaccaggagagaaccggagcatgagtggccctgataaccggggcaggggaagagggggatttgatcgtggaggcatgagcagaggtgggcggggaggaggacgcggtggaatgggcagcgctggagagcgaggtggcttcaataagcctggtggacccatggatgaaggaccagatcttgatctaggcccacctgtagatccagatgaagactctgacaacagtgcaatttatgtacaaggattaaatgacagtgtgactctagatgatctggcagacttctttaagcagtgtggggttgttaagatgaacaagagaactgggcaacccatgatccacatctacctggacaaggaaacaggaaagcccaaaggcgatgccacagtgtcctatgaagacccacccactgccaaggctgccgtggaatggtttgatgggaaagattttcaagggagcaaacttaaagtctcccttgctcggaagaagcctccaatgaacagtatgcgggggtggtctgccaccccgtgaggggcagaggcatgccacagcactccgtggaggtccaggaggcccaggaggtcctgggggaccccatgggtccgccatgggaggccgtggagggagatcgccggaggcttccctg

SEQ ID NO: 164643 - DNA, 334 bp, Homo Sapiens
tacgatctactaaagagtaagccttcattacattaaataaaacctcctgtccaaggctatctttttccttaaaaaagttgtgttcagggtaagttctagcaatgtcccttcggatcaatttttcacaaggcgaggtcattttcaggagttctgaatactgatccttaattggcatactttgtgcactgcataaaagttgccaaactattgctctaaagtgatggggtatccctttatgaacaagttccttaacttgcttttccttctttttgcgtacatcttcccattcattaacaattcttccccaaagaatccaagaatcttcttcaaggta

SEQ ID NO: 164644 - DNA, 596 bp, Homo Sapiens
  misc_feature (295)..(321): n is a, c, g, or t
tactatcattgaagtcaatagaaacacaaaggaatttttcagacaaagtatggcaaacaacaatctcttgggtgacaacacaaccccaaaatctgttaactttggaaaggtgcgagagcatagaactccagtgcaaatggttacttccagataacggccacagttctctaaatgtagtctaagaaatgtagaagggggaaaccataaaggcaacatacctgaatctttcaagacaacacacaaactctgccatgtacacacttgccttttatattgggcagtgaggaaggggagnnnnnnnnnnnnnnnnnnnnnnnnnnnaaagaggtaaactacaagaataatatccaggctacagtctaaagggtaaaatttaaatgtttcagtgagacagtagcattatggaaggtctaaggaacaggtacagtaagatgagtctaaataacagagtgccttaagtgcaggtgtactgcaaatacatagggtctgatgccttccacttcctctgcaccactatggaagcttctggtaagctactctagacagctatgtgaaaagaaacaagagcagtactcataatgaaagcctagttactt

SEQ ID NO: 164645 - DNA, 502 bp, Homo Sapiens
cctccagcgtgtttaattaaatatgttactgtattagcaaaacattttcatttttaaaatctgctaattttaaacttggactgtgttaagtaaaagttaaatcatacactgcaaggtgtaggaagatttgttttaatgaatccagtgatacagatttgattactaagtttgaactgttaattgtttaacaattttagacttgtggctttctttctttggtttatttgtttttgcttttactcctatgctacactagtttgccatgtagcaattgcactgtgcaatattacaataaggactgggaaaattttatggatgtaatgtctattacggtttgcgatagtatttctctctaggtctcagtgatttaaatgtgaccaagccttctgtactttgtcacaaaaagcgggttttccaggtgactattttggtgagtgtcaaaataagaatttatggtgtattactgtcgattcactttgaattaaaatatatatattgcagc

SEQ ID NO: 164646 - DNA, 495 bp, Homo Sapiens
tcatcccagaataaaccttgacaataatatgttcttcctgacaaatggcaatggttgtatcaacatcctcagctacccagaactgaagcactgtgcagtcaaatcaacgccaatccttccaactgcatctgtatcaagtttgaccccatggggaagtactttgccacaggaagtgcagatgctttggtcagcctctgggatgtggatgagttagtgtgtgttcaggtgcttttccaggctggattggcctgtaagaaccctcagtttcagccatgtatgggaaaatgctggcgtaagcatcggaagatcattttattgacattgctgaagtggagacaggtaacttcatgagaatctaccgtctttcacctttggcagtcaggacttctcttgtgatctcatctctgcatgtgactacttcaccagcatgatcatgaatgaatttgtctcctttagacaagggacaaactatgggaggtacagtgtgagtctccg

SEQ ID NO: 164647 - DNA, 676 bp, Homo Sapiens
gtgcaatgaacacttgaccaaccattttgaggagagtatgaagggccgggacatagctgaagtggagacaggggacaaactatgggaggtacagtgtgagtctccgaaccttcacagtggcgtggcaccccaaaaggcctctgctggcatttgcctgtgatgacaaagacggcaaatatgacagcagccgggaagccggaactgtgaagctgtttgggcttcctaatgattcttgagaggaggttgtagggagaggaggccccggcagaggtcttccttcatgtggttagtttggtctgttctctcggagttggtgggcaccctaaatatttgtaagttggtataaattgtaaacgtctctggtcaggctgcgcatttcgttcttttgctttgtctgtgtattagctctttccattctttgcccccagcatgagttaactcgcgtggactctgcagtgcgagtagtgaccccagcataccttgtcctctggacctcctgtcttctctgcttctgggtgcatggtagactttgtggcatttgatacaacttggacaatacctagtttggagggaggggaatggaagggcatggaagtttttttaaataattaaaaatatatacatataattttgagaattgagcatttaataaactgacttttgttattatggaaaa

SEQ ID NO: 164648 - DNA, 967 bp, Homo Sapiens
  misc_feature (802)..(811): n is a, c, g, or t
agacgcgcgagttcctggcgcacagcgccaaggtgcactcggtggcctggagttgcgacgggcgtcgcctagcctcggggtccttcgacaagacggccagcgtcttcttgctggagaaggaccggttggtcaaagaaaacaattatcggggacatggggatagtgtggaccagctttgttggcatccaagtaatcctgacctatttgttacggcgtccggagataaaaccattcgcatctgggatgtgaggactacaaaatgcattgccactgtgaacactaaaggggagaacattaatatctgctggagtcctgatgggcagaccattgctgtaggcaacaaggatgatgtggtgacctttattgatgccaagacacaccgttccaaagcagaagagcagttcaagttcgaggtcaacgaaatctcctggaacaatgacaataatatgttcttcctgacaaatggcaatggttgtatcaacatcctcagctacccagaactgaagcctgtgcagtccatcaacgcccatccttccaactgcatctgtatcaagtttgaccccatggggaagtactttgccacaggaagtgcagatgctttggtcagcctctgggatgtggatgagttagtgtgtgttcggtgcctttccaagctggattggcctgtaagaaccctcagtttcagccatgatgggaaaatgctggggtcagcatcgggaaaatatttttattgactttgctggaagtggagacaggggaccaactatggggagggacagtgtgaagtcttccaaccttcaannnnnnnnnncacccccaaaagggcctccggctggcaatttggccgtggatgacccaaaacggccaaatattgaacagcagcccgggaaaacccggaacctggggaaaatggtttgggggcttccctaaggaattcctggaaaagggagggttgttagggaaaaag

SEQ ID NO: 164649 - DNA, 778 bp, Homo Sapiens
tggtcaaaccttgatacagaggcacgttggaagatgggccgttgatggactgcacaggcttcagttctgggtagctgaggatgttgatacaaccattgcccatgttggtcaggaaagaacatattaattggtcattgttccaggagatttcggttgaccttcgaacttgaactgctctttctgcgtttggaacggtgtattcttggcatcaataaaggtcaccacatcatccttgttgcctacagcaatggtctgcccatcaggactccagcagatattaatgttctcccctttagtgttcacagtggcaatgcattttgtagtcctcacatcccagatgcgaatggttttatctccagacgccgtaacaaataggtcaggattacttggatgccaacaaagctggtccacactatccgccatgtccccgataattgttttctttgaccaaccggtccttctccagcaagaagacgctggccgtcttgtcgaaggaccccgaggctaggcgacgcccgtcgcaactccaggccaccgagtgcaccttggcgctgtgcgccaggaactcgcgcgtccattgctgtggccccggaacagctcctgcatccacaagcacgtagcagcgacggcacgctgctcactgagcaccacggggccatcgagccggggccgctctggcccaacgccgagggccccattggctgcagcggggaccgccatgccgagctcacccagcttccaactcacaacactgcagcagcctccacggcgcagtcag

SEQ ID NO: 164650 - DNA, 787 bp, Homo Sapiens
  misc_feature (726)..(726): n is a, c, g, or t
  misc_feature (768)..(768): n is a, c, g, or t
gtaggagtcacctgtggtgagctggaggttggagcctgtagatggcgtggctctgtggctcacttcctgtggttgtggcagcgacagcgatggagactgcagctcgacaggaatgctacccagaactgaagcctgtgcagtccatcaacgcccatccttccaactgcatctgtatcaagtttgaccccatggggaagtactttgccacaggaagtgcagatgctttggtcagcctctgggatgtggatgagttagtgtgtgttcggtgcttttccaggctggattggcctgtaagaaccctcagtttcagccatgatgggaaaatgctggcgtcagcatcggaagatcattttattgacattgctgaagtggagacaggggacaaactatgggaggtacagtgtgagtctccgaccttcacagtggcgtggcaccccaaaaggcctctgctggcatttgcctgtgatgacaaagacggcaaatatgacagcagccgggaagccggaactgtgaagctgtttgggcttcctaatgattcttgagaggaggttgtagggagaggaggccccggcagaggtcttccttcatgtggttagtttggtctgttctctcggagttggtgggcaccctaaatatttgtaagttggtataaattgtaaacgtctctggtcaggctgcgcatttcgttcttttgctttgtctgtgtattagctctttccattcttntgcccccagcatgagttaacttcgcgtgggactcttgcagtngcgagttagtgaccccagc

SEQ ID NO: 164651 - DNA, 847 bp, Homo Sapiens
aaatggctgtctagctgtgtatatcttcagtccttaagcttctacggagtacgtactattgtttagtcacagctgtcaggatgacagtgagcagatccagacaccagatccagctaggccagatgtacagtatctaacttgatctgaactgaacctattttccttgatgatgcctaaaactacatccatagtttctggtgaacctgtaatacagtcctgaaagtacagttttatataataagatgctgatctctttattctttcaagtaagagtgctagtgaacaaattgtgttacttgccttgggatctaagtttgaacgtttgtaaaatgctgtcttcctagtccaaacagctgcagctttgggcatttttcgtttttaattatatcttcctctgactttgtatcccttaaaacctacactctccaattgtaagagaaagggggcagggaagcaatatagcttccattctaaggctgtattcccgttatgaattactagctgattacagttcagagcattgatcctggaatgtgtgctggagaaatttaaaatactggggttttttgtttaatggtgcctatttagagttggaagttgaacagctgttgcattacatacttttgcttttttattgaaattttgaaatcaaacgtcttgatttttctgttctgttgaattgctatgttcaggatgttctagggggtgggggcagggactcttttcgtaataagcacttgttttattttgtgtgtgtggagtataaaggctacacccttattgtaaaaaaataataataataaaatgaaagaaacaatcaccaccaccattattaaactgaaatgag

SEQ ID NO: 164652 - DNA, 132 bp, Homo Sapiens
cataagtcagaggaagaataattaaaaagaaaaatgcccacaactgcagctgtttggactaggaagacagcagttttacaaacgttcaaaaaatcccaaggcaagtaacacaatttgtaactatcagatcca

SEQ ID NO: 164653 - DNA, 933 bp, Homo Sapiens
gtggtggaggagcagagtgttagccaaatcgatggtgactttgaagactacaagcgggaggtgttggaggccctgggtgaagtcatggtcagccggccccgagagtgaagctttccttcccagaagtctcccgagagacatatttgtgtggcctagaagtcctctgtggtctcccctcctctgaagactgcctctggcctgcagctgacctggcaaccattcaggcacatgaaggtggagtgtgaccttgatgtgaccgggatcccactctgattgcatccatttctctgaaagacttgtttgttctgcttctcttcatataactgagctggccttatccttggcatccccctaaacaaacaagaggtgaccaccttattgtgaggttccatccagccaagtttatgtggcctattgtctcaggactctcatcactcagaagcctgcctctgatttaccctacagcttcaggcccagctgccccccagtctttgggtggtgctgttcttttctggtggatttaatgctgactcactggtacaaacagctgttgaagctcagagctggaggtgagcttctgaggcctttgccattatccagcccaagatttggtgcctgcagcctcttgtctggttgaggacttggggcaggaaaggaatgctgctgaacttgaatttccctttacaaggggaagaaataaaggaaaggagttgctgccgacctgtcactgtttggagattgatgggagttggaactgttctcagtcttgatttgctttattcagttttctagcagcttttaatagtcccctcttccccactaaatggatcttgtttgcagtcttgctgacagtgtttgctgtttaaggatcataggattcctttcccccaacccttcacgcaaggaaaaagcaaagtgattcataccttctaa

SEQ ID NO: 164654 - DNA, 484 bp, Homo Sapiens
gttagaggatcccattcgcaaacggggctgtaaaagtgaagcgcacagtgtactccttagggcgcttcaggagctcaggggcctcctgggattcctcatcttggtttttccgtcggcatttctgctgcttccgagtcagggcttccttcgtttgtttttccgcctgcttggtggacttcccgcctgccttcacctccttcagctttttctcttgcttctcatactgtttcagcagttctttctgcttctgctggtacaatctttttgaaggtcatgtaaattgcccctatagtagtggagccgctgggcatcgagggtggattgatatcagtgcagacatcatccaagaagccctggttcatggggagaggatcagcaaggtcttccgacagccctggaggtacagttattaagccagatgacagcgttgaggtccaggtggttggtgggctcatccagcatcagcgggttacgagctcgaatt

SEQ ID NO: 164655 - DNA, 960 bp, Homo Sapiens
  misc_feature (850)..(850): n is a, c, g, or t
gacattcggctaccagggacagaaacactctttaagaacttggattttggcatcgacatggattcaaggatttgcattgtgggccctaatggtgtggggaagagtacgctactcctgctgctgactggcaagctgacaccgacccatggggaaatgagaaagaaccaccggctgaaaattggcttcttcaaccagcagtatgcagagcagctgcgcatggaggagacgcccactgagtacctgcagcggggcttcaacctgccctaccaggatgcccgcaagtgcctgggccgcttcggcctggagagtcacgcccacaccatccagatctgcaaactctctggtggtcagaaggcgcgagttgtgtttgctgagctggcctgtcgggaacctgatgtcctcatcttggacgagccaaccaataacctggacatagagtctattgatgctctaggggaggccatcaatgaatacaagggtgctgtgatcgttgtcagccatgatgcccgactcatcacagaaaccaattgccagctgtgggtggtggaggagcagagtgttagccaaatcgatggtgactttgaagactacaagcgggaggtgttggaggccctgggtgaagtcatggtcagccggccccgagagtgaagctttccttcccagaagtctcccgagagacatatttgtgtggcctagaagtcctctgtggtctcccctcctctgaagactgcctctggcctgcagctgacctggcaaccattcaagcacatgaaaggtggagtgtgacccttgattgtgaccggggatccccactcctgattgcatcccatttctctgaaaagaacttggnttggtcctggcttcctccttcaataataacctggaacttggccccttatttcctattgggcatcccccccttaaaaccaaaaccaaggaggggggacccacccctttttt

SEQ ID NO: 164656 - DNA, 1212 bp, Homo Sapiens
ggacgcgtgggtcgacccacgcgtcgcccacgcgtccgagtgaccttcaaaaagatgtaccagcagaagcagaaagaactgctgaaacagtatgagaagcaagagaaaaagctgaaggagctgaaggcaggcgggaagtccaccaagcaggcggaaaaacaaacgaaggaagccctgactcggaagcagcagaaatgccgacggaaaaaacaagatgaggaatcccaggaggcccctgagctcctgaagcgccctaaggagtacactgtgcgcttcacttttccagaccccccaccactcaggccctccaggtgctgggtctgcatggtgtgacattcggctaccagggacagaaaccactctttaagaacttggattttggcatcgacatggattcaaggatttgcattgtgggccctaatggtgtggggaagagtacgctactcctgctgctgactggcaagctgacaccgacccatggggaaatgagaaagaaccaccggctgaaaattggcttcttcaaccagcagtatgcagagcagctgcgcatggaggagacgcccactgagtacctgcagcggggcttcaacctgccctaccaggatgcccgcaagtgcctgggccgcttcggcctggagagtcacgcccacaccatccagatctgcaaactctctggtggtcagaaggcgcgagttgtgtttgctgagctggcctgtcgggaacctgatgtcctcatcttggacgagccaaccaataacctggacatagagtctattgatgctctaggggaggccatcaatgaatacaagggtgctgtgatcgttgtcagccatgatgcccgactcatcacagaaaccaattgccagctgtgggtggtggaggagcagagtgttagccaaatcgatggtgactttgaagactacaagcgggaggtgttggaggccctgggtgaagtcatggtcagccggccccgagagtgaagctttccttcccagaagtctcccgagagacatatttgtgtggcctagaagtcctctgtggtctcccctcctctgaagactgcctctggcctgcagctgaactggcaaccattcagcactgaaagggagtgtgacttatggacggatcccttgatgctcattcctgaaactgttgtcgtcctcaacgatgctactgtcctacaaaaggccttggcccattgcttcgacccac

SEQ ID NO: 164657 - DNA, 776 bp, Homo Sapiens
  misc_feature (251)..(317): n is a, c, g, or t
ggcgctgccctggccttgagcatccactgactgtccaagggccactcccaagaagcccccgtcacgatccaccctttcaggctaaggagctccctatctaccctcaccccacgagacagccccttcaggatttccactggaccttgcccaaatagcaccttaggccactgcccctatagctggggtggaaccggaatctgggtcaatacagtccttttgtctcccaagggaagagaatgggcagcaggtannnnnnnnnnnnnnnnnnnnnnnnnnnnnnnnnnnnnnnnnnnnnnnnnnnnnnnnnnnnnnnnnnnttcccagatattcagggcaagggaccagtcggaagggattctggctattgggggagcccagagacaggggaaggcagcctgtccatctgtgcataaggagaggaaagttccagggtgtgtatgtttcaggggcttcacatggaggagctgcagatagatatgtgtttctgtgtatgtgtatgtctgcctttttttctaagtgggggcttctacaggcttttgggaagtagggtggatgtgggtagggctgggaggaggggccccagccttaggtttggagctctggatgacatacataagtaggagcagtgggaactgtttctgtcataatggaaggctgaaagcgtggagtgaactcaggtcctacagttcatgggtggcttttggttggtcctggcctttacgggaaggaagcaaagctataccgccctaagggaacccgggacgggcgcagccccc

SEQ ID NO: 164658 - DNA, 524 bp, Homo Sapiens
aactagcactgtgttggtcagaaaccagtctcgctaaagcacttcaggctggaccattaaaaaaagatggacccatgcagatacagttaaagatctgctgactgtaaaattaaagaagacacagagtggagatgaaaagaggaagcttataccatcgccgaaagcacggaatccactagttaccgtctctgacttgcagcatgttaccctgaaacctaactccaaagtgttatcgactcgagttacaaacgtcttaatcactcctggaaaaagtcagatggatctgcggaaactgcttagaaaagtcgatgtagagaggagcccaggtggaacccctcttaccaataaggaaaatatggaaacaggaacaggactgactccagtgatgacgcaggccttaaggagaaagtttcagctggctcaccctagaagcccaactccaactctgccactttctacaagcagctttgatgaacaaaactgatgccaactctgcctcactccatgagatgatccataacaaa

SEQ ID NO: 164659 - DNA, 1085 bp, Homo Sapiens
gactctagcaggatctgtgggtcgttctgaaaatgagcaagaaatcaaaactagcctattatcatctagaaaattaggcaccaagaaggagattatctccttggaaatgcaacatcaatgacagagaagtttcaattaattaagcagctgacagatctccttgtgaacacaacaaaggaaatccacataagaagagcctccgtaaagtcctttgtcttctaccaggaacggtcggaaaaccatttctggttgttctcgctgctttacaattgtgagctccattgaatatggcctctttggtgggataatacccattatcatttctgagttgttgagagtatgggtttcccacttcaggcagcaatgtcatatctgtgttgatatgtgcaaaagatggcacattaaatattccctggatcagttcgggtgggctgcttactcccaaccacaggaacatgtgtagaccattagccagtaagaatattccttcttctgaaagacgggactcagagcaacgaacggcagcaggtaacattgtactcttgacatctaacgtgtgtatgggcagaagttgtgggtagaagaaaagctgagagtcagccacacccatggtcatgaccagctgtctctggtatgctcgttcatcagttgagatctctggtctgctgagtagtacacagtttttcaacaagcaattcatgtacactggcaatactttcatggaatctggtagaataagctggcttgctgcagaaggacttgcacaattcttccggtaacatgccaacatatgggcagtctgattaactagaatttcccggatgaccttcaaaggctggtggagaactgctttaaaagctgacttggcaaagaagttgataagagcatctgtctcacagctcttataaagatcagctagctgagagctgcagtttaagccaagattgtgaatccgaagtcttctttgaccactgattgtcgtgtaaagcacagcacactggattaaggctccactgtcttcactgagtttgtcatcgtgcttgaactccacggtcactgccttgtcacaatcgatggcagccacc

SEQ ID NO: 164660 - DNA, 1352 bp, Homo Sapiens
  misc_feature (34)..(36): n is a, c, g, or t
tggtgtgttgggccaactgcctttgccccctccnnnactttgctcaagccccatcatccctcctcacacgtccatctcccctcacagcctcgcttcaacttcagcctccaaacacactatggtgcgggcacttacttactgcagcagcagagaggaaacattcacggccatctaagtcccaacctgccgatgaagcaacaaagctctggccttacaaggcctcagaaatgggggcagtcaaaacacactctgtaagatgagcaaagaattaattcagcgtgttagcaacagaacccttgggtgtgtgctgtgggataagcgagctacgcggggaaacgtgccactggcttccaggaaccactgcactcagccaatgagcagaagtaaaaacagtggtgttggcagggccaagggaaaacagcagccctagaaccatctggggcgcagggcagtgagagagccaagtgactggcccttccctctggccagtggggttgcaaaccaaaagctgccttgaggtatagaaggggatttgcccaaagatatttgtgactgtagaattcgtaaccacaaaatgctggtgccggcccacatggcccaggtggcagtgacaacctctcaccctggaatgccccagaggaccccaaccacaacaggtggattatttcagcccaagtaattgtgtccccacatagtaactaccaatcacaacagtgtaaaataaacacatgtacatgggcagaaagcagaaaagatataaaaatcattccaaattcagcagttgaaaataaccctcatagatatttaagtccagtgcaaacaagaagacagcggagtgtgtgtgcacatgtgtgcacacctttaggtctgcactgtcaacaccagacacagtgaagcccaagcagcaagcagtccacagacgggggcgttagtgtcgggaataccaatgggtcaccctgcatcaaaacacatggagcagactgctgagccagctcaggggaagcggagagaccccaggagtgacggtgagaatgcaactcacttgtcattacacaggatatggcagatcggatttgaccaacaaaatggggaggaactgatccagatgtggaatgtgacagagaatcccttcccactgccatggaacatttataaaaataatcatacgttaatcaatgaagaaagggagccacacatttaaaaaagcagaaatcgtacaggccacttcctcagataaccattctaactagggtcaaattatacatcaggactgaaaccacaaacatataggaaataagataaagtcttttggtttttttgagacggagtctcattctgtcagccaggctgga

SEQ ID NO: 164661 - DNA, 779 bp, Homo Sapiens
  misc_feature (758)..(758): n is a, c, g, or t
gccagagcccattgctacggaccccagattttaccagagctcattgattttcagaaaattatctacattcagagcaagttttaggaaagagtgtatagaccaggaccacgacttttcagaatccagtgaggaggaggcgcccgcagaagcctcaagcggggcactgagaagcaagcatggtgagaaggctcctatgacttctagaagtacatctacttggagaatacccagcaggaagagacgtttcagcagtagtgacttttcagacctgagtaatggagaagagcttcaggaaacctgcagctcatccctaagaagagggtcaggtaaagaagattaggatgccaagacttggcctgcagaatgtcaggaatgtgaattaaaagctgctgtttccagacgctttttattctgagcaccttcactaccttgtatccagttcatctgggaactcctttttgcattttacaaaatggaaagaggcaggaaattatgataaactcatgtttaacagaaagagtttcactgactaaatgtatgtaattatattttgttgatgtagaagaaataaatagcaaatttgtggtattcttttttttaaacctgctctcattcctattaacactaagatcttagatttttatagtgataaatgggttgacatcattgtcgtttgtaattgtaaagcctcaaaagacaactgttcctactatgtaattatagacagaaataaaaacttctgagtctatcatcattanggccagagatctgatacatgt

SEQ ID NO: 164662 - DNA, 651 bp, Homo Sapiens
cttcctgtacatcagcgaacccatgcaggaaagaaagcccatggaagaggccacactcggaagtcaaagttcatggcacattagagagctaatcagcagtatctattatggacactgaaagaaagttgtgtcaattttactcacattttaaaagtatattttgacttgtggtttaaatatgggagtaaattcagcctttcttcttttcatctcagtcataacccaaaagctacgggagaaaaagcagaagtgtaatctctgtatctgacaaaattaggagacagctgcaaccctaatgagagggctgccacaggcagaggaaatgaagcactgatgcaggagatttcagagtgagagtgctcaaggctgcaggtgcaagacagcactggtaaggactcttagctgaggttcgggatataccccgaggcgccggaccatagatataacagtggtaacagtgctgtcttgcacaggcagaggaaatgaagcactggtgcaggagatttcagagtgagagtgccagaggatgattttgtaaataaggacagtctatctcagcataacctactacttgtcgatattctcatatctgtttcacggtatgcctaacaatagtaatctcgttttctgatggacgcaacgttggaccgc

SEQ ID NO: 164663 - DNA, 316 bp, Homo Sapiens
taccaattcactccctcgtctgtcaacccctcactgattattgtttgccgaacacaccaggctctcacccttgctgcctctaattcatcctaagagtcaacagaggcattatctacccccacagaccagccttcttgtatgcatgtctccagcctagcactcaacacacccaggttttaaatgggcttaacagcctatctccctgtccaggctttgagcccctcgagggtctttaatttctttttatacctagtacctagttctgagcctttacagagaggccactccaatttgcaaaacaggactagtaccattt

SEQ ID NO: 164664 - DNA, 317 bp, Homo Sapiens
cagtggtcttttcccctcaaatgaaccagtattttgtgccatgaatcgtgctgcagatacttgcatacatcatctcattcaatctttccaacaaccttctcaggtacaaatggtactagtcctgttttgcaaattggagtggcctctctgtaaaggctcagaactaggtactaggaataaaaagaaattaaagaccctcgaggggctcaaagcccggacagggatttgcactttatttcagagttgatggtgagtaattgaagcctgtcaagcaggagagtggtgtactccttcatgcttttaaaagtattcagtcc

SEQ ID NO: 164665 - DNA, 708 bp, Homo Sapiens
  misc_feature (31)..(31): n is a, c, g, or t
  misc_feature (46)..(46): n is a, c, g, or t
aggcggttttcaaaaagaaaaagtcaagtgnaccacaactctgagngcaatgaaatggcaaaggaggagttgaaaactgtttttctaattaatttgaaaataatacaaaatggctgctgccgttgctaaggcaccggagaaaaacagagtccctgaaaatccacaggtactgtgtgactcttcctttcacaacgacacagagagggaaacagccccatttaagcttcctacactgattggtttgcaaccatttccatgagtgagctgcacatgatatcgataaagactcttcctgggaaaaaaataaaacagtccatgaaaacaatcacaaacagaaaaccaaaccaaaccaaagtacagaactgtttctaaattccctatccttttcaaaccaacatgctggtggagaagggagggtgggccacagggctccaacatcagaccttgaaaacaccgaggacaaaatatcgatcaaaaaagtcatgttgttccaggtcccaagatgatggagtcataagattgggtgggcaatgaccacacatgagtcctgtatggagcagtgtctcagccacttgtgactctttttttcagccgtggtacacattggatgtttcaaagcctcaatgcatgttttgtatcctgaaagtctattgttctcacttacaaaagacataagaatcaaattaatactttattatcaaacactat

SEQ ID NO: 164666 - DNA, 537 bp, Homo Sapiens
gtgaagtgggagccctgtggcccaccctcccttctccaccagcatgttggtttgaaaaggatagggaatttagaaacagttctgtactttggtttggtttggttttctgtttgtgattgttttcatggactgttttattttttcccaggaagagtctttatcaatatcatgtgcagctcactcatggaaatggttgcaaaccaatcagtgtaggaagcttaaatggggctgtttccctctctgtgtcgttgtgaaaggaagagtcacacagtacctgtggattttcagggactctgtttttctccggtgccttagcaacggcagcagccatttgtattattttcaaataattagaaaaacagttttcaactcctcctttccattcattgctcttcagagttgtggtcactgacttttcttttgaaaaccgcctccaccaacaacccccgtttgcctaaaccaccccccttttacttagtatgtttattttttgtgtgtctcttgccttcctcccacgttttatttcccctctagagc

SEQ ID NO: 164667 - DNA, 775 bp, Homo Sapiens
  misc_feature (466)..(502): n is a, c, g, or t
cataattagagggcagactgtttctccaccctctccgagatggcatgacccacggtgtagtaggactgggagcccctggcactgtactgcatgctgtattcatcatccacgtcttgcttagctgtctcaatgatctgcttagcatccttctcagaaacttcttcgctatttggatccaggagtattttctcttcggtttcctgcctactggactcttcttcctcatcctcttcctcataatcagaatcactctcttcactgtcagatctaggggcaacttcataaccaggattcatctccagccaggcgtccagctgacttgctttgggtgcttctggtccgaacagaaccttgccggtttctgtgtgagtcactttgacagggaggtcactcatctggctgctctcatctatgggctctccatccggtcccagggcagactccccaccctctgcattctcctcannnnnnnnnnnnnnnnnnnnnnnnnnnnnnnnnnnnntggctgcctgggcttgcttgtgctcccaaaccagattggtcagattggctacatactcatcggtctgctgcaaaaggtaagctaaacgcctgtctttcttttgatcaatcagttttctataaccctcctcatcttcagccatcagtcgccgcattctctccttttcaatccgctctgtctccttcttctgctctctttcagtgttgggcatgccaagttggccactgctttgggagagcttctgggatctttccggccacagaccgatggata

SEQ ID NO: 164668 - DNA, 1230 bp, Homo Sapiens
tcctgtctagccacctccctgtggagaggacacttagggtcccctcccctggtcttgttacctgtgtgtgtgctcggtgctgcgcatgaggactgtctgcctttgagggcttgggcagcagcggcagccatcttggttttaggaaatggggccgcctggcccagccactcactggtgtcctgtctcttgtcgtcctgtccttcctatctccccaaagtaccatagccagtttccagatgggccacagactggggaggagaatcagtggcccagccagaagttaaagggctgagggttgaggtgagaggcacctctgctcttgttgggaggggtggctgcttggaaataggcccaggggctctgccagcctcggcctctccctcctgagttgccttctgttggtggctttcttcttgaacccacctgtgtaaagaggttttcagttccgtgggtttcccctttgattctgtaaatagtcccagagagaattcgtgggctgagggcaattctgtcttggaggaagaagctggacattcagcctgtggagtctgagttttgaaggatgtagggagccttagttgggtctcagaccataagtgtgtattacacagaagctgtgttttctagttctggtctgctgttgagatgtttggtaaatgccaggttgatagggcgctggctgcttggagcaaagggtgcatttcagggtgtggccaccaggtgctgtgagtttctgtggctcatggcctctgggctggtcccttgcacagggcccacgctggagtcttaccactctgctgcaggggtggaaggtggcccctcttgtcacccatacccatttcttacaaaataagttacacccgagtctacttgggccctagaagagaaagttgaagagtcccagacctactagcattttgcaactatgcttgtaaagtcctcggaaagtttcctcgcgtaccagacagcggcggggggctgatagcaattttagtttttggcctccctatcctctcacatgaaaaccctgcctggatgcatctcatgatctctggagaattttccccatctttctcttctttccatcgggggggattcattagtgtggaatttgaagggtgccctgcccccgatttttcctggcggaacccctgggcattgtacctttttgatggtttaaaagtccggggaaagtacaaccctgaggtggtgcaaaggaacctgttggat

SEQ ID NO: 164669 - DNA, 420 bp, Homo Sapiens
gtgtgcagaggagctggtggataacagagaatgccagggaagatgagtgctgggtcagggtacttggatgaaacggtgcaggccaggcgggccctaataaaaccctctgccaggtctgggagtcccaggccatctgctcaacgctctgtggtttgtcagacctgcaagcaagccccctgctggggaagcctaggtgtccttgagctgaaccgcactgaagaactcttgtcctcactggctgatgcagcagaactcttgggaaatgtcttagtcctgcagaatcaggagtcaccagatgatgcagagttgagatcatcattgcaaagttctctgttcctgaggaactaaatttaaggaaaaaatgggattttgttttagagttggaaaaaaagcctgattaaagagtttctgcctgttaaa

SEQ ID NO: 164670 - DNA, 1041 bp, Homo Sapiens
ccctttaaaaatttagttccctccaggaaaccaggggaaactttggcaattgatggatgttaaaattttggcattcattttgggtgactccttgattttggcaggatttaaggccatttccccaaagagtttttggtgccatcaggccagtgagggacaaagagttcttccaagtgccggttcagctcaaaggacacacctaggcttcccccagcaaggggggctggcttgcaggttctgacaaaccacagagcgttgagcagatgggcctgggactcccagacctggcagagggttttattagggcccgcctggcctgcaccgtttcatccaagtaccctgacccagcactcatcttccctggcattctctgttatccaccagctcctctgcacacctcagcgtctacttccacgaacttctaaacatcaaaaggtacaatggccaggggtgcggcaggagagtcgggggcagggcagccttcaaatccaaactattgaatccacacgatggaaagaagagaaagatggggaaattctccagagatcatgagatgcatccaggcagtgttctcatgtgagaggatagggaggccaaaaactaaaattgctatcagcccccgccgctgtctggtacgcgaggaaactttccgaggactttacaagcatagttgcaaaatgctagtaggtctgggactcttcaactttctcttccagggccaagtagactcggtgtaacttattttgtaagaaatgggtatgggtgacaagaggggccaccttccacccctgcagcagagtggtaagactccagcgtgggccctgtgcaagggaccagcccagaggccatgagccacagaaactcacagcacctggtggccacaccctgaaatgcaccctttgctccaagcagccagcgccctatcaacctggcatttaccaaacatctcaacagcagaccagaactagaaaacacagcttctgtgtagtacacacttatggtctgagacccaaccctcgtgccgaattcgccacccaggcc

SEQ ID NO: 164671 - DNA, 307 bp, Homo Sapiens
ccgtttcactaccagacttccctaagccactttaattgaaaaggcatgatttagactaattgacagcagatgggttcggttgcaaaatgcagagaagcatttgttgaacatgatttacagcaacgaggcaaaactttctcctttttatatctttctctgagctccatggccagaacagctcagcagaaatgagaggagaaaaaaaagtaattagtgtttaattttttaacaatttttaactcccttgttaattgctttacataaacctgtcctagaattttacagccttcaaatctctgctctaagt

SEQ ID NO: 164672 - DNA, 730 bp, Homo Sapiens
tcctggcactcttcctgcaattcatccagttcacttttagaagatatctcctcaccagagaaaggctgactctttgtccagccacccatggatgctgtggagtctacctccaggatgctactgctgtgcgactttgggatatgacgccaggaaggaaccaacccagctgatctcttagcacttggatccctgtagacatttgagctctcaggcagggctgcatccaggctgacagggctgctgctgttcctctcaccgctttcatagccagattccattcgctggattagtcgggggtgctgctctaaaaggtgagagcctggccgtgctgggccccagcgctcgtactgggggcttggtccaccaaatttaatgtcgtaagaaggtggcttgcttggttcatctggtataaattctttagctgaatcctcagaaaaggggctaagctgggtatagccacagtgcttccttttgtccttactaaagatactgtcaatattcagagattctcgtttgggtctccatgtgggacgatacttgctggaagaactggattttgactcactgctggtactctctatttcccagtcacgagagtgtaaaggcagggtcctaggaggtttttttgtcaggctggtctcctcctctgcccctgcagtgagagcctacattggtctgagaagccagggatggtctgttatggatcatattgctgactgtctctttaaaa

SEQ ID NO: 164673 - DNA, 852 bp, Homo Sapiens
  misc_feature (667)..(667): n is a, c, g, or t
  misc_feature (727)..(727): n is a, c, g, or t
  misc_feature (757)..(757): n is a, c, g, or t
  misc_feature (818)..(818): n is a, c, g, or t
  misc_feature (822)..(822): n is a, c, g, or t
gggggttcgcctccggagccatggcggcggcactgaagtgtctactgacattaggaagatggtgccccggccttggagtggctccccaggcccgggcgctcgccgccttagtacccggagtgacccaggtagataacaagtccggtttcctgcagaagaggcctcatcgccagcaccctggcatcctaaagctgccgcacgtgcggctgccacaggcactggctaacggtgcccagttattgctacttgggagcgctgggcccactatggagaatcaggtgcaaacactgaccagttatctctggagcagacatttgcctgtagagccagaggagttgcaaagacgggctaggcatcttgagaaaaaattcctggaaaacccagacttatctcagacagaggagaaacttcgtggagcagtgctacacgcactacgtaaaactacctaccattggcaagaactgagctacactgagggactgagcctggtgtatatggcagcaagactggatggtggctttgcagcagtctccagagcattccatgagatccgggctcgaaatccagcattttcagccacaaactttgaatggactttggctcaggtactggttctgtcacctgggctgctcacagtatttggggccagagcctacgtgaatatatngtgtgtggacagatcagctgccatggtggtttttggcagaaaaactactgaaaggtggtntcagaatctgggggagccttatattcccangtgtcttttttcagacagttttctaccctgtatcaccccaaggtgcagtttttgatgtaantaantgtcaaccttttttcccctttaagtgaacc

SEQ ID NO: 164674 - DNA, 525 bp, Homo Sapiens
aactccatcagtcccctaattgtcagcctttacctccctcccagagcaaggagtttagggattctaaagcttagtgtccacacatcattctaccagaccttagagctttagaagctcaatctaaaatactgtaactcagcataaactactactatcactcctttgaactcagtctccatgagcagtgttttgttggaaatacatagaacggcttaatgcctagagggtggtggatagtgaaggacggtcaaggttatatttctgactgcttagggattctttggatacaagaaacagaaatgttcaagcggaataaaggagggagtggagttgtggtaaggatgcagggtatttcgcagaacccaggacgggaagtgcctttggttcttgggtggagctggaactgcagagctttgcacctagtcctttctcccgcttcacagtctgcttatggtatatgtggcccccaaataggcactctagtcctcaagtctacaccaccttccactctggggataaccgcga

SEQ ID NO: 164675 - DNA, 800 bp, Homo Sapiens
gccttcgtcaatgcaggcgacactccaagtcagaaaagacacagtgatactacaaagcagacagcctcaattcacgtgtgcgttactggctgaccatgcggtctctttattgtaaggacaggagaagggcccctttcctgggtttcttcaaattcacacaagtggcctcttatgcaaagatcctgggctagcctccatccatatcagccacctccaaaaatcccttcgggctagctctcctcaccccaaatcttctcctggaagaaagtcccctaaagaaaaggagaatcacttcctaacccaaaattgcttaacaataccctaaatccattttgagttcagagcagaaatccgtgttccttccaatctgctcagataaccaggaaatgctgtacctgctgggtctgcacgtatagctcccgacacacctgctactccagccggcatgagtcacccacgcaggcattgcacggtgtacttgtcaaccacggattcagtggctcagcagcttgctctcacgcacaccagatggcaaacgtctacccccaaaaagacgtgtcagggcagaccggctaataacccaatttcactcaatgacacattcccactgtaggtttggggagaggaaaggagggagggggtacacagagatgctttccccacttatgggcaagctcccataggcgctggaagcctgatacggctctgctaccgtcagtagaggaagggcaaattcacctggggaggaaaatgaaaatgacgtcccaatttcaaacctcctcctgaacaaaggctgtctt

SEQ ID NO: 164676 - DNA, 532 bp, Homo Sapiens
ttgacacagacctccccaaaatttaactggtctccttcctcacacagttcatcataacccaaccccccaacccccgggtcatgaaaatcacagaacttataaacacattgaaccctagatctcaggcttcctgacctaccgccagtggccccttgctggccaccctatagggtcctccttccctggcagccccccatgtgggagaaatacctgattctcccaatctgcagtgggagagctttgctgaattccatcccaaagtcaaacatgggcaagaggtgaggatttcacttttaccctcaagtccgatttgtctgtgattttaaactaactgtgtatgtattgatgtttggaagattgtttgaattttaaagtgataatagtacttaatgttatccagtattgttcattaaatggtgttatcctaaagctgcacttggggatttttacctaacgctttactgattctctcaagcacatgggcaaagtttgattttgcactccgttgcatttctgacacgttttgctgcct

SEQ ID NO: 164677 - DNA, 446 bp, Homo Sapiens
  misc_feature (335)..(335): n is a, c, g, or t
  misc_feature (406)..(406): n is a, c, g, or t
  misc_feature (414)..(414): n is a, c, g, or t
  misc_feature (420)..(420): n is a, c, g, or t
  misc_feature (429)..(429): n is a, c, g, or t
tgtttattcaaaaaaatctattcagaaagtctggaaagcgtaataaatatctgtacagtggccacccatctcaaacatgaattacaaagcaggaacataaaaatgatgtgtaaacataactgctgagccagtgaacaaagtgctgagtcaggagcgaggcagagaagcgtgctcagtaggaacgacacagatgctgcagcctccgtcctcagcccctcaagctgcgctgggagtccaccttccgccctctccacaccgctcaggggaccgggcaggcgtccttctccattctcggaatttggcatggacgcttaggaaagggtagggagggcagncaaaacgtgttcaggaaatggaacgggggttgccaaaattcaaacttttggccatgttgctttgaggaggnttcggttnaagcgnttaggggtnaaaattcccagtggcag

SEQ ID NO: 164678 - DNA, 393 bp, Homo Sapiens
  misc_feature (332)..(332): n is a, c, g, or t
aaaaaaatctattcagaaagtctggaaagcgtaataaatatctgtacagtggccacccatctcaaacatgaattacaaagcaggaacataaaaatgatgtgtaaacataactgctgagccagtgaacaaagtgctgagtcaggagcgaggcagagaagcgtgctcagtagaacgacacagatgctgcagcctccgtcctcagcccctcaagctgcgctgggagtccaccttccgccctctccacaccgctcagggaccggcagcgtccttctccattctcggaatttgcatgacgcttagaaaggtaggagggcagcaaaacgtgtcagaantgaacggggtgccaaatcaaactttgccatgtgctttgaggaggatcaggtaaaggcgtta

SEQ ID NO: 164679 - DNA, 369 bp, Homo Sapiens
  misc_feature (107)..(224): n is a, c, g, or t
  misc_feature (324)..(324): n is a, c, g, or t
gtgtgagccactgtacctggccctgttcagattttctatttttcctgggacaattttggtcatttgtatctttctaggaatttttttgttgttgttttgagacagannnnnnnnnnnnnnnnnnnnnnnnnnnnnnnnnnnnnnnnnnnnnnnnnnnnnnnnnnnnnnnnnnnnnnnnnnnnnnnnnnnnnnnnnnnnnnnnnnnnnnnnnnnnnnnnnnnnnngtgatgatgcgggtgtgctggttggtgagacaggacagccggcaccagcgaatcagacttccacatttggaagcagttgtgattgggcgtggccagagancaagatcactgataagaaatgtctcgacagcaagtacaggaaggc

SEQ ID NO: 164680 - DNA, 817 bp, Homo Sapiens
acagcataactatgacgatttataagggtgtagatttggaatcctaggttgcaaattgctgagtgtttcggttctagaactaatgttccccaggaggtagatggtagtgatcaagtctctccccctttaactttaagaaggatgaaatctgtaagtacagacctgagaattctgttgctaatgacactggcttcacagtggtcgcacctggaaaggagaaggccctgatgaaagcagtcgcaactgtggggcccatctccgttgctatggatgcaggccattcgtccttccagttctacaaatcaggcatttattttgaaccagactgcagcagcaaaaacctggatcatggtgttctggtggttggctacggctttgaaggagcaaattcgaataacagcaagtattggctcgtcaaaaacagctggggtccagaatggggctcgaatggctatgtaaaaatagccaaagacaagaacaaccactgtggaatcgccacagcagccagctaccccaatgtgtgagctgatggatggtaaggaggaaggacttaaggacagcatgtctggggaaattttatcttgaaactgaccaaacgcttattgtgtaagataaaccagttgaatcattgaggatccaagttgagattttaattctgtgacatttttacaagggtaaaatgttaccactactttaattattgttatacacagctttatgatatcaaagactcattgcttaattctaagacttttgaattttcattttttaaaaagatgtacaaaacagtttgaaataaattttaattcgtatacaa

SEQ ID NO: 164681 - DNA, 1126 bp, Homo Sapiens
  misc_feature (896)..(897): n is a, c, g, or t
  misc_feature (902)..(911): n is a, c, g, or t
ctggggctctcctcagcccctcccgtaatgcctgtcccccagcaacccatcctgctggggcttcctggaggactacgccttcgtggtgcggggcctgctggacctgtatgaggcctcacaggagagtgcgtggctcgagtgagctctgcggctgcaggacacacaggacaagctcttttgggactcccagggtggcggctacttctgcagtgaggctgagctgggggctggcctgcccctgcgtctgaaggacgaccaggatggagcagagcccagcgccaattccgtgtcagcccacaacctgctccggctgcatggcttcacgggccacaaggactggatggacaagtgtgtgtgcctattgaccgccttttccgagcgcatgcgtcgtgtcccggtggcgttgcccgagatggtccgcgccctctcagcccagcagcagaccctcaagcagatcgtgatctgtggagaccgtcaggccaaggacaccaaggccctggtgcagtgcgtccactctgtctacattcctaacaaggtgctgattctggctgatggggacccctcgagcttcctgtcccgccagctgcctttcctgagtaccctccgacggttggaagaccaggccactgcatatgtgtgtgagaatcaagcctgctcagtgcccatcactgatccctgcgaattacgaaaactactacatccatgactgccccaacccccttggggtggggcagaaggtgaagcatcccaactgactagagactcaggccctgcagggccctatagaacctgtggccatccctgagcaccctgccaccaggtgacctcggccatactcactgccccccttgggcacccactcaccctagaataaacttaacagtgtcccggtggtnnccctnnnnnnnnnnacccaaatttgatcctctcaccctgtggaacgtgacccccgcctttgaccaaaaaaccttgtccggccgccttcggccctaaaaaaattttctaaaacaatttcctttgggcgcccggggcccccgtcgaggaaaggtgaccggtggctcatgccgggtttcccaaagaaaaaacccgggctcatgaacataagggttttggaattttccccccc

SEQ ID NO: 164682 - DNA, 1035 bp, Homo Sapiens
tcccatttcaaaggaagttcatatccacggggcaagaggaagcgggtcagggcgcccaacagcaagcctctaccagaccgcaccaacggcagcgccctctgcacccggtgcatccagatcaacaccgactccagcctcctcaactccgagttctgcttcatcctcaaggttccctttgagagtgaggacaaccagggcatcgtgtatgcctgggtgggccgggcatcagaccctgacgaagccaagttggcagaagacatcctgaacaccatgtttgacacctcctacagcaagcaggttatcaacgaaggtgaggagcctgagaacttcttctgggtgggcattggggcacagaagccctatgatgacgatgccgagtacatgaaacacacacgtctcttccggtgctccaacgagaagggctactttgcagtgactgagaaatgctccgacttttgccaagatgacctggcagatgatgacatcatgttgctagacaatggccaagaggtctacatgtgggtggggacccagactagccaggtggagatcaagctgagcctgaaggcctgccaggtatatatccagcacatgcggtccaaggaacatgagcggccgcgccggctgcgcctggtccgcaagggcaatgagcagcacgcctttacccgctgcttccacgcctggagcgccttctgcaaggccctggcctaagacaggctggcacagccccaggcttggtgaggaagaggaaggggcctcatccactgtctgctagcaaagaatgtactcaggtgacaccacctgctccagccacgtccagtgccacagtccccagtagcctcaagcagcaccaatggggatgaccctgacaggtgccctcaggggtctgggaaatccaactctctccacagtgtgagtgcacgtgtgaagccccctcactcttccgctagggataaagcagatgtggatgccctttaagagatattaaatgcttttattttcaatattaaaaatcagtatttttaatattaaaaa

SEQ ID NO: 164683 - DNA, 505 bp, Homo Sapiens
tgtgctggatatatacctggcaaggggacagcgagccttgggtgatgaccctgccctgcccacaggcccacctcggccctccctccacccagattacctggcaggccttcaggctcagcttgatctccacctggctagtctgggtccccacccacatgtagacctcttggccattgtctagcaacatgatgtcatcatctgccaggtcatcttggcgaaagtcggagcatttctcagtcactgcaaagtagcccttctcgttggagcaccggaagagacgtgtgtgtttcatgtactcggcatcgtcatcatagggcttctgtgccccaatgcccacccagaagaagttctcaggctcctcaccttcgttgataacctgcttgctgtaggaggtgtcaaacatggtgttcaggatgtcttcagccaacttggcttcgtcaggatctgatgcccggcccacacaggcatacacgatgccctggtttgtctcactctcaaaggaaac

SEQ ID NO: 164684 - DNA, 414 bp, Homo Sapiens
  misc_feature (22)..(22): n is a, c, g, or t
  misc_feature (97)..(97): n is a, c, g, or t
  misc_feature (117)..(117): n is a, c, g, or t
  misc_feature (225)..(225): n is a, c, g, or t
aaaaccctgcttgcttgtaagnagttgtcaaaaacaaggttgttcaaggatgtcttctgccaaaacttggcttcgtcagggtctgaatgccgggccnaccccagccatacacgatgnccctggttgtccctcactctcaaagggaaccttgaaggatgaaagcagaactcggagttgaggaggctggagtcggtgttgatctggaatgcaccgggtgcagaaggncgctgccgttggtgcggatctggtagaggctgggctgttgggcgccctggaccgccttcctcttgccccggtggatgatgaacttcctcttgaaatgggacaggaacttggggttctcctgctgctgcgtcatgcgtaccacctccagcttcccagggaagaggctctcgaacttcttttgcaggctga

SEQ ID NO: 164685 - DNA, 448 bp, Homo Sapiens
  misc_feature (31)..(31): n is a, c, g, or t
  misc_feature (44)..(44): n is a, c, g, or t
ccctcaaggtccccttttaaaattggggaanacccccgggccancgttgtatccccgggtgggccgggccattcagacccctgacgaaacccaagttggcagaagacatccctgaacaccccatgtttgacacctccctacagcaagcaggttatcaacgaaggtgaggagccctgagaacttcttctgggtgggcattggggcacagaagcccctatgatgacgatgcccgagtacatgaaacacacacgtctcttccggtgctccaacgagaagggctactttgcagtgactgagaaatgctccgacttttgccaagatgacctggcagatgatgacatcatgttgctagacaatggccaagaggtctacatgtgggtggggacccagactagccaggtggagatcaagctgacctgaaggcctgcaatttatttatccagcacat

SEQ ID NO: 164686 - DNA, 355 bp, Homo Sapiens
ccctagacacttcctgtacaggcatttcaaaagaaacgtaggacaggggttctcaagagagaagggaaaaggtgttaggtgctttgaagttgaaaaataaatgtgtatgtatattgtatttgcttatgaaatagtacttgcaaatgcaggtggtttgcggcctcagcatggaaagcttgaagcctctgaccagtttggacttaatccttaattaactagataagaagtggtttttaaaatgttctgtctgtgtagcttatgacagtgatatgtgtaagtttcctttaagcaatatgctgaaacattaacccagcagaattaatttgaaaagatagaaagactagagtacaggaag

SEQ ID NO: 164687 - DNA, 1050 bp, Homo Sapiens
  misc_feature (767)..(781): n is a, c, g, or t
gttgctgggcttctccatggccctgctgggctgggtgggtctggtggcctgcaccgccatcccgcagtggcagatgagctcctatgcgggtgacaacatcatcacggcccaggccatgtacaaggggctgtggatggactgcgtcacgcagagcacggggatgatgagctgcaaaatgtacgactcggtgctcgccctgtccgcggccttgcaggccactcgagccctaatggtggtctccctggtgctgggcttcctggccatgtttgtggccacgatgggcatgaagtgcacgcgctgtgggggagacgacaaagtgaagaaggcccgtatagccatgggtggaggcataattttcatcgtggcaggtcttgccgccttggtagcttgctcctggtatggccatcagattgtcacagacttttataaccctttgatccctaccaacattaagtatgagtttggccctgccatctttattggctgggcagggtctgccctagtcatcctgggaggtgcactgctctcctgttcctgtcctgggaatgagagcaaggctgggtaccgtgtaccccgctcttaccctaagtccaactcttccaaggagtatgtgtgacctgggatctccttgccccagcctgacaggctatgggagtgtctagatgcctgaaagggcctggggctgagctcagcctgtgggcagggtgccggacaaaggcctcctggtcactctgtccctgcactccatgtatagtcctcttgggttnnnnnnnnnnnnnnntgcccataggtgggaaaaaacaggaaaagggggaaaggtacctctttttgggcgcagcaaaagagacaacacctgggggagcggtgacacacccagcgtagagaacacggagggaggaagaagctccaagggccctcattaatccgcgcgggcgaccaaacaaaggctcgccacagagaggggcgcaacaaggatagacaacagctgggtgatcatttcgtgtccgagccgactattacgtgagacgaacagcgaagaccaggtgatta

SEQ ID NO: 164688 - DNA, 1155 bp, Homo Sapiens
  misc_feature (11)..(11): n is a, c, g, or t
  misc_feature (24)..(24): n is a, c, g, or t
  misc_feature (38)..(38): n is a, c, g, or t
  misc_feature (65)..(65): n is a, c, g, or t
  misc_feature (88)..(88): n is a, c, g, or t
  misc_feature (112)..(112): n is a, c, g, or t
  misc_feature (139)..(139): n is a, c, g, or t
  misc_feature (358)..(370): n is a, c, g, or t
  misc_feature (607)..(620): n is a, c, g, or t
  misc_feature (906)..(915): n is a, c, g, or t
aaacctttgancccctacccaaanattaaattatgaantttgcccctgcccatctttaattggcntgggcaagggtctgcccctagtncatcccctgggaggtgcactgctnctcctgttccctgtccctgggaatganagcaaggctgggtaccgtgcaccccgctcttacccctaagtccaactcttccaaggagtatgtgtgaccctgggatctccttgccccagcctgacaggctatgggagtgtctagatgcctgaaagggcctggggctgagctcagcctgtgggcagggtgccggacaaaggcctcctggtcactctgtccctgcactccatgtatagtcctcttgggttnnnnnnnnnnnnntgccgttggtgggagagacaaaaagagggagagtgtgctttttgtacagtaataaaaaaataagtattgggaagcaggcttttttcccttcagggcctctgctttcctcccgtccagatccttgcagggagcttggaaccttagtgcacctacttcagttcagaacacttagcaccccactgactccactgacaattagctaaaagatgcaggggctccgtatctcgacattcattnnnnnnnnnnnnnnttatttaaataagctaccaaagtacttccttttttttaataacaaaaataaaagattctttattaggtacaagcggaggcccccgtaccccagaaaagaattcctgtttcgggcacgccctccggccccttcgaaaaaagactttctccaaaaaccattttcgctttggggcccccgccggggtccccggtgaaggggcaagggggaaaaatcgggccccctcagccctgtttttccccaagggaaaatccctgggggcccgtggacttaaggggtctggggactnnnnnnnnnnaataaaaaaacgcgccccgcggcggggaacccggaaggggttcttggaaaacaaattcccgaattgcgaatcttcttgaagggagatctaacgggggactctactaaagccgggaggtcgcccggggagattccgcatttgaaaatataacgcgcccgcgccgctggcccatattattcgggaagacgggtgtggggagtcttctttaagctctgtgtcgtcgggagctggggaaacccc

SEQ ID NO: 164689 - DNA, 708 bp, Homo Sapiens
ccctagcagcttcctgtacatcatccccaattggactataaggaggtggtgcttctgtgtcatcatctgaatcagggtagttattatagggaaaacagtctctgggagatggtagaaaaacatcttcactttgatgggttgattcccttgtattatcagacaaataagaattttctatcatattttttttctctagaacatcactaaaaaacagagtaaagacctcagttagccgatgatactgagataaagaatacagtgctgtaaatttagcagtgatctcagttgcaatgtgttctccttcagtcattaactctttgatagcctcattttcaaaaaaatctgcttggctgtcagtaactgccaccagctgtacaggaatggtgtcttgaacttctgatagaaatgctcgaagcattcccatcgaagctttccgttttgcagagtaaactaatatatacccatgaactagttcatcttttcttactccaattgaagagtggtatgataatattgtgatctgtattcgcctccttttttcaccaatgattttatcaagcattagggaattattctgtccagcttgagcagcactgcaagaatgagaatcaaggaagggtgaaagaataagatccacactaaatggatctccacacatggcgcacatgacaattctcaagtcagcttctgatgtgtagaaagtgaacc

SEQ ID NO: 164690 - DNA, 859 bp, Homo Sapiens
aacatctatttagtgtggagcagataacagccatgttgttgactaagctgaaggaaactgctgaaaacagcctcaagaaaccagtaacagattgtgttatttcagtcccctccttctttacagatgctgagaggcgatctgtgttagatgctgcacagattgttggcctaaactgtttaagacttatgaatgacatgacagctgttgctttgaattacggaatttataagcaggatctcccaagcctggatgagaaacctcggatagtggttttgttgatatgggacattcagcttttcaagtgtctgcttgtgcttttaacaagggaaaattgaaggtactgggaacagcttttgatcctttcttaggaggaaaaaacttcgatgaaaagttagtggaacatttctgtgcagaatttaaaactaagtacaagttggatgcaaaatccaaaatacgagcactcctacgtctggtatcaggaatgtgaaaaactgaaaaagctaatgagctctaacagcacagaccttccactgaatatcgaatgctttatgaatgataaagatgtttccggaaagatgaaacaggtcacaatttgaagaactctgtgctgaacttctgcaaaagatagaagtacccctttatgcactgttggaacaaactcatctcaaagtaagaagatgtgagtgcagttgaagattggtggaggccgctaaacgaaattccagctggtgcaggacagaattggcgaaatgcttgggaacaggaatgttagccacaagactcaatgcagaattgagcagtagccacaggatgtgccttcacggggtggcaaaacttacccgggctttaaggtcacgga

SEQ ID NO: 164691 - DNA, 745 bp, Homo Sapiens
cagaagaagtagagaaaaaaagaagaaaagtatagatccagattctattcaaagtgccttattagcatcaggtcttggatcaaaacgacctagtttttcatctacaccagttatctcacctgctcctaacagtacaccagctaacagtaacaccaacagtaacagtagccttataacaagtcaggatgctgtggaaagggctcagcagatgaagaaagacctgcttgataagctagaaaaattagctgaagacctcccccctaataccctggatgaacttatcgatgaacttggtggccctgagaacgttgctgagatgactggccgcaagggacgggttgtgagcaatgatgatggaagcatatcttatgagtcaagatctgaacttgatgtgcctgtggaaatactaaacatcacagaaaaacaacgatttatggatggagataagaatattgctatcatctcagaagctgccagctcgggtatttcattacaagcagataggagagctaaaaatcaaaggcgaagagttcatatgactttagaattaccttggagcgctgatagagcaattcaacagttcggacgtactcatagatcaaaccaagttactgctcctgagtatggctttctgatatctgaactggcaggaagaaaaagaattgcatctattgttgctaaaaaacttgagaagtttgggggcacttacacttggggaatagaaggggcaaccgaaatccaagaa

SEQ ID NO: 164692 - DNA, 744 bp, Homo Sapiens
ggtcgaccacgcgtcactcatgaaaaacattttcctgctccagacagaaaaaaactttatagtttactaggaatcgatttgacagctccaagtaacaacagttcgccaagagatagtccttgtaaagaaaataaaataaagaagcggaaaggtgaagaaataactcgagaagccaaaaaagcacgaaaagtaggtggccttactggtagcagttctgacgacagtggaagtgaatctgatgcctctgataatgaagaaagtgactatgagagctctaaaaacatgagttctggagatgatgacgatttcaacccatttttagatgagtctaatgaggatgatgaaaatgatccctggttaattagaaaagaccacaagagaaacaaagagaaaagaacgaagacaagtatagatccagattctattcaaagtgccttattagcatcaggtcttggatcaaaacgacctagttttacatctacaccagttatctcacctgctcctaacagtacaccagctaacagtaacaccaacagtaacagtagccttataacaagtcaggatgctgtggaaagggctcagcagatgaagaaagacctgcttgataagctagaaaaattagctgaagacctcccccctaataccctggatgaacttatcgatgaacgttggtggccctgagaacgttgctgagatgactgccgcaagggacgcgtggtcgcccgggatcctctagatcgccca

SEQ ID NO: 164693 - DNA, 830 bp, Homo Sapiens
  misc_feature (799)..(799): n is a, c, g, or t
ggggcaggcgcggggaacaccaatggcggggtacttgaagctggtgtgtgtttcctttcagcgtcaagggttccacactgttgggagtcgctgcaagaatcggacaggcgctgagcacctgtggctgacccgacatctcagggacccatttgtgaaggctgcgaaggtggagagttaccggtgtcgaagcgccttcaagctcctggaggtgaacgagaggcaccagattctgcggcccggccttcgggtgttagactgtggggcagctcctggggcctggagtcaggtggcggtgcagaaggtcaacgccgcaggcacagatcccagctctcctgttggcttcgtgcttggggtagatcttcttcacatattccccctggaaggagcaacttttctgtgccctgctgacgtgactgacccgagaacctcacagagaatcctcgaggtgcttcctggcaggagagcagatgtgattctgagcgacatggcgcccaatgccacagggttccgggacctcgatcatgacaggctcatcagcctgtgcctgacccttctcagcgtgaccccagacatcctgcaacctggggggacattcctttgtaaaacctgggctggaagtcaaagccgtcggttacagaggagactgacagaggaattccagaaatgtaaggatcatcaaacctgaaaccagcaggaaagagtcatcagaagtgtacttcttggccacacagtacccacggaaaggaaggcactgtgaaacagtgaggatttctttgtgccatttcataatggtcattanctcccttttagctagaaacgtagcctgagct

SEQ ID NO: 164694 - DNA, 756 bp, Homo Sapiens
  misc_feature (625)..(625): n is a, c, g, or t
  misc_feature (663)..(663): n is a, c, g, or t
  misc_feature (704)..(704): n is a, c, g, or t
ggggcccctccggcgcttgggccagagtggtgcgggcggcaggagcagcgccgggagctgaagagcgctggaggactcatgttcaacacggggattgggcagcacattttgaaaaatcctctcattattaacagcattatcgataaggctgccttaagaccaactgatgtagtgctggaagttggacctggaactggcaacatgactgtaaagttgttagaaaaggcaaaaaaggttgttgcttgtgaacttgacccaaggctagtagctgaacttcacaaaagagttcagggcacgcctgtggccagcaaacttcaagtactggtgggtgatgtgctgaaaacagatttgccattctttgatacttgtgtggcaaatttgccttatcagatctcttcaccttttgtcttcaagctgttgctacatcgaccttttttcaggtgtgctatacttatgtttcaaagagaatttgccctccgactggttgcaaaacctggagataagttatactgcagactctcaattaatacacagctgttggcacgtgtggaccatctaatgaaagtgggaaagaataacttcagaccaccgcccaaggtggaatccagtgttgtaaggatagaancctaagaatccaccacccaccatcaattttcaaggaantggggatggtctaagtaaggataacccttttgttagggaanaaacaagaacccttctcctggctggcattttaaaatccaagtggcaggtgcc

SEQ ID NO: 164695 - DNA, 576 bp, Homo Sapiens
atcatgctcggtacccctgtgctctgaacttaggaccattgatcacgaagaagaaggctccagtctcatttgctacagctcgagcgatcatgggtctttcctgttccaggaggtcctgtaaacgcaggattcctctaggaggcttcacaccaattgccttaaagagggcaggatgtctcacggggcagttccaccatctcctttatctgagctagctgcttcctgcagccaccaagtgtcatcataccctacttcattcaaggactcttcctcatcctctcgtttgataggctccccttcgcagtggatcactgtgtctggagcaacaatgcaataagggctaggatctgtttccaccactttgaactccacagcacgcatccaaccacggacaagaaaaatgtctcctttccggatgggtcgatacgcttccaggaagtacggcttaaggtatacctcgaagagattaccagtaatgccttccactgtgtcatcaatgggcagcacatggaaacgtttgccgtacttcacatcagggcatggctggatgctgatgacatcccctaggcgtacagg

SEQ ID NO: 164696 - DNA, 450 bp, Homo Sapiens
gtgtggaactgcgcctgagacatcctgccctctttaaggcaattggtgtgaagcctcctagaggaatcctgctttacggacctcctagaacaggaaagaccctgattgctcgagctgtagcaaatgagactggagccttcttcttcttgatcaatggtcctgagatcatgagcaaattggctggtgagtctgagagcaaccttcgtaaagcctttgaggaggctgagaagaatgctcctgccatcatcttcattgatgagctagatgccatcgctcccaaaagagagaaaactcatggcgaggtggagcggcgcattgtatcacagttgttgaccctcatggatggcctaaagcagagggcacatgtgattgttatggcagcaaccaacagacccaacagcattgacccagctctacggcgatttggtcgctgttggtggaggtagcact

SEQ ID NO: 164697 - DNA, 435 bp, Homo Sapiens
gtcggtacccctagcgacttccttgactactccttgactgcctttcaaacatgtaccactctaaggaatatattttattcacattattctctaattagtatttttgcatttcaactttgatctgaccttcagtagtaccttaaaatgcaaatgcaattagtaaaaacggggcagcctgtcgttttcacacttagaaatacaatgtagtttcattacagtttgcatttttttgttactcttgaaagagtaaccccttataaaatcagatacataaaaactgcattattccttactttgcaggcatccaggaatggttaaagcaaaggaactctcattcattcattcattcattctgttcccccaatttagatacatttctagtctccagaaacggactccagggcagggaagtggagggcagagaagaggtacagg

SEQ ID NO: 164698 - DNA, 941 bp, Homo Sapiens
agctgtaggaaggggaggccattgtccgtttctgggaggagtgaggggcaacgggtcggagaaaaaggaaaaaagaagggctcagcgcctccccgccgggccgtggacagaggggcacagtttcggcaggcgggtgaggtcgctgagggcccgccggagatgttttccttgtcgagcacggtgcaaccccaggttacagttcctctgagtcatctcatcaatgccttccatacaccaaaaaacacttctgtttctctcagtggagtgtcagtttctcaaaaccagcatcgagatgtagttcctgagcatgaggctcccagcagtgagccttcacttaacttaagggaccttggattatctgaactaaaaatcggacagattgatcagctggtagaaaatctacttcctggatttggaaaaggcaaaaacatttcttcccattggcatacatcccatgtctctgcagcaatccttctttgaaaataaatatggtaacttagatatatttagtacattacgttcctctgtgcttgtatcgacatcattcaagagctcttcaaagcatttgttcagatcttcagtactggccagttttcatacagtctcggggttttaaaacttttgaaatcaaggacacgacgtctccagtctacctccgagagattagctgaaacacagaatatagcgccatcaattcgtgaaggggtatctttagcgggaacagaggatcagatggttgaagagttaggacaaaactcatgaaaaccaaaaaatatacctggaagcttcaccaagatgcatttaacactggtattgcggaaggtttctggaaagctcaaggcactcaacgacaaaaacaccatgattccctaaaggggaacccgtttgagtacccttcggtctgcctgtattcgcgcatttatgggacctctataaaacca

SEQ ID NO: 164699 - DNA, 1155 bp, Homo Sapiens
gtttctttttccatcacattctgcttttaatccactcttgtttctcaagtattcttccagtatctgtctctcggtaaattccaatctgtaccgtcgagtctatatattttctggatcatacggaattgatcatacctttattttattgagataccatgtcacatttctgttcgaccttttacatctggccttggaactgtaacttggcatggtctaatacgtaccaggacgtagtaaggcattatcgtaatgcctctgggaagtttgtggctcctattatgataactccttcattgggtttaaaaccatccatttcagcaagaagttgatttatggtctgccttgaatatggatgcattggagattcaattctcttcccaccaacagaatctaattcatcaataaatataacacaaggagcattcgcctttgcttccctaaaaagatttctgatacggctggctcccacacccacaaacatctcatcaaattcggatccagaagcataataaaaaggaacatcagcttctcccgccacagctcgggcaagaagtgtctttccagtccctgggggtccaactaaaagaattccttttggaagtttacctccaagaatagtaaatttttgtggatttttcaagaattcaacaacttcctgtaattcttgtttagcttcctccacccctttaacatgttcaaaggtgacatttttcatctggacaggatctactgcagaatcaagccctgttgttgtccggaagcggacagataaaaatgggttttttagaagtccataaatgccgaatagcagcagaacgaagagaatcagacgggttcgccttagggaatcattggttttttgtgtgagtgcttgagctttcagaaaaccttccgcaaaaccagttttaaatgcatcttggtgagcttcaggtatatttttggttttcatgagtttgtccaaactctcaacatctgatcctctgtcccgcaaaagaaaccccttcacgaatgatggcgctatattctgtgtttcagctaatctctcggaggtagactggagacgtcgtgtccttgatttcaaagttttaaaaccccgagactgtatgaaaacatatttattttcaaagaaggattgtgcagagacatgggatgtat

SEQ ID NO: 164700 - DNA, 600 bp, Homo Sapiens
  misc_feature (513)..(513): n is a, c, g, or t
gcacttccttgcattctcgcagatcgagttcaaaaaggggtccctgtgaaggtgaccaacgtcaaggatggcaccacccaccagagttccttggagctcttcatgtacctgaacgaagtcgcgggcaagcatggcgtgggccgtattgacatcgtggagaaccgcttcattggaatgaagtcccgaggtatctacgagaccccagcaggcaccatcctttaccatgctcatttagacatcgaggccttcaccatggaccgggaagtgcgcaaaatcaaacaaggcctgggcttgaaatttgctgagctggtgtataccggtttctggcacagccctgagtgtgaatttgtccgccactgcatcgccaagtcccaggagcgagtggaagggaaagtgcaggtgtccgtcctcaagggccaggtgtacatcctcggccgggagtccccactgtctctctacaatgaggagctggtgagcatgaacgtgcagggtgattatggagccaactgatgnccaccgggtttcatcaacattcaatttccctcaggcttgaaggaattataatcgtctccagagcaagggcactgccaaatagacccg

SEQ ID NO: 164701 - DNA, 597 bp, Homo Sapiens
ctttaaccagtcattttatcacgaggctctaactatgcctggatagtccgcagattaaacaatgcctggcttgaaattcctgaacctggtaataccggttcttgcacagcgctgagttggaatttgtcgcccacgtcttcgctagatcccaggagcgattgaagcgtatgttccggttcccttcctcaagggctaggtgtacatcctcggccgggagtccccactgtctctctacaatgaggagctggtgagcatgaacgtgcagggtgattatgagccaactgatgccaccgggttcatcaacatcaattccctcaggctgaaggaatatcatcgtctccagagcaaggtcactgccaaatagacccgtgtacaatgaggagctggggcctcctcaatttgcagatcccccaagtacaggcgctaattgttgtgataatttgtaattgtgacttgttctccccggctggcagcgtagtggggctgccaggccccagctttgttccctggtccccctgaagcctgcaaacgttgtcatcgaagggaagggtggggggcagctgcggtggggagctataaaaatgacaattaaaaaaa

SEQ ID NO: 164702 - DNA, 889 bp, Homo Sapiens
ctgcccgagcccgacgctatgtccagcaaaggctccgtggttctggcctacagtggcggcctggacacctcgtgcatcctcgtgtggctgaaggaacaaggctatgacgtcattgcctatctggccaacattggccagaaggaagacttcgaggaagccaggaagaaggcactgaagcttggggccaaaaaggtgttcattgaggatgtcagcagggagtttgtggaggagttcatctggccggccatccagtccagcgcactgtatgaggaccgctacctcctgggcacctctcttgccaggccctgcatcgcccgcaaacaagtggaaatcgcccagcgggagggggccaagtatgtgtcccacggcgccacaggaaaggggaacgatcaggtccggtttgagctcagctgctactcactggccccccagataaaggtcattgctccctggaggatgcctgaattctacaaccggttcaagggccgcaatgacctgatggagtacgcaaagcaacacgggattcccatcccggtcactcccaagaacccgtggagcatggatgagaacctcatgcacatcagctacgaggctggaatcctggagaaccccaagaaccaagcgcctccaggtctctacacgaagacccaggacccagccaaagcccccaacacccctgacattctcgagatcgagttcaaaaaaggggtccctgtgaaagtgaccaacgtcaaggatggcaccacccaccagacctccttggagctcttcatgtacctggaacgaagtcgcgggccaagcatggcggtgggccgtatttgacatcggggggagaaacgcctttctttggaaatgaaagtcccgaagggtatcctaccgagaaccccct

SEQ ID NO: 164703 - DNA, 468 bp, Homo Sapiens
  misc_feature (13)..(13): n is a, c, g, or t
  misc_feature (22)..(22): n is a, c, g, or t
  misc_feature (46)..(46): n is a, c, g, or t
  misc_feature (51)..(51): n is a, c, g, or t
  misc_feature (68)..(68): n is a, c, g, or t
  misc_feature (81)..(81): n is a, c, g, or t
  misc_feature (101)..(101): n is a, c, g, or t
aatttgtcccccnactgcaatncccaaaaccccgggaaccaaatgnaaggnaaattgcagttgtccgnccctcaaggcccngttgtacatcctcggccggnagtccccactgtctctctacaatgaggagctggtgagcatgaacgtgcagggtgattatgagccaactgatgcccccgggttcatcaacatcaattccctcaggctgaaggaatatcatcgtctccagagcaaggtcactgccaaatagacccgtgtacaatgaggagctggggcctcctcaatttgcagatcccccaagtacaggcgctaattgttgtgataatttgtaattgtgacttgttctccccggctggcagcgtagtgggctgccaggccccagctttgttccctggtccccctgaagcctgcaaacgttgtcatcgaagggaagggtggggggcagctgcggtggggagctataaaaat

SEQ ID NO: 164704 - DNA, 713 bp, Homo Sapiens
aaggtttactagggaaactggtgctcagatcacatctcctcatgataaagaaattctaaaatgtatagaagaatgtgtggaaccctggaatggttcctggaatgataatttagtggataccagcccgctgaagagagaccctctgcaggacatttgcaggagatacatggaagatctgaaaaagatctgtttttacagggagttaaactcgaagaccaccttgaaatttgtgcacacatcttttcatggggtcggacatgactatgtgcagttggcttttaaagtgtttggttttaagcctcaaattccagtaccagaacaaaaagatcctgatccagacttttctaccgttaaatgtccaaatcctgcaagaaggagaatctgtgctggaactttccttgagactggcagagaaagaaaatgcccgggtagtgctagccacagaacctgatgcagacagactggcagcagcagaacttcaggagaatggttgttggaaagttttcacagggaatgagttggcagctttgtttggatggtggatgtttgattgctggaagaaaaataaatcaagaaatgctgatgtgaagaacgtttatatgttagccaccacagtctcttctaaaattctgaaggcgattgcacttaaagaaggatttcattttgaagaaacattaccaggttttaaatggattggaagtacgaaggttgta

SEQ ID NO: 164705 - DNA, 648 bp, Homo Sapiens
gctcggtaccccaaccttcctgtacccctacaaccttcctaccaaccttccttgcaaatgtctgcgaggcgcttagaaatgctatagtccgtaatcttgacggtgccttctgcatccaccaagacattagatgcactcaggaccttatgcaccacagaattgctgtgcagataatcaaggcctgacaggagctgagctgtgtacctgcgaagctgatgcacagggatggggcctgagtggctcaggtgtgcagcaagagagaccccactaatgtgctccactaaaatgtccaccacgatggagtcgtcttgctctttgagattcattgcaaggtagcgtactacatttggatggctcaattttaccacgtgagttgaattctgtttccgttccttgaatctgctttctcgcacttatcaatcttcatctttttcttcgactggtaaggaatggacccatttttttctgccactgaaggacccactcatacaacaagacaaagccaccagtggctgtttccaaagcattgtagactaattttccaagttgttcatcactgccaatacatttccctttgtgcaccatgagctgatcaggactccccatattgaaatacagaatttcacaagagccaggcaaagaatcgta

SEQ ID NO: 164706 - DNA, 604 bp, Homo Sapiens
  misc_feature (328)..(451): n is a, c, g, or t
  misc_feature (472)..(472): n is a, c, g, or t
  misc_feature (556)..(556): n is a, c, g, or t
  misc_feature (570)..(570): n is a, c, g, or t
  misc_feature (587)..(587): n is a, c, g, or t
tacacatacaccgcataccttagtgccatccaaaagaactaacttttaatggggaaggggcaattccaacaatgtaggggtgttagcctctcatggaaagcttctatgcacaccacagggtttgaaaatgcaagtgctcataatggccagaaaagagatgcgaaggagcaaagcagcctggcggggtctgcctggaggtcacatgcccccagcacgagtccagcacagccagtgaggaggtttacccaagcccttcgggacaagcggagatttggattcttatgctaaataataacatctaactgatttggtgcttttggttcagttnnnnnnnnnnnnnnnnnnnnnnnnnnnnnnnnnnnnnnnnnnnnnnnnnnnnnnnnnnnnnnnnnnnnnnnnnnnnnnnnnnnnnnnnnnnnnnnnnnnnnnnnnnnnnnnnnnnnnnnnnnnnactaagcctaatgagtggacnaacccaggttactgagacctacaggacagtcctggctgggaagcccggagccccatccctctatgctgtaaggcttctgtattnctagtgtcaacttnccaagcttgccaaagtncccctgcagggcaacaa

SEQ ID NO: 164707 - DNA, 281 bp, Homo Sapiens
gggcgctactattactaaatacgcggacgcgataacgaaactgaagcagtccctgccccctgctgacaaacaaaaatggcaaatagactcccccacaccacgcctccacgccctgagctgagaatcgcccgcatctcgtgggtggtaccagagccaagacgacagccaagctttgctttctcagctctgtcttataaaagcaacatggttggctggttggttgctgattctccaaatatgaaatcacgatattacaatgtgcacactttgtggtcgacgcg

SEQ ID NO: 164708 - DNA, 849 bp, Homo Sapiens
  misc_feature (797)..(797): n is a, c, g, or t
  misc_feature (809)..(809): n is a, c, g, or t
ataactcgttgcgggctccgcgcggtcccacttcccggctcccttcgcctccaggatgcgctgagccctacaacaccccccagcggccgccggctcccccacgaggtgtgaatgacagaggtggtgccatccagcgcgctcagcgaggtcagcctgcgcctcctctgccacgatgacatagacactgtgaagcacctgtgtggcgactggttccccatcgagtacccagactcatggtatcgtgatatcacatccaacaagaagttcttttcccttgctgcaacctacagaggtgccattgtgggaatgatagtagctgaaattaagaacaggaccaaaatacataaagaggatggagatattctagcatccaacttctctgttgacacacaagtcgcgtacatcctaagtctgggcgtcgtgaaagagttcaggaagcacggcataggttccctcttacttgaaagtttaaaggatcacatatcaaccaccgcccaggaccactgcaaagccatttacctgcatgtcctcaccaccaacaacacagcaataaacttctatgaaaacagagacttcaagcagcaccactatctcccctattactactccattcgaggggtcctcaaagatggcttcacctatgtcctctacatcaacggcgggcaccctccctggacgattttggactacatccagcacctgggctctgcactagccagcctgagcccctgctccattccgcacagagtctaccgccaggcccacaagcctgctcttgaagcttcctggcatggtcnggcatctttttncaagaatggcatcgagtacagcccggaccatgtgaatgtc

SEQ ID NO: 164709 - DNA, 1195 bp, Homo Sapiens
aagtgagactgtctaaaaaataataataataaaaagcattttgaaattagtcgtggtcaatgcaattctactctttggaatccgtttagctaaatgaatgtagtgctcttgttgaatggaaacaggtgataggaaatgcctaccatttgactcaatatggataatcaagagttgctcaggatgcttggatctgggggtagattctcattcatcattgccctggcacatgtcaattactacataaaaggtcaaatgcaatgtcaaatccaaagcctcaggaggaaagtgagttcagttcccaagagaacagcaatagctcaacaatgtaaaacttcatctagagtatatcggcattaaattagtgctgtcgaaacaatacgttgaggaattacagtaacacctggaagttccttctcatgtacatataaatagaatcatggaagctttttatattacctgttttatggccttatagaattaatgaaccaaatgaaaactgaatctccattccacaatcccatcctttatttctattcttattttcaaggtagtattaagtgtccatatttctcaagccacattcaaggaaatcatgtcttaactattttggatgttgcctctccttcatcttgtacatgaaactccagcagatttaatattggcatccatcatctagtcaaacctctcacatgttcttcaaatcaatcaaatttgggattctcaacattttctgtgtcaataaaaggtgtggaattagtagattcgatgaagacctgtttttccttgccacattggacttccagacgccatttggattgggtttagaagatggggaaatttagaagacgtttcttggcctgagtctcttaagagtagagatgcagaagagagagtgagaccacgaagagactggctgttgactgcagggcaccaccagccgccttggtggtggcattagttggatttggggccaacccagagttggaagtactctgggaggagttacttgaagttccagttgttgtttcactggaataaatctgcgtgggtaggagcagtgccagcagcagcagccccagcccgagcctggccaccattgctctgcccatgtcccctccgtcggtgcgcggcgcgtctagcaggatgctgggtgcttggagaaccgctggctccgggcgggcgcaggcaaggtggg

SEQ ID NO: 164710 - DNA, 834 bp, Homo Sapiens
  misc_feature (575)..(575): n is a, c, g, or t
  misc_feature (627)..(627): n is a, c, g, or t
cctacgaatcctctctcactatgctagtggtgagatattgacaatcctattctttcaaagaggaacttttcacaccgaaaaaagagcatggaattattttatattgttataaaaatcccagatgcaaatttttttaatgccaattattagagcttctggggaaaaagtatagttcacggaaataaaactatgttctttcagggttgggtggataggtggctgctagggtgtctggctcctggcggctttgccatccatgaggcaagggctgggaacacagtgtctttgcctatggtagatccatgtgaatgtcaggaagccagctcttcagtcttggagatgatttctgctacaattctgtagaaagattaaggatggcagagtaaaaggttaccaagaatgccaggatgtttttcttgggcgtaggaggtccagattactttcctttttgatgaaagagtttggaagactgtcccatctctctggcttgagaaatctctgccattttaaacatcactgtgaaatagcaattattatcatctgtatttagttttaacattacccacaacataganataataggtaaaaatcgtcttgcctactcattccaaagatgatcaagtcatnaatctagcaaagtattcatgtatcagattttgtatattttgaatcaaagctaactaggaatgttagatataaggaatgtaatgatattcatgcactggaattctaagccaatatgaaccaaaaatgctggcatggatgggcacatatagggtcacccaaagttcatttcacagggtaggaaaaaacttgtgcttttctttttccctc

SEQ ID NO: 164711 - DNA, 1191 bp, Homo Sapiens
gtcttgcttactcatttcatagatgatcaagtcattaatctagcaaagtatttatgtatcagattttgtatatttgaatcaaagctaactaggaatgttagatataagaatgtaatgatattcatgcactgaattctaagccaatatgaacaaaaatgctgcatgaatggcacatataggtcaccaaagttcattcacaggtagaataaacttgtgctttcttttccatctaaaaacaaaaggagactttctttatctcatttaaagaacagctctttgaaattgaaattgaccctttttgcttgaccttaaggagattagcttccagtagatgagtttgcaaaatacttttcctgttcttttgttttgctggtattgaaaacatcccactaaatcagatgaagaggcatgggaggaaaaatatccaaattaattactaaaatcgagaagagaaggcaaactcttgataaagtaaaaaggtgtttgtgaccttcagtatttattgaacagaggaaataactgacaagggcaatacaattcaatgttcatgtagtaacattcatgtcacttgttgaatttgggtctcatatgtatattgcatacacataaattcaaactataagtcgtcatttttgagccatcatcttacattcatgtaatgaaattatggaagagagtaaaaactagctcttaacttagtaaatataatatggtatttaaaatcaggtcactacagtaaggttctaagtattgccaattgaaaagctagaaatggtattactgttgcaaagtgttgtcaataattgactccaatagcattgtaaatacttgtatcccacaactattttaaacccaagcaataaaatggattttctaattcacttcaattctttatttctcttacctatctatgtcttggtacataagaaaagtgtttccatcactgcattggtagaattatttcagtgttattatttttgtgatttcgtatgtctacacaaaaatgaattagtttaatttatattgtgatacagttgtttgagaaatatttttaattctgtttcaactttatttctccaagtgtataatataaaaattacttctgttattgttctctaccaataggggaaaaaattaaaacattagatccattgagaaagagatgatgtaataaataattaagattaacaa

SEQ ID NO: 164712 - DNA, 742 bp, Homo Sapiens
  misc_feature (618)..(626): n is a, c, g, or t
aagggagtaaaagtgttaaggcaaacgtcaaaaacatgaaagggcatgcaggatgtcccatggcaataagaacaggagaaatctcagagcacaattcagcaggatgagagaaggggaaccagaagctccggagtcattgctcacttcagagtttgaattcgtgagctgacaaagagtaacatgctctttctacacagacatggacaatttagacagtattggaaaattacttgaagctggattttcatgaagttctgaatgagtgtaaatgctttttaggatactataaagagtgatgtttttcataagcaccataaaatgggttctggaaaaactgattaccttagcatcctgtaatataacttatggtagcagattggggaaaatgaagcagcccactgaataattgacaaagtctgcttggagaacattctaaggtacaatatcatggagctcctttttcctttctccactaattgcgtgatgagctattgttctggctggtaattctccaactcggctgtcatttgaagtggcagacttaatatggaaagtttttataattatgagtttgaaaaagcattttaagatgatacagaaagtatccaaaacaacagnnnnnnnnngccacgtcattttagatgaattgcgtgccttaaaatggtgaacgttagaaaattaaacaagtctggattccacaagtagttccaagtcaccaagtgacaaaaacaaggttaacatt

SEQ ID NO: 164713 - DNA, 542 bp, Homo Sapiens
  misc_feature (428)..(437): n is a, c, g, or t
tgagtcggacccgttgcgctctgaatcgctatcactttaaagagagtacagtcccactaggttacgtgctgttccacctgggcagtttctgttcatgtattttctcagtatcactgcacaagccagcaaagggagtctaccacacatcatgcagaagaagtaacactgtcctgggacatggtgtctgtcttctaattcctagcagggcaaacaatgaactgaaaagaaggtagaaaccccagcccaattctatttgccatgactgccccactgcagttcacaggtaatgatgggctagagaaagtgaacaggggatgggctgctgctcactcccagctaggcaccagaccatctccacaaagaatgctagaacagagtgatgctgccaccccttggattcataaataagtagattttgatgggtttgnnnnnnnnnncacaaaactctaaggtaagcggtaagccactagtcttgtgccaaagaagatgctatctcttttctatactcattcctacctccccatcctgatcctctagagtag

SEQ ID NO: 164714 - DNA, 328 bp, Homo Sapiens
agaaactatagtgacactgaaactgaaggagagatttttaattccttagtgcaatactttggtgacaacttggggcgaaaagttaaagcgatgccattagttgaagaaacttctttactggaagattcgtcagtgacttttcctgtggtaataataggaaatggaccctcaggaatatgcctttcttatatgttatcaggctacagaccgtatttatcatcagaagcaatacacccaaatacaatcttaaatagtaaattagaagaagcaagacatctttccattgttgatcaggacttagaatacttgtctgagggccttgagggcg

SEQ ID NO: 164715 - DNA, 218 bp, Homo Sapiens
tcggtacctgatagactggcataattccactcaatccaaaaacaatgcatcccagagctgaatatttaggtgaaaatatatcaggaatgggaggcattcaggtttaattttcatgttttggtagagttaggatgtgagttttcatttaaaaatattctttattttttttgctactattgtggtttctgtattgttactatacaatctgtcaatcataa

SEQ ID NO: 164716 - DNA, 467 bp, Homo Sapiens
gtagtacatctacacattatcaagtacacatacacaaagtaaagctatttagtacatacagattgcagcacttgaaccaaatgtacccaactcctaaacttgttctaatcagcttgggcaattttttaaaagatacacgttatctttaaaacaaccagtgctttgatcttacaaacaactgaataattctaatctcaagccagtcaattcagtaaaccaaatttatgctaaagcaataaaggtaaaagcctatcctacctttaaaccagctttaagacaaaaaatcgtcaccaagttccatatgacaaaaaagggtctttcagtttgaattactttccatttctatttgatcaaataaaccaaaatattactaaggaagagcatccaatgatttgtaaagctgataaaactgccctgtttcaagaaaagctctttaatagatacaagtctagcttcgtgtcaagtga

SEQ ID NO: 164717 - DNA, 284 bp, Homo Sapiens
caaaaatttacaccatagtaagctaaaagcagccaccattaagaaagcgttcaagctcaacacccactacctaaaaaatcccaaacatataactgaactcctcacacccaattggaccaatctatcaccctatagaagaactaatgttagtataagtaacatgaaaacattctcctcagcatgaccctgcgctgaactgacactctgcagtgacatttctacgctcaaccaccacgatattattacccgcactgactaccctacacgggcatgctcctcaggca

SEQ ID NO: 164718 - DNA, 298 bp, Homo Sapiens
gcgatctagaactagtcctaaaaggtccatagaaaaggagctggatgtagatgctgattttgtagaaacgtcagagttatggagcttgccaccacatgcagaaactgctacagcctcctcaacctggcagaagttcgcagcaaatactgggaaagccaaggacattccaatccccaatcttcctcccttggattttccatctccagaacttcctcttatggagctctctgaggatattctgaaaggatttatgaataattaaaatggaaggccacagaaaaggggaaaagaggaaata

SEQ ID NO: 164719 - DNA, 608 bp, Homo Sapiens
ccagatcgccgagggcttcagcgacactgcgctcatcatggtagacaacaccaagtttacgatggactgcgtagcgcctacgatccacgtgtacgagcaccatgagaacagatggcggtgcagagacccacaccatgactactgtgaagactggccagaggcacagaggatctcagcctcgctcctggacagccggtcctacgagacgctcgtggatttcgataaccacctggatgacattcggaatgactggacaaacccagagatcaataaagctgtcctacacttgtgctaggcaggcaccgctgtgactgggctccgggcctttccactacgttgaagaagaaaacctatttttaaatgtaaataaaatatctggtagcctgtgtggaaagctgaccgttttaagaagtggcatgtgccttgaaagggggcagaatgttcagtcggtcgtgtttttaacacagagtctctagaagaggtgcagacatcccgtctgactgtccctgtggactctctcagttgtatgttgctataatcctccaaatcaaagctctttctgcttgtgcaagattgttcctattaaacagttttaactaaccttttat

SEQ ID NO: 164720 - DNA, 901 bp, Homo Sapiens
gcgcgactggagtctggggctgcggcttcccagaggcgcgagtcgcttttccaggagccgaggcccaaacggggccgggcctgaagggtcccccgccagcccgcggccgcgccatcaatcgccgccgcctcgtcccgcttctcggctgaggcgccgcgcggccaggcagcgggtccaggcctcagccgcgcgcccaggggcctccggggccctcccgggtcagcatgcccggggtgaaactgaccacccaggcctactgcaagatggtgctgcacggcgccaagtacccgcactgcgccgtcaacgggctcctggtggccgagaagcagaagccgcgtaaggagcacctccccctgggcggccccggcgcccaccacaccctcttcgtggactgcatccccctcttccacggcaccctggccctcgcccccatgctggaggtggctctcaccctgattgattcatggtgcaaagatcatagctacgtgattgctggttattaatcaagctaatgagcgagtaaaggatgccagtccaaaccaggttgcagagaaggtggcctccagaatcgccgagggcttcaccgacactgcgctcatcatggtagacaacaccaagcttaacgatggactgcgtagcgcctacgatccacgtgtaccagcaccatgaaaaccgatgggcggggcaaagaccccaccccatgcgccactgggaaaaactggcccagaggccccaaaggaatctccaccctccgttccctggaacagtcgggtccctaacaagaaaggctcgcggaatttttccaaaaacccccccgggcatgaaccacttcgggaattgaactgggacaaaaatccccaggaggagactatataaaaaggcggtccgctaaacacttggc

SEQ ID NO: 164721 - DNA, 975 bp, Homo Sapiens
gtgccgaatcggacgagggtacaacgttctaaaaagcctgagacgccttacaaaaagtaaggaaactgaggtcctgtgagtgaagtgacctcatgatcacacaacaggagatggcagggctgggattcaaacccgggagtgtctgctgccacatcccacactcccactgcctggctccaagtcccaggaagctcgagactaacctcctcttcattggaaatgctgggcacattgcagtcagtgagctgctgccaaaacggcgttaagtagaacccccagaggccccgccggttggtgatcaccctcaggtcctgccagggagacacagtgaggaggttggctaattgctgctttcaggccctggaaatcagtcgccaaggcccaggagaaccccggtgagtccgtccagttgaggcagaggcaataacctcccattgctcggccctgcgcctgccccagtcctggcagggggcaccggctcaggaacatgcggcctcctggcatttctcggtatttaactgtctcgctgtcttatccgagtccctaatgaaacgacttgtgtgacaatctgtctgtgccttacgaaagtgtctgtgcacttcttatcctttttaaaagcaacttttaaaagtggatggggaggggggctagcatacgtggtagggttctagaaatctgtggtcatcgctgaaatcctttttgcatcatgttttttgatgttggagtgatgaagtgtacatcccccaccccacacaccactacctgtgtacagaccttttaaaacatgtcttctttttctgattcaatactgtgacctctccgatacagtctaatccttggggatctgtaatcaaggttttaaaacctgggaagtgggttgggaagggtttgcactggtcttgagtgttgtgcttttctgtgttgtgtgttttgattttgtcttttacttttatagttgacatattttctgatata

SEQ ID NO: 164722 - DNA, 751 bp, Homo Sapiens
  misc_feature (20)..(20): n is a, c, g, or t
  misc_feature (35)..(35): n is a, c, g, or t
  misc_feature (154)..(154): n is a, c, g, or t
  misc_feature (204)..(204): n is a, c, g, or t
  misc_feature (214)..(214): n is a, c, g, or t
  misc_feature (722)..(722): n is a, c, g, or t
aaaccagacccagcccagcnggtctcagaaatacntgtaaaaagaactttaatttatcacatctttctcccttgcgacctgtccaattatactgacctggccatgagcacggtaaagcagaccaagcccattccatatactggtccctttaatntgctctgttaccagctgcagaaattgacaggtgatgtggaagaattaganattcaagaanaacctgctctgaaagtgttcaaaaatattactgtaatacaagaaccaggcatggtggtattagaatggctggcaaacccttctaatgatatgtatgcagatacagtaacaactgtgatattggaagttcagtcaaatcccaaaataagaaaaggtgcagtacagaaggtttctaaaaaattagaaatgcacgtttacagcaagaggttggagatcatgctccaggacatatttggagaagactgtgtaagtgtaaaggatgactctattcttagcgtcacagtggacgggaaaactgccaaccttaacttggagacacggactgtagaatgtgaagagggaagtgaagacgatgaatccctccgagaaatggtggagctggctgcacagagactgtacgaggccctgacgccagttcactgagactgtgcctgtatatgaactttgaaaaaatacttgactctacttttgttacctaaaataaaatgcattcgtttctctgggaaacncccaagagcccccaaaacaaaaaatatgt

SEQ ID NO: 164723 - DNA, 278 bp, Homo Sapiens
tctgggagctgcacagagaagtttgtagccaggtactgcattctctcccatcctggggcagcactccccagagctgtgccagcaggggggctgtgccaacctgttcttagagtgtagctgtaaaggcagtgcccatgtgtacattctgcctagagtgtagcctaaaaggcagggcccacgtgtatagtatctgtatataagttgctgtgtgtctgtcctgatttctacaactggagtttttttatacaatgttctttgtctcaaaataaagcaatgtg

SEQ ID NO: 164724 - DNA, 600 bp, Homo Sapiens
  misc_feature (22)..(22): n is a, c, g, or t
  misc_feature (50)..(50): n is a, c, g, or t
  misc_feature (64)..(64): n is a, c, g, or t
cctgtaaattacaatgccatantggacaatgtaataagcaagtagacaangcccatgatacagnagagaattattaaataaagcactgacattgtttgatacagtgaaaaaacactgcaattcccacttttaaaatttgaagctatttacgtttatctactgatcaatatgatcagctgaatttaatggaaaaaaaatccaagaccagcagttcctcacatttgagtactactcagattggcagccttcacttttccggagtctgtgcaaaacaacacaaaaatagagtggaggggtcatttcagtcattatagggttaatagcagctgtgagcagatggttgctacacctaggccttctctatatgcagcgtccataaagccacttggaggttagtctttggtgactaacctgccttgcaaaggctggcatgtctaaccaggtttttgatcttttatcacgtttaaaggcttgtttattccctaatgccaattcaataaagggaggctgtcttgaaagagcagtataaacagctggcattagctccaacatcccaagctgctttcactgcaatgctatccagttataaatgtttctctt

SEQ ID NO: 164725 - DNA, 1035 bp, Homo Sapiens
agggtttttaccgtggaggattatttaattccaggtctttttttcttcaaaaacttcttccttgttttttccattaataggccatttatacttgaggagttctgtttccaaaaaaattcggatccccacccatgtaaaatggtggaagccatagttttccaaatgaagtttcatgggggtgaaaattcatgatgcccgagaaccagccatagaaaagggatcagattttaaaggggttgagagggaatatcataaccactatggacatcaatagtttctaataaacgaatggtcacccatgcccaaagaagaattacatgatcacacaaaagcacgattccaatgaaaaatccagttccaagaattagagtctccaaaggatgtgcatattcagcttccattccaaatggagcctgaaactcatgatgaactttatgaatatacttgtatattcttttgtggtgtaagagtctatgcagaaaatagtgccaagtatcttcaatgactgcacaaccaaagcatcttgccaaaagaaaataccatcttggcattctttcccaatcataaggaatattgaaatactctgtaaaataataggttccacaaatcaaaggcagctggatacagaagtgattaaagagaagaactttgaaacacttccattggttttcccatgtctctggcttatccttttgaattttgtattttttcatataaggtataaattgaaataaaaatccaggtaaacagaataagaaataaagggcttcatgaactataagggatccccatgttgcaatctggaactttgtataattattcaacatatagttccaagcatttttaaatggttcttgcagaggattctcaggtaaaagtgaatctacatattccacagccaaggatgctgaactaaagatgctgacactttcatttgttgccatttttcaaatctctgcagacagccttataattctgaacggccgcgagatgactgccggccaccgacaccgaggactcgccaggtgttccccc

SEQ ID NO: 164726 - DNA, 519 bp, Homo Sapiens
aacaggactcatctatttattgatattagtattaagccacttcccagcagtgtgactgccgtaacaagaacaggactcagtttctaaaggcaataaaataacaaggacatcatggacaaagcattgggaacactcctcgtagggaactggcttttcctctccagccagagcacccaggtgccaggggccactcccgagcacactctttgcgcatctcagccctcatgccggatgctcttctccccaccctaatctgaccttctcagttcatctggataaacctgctgtgcttcctgtccgtgaagcgaggcgctccccaaagcgggagccaaagtctggtgatgaaacagctggcaccaaagagctggttctgcctcctcctcaccaagtaaacacgtactttattttttaaggaaagaaaagtcttaaaaatatatggcactagagtgtaaaactatacaactgcatccaatgaaaattccctgcagcttgcagcctgtgcacaccatgtccctcaga

SEQ ID NO: 164727 - DNA, 236 bp, Homo Sapiens
ccagttctaataggtggacaatcagcttctctccgggcacaaagcccaccatctcgcacctctttgaatcccaacatctaagagaacgcctatataatgtacttggtaaaggctgatgtgtaaaagctgtctttgaaatgtcaattaactcacatataatttttacagaaaaacactggaagttttgtgctataagttttgtaatatatcagtgaactaacattattatcctgata

SEQ ID NO: 164728 - DNA, 529 bp, Homo Sapiens
ggatacgaaatcacactggaaagaaaccctatcagtgtaaggaatgtgggaaagccttcaatacatccacaacgcttactcaacatacaagaattcacacaggagagaagccttatgaatgtgttgaatgtgggaagaccttcattacttcttcccatcgtagtaaacatttgaaaactcacagtggagaaaggtaaatgcaagatatgtgggaaagaatttctgtattcctcaccccacctgtgaactcctaccagagagaaaccttttgtatgtaaagaatttgggaaagcatttgctctttcctcatgcctaagtatgcatgaaagaattcacactggggagaaatactatgaatgtaaggatatgagtgttgttaccatttagcccattggttgccatctttaattattggcagtgcaaagatcatcagattagtcctaaatgccttttggaggttgtaatggctcacagattggccttagatgcatcccgagggtctgaaattaaacctacaggttctgaatac

SEQ ID NO: 164729 - DNA, 626 bp, Homo Sapiens
  misc_feature (190)..(216): n is a, c, g, or t
ggagttagtatatattaagtttagggtttgttagcattctacataatacttttaaaacagcaatggcttccaaaaattcaaaaaggttagttatgtgactgttggtccaacagatgtgttaaaatgcagcaagtatatttaactttataagttctgtccaagtataaaaatactatacaaaattaacaannnnnnnnnnnnnnnnnnnnnnnnnnncatgtatgcatgcacgtttataactgttcatgcttccaaagctcagacattcactagtttacaagtatgttgccgcagtcagctgataccatttaaccgtctctttgctcaagttgaaatctttcaaaggcagggttactccacccaagaaaaaattctcccgcaaagattctcaactgagcacacttagttgaagttctcgaaatcttagggtttctttgctatatccactgtatacaagcatttcattgaatgtcggattcctcgtttttcgtgaaattttggttttacgtttggatgttttgtggttatctggaagtaggtatgttttgacatatggatttgggtcagctccatcttcagtaacaagatctttgatatgcatcaccatgatgaaaagagtaccattt

SEQ ID NO: 164730 - DNA, 728 bp, Homo Sapiens
  misc_feature (578)..(578): n is a, c, g, or t
  misc_feature (627)..(627): n is a, c, g, or t
  misc_feature (643)..(643): n is a, c, g, or t
  misc_feature (680)..(680): n is a, c, g, or t
  misc_feature (692)..(692): n is a, c, g, or t
catttctaatcaggccacttggatgaaaacccttcaaggattactggatagaattcaggctttcccctccaccccccaatcatagctcacaaaccttccttgctatttgttcttaagtaaaaaatcatttttcctcctccctccccaaaccccaaggaactctcactcttgctcaagctgttccgtccccttaccacccctgatacaactgccaggttaatttccagaattcttgcaagactcagttcagaagtcaccttctttcgtgaatgttttgattccctgaggctactttattttggtatggctgaaaaatcctagattttctaaacaaaacctgtttgaatcttggttctgatatggactaggagagagactgggtcaagtaagcttatctccctgaggctgtttcctcgtctgttaagtgtgaatatcaatacctgcctttcataatcaccagggaataaagtggaataatgttgataacagtgcttggcaccctggaagtaggtggcagatgttaacgcccttcctcccttgcactgcgccccctgtgcctacctctagcattgtaacgnccacatagtattgaaatggccagtttacttgtctgccttcctttccaanaccgttggtgcctagnggactagaatcgtgtcctatttaactttgtgttcccnggtcctagctcnggagttggcaaataagaattaaatgtctgctacacc

SEQ ID NO: 164731 - DNA, 458 bp, Homo Sapiens
gacaaggctggtgacatcagttgtaatgcagatatcaatccactgaaaataggacaaacatcttctatctgtatcatttcaaaagtgaaaatttcaggcacaccaaaaaattgaactgcagaactgcttcctgtagtaatgttacctgctggttgaaagacgttcacatgaaaggagaatactttgttaatgtgactaccagaatttggaacgggactttcgcatcatcaacgttccagacagtacagctaacggcagctgcagaaatcaacacctataaccctgagatatatgtgattgaagataacactgttacgattcccctgatgataatgaaacctgatgagaaagccgaagtatccacaggagttataataggaagtataattgctggaatccttttgctgttagctctggttgcattttatggaagctcggcttctcaaaagttatatgtc

SEQ ID NO: 164732 - DNA, 783 bp, Homo Sapiens
  misc_feature (574)..(574): n is a, c, g, or t
ggggcgagtagtcgtccgacgtctggccgtgagacgtttcgggagccggagtctctccaccgcagacatgacgaagggccttgttttaggaatctattccaaagaaaaagaagatgatgtgccacagttcacaagtgcaggagagaattttgataaattgttagctggaaagctgagagagactttgaacatatctggaccacctctgaaggcagggaagactcgaaccttttatggtctgcatcaggacttccccagcgtggtgctagttggcctcggcaaaaaggcagctggaatcgacgaacaggaaaactggcatgaaggcaaagaaaacatcagagctgctgttgcagcggggtgcaggcagattcaagacctggagctctcgtctgtggaggtggatccctgtggagacgctcaggctgctgcggagggagcggtgcttggtctctatgaatacgatgacctaaagcaaaaaaagaagatggctgtgtcggcaaagctctatggaagtggggatcaggaggcctggcagaaaggagtcctgtttgcttctggggcagaacttggcacngccaattgatggagacgccagccaatgagatgacgccaaccagatttgccgaaattattgagaagaatctcaaaagtgctagtagtaaaaccgaggtccatatcagaacccaagtcttgggattgaggaacagggcaatggggatcatttcctcaatgggggccaaaaggatctggacgaggccccccgtcttcttgggaaattccctt

SEQ ID NO: 164733 - DNA, 1516 bp, Homo Sapiens
  misc_feature (1413)..(1425): n is a, c, g, or t
gaaagctgagagagactttgaacatatctggaccacctctgaaggcagggaagactcgaaccttttatggtctgcatcaggacttccccagcgtggtgctagttggcctcggcaaaaaggcagctggaatcgacgaacaggaaaactggcatgaaggcaaagaaaacatcagagctgctgttgcagcggggtgcaggcagattcaagacctggagctctcgtctgtggaggtggatccctgtggagacgctcaggctgctgcggagggagcggtgcttggtctctatgaatacgatgacctaaagcaaaaaaagaagatggctgtgtcggcaaagctctatggaagtggggatcaggaggcctggcagaaaggagtcctgtttgcttctgggcagaacttggcacgccaattgatggagacgccagccaatgagatgacgccaaccagatttgccgaaattattgagaagaatctcaaaagtgctagtagtaaaaccgaggtccatatcagacccaagtcttggattgaggaacaggcaatgggatcattcctcagtgtggccaaaggatctgacgagcccccagtcttcttggaaattcactacaaaggcagccccaatgcaaacgaaccaccctggtgtttgttgggaaaggaattacctttgacagtggtggtatctccatcaaggcttctgcaaatatggacctcatgagggctgacatgggaggagctgcaactatatgctcagccatcgtgtctgctgcaaagcttaatttgcccattaatattataggtctggcccctctttgtgaaaatatgcccagcggcaaggccaacaagccgggggatgttgttagagccaaaaacgggaagaccatccaggttgataacactgatgctgaggggaggctcatactggctgatgcgctctgttacgcacacacgtttaacccgaaggtcatcctcaatgccgccaccttaacaggtgccatggatgtagctttgggatcaggtgccactggggtctttaccaattcatcctggctctggaacaaactcttcgaggccagcattgaaacaggggaccgtgtctggaggatgcctctcttcgaacattatacaagacaggttgtagattgccagcttgcctgatgttaacaacattggaaaatacagatctgcaggagcatgtacagctgcagcattcctgaaagaattcgtaactcatccctaagtgggcacatttaaaactagcaagcgtgatgaccaacaaagatggaagttcccccttatctaacggaaaggcatggacttgggaggcccacaaaggactcctcattggaggttcttaccttcctttccaatccaagaacaaatgcttaattttaagaaacctccaaaaatggtctttnnnnnnnnnnnnnaaaattgggaaccggttggaactttaaaaaaggcccttctgcactaaaatgggcacgcaaaaaatcttttcaacccgcaaaaacaaagggg

SEQ ID NO: 164734 - DNA, 1110 bp, Homo Sapiens
  misc_feature (502)..(520): n is a, c, g, or t
  misc_feature (529)..(567): n is a, c, g, or t
  misc_feature (614)..(686): n is a, c, g, or t
  misc_feature (725)..(733): n is a, c, g, or t
  misc_feature (740)..(837): n is a, c, g, or t
gagcgaggcctgggtggcgaattcggcacgaggcacccctcaccttgtttttttgggggctccagggaccaatctggggctggaaatgttaggaggttgccttggtgctgccccagatctgtccagcagggggcagtaagtgatcttggtagtatccctggctgctaagcccttggcaggggtggtcctttctacattcccattcacttaacagctcttttgggattgggtgtttcattccatttctgcccactccctctcctctcctctctggtaggtttaattttatgctttccctgattccagctttctgcttcctgaggactcccgctccccccaccccaaagtttgtctgtggtgttatagtggtaactgcagttcctcctctggaatgtagactgtatatgtttaataactcaccttctctatccttgctcaaaatgtgggataacgcgatgactgtgaccctggttggaaattaaacttgttttatgcagctttnnnnnnnnnnnnnnnnnnnctcgaggcnnnnnnnnnnnnnnnnnnnnnnnnnnnnnnnnnnnnnnncatggtcatagctgtttcctgacccagctttcttgtacaaagtggtnnnnnnnnnnnnnnnnnnnnnnnnnnnnnnnnnnnnnnnnnnnnnnnnnnnnnnnnnnnnnnnnnnnnnnnnntgcagtacccgggaatttaacccgcctaatgagcgggcnnnnnnnnngtgatcnnnnnnnnnnnnnnnnnnnnnnnnnnnnnnnnnnnnnnnnnnnnnnnnnnnnnnnnnnnnnnnnnnnnnnnnnnnnnnnnnnnnnnnnnnnnnnnnnncagaacttaccaactcttttttccaaaggaaactggcttccagcagaagcgcagataccaaatactggttcttccaagggaagccgtaattaagcccaccactttccaaaactttggaagcaccgcccctaataacctccgctctggcaaatcccggtaaacagggggcttccgtccagtggggcaaaaaagtcctgctcttaccggggttgggactccagaaaccataattttcccgggaataaggggcccccccggcccgggttttaaaaa

SEQ ID NO: 164735 - DNA, 1097 bp, Homo Sapiens
  misc_feature (51)..(113): n is a, c, g, or t
  misc_feature (170)..(289): n is a, c, g, or t
  misc_feature (353)..(417): n is a, c, g, or t
  misc_feature (431)..(452): n is a, c, g, or t
aaccttcagtcttcaatattgaaactggtaagttaccccatttttccatgnnnnnnnnnnnnnnnnnnnnnnnnnnnnnnnnnnnnnnnnnnnnnnnnnnnnnnnnnnnnnnnattactaaataggtttaagaaaaaagcctatataggccaggtgcagtggctcacacnnnnnnnnnnnnnnnnnnnnnnnnnnnnnnnnnnnnnnnnnnnnnnnnnnnnnnnnnnnnnnnnnnnnnnnnnnnnnnnnnnnnnnnnnnnnnnnnnnnnnnnnnnnnnnnnnnnnnnnncatggtagcatgcacctataatcccagctattcaggaggctgaggtgggacaatcacttgaacnnnnnnnnnnnnnnnnnnnnnnnnnnnnnnnnnnnnnnnnnnnnnnnnnnnnnnnnnnnnnnnnnagactctgtctccnnnnnnnnnnnnnnnnnnnnnncgcctatataaagaaaatattccaataggagataaacctatgtacacagagttgctcaccccagcattatctgtagtaacaattagaaacaaatgaaatattcaaaaacagtaaattaggcagatgatgaaacaacatggcaaatgtatgatgctaagccaaatatacaaaaagatccctgtgagacggagcagggacccctctttggggtgtgccagggggattcccacaagcacagaaataaaggagaatcttgagtttccttcaccgaaaactgccaggcacccagctcgccccgagaaggaaaccagcaagctgataagcaagaaggtcataacagtttcaaacaatagccagggaagttgagagtgcacctagagacatcctgaacacgtgcccctgagctgacttttcgagaatacccagacccccaccaaatggagtgcacacagacgtcagataagggggaacaccagggacgaaactctgaccgccattctttgctctcagtttcttcctgatggtgcctgtgccagaccgtaatgttcctttctgcggaccctccaagtttgtagacaaagctttgcgtccttaacctatcactaaatcagtgtcctgtgcttggtttgtgacctggcaggtcag

SEQ ID NO: 164736 - DNA, 745 bp, Homo Sapiens
tgtattgatcgtagactggtgaacacactaaatatgatgccacaccatttctaatctgagcatccttacccagagaatattcatgatacttcctaagtgagcaataatttaaatcagaagctattttattttaatgtaattaacctttcttcacatttcttatgtgttcacctctaatctgttttaggaagagagttggttattatgttgatcccataatataaatcatatcctttatattttagaatatctcaaatgtattccttttttgtatggtgggtttgcctagggacgtgtaactacaggcttttattaagccaaggaaaaagagaatttttcttttcatcttacaaattccagatatctacaaaagatgtgaaagcactaaaaataccatttttaagcagtactttacctgttttttctttagcaaaccaggttatgtggtgtaaaggtttgttatacgtgccacaatatagcatataaatattatgccatcattccttctcttgttaaaggtagaagaataaaattgtgatttttataacctgtgcttattactcaaatggtcttcaacatctttttaaacaacacatactttttgaatgttcagtttctattttgcttgaggtattttgtacatatgtgccttgtgattgctgctgctttaaaggataaagtactctttgggggatgagtctggtttgttttgttttattttaatgaaatatacctatattcctga

SEQ ID NO: 164737 - DNA, 1306 bp, Homo Sapiens
gaaccctgaaaacccgctaagtgaaatcagacagacccaaaaagacaaatactgtatgattacacttatatgaggcccctagaataggcaaattcacacagacagagagcacaacaaagtttaccagtataacaaaggttaccaaagactagggggagagacaggtaggaagttatttttttatgaatacagagcgtctgtttgggatgacgaaaaagttctagaaatggatagtgtcgatggttgcacaacatagcaaatatactaaaagccactgaatagaacatttcaaaagcatgaattttatctcaatatttagaaggaaaaataaatattcttagaagaaacaatattaccatcataaatggaaaaccggtaataataaaatacatacataaatattaagatttacaatgtctattagcaagtcaccctaactcatcttacagaccaccagtaggacaattacccctttgggtgacatgaaaaaggctgccagggggcttatgtccagtgcccagggtccagcatggcaacatattttgtaaaaagttccagcaggctgtggacagcaggaataggctgttgaggggttgggcacagggtcaggtgctggacactagaacaggactccactccgacattccgggtacacagaacttcccagtgggaagagctagccacacagtggcagaagcttggaaaacaacccataacagcccgacgctctctgaatgtgaccttgggtgcaagctgggtttgtatgaacttactggcatttttaacaagacagtgtgtacgggagcatttcaactgcaaagaccactgaactggacactgtcggcgtgacagtatcaagtaaccattaggcagagcaaaacgtaaataaaagtactctctgatggggtagtcagtcaagatggggtggggtcggctaagggggcagtgaggacaactagatgccgaggtagacagaccaagaccagctttctgtgtaatgcaaagtcaaattaaatagacgtgagtggatggaaagacgtaccttattcttgcataagaagacaacggcatgaagacatcacagggaaggttaaggtaaacatgcagcctggaatagccaggagaagtctggaaaagtagaataatgaggtagggcttcccttcgctatttggaagtgcagataacactatgtaaaaccattaggaactggcacgtgaatagacagatcaatagttaatagcagtattagccagaaaatggcgtaaggacaacaggctaactaaccctgtcctcactacatgccat

SEQ ID NO: 164738 - DNA, 1348 bp, Homo Sapiens
  misc_feature (1156)..(1156): n is a, c, g, or t
agtctaatcaggctctgaagattgagagagaaacaagccgtctgctcctgttgtctctgtgagcatctttgacagagtgctcagattgttgggatatagtgcatcggactggcagcctgaatttgtggagaccgcagtcagtaactttgtgatatatggaatatttagaggacagtaacccatttccctacgccctacctgatcacatcgtgccctgctgggccataccccaaacagcccaccttcctctaggcctggccatggccctgtgcctgccacattgaggattaagtcaggatatcttgagccctctcaaatccctgtttattcaggcctctgccacatatagagccagccttctgtccccaccacttccactaccatggagcccacttagtaaaacgctctctgggcccagcttcgccagaaaagacaccaggggagcaaggctcaaaccaggggcagctaaatctgatcttgtggaccagtctctagtaagggctttcagcgtggctgtctgtccattgctttccaaataggatgcagcaatgattggtacatgggtattaagatcggtagtaggggctagtccaagtttagcaatagccaaactggagagcctctgaagtatgagagtcccagagggatttgtcagctcctggcagacatcctgattttcaccttcctgagtctaccctaccccagagggtgccagtctcactgtggtgatggttagcccagtgtgtgctgcactcacacaccagcacggggtccgtgcttgcaggctggtggatgctgtcctctgggttaagactgtctcccttctcgggagcactggagggttctccatctgcgtgtttcagtggaagttggcagatacgaaaacaggcccctatagggaagcagttccatgaaaatgattaattctttccaaaagacttaaaattttttcctatttcaattttcctttcaaaaaaggaaatacattcatgtagttcaaaacttaagaaaacaaaagtctgttcagcaaaagactcccactccgttttcccaaacgctgagccccaccccccatccctggtagcaagaagtgtttccaatttttaggttaagaaacaaaagtccctggaattgtgttaagggatgtcttcctganaaaggggtttgtgttcccgtttgacccctggcgggttgaacctccggcccactagggatcatggccgccctcttcccggggaaggaagggccttcccccattcacccctgtaaaaggggggaccccccagccctttggaactgccccgcccccttggttcacccgtaaccctttcccctgggcccctctgga

SEQ ID NO: 164739 - DNA, 967 bp, Homo Sapiens
gtaactctacaggatcttccaggtagactaacccaggtaggttaggcttcgagtggctacacatacaggagagtggaaacataaaactgtacaaagtcacacttggcacacagttgatatagtcacagctggagctactagggctttctaagggcacactcagcagttcttaccaatgatgttttcttacccagttgtgaataagccataggtagaagctccggagtccagggtaaattagtagcatggtgttagatgttagaaacagaactgttatttgcagtgttaggtctaggatcccagttctaataggacagccctgcaagacaatcaaccagaagcctccaggagcttctacctatggcttattcacaactgggcaagaaaacatcattggtaagaactgctgagtgtgcccttagaaagccctagtagctccagctgtgactatatcaactgtgtgccaagtgtgactttgtacagttttatgtttccactctcctgtatgtgtagccactcgatgcctaacctaccttccacaagccagccccgcatccctgctcccgcagtgtaagtgcagagcctgcctcactggtaagggaaaaccttggcttgggaggccagccctggcccttgaaggggttggctgtgcccagcccacctggctgcagtgggcagctcatgtctgtatctccaaagtgatgtttgtttgcaaaacaccggctgaactgagctggtgttgccaactcttggcagcactgggccaaaccgaccacataccatgagctcccaaatggcgtgtgctcactgtgagacgtcctgccacaccccacaggagacggaggcagtgggcatttggaaccaattctattcagacttcgtcaaagccaaagtcagtctggtgttgtcagttgacacatctccagagttcatgacagctcaacctcgctacttgtcaacagaataa

SEQ ID NO: 164740 - DNA, 473 bp, Homo Sapiens
catgtttgtgagaggaaaggccttggagctgcgatcggagctctacttcctcatcgcccggttcctggaagatggaccctgtcagcaggcggctcaggtgctgatacgcgaggtggccgagaaggagctgctgccccggcgcaccgactggaccgggaaggagcatcccaggacctaccagaatctggtgaagtattacagacacttagcacctgatcacttgcgtgcaaatacgtcatcgactaggacctcttcttgaacaagaaattcctcaaagtgttcctggagtacaaactttattaggagctggaagacagtctttactacgcacaaataaaagctgcaagcatgttgtgtggaaaggatctgctctggctgcgttgcactgtggaagaccacctgagtcaccagttaactatggtagcccacccagcattgcggatactctgttttcaaggaagctgaatgggaaa

SEQ ID NO: 164741 - DNA, 618 bp, Homo Sapiens
gggctttatcaggacatcactctgagtatccgtccagagactcactctcctgggatgttctcatggtttcccatcctcttccctattaagcagcccataacggtacgtgaaggccaaaccatctgtgtgcgtttctggcgatgcagcaattccaagaaggtgtggtatgagtgggctgtgacagcaccagtctgttctgctattcataaccccacaggccgctcatataccattggcctctagccctgcgtgccaagtgtccagagccttggaagcagcttcaggttctgctcctgtagtacagaaggtgcagtacatctatgggctgtgattccccttgcccatcagagaggagcatttcaatctgctttcctgccttacatcaaggtgggcaagggattataattaattgcagggctcaagccaccaatctatgaagacctcaggccagggggtgaggaattagggctggatttgaagctacgcactcagccctcaagaactccctggaatatccctgagaacatggggtttgaacggattttcagcctttttctgttcttgttttgatggttttgtgtaagaggaaatacaaataaagttatagccctttactgc

SEQ ID NO: 164742 - DNA, 2309 bp, Homo Sapiens
  misc_feature (77)..(78): n is a, c, g, or t
  misc_feature (96)..(96): n is a, c, g, or t
  misc_feature (99)..(99): n is a, c, g, or t
accggcgcccccccaaaacgaaaagggttttaggaaaagcttctctgagggggccggaggccggcccaaccatgacnnctacttctcttgtgtgcngtntccttttttggagtaaaggggcttaaaccttaattggtatttcttcttaccaaaacccctcaaaccaagaacagaaaaaggctgaaaatcgtttcaaaccccatgttttcagggatattccagggagttcttgaggctgagtgcgtagcttcaaaatccagcactaattccctcaccccctggcctgaggtcttcatagattggtggcttgagcccttctgtactacaggagcagaacctgaagctgcttccaaggctctggacacttggcacgcagggctagaggccaatggtatatgagcggcctgtggggttatgaatagcagaacagactggtgctgtcacagcccactcataccacaccttcttggaattgctgcatcgccagaaacgcacacagatggtttggccttcacgtaccgttatgggctgcttaatagggaagaggatgggaaaccatgagaacatcccaggagagtgagtctctggacggatactcagagtgatgtcctgataaagcacagtctcaaagtagccggcaaagccatgtagtactgtgttcacctccacaggaaattccaaggtgcaatagcggttgttgtcaatcataggatctctgttgggatggctgaaggtgaaacagggctggggtgcagagagctggtggaagttgtgcagccgtaccacataaggcatctcaaacggggcctcagggtcacggtccttctccctacaggctcggacctcattgtacagcttggaggaagagatgggagccagaaaggaagtgtactccccggggatgctcacaccatcatcttttaggaagtgctgggctccatccaggcactcaggcgacaattcattgtcagcaaatgagcccagaagctcactgacaatgatgtctgctttctctggagccacccattccctcatgtctgatgagactacggtcacttggcttccccattcttcaaactgccagttctctagcgtcaccacggcatttgggtttttctccacagcatacagctttatccgccggtcggcctgcttggctgcccgcagggaagcgttcaccaggggtccccgtcctgctcccagcaccatcagtacctggacattggtatccttctcctcttctggtactcggtctagcagacatttatagatggcctgctggtactgagagtatttgatggggtccttttcaaacacttcatatgtctgagattccagattgtccatcagtggctgaagcggggactgcagatagtcttcatagcccttggcaaagagttcataggcattaggtggaggacggttctggcttaagtattccaggtattggaggtaggagcagaactccttctctgagtggtggttggtgcctgtgatgatgaactgcacctccaacttgaggagccggaagatgagcctctggtgcatcttagaaagaacaggaaatcccttcttattggtcaggaaaatgctagtggggagaatggctgctttgatgggctccccaagccagcgatcaatgacatgattagatgggaggtcagccccaatttcaagagccactgcaatcctcttaatataatcacacaaagtccggaagttgtgccaacacatcctacgtattcgtgcctccccaatgtactcctctgtgtgtgtactttggtgcattcgtcaattatatcatctctcaggtcctctggtgccaccaagggtacccgcatccagaacatggaagagtgatggccagtgtggatgtggttggtcaaaactctggccaggttggtgttatcttcctgattaaggggcagcaggaaagctggaagacccaaatatgcaccaaaattcagctcctgtaacatggccgcctcggagttcctgcgaatcttctacacctttgagtctggacgaatccatggagaaagctttcccacaattagcgtattccagtcccttcctgacagcagtaggtctgatcgtgtctggggaccgggccgattcttagcaggttcctgaatgaactccctcttgaaacgcggatggaagacaggcatgcagaggaaatcaaacccctgcttggccacagcccctagtgtgtcagctatttcggggacgcaattcaggtccctcccgctggacacgcggctcccaccagcacccccgaccgccatcgccgccatctttctcctcgc

SEQ ID NO: 164743 - DNA, 437 bp, Homo Sapiens
cgactagaggatcaggatgaggattccaacgatgaggccagcgtggagggttccccctttcttctcagctgcactgtcatctgtagaagctccattatcttttagatgtagtgctatcttggtatcatcttctgtagggaggctggtgggaaactgagaagtcactgctcttctggtggtagttaggaccctgaactgggtggttgtcgctcctatggttgtggtggttcgagaagaagtttccactggttctgtattctcacacatcttctcttttgactcttcagggcatccactgtccacccagtcctgccgatgacgatcaaatccactggaacatcattgaagtttactacaccaactgcagttgaagccaatctgagaagatacacaggggccacatctgttaaactggaggcatgtgggtaatggggtca

SEQ ID NO: 164744 - DNA, 501 bp, Homo Sapiens
  misc_feature (51)..(167): n is a, c, g, or t
ccccttcctgcaacattatttatctggaatctacctgcccttttgtttttnnnnnnnnnnnnnnnnnnnnnnnnnnnnnnnnnnnnnnnnnnnnnnnnnnnnnnnnnnnnnnnnnnnnnnnnnnnnnnnnnnnnnnnnnnnnnnnnnnnnnnnnnnnnnnnnnnnnnactttgctgcctttcttacatgatccaggcccagaacccaaactcaggcactgtatagatgaccactttcgtaaactactgacctagcttgttgccaattgttgattgaacttcccataactccacttcgtgtctgttcctctgtatacagccaccttctgttcccgtcatgagcctttaggtctccatttgcatattgcaaatactatgttccatgtaggtagctcattcagggccttgctcttcacttcaaaaaaggttcccttgaggactggctgtcaatttgtgttgctgtgttggttgttgatgaaaataataaaatgattgattacat

SEQ ID NO: 164745 - DNA, 991 bp, Homo Sapiens
aacacgtgatgcacagaggcccctatccggagaatgatggcatatgtgaagtatggcgtctctcctctcttcttggtgtagatgcaggtcagggccaagtactcccaccgcattcaccgatcactcgccaggcagttaatagtacgccatgcgtttggggcaacagcaccaagtacagtccgcagcgggtgggcctgacccacaccatggagcatgaggacgtcatccagatcgtgaagaagtaacggcgcctgccgggcctcccgcccacctgcctcgtctccctggggaggtggtcccactgggacacacaaacacccaaacagaaaaatacaaatacacgtaccccaggaaggggttccctcaagtctctgctatttacagaagtttcttcagtaggcagacgaagagtgtgttggggcaaaggggctcggttggaggcatttcccataagactgagccctcttcatgggggttttgagtttgtagtgctgagcctgcatctgtgcctcccagccccctgcactgagggagcaagttgcccacatgcccgccagccagggcctaaagcagatggcatgctcagtgccaggctggtagctgggcctgtttgggtccctggaggctgtggctgctgtcatggcacctcactccctcagctcttgccagcttctctgacacttgggttgggggcccttccaggaggaaacccccttgggtgccccacacagggctctccatgatgggaaccagtggttagtggcttcaaaggcccagctgacaccctccacagcctaaggggtgtcctaaagtgcctccccctgtattcccctttcccagggcagccccctgcccagcacaaaaacccagggaccctgggctctgcacgcctgggggcagggaacttttttgattttagggatctggtatttttctaggtcccccaggttctctgggctctccttttcctgaattaagaggattgaaaacg

SEQ ID NO: 164746 - DNA, 390 bp, Homo Sapiens
  misc_feature (12)..(12): n is a, c, g, or t
  misc_feature (66)..(66): n is a, c, g, or t
gtaaactggggnccttgtttggggtcccctggaaggcttgtggctgcttgtaatgggaaccttaantcccctaagctcttgccaagcttctctgaaacttgggttgggggcccttcccaggaggaaacccccttgggtgccccaaaaagggctctccatgatgggaaccagtggttagtggcttcaaaggcccagctgaaaccctccaaagcctaaggggtgtcctaaagtgcctccccctgtattccccctcccagggcagcccctgcccagcacaaaaccccaggaccctggctctgcacgcctggggcagggacttttgagtttaggatctgtattttctaagtccccagttctcctggctctcctttctgaaataaaggattgaaa

SEQ ID NO: 164747 - DNA, 547 bp, Homo Sapiens
cgactcaaggatccgggtggaacggttagcggccatcgggcggttggtcttcattctaccagactttgctgtcggaagagagaaatggtagaatgacaggccacgtttggcccgttggaaatgcccaccaccctctgggaagatttactggccgtttatggaaggcctgtgtatataatatgaaaaagctgctctcaactccaccccaaccttttaatagaaaacatttgtcacatctagcccttctagatggaaagaggttgccgacgtatgataaaatagagttagaaagttacacatcttgtaaattctcatttgtttaaaagaaatcatagaaaatacatgtcttctggagatgacttttggaaatggagttgttaagacggcctctggaagcgatacgtccacgtttgttaagtgggttagatgacatggagctggaagacctgagaaggaagagaagaaggttctatgctagactggtcatatttagaagacattttcatattctatccattgtgttgtgtgcattttattcctcactact

SEQ ID NO: 164748 - DNA, 485 bp, Homo Sapiens
tcgactctagaggatcttgatgctcaattgagaagaacacttagtccagagattatcacagtgacttctgcggttggtcctgtgtccatggcggctccaacagcaatcacagaagcaggaacacagcctcagaagggtgtttctcaagtcaaagaaggccctgtcctagcaactagttcaggagctggtgtttttaagatgggacgatttcaggtttctgttgcagcagacggtgcccagaaagagggtaaaaataagtcagaagatgcaaagtctgttcattttgaatccagcacctcagagtcctcagtgctatcaagtagtagtccagagagtaccttggtgaaaccagagccgaatggcataaccatccctggtatctcttcagatgtgccagagagtgcccacaaaactactgcctcagaggcaaagtcagacactggcagcctaccagttggacgtttgcaggtgacaactacagcata

SEQ ID NO: 164749 - DNA, 537 bp, Homo Sapiens
cctgttctcttctggagaacccaaggctgcccagctaatacagaagttcgtcctctgtgttacagaatgagtggaaagggcaggaatgcagggccatgcctgcccaatgcaaaagaaaattactcctaacggtttctttacaatatatacagagtatgctgcaggccagtgccacagatacaaaacacacaacaatatttaaaaacaaacaggaacagagagggaaccttggctccacctcacaggagccccaggagggcataatcaggctgaaattcagtcaccctcttggttggggtgactcaggtggggtgggatgacggtgtctgcactagctacttccacggaggaaagggaggtcactgctcagagcactgcccatgagggcagcagaaggcagacggaatgatgggtatgagggaggctgttttggggccctgccaagaggtctaaacaatggtttttggggaggactcagaacccaacttgaacaaaaacgaggaggcagaaacctagggaaaaggcctgtagatcaga

SEQ ID NO: 164750 - DNA, 959 bp, Homo Sapiens
tcccttgcaattgttcgcccctctgggccaaaccaaagggacgctgctctgtacaggtagagtccaaggaggtgtcagctcatcatgtcattgctattcacgccataagtggaattcttcattgagtcgttgacttctcgacggaatgctgacaggttctgggtgaacctgtctctgtttttcgtaagaagatttcactcgatgccttccatcaggttctcaaaacacaggtgcatggcctgctgcttctccggtggctggctgttcacaatactgtttcttaggtcagaaaaacacttttcattaagcaatatcaagccaagtagtggtcgggacatagaccactggttcctacagtcttcaaagatgatgatgttcagcaccgtggacagcatctgctggatcatctctggatgctgctgcatgatgtgcagaaagcggtcgctctcctggttccaggggtggggtcctcttcttggtgctacgtgacagctgcttgaagaggtatgtcacaatgtggtccaggcaggagcagcagcctgtgcataccatggtgtcaagtgcagtaagtccttcagaaatggaagagagaatatacatgatgacgtgaggttccaggcttgcaataaagttcatatggtcctgggtcaggacttccagtagtgaataataagactggctgagcttggggtaatccaagagatcactgtgaggaatagagaggagcagcttgatgaaggtctgcagagcattgtccagggcatcgtctccatagagacgaaagactccgaaattgacgtaactcccactgagagcagccttcagcatggagaagcagatggagatgcccttgagcttcagagcatagacctgatcctttgggacctctcctagtgtcaggatgcgattgccatacattgttatcatcttgctggtttctcgtgatcgtggggttgtaa

SEQ ID NO: 164751 - DNA, 1031 bp, Homo Sapiens
ggggctcagagactcccaccccagctcagagggagcaggggcccagccagggacggaccctcattcctcccagggaccccagacctctgtctctctcggcaggccttggctccttgaacttttggccgccatgtgcttcccgaaggtcctctctgatgacatgaagaagctgaaggcccgaatggtaatgctcctccctacttctgctcaggggttgggggcctgggtctcagcgtgtgacactgaggacactgtgggacacctgggaccctggagggacaaggatccggccctttggtgccaactctgcctctcttcacagcaccaggccatagaaagattttatgataaaatgcaaaatgcagaatcaggacgtggacaggtgatgtcgagcctggcagagctggaggacgacttcaaagagggctacctggagacagtggcggcttattatgaggagcagcacccagagctcactcctctacttgaaaaagaaagagatggattacggtgccgaggcaacagatcccctgtcccggatgttgaggatcccgcaaccgaggagcctggggagagcttttgtgacaaggtcatgagatggttccaggccatgctgcagcggctgcagacctggtggcacggggttctggcctgggtgaaggagaaggtggtggccctggtccatgcagtgcaggccctctggaaacagttccagagtttctgctgctctctgtcagagctcttcatgtcctctttccagtcctacggagccccacggggggacaaggaggagctgacaccccagaagtgctctgaaccccaatcctcaaaatgaagatactgacaccacctttgccctccccgtcaccgcgcacccaccctgacccctccctcagctgtcctgtgccccgccctctcccgcaaactcagtccccctgcctggcattcctgccgcagctctgacctggtgctgtcgccctggcatcttaataaaacctgcttatacttccctggcaggggagataccacga

SEQ ID NO: 164752 - DNA, 834 bp, Homo Sapiens
  misc_feature (477)..(477): n is a, c, g, or t
  misc_feature (489)..(489): n is a, c, g, or t
tcgactcaaggatccatgggggagtgaaaccaattctcagagaacaacccaccagagacttttaaagagaggccaggcttgggaatgggttgggagaggcatctgttcattggagcatgagtggatgccagaactgtaggttataaggcagtcactttttctctctactcccacccacacctgcctccctcttacccctgctcccccacactgcaggaggatttgtctctaagaggtgctgccccaaagctccccaagcatcaatactcctagggctcaggacaagtggctcccctggccaggagagccacagccatgatacagggctcttatggagccctggagttgttgggcaagaatgcggtcattttttgaaccaaaagacaaacaggttaaaaggaaaaaaagtaatctgaatttcccaagtgcctacgctgcatattccccttgttagatcccattttcatgttactttgnagccttggccanaggctcaaaaaggacacaaccagtttggggaaggggtggctaaggaagatggtataggtgaaggcggctgtgtgaccactttcccccacccttcccaccctctagacaactctctcccttacctgtttttgctatggctgtaaaggtatttttcctctgccccactccctgccatacctttatcccgggatcctattttgggcctggggtgggtatacctggggctggtcttaggagggtgctaggctgcagactgccttgtactccctggacaccctcaaatggggttttctgtgttatttcataaaattctttgaagtccaataaagcatgtaggagattcta

SEQ ID NO: 164753 - DNA, 425 bp, Homo Sapiens
taagaattctttcttctttggttcaaagatttgtcttaattctgcaactttaggaagtgcaactaaaagctgagcatcgattcctctttcgtggttagcgagctgttctttatcttcgagtgagaactccttctgaaagcttgaaactttcctttgacgtgggaatccaaggaagcttaagtttttcttgttgaaatcttaacgccgatatttaaatcatggcttcgatgtgaaatgacttcaaaatcatcatatctcagcttttcaagtcctcaaggccatccacttgaactctctcttttctcccgcaagtcaaaactcagtgagaatccaccatctcttcatgggcttctccttcagttttagaaagcaaccaatctccaatgtagccagaatccggctcttccacacctcccggtggcagg

SEQ ID NO: 164754 - DNA, 1316 bp, Homo Sapiens
  misc_feature (1159)..(1159): n is a, c, g, or t
gggacgcaagatggcggccgcggcggtgaacggggcggcaggcttctcgagctccgggcccgcggcaacctcgggcgctgttctgcaggccgcgaccggcatgtacgagcaactcaagggcgagtggaaccgtaaaagccccaatcttagcaagtgcggggaagagctgggtcgactcaagctagttcttctggagctcaacttcttgccaaccacagggaccaagctgaccaaacagcagctaattctggcccgtgacatactggagatcggggcccaatggagcatcctacgcaaggacatcccctccttcgagcgctacatggcccagctcaaatgctactactttgattacaaggagcagctccccgagtcagcctatatgcaccagctcttgggcctcaacctcctcttcctgctgtcccagaaccgggtggctgagttccacacggagttggagcggctgcctgccaaggacatacagaccaatgtctacatcaagcacccagtgtccctggagcaatacctgatggagggcagctacaacaaagtgttcctggccaagggtaacatccccgccgagagctacaccttcttcattgacatcctgctcgacactatcagggatgagatcgctgggtgcatcgagaaggcctacgagaaaatccttttcactgaggccacccggatcctcttcttcaacacacccaaaaagatgacagactacgccaagaagcgagggtgggtcctgggccccaacaactactacagttttgccagccagcagcagaagccggaagacaccaccattccctccacagaactggccaaacaggtcatcgagtatgcccggcagctggagatgatcgtctgagccccccgggcactgggtggggcagggcacgagttatttaaaacagttacactgcagggtttcgcccaataaaggtggactgacattccctcttccagggcccttgtctccccagttgggacggcagagagacaagttcttatatctgaaaaacttggaggttttggggcattcaggagttggagatagcctccaactgggtcagcctctgtctggtgggcattgctcagggtctcaaacatggacgcccactgtggggccccagcagcactgtggcctgcaggnagccatggccccaggtagggggactgttctagccagctgtggacacataggaatgctggaccagggtaccagattttttcaacaaagggggtgaagtgtcctactaaaaagaataaatgttggcagtgaattaaacaatttttcaaatgaaaaaaaa

SEQ ID NO: 164755 - DNA, 986 bp, Homo Sapiens
  misc_feature (738)..(746): n is a, c, g, or t
gcggtgaacggggcgtcacgcttctcgagctccgggcccgcggcaacctcgggcgctgttctgcaggccgcgaccggcatgtacgagcaactcaagggcgagtggaaccgtaaaagccccaatcttagcaagtgcggggaagagctgggtcgactcaagctagttcttctggagctcaacttcttgccaaccacagggaccaagctgaccaaacagcagctaattctggcccgtgacatactggagatcggggcccaatggagcatcctacgcaaggacatcccctccttcgagcgctacatggcccagctcaaatgctactactttgattacaaggagcagctccccgagtcagcctatatgcaccagctcttgggcctcaacctcctcttcctgctgtcccagaaccgggtggctgagttccacacggagttggagcggctgcctgccaaggacatacagaccaatgtctacatcaagcaccccgtgtccctggagcaatacctgatggagggcagctacaacaaagtggttcctggcccagggtaacatccccgccgagagctaccccttcttcattgaacatcctgctccgacactatcagggatggaatccgctgggtggcatcgagaaaggcctacgagaaaaatcccttttccactgaagggccaccgggaacccctttctttcaccccaccccaaaaaagatgacaggactaccgcccaagaaagggaannnnnnnnnaccctggggcccccaaacaaactaattaaaggtttttggccagacccagcatacaaaaaatagcggtgaaagaacaccctccaattttccttcccaaaaagaatctggggcccaaaccgtgggccactcgcagatatggcccccgaggatcactggtaagaatggaatcgttactggacacacccccccaggggcaacatagtgggtgggcggcgccggcggcccccacgtcttttattc

SEQ ID NO: 164756 - DNA, 777 bp, Homo Sapiens
  misc_feature (684)..(684): n is a, c, g, or t
  misc_feature (751)..(751): n is a, c, g, or t
ggggggtctgcttgccgcatcacgcaagatggcggccgcggcggtgaacggggcggcaggcttctcgagctccgggcccgcggcaacctcgggcgctgttctgcaggccgcgaccggcatgtacgagcaactcaagggcgagtggaaccgtaaaagccccaatcttagcaagtgcggggaagagctgggtcgactcaagctagttcttctggagctcaacttcttgccaaccacagggaccaagctgaccaaacagcagctaattctggcccgtgacatactggagatcggggcccaatggagcatcctacgcaaggacatcccctccttcgagcgctacatggcccagctcaaatgctactactttgattacaaggagcagctccccgagtcagcctatatgcaccagctcttgggcctcaacctcctcttcctgctggccccagaaccgggtggctgagttccacaccgagttggagcggctgcctgccaaggacatacagaccaatgggctacatcaagcacccagtgtccctggagcaatacctgatggagggcaactacaacaaagtgttcctggccaagggtaacatccccgccgagagctacaccttcttcattgacatcctgctcgacactatcagggatgagatcgctgggtgcatcgataaggcctaccagaanaatccttttcactgagggcaccccggatcctcttctttcacacaccccaaaagatggacgactacgnccaagaaacgaagggtggggtcctgg

SEQ ID NO: 164757 - DNA, 426 bp, Homo Sapiens
tccactagtgtaggccatcacataaattgtcttgctgtgaaatctaaatcaaatgtctggactttatgttcctgtaccatggtgatggtaataatcaggattattgtgaggattgtataagtactagcacatagtaagcactcatgttgtttgctattattgatactcccacttctcccctctggtggcatgtaacctgcacggaccttggaggactgaacaaagggggcaagcgtgggaataaaagacaaagacaagagagtatatttggaagaaggggtcagggggcaccttgcctctagcggacaagggccctgaactttacacagccctccgtatttattaggcaaaagacatagtgagaagcaggggtgattgtcgggtaattgtcagtccatttggcagtttgggtcacagcaggcttgc

SEQ ID NO: 164758 - DNA, 428 bp, Homo Sapiens
cagctcctcaaatacctggatcaggacggagaacacccccgaaaccacctcaccagcacagccggcggacccttccggaggtggccgcagagactagccaacttgcgcgccgccgaccggaccacagctcccagcacacctcaagggcccacgcccggcgaggactacaattccgcggcgtcctcccggaagctcaagtgtacccaggcgcggtgccttgctgggaattgtagttgacgttggtcagcacggaggccacaggatcccagccgggcctttgtgggactgaggtggcgctgagtgggaaagcagcaggcgatgggcaaaaggggggacttggagataaatactgagcacccacaacaggcaggcagcaccactgcaggattggatactgcaatgatgataagcatggcttggctttatgg

SEQ ID NO: 164759 - DNA, 1087 bp, Homo Sapiens
catggacggatactcacacacctgaggtcacacctgcacatacaggtggcatcaacacatgcaggactgtcgcggttgcttctggaccgaacgaagtgacgacgaatgcagaaatgacgacagacaaaaggatctgtttgaaagaaggggtcagggggctccttgattctagggaacagggacctgagcttttacagcccttcatatttattaggtagagtgaatagggaggaagggataactgtcggtcagctatttgatttaacacaggcccacatgattcctttctttgttcaacaggttctggatgttcctgtggataacctcaaggagcacgggacctgggacatgactgcccccagcattccttctggcggcagacagagtttgtcagttcgccaacatcctgctttcatgagaacagtttgctgtttgctcacagagcctccagtggtatactgagttggtcacgaccctcattccttcggcctccaacatctccccttttgtttttgcattaattgaataaaggtaatttcaggctgtgcagctttcaattgccggttggtggttcacccgatcctatagacgcacaggacactacagctagcatggccaagaacatggagtcaggggtttttgcctgaccctggcgctccagtagtttctcagcttcttgtgtcgttttcttgatctgtccccatgttatggggttggatgtcattgtgactccggtcggcccttgttctgtctttgcattcagattccgctggctcatggctcgtactggaggtaacaggcccacggttgaataccatggatccctccggtctcccgttccatggtcacacacacctggagggcacccacacggtttgtccatctccttatattctccgccggcagactctcccgtccaggggttcgtagttcgtctgatcagtttcactttctctgctctggcagaccttcctcgttcaggtccctggtcgggcaccacttgtcacggttgcttcactgtggcagcctcctcagagagcctagccgcccgatagtccgcgcgcccgtgagcgtcttacacactccc

SEQ ID NO: 164760 - DNA, 367 bp, Homo Sapiens
ggggtagttgacgttggtcagcacggaggccacaggatcccagcccggcctttgtgggactgaggtggcgctgagtgggagagcagcaggcgatgcgcgaaaggcgggacttggaggttctggatgttcctgtggataacctcaaggagcacgggacctgggacatgactgcccccagcattccttctggcggcagacagagtttgtcagttcgccaacatcctgctttcatgagaacagtttgctgtttgctcacagagcctccagtggtatactgagttggtcacgaccctcattccttcggcctccaacatctccccttttgtttttgcattaattgaataaaggtaatttcaggctgtgcaaa

SEQ ID NO: 164761 - DNA, 507 bp, Homo Sapiens
aaggatcagaatctaacacattagattcatccattataaatgctatcttttcatttttacagccagaacgtctcaacactgtccgtagatcttcatcaaagtcttcccctggtgtacttcctatggaccttaatctggtacacactcaaaccgttcatccaggcgacgaaacgagacagggtagtttttcctgctccactaacaccaatcagaagcaagtggccttgaggttgacggaatattctgtcaatcctcagcacgtggtctaggacttcattaaacagcaccagcggaacatcaagttcttcttcataaaagaccttcagcctagctttgacataatctcttaactcttcttggtctactgggatgtaatcctttgacagccagttgctgtacaagatgggtcggctcattgccttctctctgtcgatgttagggaagtgcttcagagcaaccgtgtcgatgttctcatcagtccaacgcctctcctgcctctagagtcga

SEQ ID NO: 164762 - DNA, 844 bp, Homo Sapiens
gtcaagagcttcaatatccctctactcgtgctgggtggtggtggttatactgtccgaaatgttgcccgctgctggacatatgagacatcgctgctggtagaagaggccattagtgaggagcttccctatagtgaatacttcgagtactttgccccagacttcacacttcatccagatgtcagcacccgcatcgagaatcagaactcacgccagtatctggaccagatccgccagacaatctttgaaaacctgaagatgctgaaccatgcacctagtgtccagatacatgacgtgcctgcagacctcctgacctatgacaggactgatgaggctgatgcacgaggagaggggtcctgagcgagaactatagcaggccagaggcacccaatgagttctatgatggagaccactgacaactgacaaggaaagcgatgtggagatcttaacgagtggcttgggatgctgctgtcccaaggaatttctttacacctcttggttcgggctggagggcaaaaggagctggctcctagagtcctgggggtcaccccagggctttcgctgacctctgggaaagagtctggagaccacatttggttctcgaaccatctacctgcttctcctctctctcccaaggcctgacaatggtacctatcagggatgagatacagacaaggatagctatctgggaaattattggcgtgggccctggaggccagtccctagccccccttgccctttatctcttcctgcttcctcgcacccagagatcttcgggggatgaacgggtacacaggactgaaattgctctggactccctcctccctgggttctgacttctcctccc

SEQ ID NO: 164763 - DNA, 883 bp, Homo Sapiens
tcgactctagaggatctccagggccatcaaagccccctcgtgggatagggagactatttacacagccagggaggagggcagccaggaggcagagaccgggtcccgtatttccctctgcccgaatgaggaggggaggggcgtcctgggtcctgcagctgtagtcttataagctcaaagccctcatagcagaagaagcgcagagactcgcccgcctggtagtggtgcttgtagatgtaaacgccactgccgaggacaatgaccaagcctagaggcagcaggatggccagggccaggttccccccttccagctgccgtgatggatctgtggtctgggtcacttccagttttcggttgtccaggagctcctcataggcaactttgcagagtgggggctggctggtccactgggaggggtggccgggcacacaggtgatggtgacctcgccgataagctcaaagccctcatagcagaagaagcgcagagactcgcccgcctggtagtggtgcttgtacagcgtctggtagccattctcgggaacccccgggttcaggcacggctcgtacttcaaggcgcatttggggaccctatcgctccacttgggtgtgcctgtgtcccggctgtagcaggtgagcatggctgccccctcgaggctgtaccctggcaggcagcggtactggacgcgggagccaacggggaagccggcgtccgaggcggtgcggtgcccgttggcaatcccgccagggtcagcacaagtcatgatcttttggcaggcgggcggcgcggcgctccaagacaggtcccactggcaagtgagaatgtcggagcctagcagctcgtagccagctcgcactgtaggtgagcaccgtgctatctcatccggac

SEQ ID NO: 164764 - DNA, 948 bp, Homo Sapiens
  misc_feature (43)..(52): n is a, c, g, or t
  misc_feature (625)..(689): n is a, c, g, or t
  misc_feature (775)..(775): n is a, c, g, or t
  misc_feature (793)..(802): n is a, c, g, or t
acccttttctttctagttgtctttaaggaaaattaattttacnnnnnnnnnngttctggccgaaatttttatgagatatctctcacttgtcttccactttgaaccggttaaagctcatagctgtcagctctgaatgaggaggggagaagcccctgggtctttctttgaaaggaatccgctgcttgagggctgcctccctcatggtgtgcgtgtcgtttctcttcctgacgcatcttgtgatatcagaggtaactatgcaaagcatccaggcggttctgaatgtgaagcactacacccagcagagtcccggtgccctctgtccccactgccggcccatgttctctctccggaggtcaccaaggaatgcacaggtttcgactaccagaaaggggagtccttgggttctttcaaaaaattcgtgaggagagctgtctacagtggaatagggggtctccctggggaatgcaggccaagtccttttattttaacatgatgtccatgaagaggtttgccgtctgggcagccctgtcggcaaggagcgtgcatactgcgtttgtgtaattgtttgctgtatctcccttccctctgagctgtattgttctttaatggctgtcttgcccttccnnnnnnnnnnnnnnnnnnnnnnnnnnnnnnnnnnnnnnnnnnnnnnnnnnnnnnnnnnnnnnnnngttttgtttagtttactgtgaaatgaactgtatggcttatttacagtatttttaattcttaataaacacttgagctttgttcctangccaaaaaccacaaaccnnnnnnnnnnccttggtcggccgcctcggcccccccaaaaagctttctaagccctttcgttttggcggcgcgggccccagaagggaaagggaaacatgggccataagctgttttccaaaggaaattcctggtccatgaactaggggcttgtgaatt

SEQ ID NO: 164765 - DNA, 876 bp, Homo Sapiens
ggggaaccgcgacgggcgggcggcgagcaggcccgggagccgggaggctgcgggcggcggcgctggacccgacgcggcgagagaggccccgagatgccgagcaagaagaagaagtacaacgcgcggttcccgccggcgcggatcaagaagatcatgcagacggacgaagagattgggaaggtggcggcggcggtgcctgtcatcatctcccgggcgctcgagctcttcctagagtcgctgttgaagaaggcctgccaggtgacccagtcgcggaacgcgaagaccatgaccacatcccacctgaagcagtgcatcgagctggagcagcagtttgacttcttgaaggacctggtggcatctgttcccgacatgcagggggacggggaagacaaccacatggatggggacaagggcgcccgcaggggccggaagccaggcagcggcggccggaagaacggtgggatgggaacgaaaagcaaggacaagaagctgtccgggacagactcggagcaggaggatgaatctgaggacacagatactgatggggaagaggagacatcacaacccccaccccaggccagccacccctctgcccactttcagagccccccgacacccttcctgcccttcgcctctactctgcctttgcccccagcgcccccgggcccctcagcacctgatgaagaggacgaagaagattacgactcctagcgccttctgccccccagaccatagccccttttagttggttttagttgctctggggggaggagagaaggcagagctgttcttaaatttattaaaaaaacaatacgagggaaaaataccatccacgttcacgaacgggaaaacgacataaacacaaaacaaccttgt

SEQ ID NO: 164766 - DNA, 978 bp, Homo Sapiens
  misc_feature (434)..(434): n is a, c, g, or t
  misc_feature (872)..(930): n is a, c, g, or t
tcgactctagaggatcggggtgcggctgcccggccaccagaagcgcatcgcctacagcctgctgggactcaaggaccaggtgaacactgtggggatccccatctgagcctcgacagggcctggagccccatcggccaagaatacttgaagaaacagagtggcctccctgctgtgccatgctgggccactggggactttatttatttctagttctttcctccccctgcaacttccgctgaggggtctcggatgacaccctggcctgaactgaggagatgaccagggatgctgggctgggccctctttccctgcgagacgcacacagctgagcacttagcaggcaccgcctctccccagcatccctggagcaggagccccgccacagccttcggacagacatataggatattcccaagccgaccttccctccgccnttctcccacatgaggccatctcaggagatggagggcttggcccagcgccaagtaaacagggtacctcaagccccatttcctcacactaagagggcagactgtgaacttgactgggtgagacccaaagcggtccctgtccctctagtgccttctttagaccctcgggccccatcctcatccctgactggccaaacccttgctttcctgggcctttgcaagatgcttggttgtgttgaggtttttaaatatatattttgtactttgtggagagaatgtgtgtgtgtggcagggggccccgccagggctggggacagagggtgtcaaacattcgtgagctggggactcagggaccggtgctgcaggagtgtcctgcccatgccccagtcggccccatctctcatccttttggataagtttctattctgtcagtgttaaagnnnnnnnnnnnnnnnnnnnnnnnnnnnnnnnnnnnnnnnnnnnnnnnnnnnnnnnnnnngttagaaaatgacttatttctgctctggaataaaagtgcagatgattc

SEQ ID NO: 164767 - DNA, 2497 bp, Homo Sapiens
  misc_feature (170)..(170): n is a, c, g, or t
  misc_feature (204)..(323): n is a, c, g, or t
ggggggggacagcacagggccgatttttgggcgcggggtttttctgtggggagggaaagggatacggacagtttgcagtggtcccgggtgggggcggcgcgcccccaaaaaagaaggtttgggaaaaaagtgtttttggggaggggaaacgcccgcacaaatttgaaaanaacgaagggggtaggggtaggttggtgcgtggtnnnnnnnnnnnnnnnnnnnnnnnnnnnnnnnnnnnnnnnnnnnnnnnnnnnnnnnnnnnnnnnnnnnnnnnnnnnnnnnnnnnnnnnnnnnnnnnnnnnnnnnnnnnnnnnnnnnnnnnngttgtgttgtgtggtttctctttcatgtatttacacaagttcaaaatgatattcacagcatcttctaaattttggccaagagtcaaaaaaatgcatttaaactttggaacgtgcccacataagacaggaggctgatcccaacagtagttggggcagatacccacaaaccaaagggctgggaaagtcaggaagagctgaaaggattcttcagtcagtttatgaactcggtgcagtgagacctctagactgacacgtacaacagagatgcagtttcgtctaactggcacctgtcccttccattacttgctgggcctgcttctgtcccatgcagcactgtgcgaccgactggaataacttttcgatttctggggcacagtgtacaaattcatggttccagaacttaaacgctgggtttttaatcagctcaatgaaggtaataagaagaccccaaggatgtggcctatttacaatcaaccgttccaagagaactcttgtgatctgttcttggatggcttccgtatgggcctctgcaaaaaggtacagcatggtgcaactgaagtagtgagtgtggctatttgggtaccggagctgatttgcaattgcattcaaaaagagatagcgaccctcagtgtccaagtccacagccaaattctggaagatatccatgtgtgctgagtgagtgatggtgctcattgaaggtgtgctgcccttgttgtggatgtgcgcaatggcctgagtcccgacatagagcaccagtgcattgatgagctggaggttgtagcgattcccaggttcattggatacctgtaggttgctgcgcagatcagacaggaaagtgactggtgatcgagttttaagataggaatccaaatcctttttgaactgaggtggcattactccagtgaaattggtgagaatccggggagcaatgttaatttcactcaacatgtccacctttagattaggagtgaatgggtcggggagcctcatgtttcttggaaaggcactcacgatcaaatttcttaagctggatacaattaggtgagatcacatcacagaacccataatggtaatcacaaaggaactctgggaaatcatgcaaaagaaccagcagcactcttaaagtgcccttgtagaggatttgcataggtttggtgagttccacatttctaaggaaaggcgctaaatatttgaataaatcaatcagtagctgtgcatacataggccaccccttctgctgtggcgtatgtgccagcattcttgcaataaatatccgatgggaaatcagttcaagccaggcatatacaaagccaggagctttggtaggcctcaagatgtggaatgtattgcagaaagctgtaagtgtctggaaattaatggtttccaacacatgctcaggtgcattgagttccaagagaagcatgataaaaattcgatggtagggaagttgctgaaattcactctgacgaacatcatgatcctgaaggagaactcccactactataccaaggaccttgttcagcagattaatctttgtgacagtgttggtggcctcccctgagtgtttcacgagcagtgcaatgagtcgaacaaaggcatccaggttgtgatagcacttggctcggatcatggtgggattggcagcaggattgtgctgctgctcagcctgagcacggtaactgatttcaacacacatttcagtacacagacgaaagaaccttgttatgagatcatcggtcttcagtattccttgctggtgcatctgtccaacaaatgcagagaaagctttggtactgtcgcggccagctgctgctgaatggtagagattcacccattccctcagaagatactctgccttctccctcaggcctggagggtcatcatactctgaggcttgagagatcccagaatgcatcataaagtttgggcctccatgagcacgatcaatcattgcttcatagttggatcgcactacttccatcagctggggcaatccttctggagcattgcctctggaatgagcattaatcctcatgagggtttcaatggtgtggaacagatctgcctcagtaacatgagcaacactcctttcatccaccagcaggatttttactaactgcatagcaaatgccacagccatgtagtttaagccatcagccctgggatcctctaga

SEQ ID NO: 164768 - DNA, 611 bp, Homo Sapiens
tagaaagcagccaagcttgagtgagggaagatgcctgaccactcacgcgtgtctgtctctccaggcgggctccagctcagtgcctggcggccttgcagatcttgtcgtacacctcggggaaggcgtcctggcaacccagcttctctcgcagcttgtggtacaaggagccatcaaacatctcccagaactcctcccggttcatgtagcagtcggcatacagcatctggaagccatgcacgctgcggacaaacttctccagctgcctcatgcaggacctggcttcaaagtgtttcacacgcggctccccatatgctccaatgtcgatgtgagtagctctgcctcatttcctcttggggtgcactaggtcctggtctggctgggcaggatgaacggacacagccagatggggtagacgtggactatcgttttggaaggtgtgcagggcctgctgcaggcacttaatgggcaccagcatgtcctgcaccatcgtggtgctgctcgtacagcttgcgcagggtctcatcctctgggtcagcttcaggagggagatcattgggatggcaccatcctacctctagagtagcggaagatgggtttttttcataaggtgt

SEQ ID NO: 164769 - DNA, 253 bp, Homo Sapiens
gtctgcttctgctcatgcaggactggcttcaaagtgtttcacacgcggctccccatatgctccaatgtcgatgtagagctctgcctcatttcctttggggtgcactaggcctggctggctgggcaggatgaacggacacagccagatggggtagaagtggatgtcgttttggcttgggagaactgaagctccagataactcatgtgaggtgcagtgaggactccagcacaacagtggtggcagaagcaggaag

SEQ ID NO: 164770 - DNA, 825 bp, Homo Sapiens
  misc_feature (735)..(735): n is a, c, g, or t
ggggtatttccggagtcccttctgagacagaaggttgtgttggggaactgaaggagtttctgtgggcggacagggaaccctgcgtttctactgtgtgattctgccaccttcctggcccgacgccatgggagtgacttgtgtgtcccagatgcctgtggccgagggcaagagtgttcagcaaaccgtagagctccttacccggaaattggagatgcttggggcagagaagcaaggaacattttgtgtggactgtgagacttaccatacggccgcctctacccttggcagccaaggtcagaccgggaagctgatgtatgtgatgcacaactcagagtacccattgagctgttgcgccctctttgagaatggcccttgccttattgctgacaccaactttgatgtgcttatggtgaagctcaagggctttttccagagtgctaaggccagcaagattgagacccggggcaccaggtaccagtactgtgacttcctggtgaaggtgggcacggtcacaatggggcccagtgcccggggcatctctgtggaggtggagtatggcccctgtgtggtagctagtgactgctggagtctgctgctcgagttcctacagagttttctaggcagccacacaccaggggctccccgcagtgtttgggaacagacatgatgcggtctacggcccagcagataccatggtccagtacatggaactcttcaacagatccgcagcagcanccaggggccggtgggctgggaattcgttagtgatgagcagctggccgctgagctctgtccccaggggtactccccaagggaggagcaggg

SEQ ID NO: 164771 - DNA, 550 bp, Homo Sapiens
tagtctggatgtacttatccatctcattacaaacaaaagcacacagactggctttggtagctctgtaatccttgattacggaatgtaaattttcttctttcctgactttgacattgtagctatactgtttccatttttgtttttacaaatcctttgggtctaattctgtgagcctacctatagcactggattaaaatgtctgcatcatttctttagttatccagttaactttaaaactgttgtaaaagtgtaaaccagcccatgacaggtttttgtacatgttaaagaacttcattgttcagttttcatgattattgtgtaaggaagactgatgtagatgttctgtgctgtcctggaccatgttaattacacttacgacgtatattagttccacatcacaatgatttgtccccagtgacccttttatcctttctaggcacatttcttgttgttgttgttgttgcagttcccctttgcattgtattgctttgacaactgtaatttgaatcagatctgaaagaggtccagaataaaatatattttgatatta

SEQ ID NO: 164772 - DNA, 443 bp, Homo Sapiens
ggagtcgcgattcgtgccggccggtcctggttctccggtcccgccgctcccgcagcagccatgtcgttcttcccggagctttactttaacgtggacaatggctacttggagggactggtgcgcggcctgaaggccggggtgctcagccaggccgactacctcaacctggtgcagtgcgagacgctagaggacttgaaactgcatctgcagagcactgattatggtaacttcctggccaaacgaggcatcacctctgacggtgtcagtcatcgatgaccggctcaaggagaagatggtggtggagttccgccacatgaggaaccatgcctatgagccactcgccagcttcctagacttcattacttacagttacatgatcgacaacgtgatcctgctcatcacaggcacgctgcaccagcgcttccattgtttgagcttcgtgt

SEQ ID NO: 164773 - DNA, 1004 bp, Homo Sapiens
  misc_feature (45)..(46): n is a, c, g, or t
  misc_feature (54)..(54): n is a, c, g, or t
  misc_feature (56)..(56): n is a, c, g, or t
  misc_feature (71)..(74): n is a, c, g, or t
  misc_feature (265)..(265): n is a, c, g, or t
  misc_feature (394)..(402): n is a, c, g, or t
  misc_feature (521)..(570): n is a, c, g, or t
tttccggcccaccccggaacaataggaatgcccctccggaagggnntttttttnanaataaatttttttgnnnnttggggccttaagagaaggggccagtttttattggtcttcagagggggccaggggctgaggggaggggagcctgagggagcaacatcccccccaggcctccaaggacacacacactctgtcctttcccatgggccatggctctgggagcgacccacagaagggagaggaggctcaaactgcccccaggccncagggttctcaggtcagggagttagggaggaacatgaaagtgacatgcttcttagatacatcagcggctgtaaccacagggctgagggggcctccttgctctggagggggtcttcgtccatccttggtnnnnnnnnntgcccagccccttttcaggcctaagaacagtctctaagagggtcaggagaactgggcagccgctaggacagcgtactacaccccggacaggcaggtgagccacaggcttgtcacagacnnnnnnnnnnnnnnnnnnnnnnnnnnnnnnnnnnnnnnnnnnnnnnnnnnaagagtgcaattgagagccttgggccaggacgctagaagatagggatgtggttgtcgattttggcgcggtggcgctgggcgatacattcagcgatccacacgatgttgcgacactcctgctccttgagcttcacgaaggcatagaagacaccaaagtggaactggttcaggaaggccaacttgttcagctttacctcgtgctcaaagaatcggtcctccagcgtcttgtctccagggttgctacctgcaccctcgaagagcagcttgtactccgggtagtaatcggccacgttcttgacctgttcatagtcgtcagcccgagccagctgcgccaggccctcagggtagagccgcccacagtgtggaaagagcttggcacggtcctctttggacagctctgcctcgtgccgaattcgccacccaggcctcgctac

SEQ ID NO: 164774 - DNA, 1638 bp, Homo Sapiens
  misc_feature (1159)..(1208): n is a, c, g, or t
  misc_feature (1327)..(1335): n is a, c, g, or t
ccacgcgttcgggttctccggtcccgccgcttcccgcatgtaggccagtgtcgttcgttcccggaggctttactttaacgtggactaggtggtcgtacttggaggggactggtgcgcggtctgaaggccggggtgctccgccaggccgacgtacctcacacactggtgcagtgcagagagcgctagaggacattgaagactgcaatctgcagagcgactgagtgatggtaacgttcctgtgccagactgaggcaatcacctctgacggtgtcagtcatcgatgaccgggtcaaggagaagatggtggtggagttccggcacatgaggaagcatgcctatgagccactcgccagcttcctagacttcattacttacagttacatgatcgacaacgtgatcctgctcatcacaggcacgctgcaccagcgctccatcgctgagctcgtgcccaagtgccacccactaggcagcttcgagcagatggaggccgtgaacattgctcagacacctgctgagctctacaatgccattctggtggacacgcctcttgcggcttttttccaggactgcatttcagagcaggaccttgacgagatgaacatcgagatcatccgcaacaccctctacaaggcctacctggagtccttctacaagttctgcaccctactgggcgggactacggctgatgccatgtgcccaatcctggagctctgaagcagaccgccgcgccttcatcatcaccatcaattcttacggcacagagctgtccaaagaggaccgtgccaagctctttccacactgtgggcggctctaccctgagggcctggcgcagctggctcgggctgacgactatgaacaggtcaagaacgtggccgattactacccggagtacaagctgctcttcgagggtgcaggtagcaaccctggagacaagacgctggaggaccgattctttgagcacgaggtaaagctgaacaagttggccttcctgaaccagttccactttggtgtcttctatgccttcgtgaagctcaaggagcaggagtgtcgcaacatcgtgtggatcgctgaatgtatcgcccagcgccaccgcgccaaaatcgacaactacatccctatcttctagcgtcctggcccaaggctctcaattgcactcttnnnnnnnnnnnnnnnnnnnnnnnnnnnnnnnnnnnnnnnnnnnnnnnnnngtctgtgacaagcctgtggctcacctgcctgtccggggtgtagtacgctgtcctagcggctgcccagttctcctgaccctcttagagactgttcttaggcctgaaaaggggctgggcannnnnnnnnaccaaggatggacgaagaccccctccagagcaaggaggccccctcagccctgtggttacagccgctgatgtatctaagaagcatgtcactttcatgttcctccctaactccctgacctgagaaccctggggcctgggggcagtttgagcctcctctcccttctgtgggtcgctcccagagccatggcccatgggaaagacagagtgtgtgtgtccttggggccctggggggatgttgctcctcagctccctccctcagccctgcccctctgagaacaataaaactgccctctcttagggcaaa

SEQ ID NO: 164775 - DNA, 768 bp, Homo Sapiens
caacatctaggcagggccaacattcgtgaaagaagctaagagattttgcatccaatcacagttagttgcgggtatcttattgccaatctgcgagttacactgatcacatcattagcatcgctggtgcagaaaaccaatttggttggggaaaagggagagcaagctctggcctcaattttgagttcattacaacttctcaagaatttcaccaacagcctatacagtacaagttcaaaaaagtaaacatgtaaaggtaagcagacaactcttacagaagcccaaacacattattctcgctgtatatatggtgaattctccatctacaatgagcagtcatgaagatggtcttcatcagggacaacatggtcacaggactggggcaatccaagagactgagagggagcatgaggacgggagagggggctacctctagctgtttcatgttagagacaaactgtaacacagtccatgggcctgcaatcgtccccttttatcatctggcataacgtttgatgtagtcatccactttattccggaagtcctccttgtcccgcaaatgatgttctgcagcttcaatattcagtggatcatcaaaattcaaaagatcagtaaacaaagagtttaatccccaaacgacatcctttaatgttcttgtgggagcccagccagtgccatcaattgaatgttctctcaataaactcagacatatttcccctgtctctgtgatgttggggtgccagatcttggtcaggcatttcacatttggcg

SEQ ID NO: 164776 - DNA, 771 bp, Homo Sapiens
tccgtgggaggcagccctcagaccaagcacctcatcgaggatctcatcatcgagtcatccaagtttcctgcagcccagcccccagaccccaaccagccagccaaaatcgaaaccgactactggccatgccccccgtctctggctgttgtggagacagaatggaggaagcggaaggcgtctcggaggggagcagaggaagaggaggaggaggaagatgacgactctggagaggagatgaaggctctcagggagcgtcagagagaggaactcagtaaggttacttccaacttgggaaagatgatcttgaaagaagagatggaaaagtcattgccgatccgaaggaaaacccgctctctgcctgaccggacacccttccatacctccttgcaccagggaacgtctaaatcttcctctctccccgcctatggcaggaccaccctgagccggctacagtccacagagttcagcccatcagggagtgagactggaagcccaggcctgcagatctatccctatgaaatgctagtggtgaccaacaaggggcgaaccaagctgccaccgggggtggatcggatgcggcttgagaggcatctgtctgccgaggacttctcaagggtatttgccatgtcccctgaagagtttggcaagctggctctgtgggaagcggaatgagctcaagaagaaggcctcctctcttctgaaggccccccacctgcctccggggaacggccccccttaccccctgctggcttccggggttttttcccccgg

SEQ ID NO: 164777 - DNA, 362 bp, Homo Sapiens
tcgactctagaggtcatccactgctgaacactagggaagtgagtggggtctttagtgcacaggaagagggacaaatgcaagtagcacattaacagtacaaaagaaatgtccttgtgattagcaccctctactgtaatgctaagagggtgtgagcagttgggatcttaatttaatggaaaagaccataattgcaattatgcgcattaacagtcccaagtaccccctgctgtaagacacaaggaatatgaggggatgagaccccagactcacagcagatagggaaattgcattttgcacatcaataatttctggaggaggggcattaggtaaccagcaccctcttgatgtaaagcaaagatgat

SEQ ID NO: 164778 - DNA, 1296 bp, Homo Sapiens
ggacgcgtgggtcgacccacgcgtccgcccacgcgtccggcgggcagcagcacagtactatctgggcaattttcgttctgctctcaatgatgtgacagctgccagaaagctaaaaccctgccacctcaaagcaataataagaggtgccttatgccatctggaactgaaacactttgccgaggccgtgaactggtgtgatgagggactgcaaatagatgccaaagagaagaagcttctggacaatgagggctaaagcagacaagctgaagcgaattgaacagagggatgtgaggaaagccaacttgaaagaaacagaaggagaggaatcagaatgaggctttactccaggccatcaaggctaggaatatcaggctctcagaagctgcctgtgaggatgaagattcagcctcagaaggtctaggtgagcttttcctggatggactcagcactgagaacccccatggagccaggctgagtctagatggccagggcaggctgagctggcctgtgctctttctgtacccagagtatgcccagtcggacttcatctctgcttttcatgaggactccaggtttattgatcatctaatggtgatgttaggtgaaacaccctcttgggacctagagcaaaaatattgccctgataatttggaggtctactttgaggatgaggacagggcagaactataccgggtgcctgacaagagcaccttgctacaggttctacagcaccagaggtacttagtaaaagccctgacaccagcatttttggtctgtgtaggatcctctcctttttgcaagaattttctccgggggaaaaaggtgtaccagatacgatgactaagccagggcccctggatctcctcccttaccctcctctgctgggaacctagcacacctgaatcagctggacatactgctggagtccagtgctttctttccgtcaccctggggatagtccttcctggcatcgtggtgggggaggagcctctggcttccctaaactgcagcctctctggctggtcttcactttcctcagttgatataaaactctgggtcttggccatgatgtccttggactccatcgctaaagggaccatctgctgcagttaccacagcaactgacctgagcggcaccctggtctgtggagatggactcaggatccagtgacatgattctgaacttttgtggagtttgacaccttagagaagctacccctcaaactgcacatctacacacaaacaaacaatgcataagattccaaggctttaaagctgagagaccctggcctcaag

SEQ ID NO: 164779 - DNA, 1786 bp, Homo Sapiens
  misc_feature (1103)..(1133): n is a, c, g, or t
  misc_feature (1145)..(1157): n is a, c, g, or t
  misc_feature (1159)..(1419): n is a, c, g, or t
  misc_feature (1549)..(1561): n is a, c, g, or t
ggggatgacgccacggacatggtggccgagaccggcggggtgggggacgtgtcgcgcggccgggtggcctcggtcggtaccctgggcgcggagcagctgcctcattagtattcgtacccacgaggcggcgcagcgggccctcggggacagcgagcgtcgcggccatggcttatcactcgggctacggagcccacggctccaagcacagggcccgggcagccccggatccccctcccctcttcgatgacacaagcggtggttattccagccagcccgggggatacccagccacaggagcagacgtggccttcagtgtcaaccacttgcttggggacccaatggccaatgtggctatggcctatggcagctccatcgcatcccatgggaaggacatggtgcacaaggagctgcaccgttttgtgtctgtgagcaaactcaagtatttttttgctgtggacacagcctacgtggccaagaagctagggctgctggtcttcccctacacacaccagaactgggaagtgcagtacagtcgtgatgctcctctgcccccccggcaagacctcaacgcccctgacctctatatccccacgatggccttcattacttacgtgctcctggctgggatggcactgggcattcagaaaaggttctccccggaggtgctgggcctgtgtgcaagcacagcgctggtgtgggtggtgatggaggtgctggccctgctcctgggcctctacctggccaccgtgcgcagtgacctgagcacctttcacctgctggcctacagtggctacaaatacgtgggaatgatcctcagtgtgctcacggggctgctgttcggcagcgatggctactacgtggcgctggcctggacctcatcggcgctcatgtacttcattgtgcgctctttgcggacagcagccctgggccccgacagcatggggggccccgtcccccggcagcgtctccagctctacctgactctgggagctgcagccttccagcccctcatcatatactggctgactttccacctggtccggtgaccccctggccccagatggcactgagtttttcattcattgaagatttgatttccttgnnnnnnnnnnnnnnnnnnnnnnnnnnnnnnnctcgagtttttnnnnnnnnnnnnngnnnnnnnnnnnnnnnnnnnnnnnnnnnnnnnnnnnnnnnnnnnnnnnnnnnnnnnnnnnnnnnnnnnnnnnnnnnnnnnnnnnnnnnnnnnnnnnnnnnnnnnnnnnnnnnnnnnnnnnnnnnnnnnnnnnnnnnnnnnnnnnnnnnnnnnnnnnnnnnnnnnnnnnnnnnnnnnnnnnnnnnnnnnnnnnnnnnnnnnnnnnnnnnnnnnnnnnnnnnnnnnnnnnnnnnnnnnnnnnnnnnnnnnnnnnnnnnnnnnnncttgtataggaaccgaaaaccgataagatgtaaaattcaaaaacatgtgaaaactcatctggggtgatacaagtcgggatcgtggtggcccctagagggaacatgagttggaggggaaaaagggcaactnnnnnnnnnnnnnaaggcccaatctgcctcactggggtgcccaattaagggttggggaccacctggaaacccccattcatatggggctgcagcttctataagaaatttttgaaaaaggctagcttaaaaacaattggggggccccggaaaaatgaaatggaccctgaacacccggctcttccttttctccaagggggaaacataccaattattttggggctctccgggggaaggttta

SEQ ID NO: 164780 - DNA, 797 bp, Homo Sapiens
ggtgctgctgcttctggaagtagtcccccttcctcccgggatgacctcaggactctgtcggtttcccctctttacccttccccgtccccgtgttctgctgggctctgattctgcccaatgagtatccccataggttctcaaaaacatgaacaagtctgtaaagctcagacatttgtcagcctcaacagcaccacccattcaagcatcctgtggataaagaattcagggaaccatccacacacctgccaaccctgggaagcatccagttctcaaatcgtttttgctatggatttatactagcaagaacattccttgacttccctcctgctggtgttttaaagccacaagtagggaagatatctggcaggcagaaagaagtctgtgatgataaacaatgatgaggatgacctaggcaccctacgctagtgtgagaagcctgcgccccaggaaggatctgtgttagtccctgggatggctccaaggcctgctctaggaaggcagcatgctcagtgggaacacagcaagattcagaatttaaagtagttgcttcatggctctgtgcactcccttttcttcctcgcagcctccctaagatgactccagtgtgaccctgggcttagtgagcaatagtgattgagctcatgtttccctgcaagtggcatttcctctccaggatgggcctctaaagctgaggcctggctcagagcctgtttgccctctgtcttaaacaattgtaaatatcacttaaattataaccatttgcaataaacatccgcagtccaaaagaaattagagct

SEQ ID NO: 164781 - DNA, 1725 bp, Homo Sapiens
tcgtcaggctcgacccagctgtgagcggcaagatggcggcgcccaggccgccgcctgccaggctgtcgggcgtcatggtgccggcgcccatccaagacctggaggccctgcgcgcgctcacggcgctcttcaaagagcagcggaaccgagaaacagcacccaggactatcttccaaagagttctggatatcctaaagaaatcttctcatgctgttgagcttgcctgcagagatccatcccaagtggaaaacctggcttccagtctgcagttaataacagaatgcttcaggtgtcttcgcaatgcttgcatagagtggtctgtgaaccagaattcaatcaggaacttggatacgattggtgttgctgttgatttgattcttctgtttcgtgaactgcgagtggaacaggaatctctgttgacagcttttcgctgtggcctgcagtttttaggcaacattgcctcacggaatgaagattcccagtctattgtttgggtgcatgctttcccagaactgtttttgtcttgcttaaatcatccggacaaaaaaattgttgcctactcttcaatgattttgtttacatcccttaatcatgaaagaatgaaagaactggaggagaacctcaatattgcaattgatgtcatagatgcttaccaaaaacatcctgaatcagaatggccgttcttgattattacagacctctttctgaaaagcccggaattggaacaagccatgtttcccaaactgaacaatcaagaaagagttacactgttagaccttatgatagccaagataacgagtgatgagccactcaccaaggatgacatccctgtgtttttgcggcatgctgagttgattgcaagcacctttgtggatcagtgcaagactgtgctcaagctggcctctgaggagcctcctgatgatgaggaggcactggctacaattaggcttctcgacgtcctgtgcgaaatgactgtgaatactgagctgctcggctatctgcaggttttccctggcttgctggaaagagtgattgatcttttgcgggtgattcatgtagctggaaaagaaaccacaaacatcttcagtaattgtggttgcgtgagagcagaaggtgacatctccaatgtggccaatgggtttaagtctcatctcattcgtctgattggaaatctgtgttacaagaataaagataaccaagacaaggtaaatgagctggatggtatcccgttgatcctggacaactgcaacatcagtgacagtaacccctttctgacccagtgggtgatatatgccatccgaaaccttaccgaagacaacagccaaaaccaagatttgattgcaaagatggaggaacaggggctggcagatgcatccctacttaaaaaagtgggttttgaagttgaaaagaaaggcgaaaagctgatcctgaaatctactagagacacccctaagccatgaatgaactacatccaaatacctgaatttttggaatctgtttcatggatttttcatcttctaccgtatgtgaaattgcaagtgtttgaagatttataagtacaaatttgggaacatacaaatcttttaggtagtagagttttacgtgtataagctaaaagtgaaagtaactgaggggttctcctgtttctttgcattaatgtaactgtgtgggttggcctttgtcccccctgaatagaacgtgcatttaaagaatatttgggacttt

SEQ ID NO: 164782 - DNA, 1132 bp, Homo Sapiens
  misc_feature (25)..(25): n is a, c, g, or t
  misc_feature (666)..(811): n is a, c, g, or t
  misc_feature (843)..(884): n is a, c, g, or t
  misc_feature (916)..(925): n is a, c, g, or t
cggacgcgtgggtcgacccacgcgntcggacccacgcgtcgctcattcgtctgattggaaatctgtgttacaagaataaagataaccaagacaaggtaaatgagctggatggtatcccgttgatcctggacaactgcaacatcagtgacagtaacccctttctgacccagtgggtgatatatgccatccgaaaccttaccgaagacaacagccaaaaccaagatttgattgcaaagatggaggaacaggggctggcagatgcatccctacttaaaaaagtgggttttgaagttgaaaagaaaggcgaaaagctgatcctgaaatctactagagacacccctaagccatgaatgaactacatccaaatacctgaatttttggaatctgtttcatggatttttcatcttctaccgtatgtgaaattgcaagtgtttgaagatttataagtacaaatttgggaacatacaaatcttttaggtagtagagtttaacgtgtataagctaaaagtgaaagtaactgagtgttctcttgtttctttgcattaatgtaactgtgtggtttgcctttgtccccctggatagaacgtgcatttaaagaatatattgtacttactgtgacagcagataataaaccagtctcttggagggcacaacccttatttgacnnnnnnnnnnnnnnnnnnnnnnnnnnnnnnnnnnnnnnnnnnnnnnnnnnnnnnnnnnnnnnnnnnnnnnnnnnnnnnnnnnnnnnnnnnnnnnnnnnnnnnnnnnnnnnnnnnnnnnnnnnnnnnnnnnnnnnnnnnnnnnnnnnttttttaaaacctttctttgggccccgggccnnnnnnnnnnnnnnnnnnnnnnnnnnnnnnnnnnnnnnnnnntcgggccaagaataagggttggattccccccnnnnnnnnnncccccgggggaaacgaacgttttaaaaaaatcccaaaggagttttggggggtttaatggggattatcaaaaggggccccaagcgaccctaaataaaatacccgcccccccctggccctttttggaaaatgggggaattcactaaaactttcgcgccaagggaaccccccccaaacgggttgagaaccccgaaaccccaggggtttca

SEQ ID NO: 164783 - DNA, 525 bp, Homo Sapiens
  misc_feature (284)..(284): n is a, c, g, or t
  misc_feature (289)..(289): n is a, c, g, or t
  misc_feature (313)..(313): n is a, c, g, or t
  misc_feature (340)..(340): n is a, c, g, or t
  misc_feature (387)..(387): n is a, c, g, or t
  misc_feature (409)..(409): n is a, c, g, or t
  misc_feature (448)..(448): n is a, c, g, or t
  misc_feature (480)..(480): n is a, c, g, or t
atgcaacttggagaagaagcagaagaagtttgaccagctcctggcggaggagaagaccatctctgccaagtatgcagaggagcgcgaccgggctgaggcggaggcccgagagaaggagaccaaggctctgtcgctggcccgggccctggaggaagccatggagcagaagacggagctggagcggctcaacaagcagttccgcacggagatggaggaccttatgagctccaaggatgatgtgggcaagagtgtccacgagctggagaagtccaagcgggccctanagcancaggtggaggagatgaaaacccanctggaagagctggaggaccagcttcangccaccccaaagatgccaaacttgcgggttggagggtcaacctgcangcccatgaaaggcccaatttcnaagccggggacccttcaagggcccaggggagcacttaanccgaaggtggggttcccgagcttcgaaattcntaaattcattgggtcaataagcttgtttttccttgtgtggaaaaa

SEQ ID NO: 164784 - DNA, 196 bp, Homo Sapiens
gctctctcctgctcatcgttcatagccctgccgccgcttctgctccatcatttccctgatgtcatcaaagacccctccatcccacaagccaatggacatgctgtagtccttttcctactttatctccctctttcaaaaggcaaattcttttttgtctcctggagcgtggacaatcatctgggatcctctagaacac

SEQ ID NO: 164785 - DNA, 1500 bp, Homo Sapiens
  misc_feature (1287)..(1352): n is a, c, g, or t
  misc_feature (1419)..(1419): n is a, c, g, or t
  misc_feature (1422)..(1422): n is a, c, g, or t
ggatgatgtgggcgagagtgtccacgagctggagaagtacaagcgggccctagagcagcaggtggaggagatgatagatgcatgtggaagagctggatggacgagctgtaggccaccgaagatgccaagctgcggatgtaggtcaacctgcaggccatgaaggcccagttcgagcgggacctgcagggccgcgacgagcagagctgaggacaagaacgaagcagctgtgtcagagcaggtgcgggagatggaggcacagctagaggacgagaggaagccgctgctctgatggcagtggcctgcccggaagaagctggagatggacctgaaggacctggaggctgcacatcgactcgtgccaacaagaaaccgggacgaacccatctaaacagctgcggaagctgcaggcccagactaatgactgcatgcgcgagctggatgacacccgcgcctctcgtgaggagatcctggcccaggccaaagagaacgagaagaagctgaagagcatggaggccgagatgatccagttgcaggaggaactggcagccgcggagcgtgccagaatgctcggcagcagctggaacgccagaacaaggagcttaaggtcaagctgcaggagatggagggcactgtcaagtccaagtacaaggcctccatcaccgccctcgaggccaagattgcacagctggaggagcagctggacaacgagaccaaggagcgccaggcagcctgcaaacaggtgcgtcggaccgagaagaagctgaaggatgtgctgctgcaggtggatgacgagcggaggaacgccgagcagtacaaggaccaggccgacaaggcatctacccgcctgaagcagctcaagcggcagctggaggaggccgaagaggaggcccagcgggccaacgcctcccgccggaaactgcagcgcgagctggaggacgccactgagacggccgatgccatgaaccgcgaagtcagctccctaaagaacaagctcaggcgcggggacctgccgtttgtcgtgccccgccgaatggcccggaaaggcgccggggatggctccgacgaagaggtagatggcaaagcggatggggctgaggccaaacctgccgaataagcctcttctcctgcagcctgagatggatggacagacagacaccacagcctccccttcccagaccccgcagcacgcctctccccaccttcttgggactgctgtgaacatgcctcctcctgccctccgccccgtccccccatcccgtttccctccaggtgttgttgagggcattnnnnnnnnnnnnnnnnnnnnnnnnnnnnnnnnnnnnnnnnnnnnnnnnnnnnnnnnnnnnnnnnnnggcccgggccagggcagagagcgaccagcaggctcctcagccctctcttgccaaaaagcacaagatnttnagggcgagcagggcaggcccccggggaggggccaagagttttctattgaatctatttttcttcagactgagggctttt

SEQ ID NO: 164786 - DNA, 1194 bp, Homo Sapiens
  misc_feature (398)..(419): n is a, c, g, or t
  misc_feature (1002)..(1002): n is a, c, g, or t
ccacgtgataccgaaagcacgtgataccaaagagacagggcccgggcccaggcagagagcgaccagcaggctcctcagccctctcttgccaaaaagcacaagatgttgaggcgagcagggcaggcccccggggaggggccagagttttctatgaatctatttttcttcagactgaggccttttggtagtcggagcccccgcagtcgtcagcctccctgacgtctgccaccagcgcccccactcctcctcctttctttgctgtttgcaatcacacgtggtgacctcacacacctctgccccttgggcctcccactcccatggctctgggcggtccagaaggagcaggccctgggcctccacctctgtgcagggcacagaaggctggggtggggggaggnnnnnnnnnnnnnnnnnnnnnngcgctctgcctcttctcccctttgccgccccacggcctcgtcccccgttcgcgcctctccgtctcttgcctcgtccgtcctctttctctcttcctcgtctttcgcgctttcttccgtctcctccccctcttccgtccgctcctctcatttcccgtctccctctctgcgtttctatgcgtcccgacgttccgcccccccgtccttttaccccttcccgctttgcctgcttcctttgccgccacgtttccgttctcgctcccttgacctccctgccgtgccggtgacgactctgatccgttcggtctcgtgccgtgcttgcgctgtcccccttttttctgcgtttgctcgtcgccagtcgctcccattatctgctcctgttccgctcgtctcgacctgatcgttcgtgccccctcctctttcttccggccctcgctttcctcctcgtcgccccctcttacccgccgacgcttcctgcttgtgcgccccgcgcgtcttcccttttccctgccgcggtgccctcttccttgtgtcgctgtccgcatgctacaactttccacttctccctttttccaccgcgtttatntttcccgcttgtctcggttccgtgtcgccctgcttctttgacccggtgtcccctcgctgctcttgtgatcctaccgttcttattatccgcttacctcttggttcctcgccatatttctctcgttccgccgtctccgttcccgtttttcccttcgcccttatattcggagcaccattcatgcggccgcgtcgc

SEQ ID NO: 164787 - DNA, 445 bp, Homo Sapiens
  misc_feature (413)..(413): n is a, c, g, or t
tgactgggcatccctggcgagcggaggaacgccgagcagtatcaaggaccaggccgacaaggcatctacccgcctgaagcagctcgagcggcagctgcagcaggccgaagaggaggcccagcgggccaacgcctcccgccggaaactgcagcgcgagctggaggacgccactgagacggccgatgccatgaaccgcgaagtcagctccctagagaacaagctcaggcgcggggacctgccgtttgtcgtgccccgccgaatagcccggaaaggcgccgtggatggctccgacgaagaggtagatggcaaagcggatggggctgaggccaaacctgccgaataagcctcttctcctgcagcctgagatggatggacagacagacaccacagcctcccctttccagacccgccgngcatcacaataccatatttaacacggggatcc

SEQ ID NO: 164788 - DNA, 1218 bp, Homo Sapiens
  misc_feature (21)..(21): n is a, c, g, or t
  misc_feature (52)..(52): n is a, c, g, or t
  misc_feature (89)..(89): n is a, c, g, or t
  misc_feature (179)..(179): n is a, c, g, or t
  misc_feature (185)..(185): n is a, c, g, or t
  misc_feature (894)..(894): n is a, c, g, or t
  misc_feature (899)..(899): n is a, c, g, or t
aggattgtgccgctgttcttnggcctcctgctgactgttcctccagtggcantcttgcctccagcgccgcgatggggacttgaacttgnacttgagggccccctccatctcgtgaagcttgctccggagctccttgttctgccgctcgagctgctgccgggcactctcattcttctggnccgtgntgcgctctgtggccagctcgttgctgagctgctcggcctgctgtgtggctttgcggacccggtcgctcatggcctccatgttgccctgctcctcctccagctcctcctccagctgggcgatccgggcctccaggcggcgcttctcgtcctggagtgcgttccttcccgacaggctactggccagctcctctgccagttcctccttctcgaggtccgcttgtttgcgagccctctcagcggcggcgaggtcctcttgaagctgcatgaggtctgcttccaagctcttggctttcttctcattctctttggctgtggcaaagatctcatctctgaaggcacgggcatcttccagctctctttgaaagtccttcatctgagcctgcagtttgcgtagctgcttgatggcttcctccctccccttgatggcagagtcggcctgaagctccaggtctttcaggtccccttccagcttcttctttgctgcagctgccagggcacgttgctttcgctcgtcttccagttccgtctcatactcgtgaagctgtctctgcagttgcctcctcttctcctcattctgctcgtcccgggcttggagatccctttcgaactggcccttgagcgcctgcatgttgacttccagccgcagtttggcgtcctccgtggcttgcagctcgtcctcccagctcttccaagctgcgtcttcatctcnctccnatctgggtctccagggcccgcttggacttctccagctcatggacgttcttgcccacgtcatccttggagctgaccaggtcttccatttcggctttgagcattttgttggtccgctcgagttcctctttggcttccaaggcctcttcaagggcccgagccagggacagggccttggtttccttctccctggcttctgcctcagctctgtccctctcatccgcgtatttggaagagatgtttttctcctcggctaacaactgatcaaatttcctctgcttcttttccaggttggacacgagttgccgctggttgtccaaat

SEQ ID NO: 164789 - DNA, 962 bp, Homo Sapiens
  misc_feature (577)..(577): n is a, c, g, or t
  misc_feature (752)..(752): n is a, c, g, or t
  misc_feature (758)..(758): n is a, c, g, or t
  misc_feature (847)..(847): n is a, c, g, or t
ggatgagctggctgacgagatcgccaacagcagcggcaaaggagccctggcgttagaggagaagcggcgtctggaggcccgcatcgcccagctggaggaggagctggaggaggagcagggcaacacggagctgatcaacgaccggctgaagaaggccaacctgcagatcgaccagatcaacaccgacctgaacctggagcgcagccacgcccagaagaacggagaatgctcggcagcagctggaacgccagaacaaggagcttaaggtcaagctgcaggagatggagggcactgtcaagtccaagtacaaggcctccatcaccgccctcgaggccaagattgcacagctggaggagcagctggacaacgagaccaaggagcgccaggcagcctgcaaacaggtgcgtcggaccgagaagaagctgaaggatgtgctgctgcaggtggatgacgagcggaggaacgccgagcagtacaaggaccaggccgacaaggcatctacccgcctgaagcagctcaagcggcagctggaggaggccgaagaggaggcccagcgggccaacgcctcccgccgganactgcagcgcgagctggaggacgccactgagacggccgatgccatgaaccgcgaagtcagctccctaaagaacaagctcaggcgcggggacctgccgtttgtcgtgccccgccgaatggcccggaaaggcgccggggatggctccgacgaagaggtagatggcaaagcggatggngctgangccaaacctgccgaaatagcctcttctcctgcagcctgagatggatggacagacagacaccacagccctcccctccccagacccggagnaagccttctcccacccttcctgggactgctgtgaacatggcctcctcttggcctccgcccccttcccccccatcccgggttccccttccaggggtttgttgaaggggcaattggt

SEQ ID NO: 164790 - DNA, 399 bp, Homo Sapiens
  misc_feature (24)..(24): n is a, c, g, or t
  misc_feature (53)..(53): n is a, c, g, or t
cccctggttcagctccaaggattnacgtgggccaaaaacgtcccataagctgnaaaaagtcccaagcgggcccctggagaccccagatggaggagatgaagacgccagctggaagagctggaggacgagctgcaagcccacggaggacgcccaaactgcggctggaagtcaacatgcaggcgctcaagggccagttcgaaagggatctccaagcccgggacgagcagaatgaggagaagaggaggcaactgcagagacagcttcacgagtatgagacggaactggaagacgagcgaaagcaacgtgccctggcagctgcagcaaagaagaagctggaaggggacatgaaagaccctggagcttcaggccgactctgccatcaacgggagggaggacaac

SEQ ID NO: 164791 - DNA, 345 bp, Homo Sapiens
  misc_feature (322)..(322): n is a, c, g, or t
acgacctggttgttgatttggacaaccagcggcaactcgtgtccaacctggaaaagaagcagaggaaatttgatcagttgttagccgaggagaaaaacatctcttccaaatacgcggatgagagggacagagctgaggcagaagccagggagaaggaaaccaaggccatgtccctgggctcgggcccttgaagaggccttggaagccaaagaggaactcgagcggaccaacaaaatgctcaaagccgaaatgggaagacctgggtcagcttccaaggattgacgttgggcaagaacgttccatgagcttgggagaagttccnagccgggccctgggagaccccag

SEQ ID NO: 164792 - DNA, 892 bp, Homo Sapiens
gggacggcccgttttccgccagctcgccgctcgctatggcgtcgctcaccgtgaaggcctaccttctgggcaaggaggacgcggcgcgcgagattcgccgcttcagcttctgctgcagccccgagcctgaggcggaagccgaggctgcggcgggtccgggaccctgcgagcggctgctgagccgggtggccgccctgttccccgcgctgcggcctggcggcttccaggcgcactaccgcgatgaggacggggacttggttgccttttccagtgacgaggaattgacaatggccatgtcctacgtgaaggatgacatcttccgaatctacattaaagagaaaaaagagtgccggcgggaccaccgcccaccgtgtgctcaggaggcgccccgcaacatggtgcaccccaatgtgatctgcgatggctgcaatgggcctgtggtaggaacccgctacaagtgcagcgtctgcccagactacgacttgtgtagcgtctgcgagggaaagggcttgcaccgggggcacaccaagctcgcattccccagccccttcgggcacctgtctgagggcttctcgcacagccgctggctccggaaggtgaaacacggacacttcgggtggccaggatgggaaatgggtccaccaggaaactggagcccacgtcctcctcgtgcaggggaggcccgccctggccccacggcagaatcagcttctggtccatcggaggatccgagtgtgaatttcctgaagaacgttgggggagagtgtggcacctgccccttagcccctctggggcatttgaaggttgatatccgatgtgggagcacgggaggggaaaagaaagcccgcctggaccccccggtctctcccagaagaggttccggccaccggag

SEQ ID NO: 164793 - DNA, 213 bp, Homo Sapiens
gcggccgcctactactactatacggctgcgagaagacgacagaagggcatccgcaatgttggtttcactgagagctgcctcctggtctcttcaccactgtagttctctcatttccaaaccatcagctgcttttaaaataagatctctttgtagccatcctgttaaatttgtaaacaatctaattaaatggcatcagcactttaatcaaaaaaa

SEQ ID NO: 164794 - DNA, 579 bp, Homo Sapiens
  misc_feature (90)..(103): n is a, c, g, or t
ccagtttctctgccttcttccaggatcaggggttagggtgcaagaagccatttagggcagcaaaacaagtgacatgaagggagggtcccnnnnnnnnnnnnnnctgatgtttcctgggtgccctggctccttgcagcagggctgggcctgcgagacccaaggctcactgcagcgcgctcctgacccctccctgcaggggctacgttagcagcccagcacatagcttgcctaatggctttcactttctcttttgttttaaatgactcataggtccctgacatttagttgattattttctgctacagacctggtacactctgattttagataaagtaagcctaggtgttgtcagcaggcaggctggggaggccagtgttgtgggcttcctgctgggactgagaaggctcacgaagggcatccgcaatgttggtttcactgagagctgcctcctggtctcttcaccactgtagttctctcatttccaaaccatcagctgcttttaaaataagatctctttgtagccatcctgttaaatttgtaaacaatctaattaaatggcatcagcactttaaccaaaaa

SEQ ID NO: 164795 - DNA, 1276 bp, Homo Sapiens
cttgccaggggaagggggttcaagggaggcgccgctgccagggaagcccttggggtcttggcagggcccaagccctgtctgcaaggaagccagggcacccagggaaacatcagcaacacacacacacagggaccctccccttcatgtcacttgttttgctgccctaaatggcttcttgcaccctaacccctgatcctggaagaaggcagagaaactggcccgtacagagacctgcaattctacgcaagcttaacacaactatgagacagaagaggggcacgcagaagaggtgggcaaaagtggtcacaacggcgggggatgctttgaatactggatggtgtccagagccgctccgatgtcatagttcttggtctgcaggagcctggtgagccagccgccttcatcagagaagcccatggacagcatctgggagagggactcaatcagccgcgggtcacctctggcgggagatgtgggtacaaggcagcttccttcagccctgtgggtccctcctgggaggggtccagagagcttggcccttcggattctggcatctgtagggactggagttcacctgtagacgggtccacttcttttgaagacagatgggtccagtcatcatctcctcctgaacagttatccgactccatctgttcctcagggcgcccctcggactccaaggcgatcttcctcatctgctccgccagagactgcgtggcgccctcaacattcccacccggcttgctgggatcagagcagcagctgcttggctgtgagctgctcttctcctctgtgctggaactctctggagagacgggggtcaggcggcttcttttccctccgtgctccacatcgatatcaacttcaatgcccagagggctaagggcagctgccacactctccccaacgttcttcaggaaattcacactcggatcctccgatggaccagaagctgattctgccgtggggccagggcgggcctcccctgcacgaggaggacgtgggctccagtttcctggtggacccatttcccatcctggccacccgaagtgtccgtgtttcaccttccggagccagcggctgtgcgagaagccctcagacaggtgcccgaaggggctggggaatgcgagcttggtgtgcccccggtgcaagccctttccctcgcagacgctacacaagtcgtagtctgggcagacgctgcacttgtagcgggttcctaccacaggcccattgcagccatcgcagatcacattggggtgcaccatgttgcggggcg

SEQ ID NO: 164796 - DNA, 1100 bp, Homo Sapiens
  misc_feature (651)..(664): n is a, c, g, or t
  misc_feature (805)..(805): n is a, c, g, or t
gagcgaggcctgggtggcgaattcggcacgagggcaagccgggtgggaatgttgagggcgccacgcagtctctggcggagcagatgagaaagatcgccttggagtccgaggggcgccctgaggaacagatggggtcggataactgttcaggaggagatgatgactggacccatctgtcttcaaaagaagtggacccgtctacaggtgaactccagtccctacagatgccagaatccgaagggccaagctctctggacccctcccaggagggacccacagggctgaaggaagctgccttgtacccacatctcccgccagaggctgacccgcggctgattgagtccctctcccagatgctgtccatgggcttctctgatgaaggcggctggctcaccaggctcctgcagaccaagaactatgacatcggagcggctctggacaccatccagtattcaaagcatcccccgccgttgtgaccacttttgcccacctcttctgcgtgcccctcttctgtctcatagttgtgttaagcttgcgtagaattgcaggtctctgtacgggccagtttctctgccttcttccaggatcaggggttagggtgcaagaagccatttagggcagcaaaacaagtgacatgaagggagggtcccnnnnnnnnnnnnnnctgatgtttcctgggtgccctggctccttgcagcagggctgggcctgcgagacccaaggctcactgcagcgcgctcctgacccctccctgcaggggctacgttagcagcccagcacatagcttgcctaatggctttcactntctcttttgtttttaatgactcataggtccctgacatttagttgattattttctgctacagacctggtacactctgattttagataaagtaagcctaagtggtgtcaacaggcaagctggggaaggccagtggttgtgggcttcctgctggggactgagaagggctcacgaagggcatccccaaatggtgggtttcccctgagacctggcctcttgggctccttccccactgaaaatctcttcatttcccaaaccattcagctggctttttaaaataaaatttcctttgtaaccc

SEQ ID NO: 164797 - DNA, 1098 bp, Homo Sapiens
gatgatcgaggaccttggaggaacgccgatgatgacagaattcccaggcgtggtgcagaggatgacaggggcccttggagaaacatggatgatgatcgcctttcaagacgtgctgatgatgatcggtttcccagacggggtgatgactcaagacctggtccttggagaccattagtcaagccaggtggatggagagagaaagaaaaagccagagaggagagctggggtccacctcgagaaccaaggccatcagaagaacgtgaatgggacagagaaaaagaaagggacagagataatcaagatcgggaggagaatgacaaggaccctgagagagaaagggacagagagagagatgtggatcgagaggatcgcttcagaagacctagggatgaaggtggctggagaagaggaccagctgaggaatcttcaagctggagagactcaagtcgccgggacgatagggatagggatgaccgtcgccgtgagagggatgaccggcgtgatctaagagaaagacgagatctaagagacgacagggaccgaagaggacctccactcagatcagaacgtgaagaagtaagttcttggagacgtgctgatgacaggaaagatgaccgggtggaagagcgggaccctcctcgtcgagttcctcccccagctctttcaagagaccgagaaagagaccgagacccgagaaagagaaggtgaaaaagagaaggcctcatggagagctgagaaagatagggaatctctccgtcgtacttaaaaatgagacttgatgaagatggatggaccacagtacgacgttaagtctcaagataatggatttaaactggtgtcttaaataggtttgatcacattcaaggattattatacttgtgcttcaaccaatctaaattggattctttaatgttgtttcaccataacacaaaaagcatgaacttgtattaatcctatataatagattgatcatgcaccatatccacaggaggttggaaaaaccatgccattttctggaatttaagggtgttgcattatttcatcaatcatttgttgacaaaaaagaaacctaagccagcttaagcggatcagcgggta

SEQ ID NO: 164798 - DNA, 1023 bp, Homo Sapiens
tcagccggaccgatgtgaataggtggtgaaaaagaagaaacaattcctcctgattatagattagaagaggtcaaggataaagatggaaagccactcctgccaaaagagtctaaggaacagcttccacccatgagtgaagacttccttctggatgctttgtctgaggacttctctggtccacaaaatgcttcatctcttaaatttgaagatgctaaacttgctgctgccatctctgaagtggtttcccaaaccccagcttcaacgacccaagctggagccccaccccgtgatacctcgcagagtgacaaagacctcgatgatgccttggataaactctctgacagtctaggacaaaggcagcctgacccagatgagaacaaaccaatggaagataaagtaaaggaaaaagctaaagctgaacatagagacaagcttggagaaagagatgacactatcccacctgaatacagacatctcctggatgataatggacaggacaaaccagtgaagccacctacaaagaaatcagaggattcaaagaaacctgcagatgaccaagaccccattgatgctctctcaggagatctggacagctgtccctccactacagaaacctcacagaacacagcaaaggataagtgcaagaaggctgcttccagctccaaagcacctaagaatggaggtaaagcgaaggattcagcaaagacaacagaggaaacttccaagccaaaagatgactaaagaaatacaagttaaggtatctggtatctgcatgtaaaatcttcagcaggtggatggtgacttttgaagaacaaaaggctttggccccagaaaacaattgttctgggtgatttctagaatgggttatagtggagtctctgaacatcctaaatattggttcgttatacttttccagaaagaaaatgcctttgactggttcacctgtgtactgagtattgataaacttgggattttgttaattgccttcacttgtgagagaaagctttatcttcggtagaaata

SEQ ID NO: 164799 - DNA, 988 bp, Homo Sapiens
gaacttactgattcctctgttcctaaagcaagagtggcaggtgatcagggctggtgtagcatccggttcctttagtgcagctaactgcatttgtcactgatgaccaaggaggaaatcactaagacatttgagaagcagtggtatgaacgttcttggacaagccacagttctgagccttaaccctgtagtttgcacacaagaacgagctccacctccccttcttcaggaggaatctgtgcggatagattggctggacttttcaatggttctgggttgcaggtgggcactgtatggctgggtatggagcggacagcccccaggagtcagagcctcagcccggctgccctggtggaaggtacaggtgttcagcaccttcagaaaagggcataaagtggtgggggacaattctcagtccaggaaaatgcattgaccattgctggctatttgcttacctagtaagaattggattcatttttgaccagattattcttctatgcttttttgcaataaatcaaatcccacatatctacaagtggtatgaagtcctgcaccccccaggaggcctgtccaggcatgtcttcagaggcagggtgggttaaactcatttacctcccctctccccaccaaattatgacacaaacgagtatgtttcctctctagaaccctgtaatgcctcctcccccatccccagagctccttactgtaggtcttaccctggacaaggattttttcaagttggaggcacagaacatgagcaatctgacattcccacagcccctcaaacatgcaaggctactaaggcaggaggagtataaatgatggatattgaccaagacctgcttggacggagaccgccatattatctgttctcttcgttcacaaaacagccttcacttgtctcagaatttgatggacacatactgtgatgagcaggagcttcagatgcactctttacacattttgttgaaataaacctctacatttgtag

SEQ ID NO: 164800 - DNA, 1085 bp, Homo Sapiens
  misc_feature (896)..(896): n is a, c, g, or t
  misc_feature (976)..(976): n is a, c, g, or t
  misc_feature (985)..(985): n is a, c, g, or t
  misc_feature (991)..(991): n is a, c, g, or t
  misc_feature (1013)..(1013): n is a, c, g, or t
  misc_feature (1018)..(1018): n is a, c, g, or t
  misc_feature (1044)..(1044): n is a, c, g, or t
  misc_feature (1052)..(1052): n is a, c, g, or t
  misc_feature (1067)..(1067): n is a, c, g, or t
gggaaaggtagttgttggcctgcctctcgcctgcacgtcactgctggactagctgtcgcatgtggctgggagctgcaaggccagtgcttgaggggccccagcagttccacaggtggtgaagcctgagttggcagaggaggagccagaagagaactgccctttctgcactggtggaaactagttatttatgccatgtggagagccagtgagatagatagatagtctgtttgttttgaggacttggaaagttgttcctatgaagcctggagcttggatggttttgagaggttaatggtgcctccacactcactcttccctaggtccaggatcactgtcctagcagctaacggttctactctcttccccagagtgtacgacaggcagcaggtctccccacagctctgaaaggaccctggtgacagctacaccctcagcaccaggagctggccttcctgatgagggaagcttccaggaaacacagaatccacatgaccttaagattatttacaactcagtcatggtggctgctggcctccagggcttactggcccctcctgactggcatcaggggcttcctcaggtggtggagagagtttactttcaacaactagtttattcaagaaaagaacttactgattcctctgttcctaaagcaagagtggcaggtgatcagggctggtggagcatccggttcctttagtgcagctaactgcatttgtcactgatgaccaaggaggaaatcactaagacatttgagaagcagtggtatgaacgttcttggacaagccacagttctgagccttaaccctgtagttttgcacacaagaacgagctccacctccccttcttcagggagggaatctgtggcggataggattgggctgggactttttcangggttctggggttgcaggtggggcactgtatgggctggggtatggggagcgggacagcccccaggggattcagagccttnagccccggnttcccngggttgggaagggtaccaggtnttttnaggcaccttttcaggaaaagggggcnttaaagtnggttgggggggacanttttttcattcccggggg

SEQ ID NO: 164801 - DNA, 547 bp, Homo Sapiens
gatttcactggatctgagagaatctcactgagttcctcattgaaatagcccctcttatatgctatgtcaactggtaaacgatggctctcctttgggtcaatgatccccccggttgcgatctgtgcttctaataagcgaataccgtggcccttttcgatgagttccttattcatggcttggaacaaagagatgatgtttcctgtttcaggatcattatacccagtgacagctcgttctgcagacaggagcttctctttgaactcaatgcccaccagacctctcttgtaggcttcctccactggtaacctcaagttgctaacaggatccactataaagccagtagctgcttgggcttccagcaactccagagcagtaccaggtcggactaagccaattttcatggcctcataaatgccaagcttctgttttgtggtctcattgtatatgcctgctatgcagcttgaaccctggaggaagtccttaattctctcaccaacctcgtcataagaaatctgaccagattccagttcactgacaacggggagta

SEQ ID NO: 164802 - DNA, 732 bp, Homo Sapiens
gtgtaacaccttaactttggaaaaaccagttgagtaaaagcggtggtacggccggaatcccgggatatcgtcgaccacgcgtcgaataacattgctatggcttggaagttacttaccgggaacgactgtatagagtatataaggaagtaaagaatcgcctggactatcatatatctgtgcagaacatgatgcgtcgaaaggaacaagaacacatgataaattgggtggagaagcacgtggtgcaaagcatctccacacagcaggaaaaggagacaattgccaagtgcattgcggacctaaagctgctggcaaagaaggctcaagcacagccagttatgtaaatgtatctatcccaattgagacagctagaaacagttgactgactaaatggaaactagtctatttgacaaagtctttctgtgttggtgtctactgaagttatagtttacccttcctaaaaatgaaaagtttgtttcatatagtgagagaacgaaatctctatcggccagtcagatgtttctcatccttcttgctctgcctttgagttgttccgtgatcacttctgaataagcagtttgcctttataaaaacttgctgcctgactaaagattaacaggttatagtttaaatttgtaattaattctaccatcttgcaataaagtgacaattgaatgaaacagggtttttcaagttgtataattctctgaaatactcagcttttgtcatatgggt

SEQ ID NO: 164803 - DNA, 408 bp, Homo Sapiens
ctaaattcgcggccgcgtcgacgattctcctatcggggtcacagggacgctaagattgctacctggactttcgttgaccatgctgtcccgggtggtactttccgccgccgccacagcggccccctctctgaagaatgcagccttcctaggcccaggggtattgcaggcaacaaggacctttcatacagggcagccacaccttgtccctgtaccacctcttcctgaatacggaggaaaagttcgttatggactgatccctgaggaattcttccagtttctttatcctaaaactggtgtaacaggaccctatgtactcggaactgggcttatcttgtacgctttatccaaagaaatatatgtgattagcgcagagacaatccagcaggtcgacgcggccgcgaatttagt

SEQ ID NO: 164804 - DNA, 1181 bp, Homo Sapiens
cggacgcgtgggtcgactcctatcggggtcacagggacgctaagattgctacctggactttcgttgaccatgctgtcccgggtggtactttccgccgccgccacagcggccccctctctgaagaatgcagccttcctaggtccaggggtattgcaggcaacaaggacctttcatacagggcagccacaccttgtccctgtaccacctcttcctgaatacggaggaaaagttcgttatggactgatccctgaggaattcttccagtttctttatcctaaaactggtgtaacaggaccctatgtactcggaactgggcttatcttgtacgctttatccaaagaaatatatgtgattagcgcagagaccttcactgccctatcagtactaggtgtaatggtctatggaattaaaaaatatggtccctttgttgcagactttgctgataaactcaatgagcaaaaacttgcccaactagaagaggcgaagcaggcttccatccaacacatccagaatgcaattgatacggagaagtcacaacaggcactggttcagaagcgccattacctttttgatgtgcaaaggaataacattgctatggctttggaagttacttaccgggaacgactgtatagagtatataaggaagtaaagaatcgcctggactatcatatatctgtgcagaacatgatgcgtcgaaaggaacaagaacacatgataaattgggtggagaagcacgtggtgcaaagcatctccacacagcaggaaaaggagacaattgccaagtgcattgcggacctaaagctgctggcaaagaaggctcaagcacagccagttatgtaaatgtatctatcccaattgagacagctagaaacagttgactgactaaatggaaactagtctatttgacaaagtctttctgtgttggtgtctactgaagttatagtttacccttcctaaaaatgaaaagtttgtttcatatagtgagagaacgaaatctctatcggccagtcagatgtttctcatccttcttgctctgcctttgagttgttccgtgatcacttctgaataagcagtttgcctttaaaaaaacttgctgcctgaactaaagattaacagggtataggttaaaatttgtaattaattctacccatcttggcaataagtggccaatggaatggatt

SEQ ID NO: 164805 - DNA, 807 bp, Homo Sapiens
ggggcgagacttgtgagcggccatcttggtcctgccctgacagattctcctatcggggtcacagggacgctaagattgctacctggactttcgttgaccatgctgtcccgggtggtactttccgccgccgccacagcggccccctctctgaagaatgcagccttcctaggtccaggggtattgcaggcaacaaggacctttcatacagggcagccacaccttgtccctgtaccacctcttcctgaatacggaggaaaagttcgttatggactgatccctgaggaattcttccagtttctttatcctaaaactggtgtaacaggaccctatgtactcggaactgggcttatcttgtacgctttatccaaagaaatatatgtgattagcgcagagaccttcactgccctatcagtactaggtgtaatggtctatggaattaaaaaatatggtccctttgttgcagactttgctgataaactcaatgagcaaaaacttgcccaactagaagaggcgaagcaggcttccatccaacacatccagaatgcaattgatacggagaagtcacaacaggcactggttcagaagcgccattacctttttgatgtgcaaaggaataacattgctatggctttggaagttacttaccgggaacgactgtatagagtatataaggaagtaaagaatcgcctggactatcatatatctgggcagaacatgatgcggtccaaaggaacaagaacccctggataatttggggtgggagaagcacgttgttgcaaagcattctccacacagcacgaaaaaagc

SEQ ID NO: 164806 - DNA, 606 bp, Homo Sapiens
ggtgatggcagcaactggtgcactgtttattaaaaagagctgccatcatggcccagggaggcgggtgaaagctccgtcttctgaattcatctctacaggctcaaaactcctctttgatatcagacctgatgttattttccttcttttggagggcatttgtttggttaagaaggcttctttggactttggaatttcaacccagattttaccttgcagacggaatgacaagcaaaaagtgttgtggggaatcaaatttgttcctttcctcatgcacaaaacataaaggatagtggcgagtttacaagctgtggatgggtttccatagtcttcctttctgtacattgctatatcttcagtcctttggagcaagtggacctaacaagttgagcaaaatgaatatttggatccatgttcctcttgtgaccctgagtcttcatgcaaggagatctgaagctgaacaatgaaaatcttcagcagaaatagaaatggccgtggattgtaatacacactgaaattctgactttctgaatttaaatgtagaataaattttaccaacttggagtactgtatgagtattttcagaagggggaataaactcaaaattat

SEQ ID NO: 164807 - DNA, 600 bp, Homo Sapiens
ccactactgaccacaagttgccacgaaacttctgactttctttctctttacctttcaggtgcagatgaaggattttcggttttcttacaagtttaaaatggcctgcaaggaggacgtgttgaagctttgcccaaactaaaaagaaggtggacgtggtgatctgcccgagcacgaccgtgcgcaatgacactctgcaggaagccaaggagcacagggtgtccctgaagtgccgcaggcagctccgtgtggaggagctggagatgacggaggacatccgcttggagccagatctatacgaagcctgcaagagtgacatcaaaaacttctgttccgctgtgcaatatggcaacgctcagattatcgaatgtctgaaagaaaacaagaagcagctaagcacccgctgccaccaaaaagtatttaagctgcaggagacagagatgatggacccagagctagactacaccctcatgagggtctgtaagcagatgataaagaggttctgtccggaagcagattctaaaaccatgttgcagtgcttgaagcaaaataaaaacagtgaattgatggatcccaaatgcaaacagatgataaccaagcttg

SEQ ID NO: 164808 - DNA, 813 bp, Homo Sapiens
cctaggtatatgtcgtgctcaggcagatcaccacgtccaccttcttttttatgtttgggcaaagcttcaacacgtcctccttgcaggccattttaaacttgtaagaaaaccgaaaatccttcatctgcaccagctggaagtgggtaactccgatggcgcacttctcattcatgtccttctggtgtttgttctgtatcaaacactccatcaggtccccagagtctatctggttatctgccacatcgtgaccagaagttctgaattatgggctcacaggctcacatcagcaaggcttctatttgaatatcctctgattctaactcagtgaggttgcaaactatatctctacactccaccaccaagtcatccagatggtcctgaaggcactccagctcctgtccagtctctgttttctcactgcaccattttcccagatcaatcaggcacttatcctggagggcaggatccagcttgacatccatggcacgctggtgtaggatcctttggacttcagctcggcactcccgtgagagcctccttccctgttcctcagtgcggtaggcgtgtctgtataaacaagagaacacagctccctgaggcataaattcactggtctcattccaaccgtgggtgtggcaaagacgagaagcgtctccctggcacttgcggtacaggacagggtccagcttccaatcccgggagatgaaatactgcagctctaagagacggtgttcacagtcttctaccatcttctctgtgtataaatgttccatcaggcacgacatatacctaggggggatcatctagagtcag

SEQ ID NO: 164809 - DNA, 959 bp, Homo Sapiens
ctagaagggaatatgaaaggtagaagtgacttcaaggtcacgaggttcccctcccacctctgtcacaggcttcttgactacgtagttggagctatttcttcccccagcaaagccagagagctttgtccccggcctcctggacacataggccattatcctgtattcctttggcttggcatcttttagctccaggaaggtagaagagatctgtgcccatgggtctccttgcttcaatcccttcttgtttcagtgacatatgtattgtttatctgggttagggatgggggacagataatagaacgagcaaagtaacctatacaggccagcatggaacagcatctcccctgggcttgctcctggcttgtgacgctataagacagagcaggccacatgtggccatctgctccccattcttgaaagctgctggggcctccttgcaggcttctggatctctggtcagagtgaactcttgcttcctgtattcaggcagctcagagcagaaagtaaggggcagagtcatacgtgtggccaggaagtagccagggtgaagagagactcggtgcgggcagggagaatgcctgggggtccctcacctggctagggagataccgaagcctactgtggtactgaagacttctgggttctttccttctgctaacccagggagggtcctaagaggaaggtgacttctctctgtttgtcttaagttgcactgggggatttctgacttgaggcccatctctccagccagccactgccttctttgtaatattaagtgccttgagctggaatggggaagggggacaagggtcagtctgtcgggtgggggcagaaatcaaatcagcccaaggatatagttaggattaattacttaatagagaaatcctaactatatcacacaaagggatacaactataaatgtaataaaatttatgtctagaagttacacacccaaaaag

SEQ ID NO: 164810 - DNA, 845 bp, Homo Sapiens
  misc_feature (199)..(199): n is a, c, g, or t
ccggggaaggaaaaaagccattttattttatatgggaaaaaggttccagtaaagatcggttaaaaggggtcaattataatattgccttttacaggaaaaaaattcaaaatgtgaatagcaacaaaataaaagttaccacatcttcctacttaggcagtgcaattaaattcacatgccaataagttaaagtcaagtatancaaaatcaaaacaagtgtttctccataatcagtatgctgagaattacagtgtaaagatcatttcagattaagaaatctgcaatcaatctacagaatatcctaagacaagggagacacagttaattcacttaattatcagccgttggggtttttcaatactgttcacaggaaaaaagtaatgagttgacatacatgtaaatagaatatatttagtctatacagtaaaaaaatacaaattataaagtgagctaacaaagaatgaaatctgaatacagatttataaaactgacatcttagacaacacatacagtatttctcatgtaaaaacatctagtttcagcaaaaaataatttggttgcttttcagctgcattgtagatcttgtaagctgaagatgcagatgtccaagtatcttaaaaaccataataaatgtctttctcaatgcatacaaaatgataaatgctctcatcacagtcttaagggtatttttggaagtttgttttgtcttgcttcagaaacacatttaaaatgggtaaaaatcaaatggtttcatggtacaatgaaacagtaaaccagtgctcaatttactgctaatgttgaatgaacctagattttacagtactctggtatatatgaaatttttgatc

SEQ ID NO: 164811 - DNA, 1380 bp, Homo Sapiens
  misc_feature (1011)..(1036): n is a, c, g, or t
ggcctgggtggcgaattcggcacgaggtactattatcacgcccgggtctatgagttcctggacaagctggatgtggtgcgcagcttcttgcatgctcggctccggacagctacgcttcggcatgacgcagacgggcaggccaccctgttgaacctcctgctgcggaattacctacactacagcttgtacgaccaggctgagaagctggtgtccaagtctgtgttcccagagcaggccaacaacaatgagtgggccaggtacctctactacacagggcgaatcaaagccatccagctggagtactcagaggcccggagaacgatgaccaacgcccttcgcaaggcccctcagcacacagctgtcggcttcaaacagacggtgcacaagcttctcatcgtggtggagctgttgctgggggagatccctgaccggctgcagttccgccagccctccctcaagcgctcactcatgccctatttccttctgactcaagctgtcaggacaggaaacctagccaagttcaaccaggtcctggatcagtttggggagaagtttcaagcagatgggacctacaccctaattatccggctgcggcacaacgtgattaagacaggtgtacgcatgatcagcctctcctattcccgaatctccttggctgacatcgcccagaagctgcagttggatagccccgaagatgcagagttcattgttgccaaggccatccgggatggtgtcattgaggccagcatcaaccacgagaagggctatgtccaatccaaggagatgattgacatctattccacccgagagccccagctagccttccaccagcgcatctccttctgcctagatatccacaacatgtctgtcaaggccatgaggtttcctcccaaatcgtacaacaaggacttggagtctgcagaggaacggcgtgagcgagaacagcaggacttggagtttgccaaggagatggcagaagatgatgatgacagcttcccttgagctgggggnnnnnnnnnnnnnnnnnnnnnnnnnnacaggcactttcccccttgggggtcccctgcccagggcactgtccccattttcccacacacagctcatatgctgcattcgtgcagggggtgggggtgctgggagccagccaccctgacctcccccagggctcctccccagccggtgacttactgtacagcaggcaggagggtgggcaggcaacctccccgggcagggtcctggccagcagtgtgggagcaggaggggaaggatagttctgtgtactcctttagggagtgggggactagaactgggatgtcttggcttgtatgttttttgaagcttcgattatgatttttaaacaataaaaagttctccacagtg

SEQ ID NO: 164812 - DNA, 526 bp, Homo Sapiens
ctggaggcacagccactaccgggggacatctacttatgcacgggttatgaccctcccatgaagccctacggacggcgcaatgagatctggctgttgaagacatgagtgaccaactgaaccaagaacttactggaagtgtgcctctgtgtctccttcctcgggggtaaggaggggacagtgcttcccaagttccagctgcaagtccaacttaaccaactttccttcaaagtcagttactgccaattttctgaaaaaagcatgttccatatactaagtctcttttctcacggtaggaaataatacagccaagatatgcagcatccttctcattgatgtagaaaattctgcgatagaccagaaaaatcctggcagcttttctccaggcatctgggtcactaaaaactgattttctaaaattattgggatttgtatttttgtttattaagggggaaaatgtgatttgtgcctgatctttcatctgtgattcttataagagctttgtcttcagaaaaactaaaaataaaaa

SEQ ID NO: 164813 - DNA, 518 bp, Homo Sapiens
  misc_feature (78)..(105): n is a, c, g, or t
caggcatccagaagtttagaagctagcatagtagaacgggatgacttctcctgcagggcaggatgagaggtagggggnnnnnnnnnnnnnnnnnnnnnnnnnnnnatgattttctaattcctagtcatttttctattgattgttttgcaaaagccatttacatcttaaggatattgataatcttttgttatatttgatgcaaatatttttttccagtttataggttgccttttaattttgtgtttcaggtagataaaagttaaacgattttcttaggttagtttatcactgtggtttctgaacttgttatgtgtagatcttttccaccccaagagtacataaatattaatccatactttcttatggaacttgtatggtttcgttttttacaattttatttatttcttgctactttaagaaatttgtgtggtgaaatacatataatagaagttgactatctgaatcatttttaagtatacattcagtagtgttcagtatgtcgccattgttgtacaacc

SEQ ID NO: 164814 - DNA, 1335 bp, Homo Sapiens
  misc_feature (548)..(617): n is a, c, g, or t
  misc_feature (1021)..(1079): n is a, c, g, or t
  misc_feature (1156)..(1198): n is a, c, g, or t
gctgcacgatttaaagtagtcaaaacagtttaacagctcaagagatgggctacatatcctttagtataagcacaatggcataaaatcatgcaatcattcattcatgatcttttttgagcacgaacaagcagatgaaagttatgctttccacagaaaaatacaatttcagagcatttatagacttctagaaacccatccatgggacttcctttgggaaggttaagaatcctgagaaaaagcctcttcaaatgtgtttgtgaactctgccggtacagggaaatactactggaaacaaaattaagtgtagaaacagaccagaccagaatatacatgctgattcccgttacatgaaaggtccagcgccaggcgggcaggcagccagccacagaaaagggagaggggcccaggaggaagtggctagacctgacgctaggcaccaggggaggcggggaaggagggcagagggcaggagagttcactgtgagagctcaacaaggagtagctgctgccaaacatctacattcatttacccgcatttcacagacacnnnnnnnnnnnnnnnnnnnnnnnnnnnnnnnnnnnnnnnnnnnnnnnnnnnnnnnnnnnnnnnnnnnnnnagctccagtgccctattaggtccaaatccactcagatggggaaatggagagtcagggacaagcaacaaccaggggcccattcaggaaacatcagcctgccctcaaggtcttctgaattgaaccctgccactgtgataaccaccctcacaggacagggctctctggccacaggaggtgggttctgagagcaccatgcccctcctcacacaaacacagattccacaacacacaccacggggaagaaggtttaaatgtaaaaaacgaaaccatacaagttaaataagaaagtatggattaatatttatgtactcttggggtggaaaagatctactcataacaagttcagaaaccacagtgataaactaacctaagaaaatcgtttaacttttatctacctgaaacannnnnnnnnnnnnnnnnnnnnnnnnnnnnnnnnnnnnnnnnnnnnnnnnnnnnnnnnnnattatcaatatccttaagatgtaaatggctttggcaaaacaatcaatagaaaaatgactaggaattagaaaatcatnnnnnnnnnnnnnnnnnnnnnnnnnnnnnnnnnnnnnnnnnnnaatggccaagtgacacaaggtagagatgttcagtcaccagcagacaaagcaatgctcacatccacagggaaagcagactcgatccgtcggaggagcaaaggttctcaatggcagaagcaggaagcggggatcctcta

SEQ ID NO: 164815 - DNA, 706 bp, Homo Sapiens
ctcggtacccatgcacgctggaaaaccaaaagcggatgccaagaaggtgcccaagaagcccgaggagatcacccccgagaaccacgtggaagggaccgcccgcctggtgacagacacagctgagatcctctcgagactcggcggggtggagctcctccaagacacattaggacacgtcatgccttctgtacagctgccaccaaatatcaaccttgtgcccaaggtccctgtcccactaaatactaccaaatacaactctgccctggatacaaatgccacgatgatcaactctttcaacaagtttccttacccgacccaggctgagttgtcctggctgacagctgcctccaaacacccagaggagcacatcagaatctggtttgccacccagcgcttaaagcatggcatcagctggtccccagaagaggtggaggaggcccggaagaagatgttcaacggcaccatccagtcagtacccccgaccatcactgtgctgcccgcccagttggcccccacaaaggtgacgcagcccatcctccagacggctctaccgtgccagatcctcggccagactagcctggtgctgactcaggtgaccagcgggtcaacaaccgtctcttgctccccctatcacacttgccgtggcaggagtcaccaaccatggccagaagagacccttggtgactccccaagcttgcaatgccca

SEQ ID NO: 164816 - DNA, 759 bp, Homo Sapiens
gatcagctcgcccgtctatcttctgaatcccggcatggcagaaaaatggaaatagcacgccaagaaagtaccagtgtgctgctgcaacaaagtgagaaaaagcttgggagaagtgaaattcagttcctgatttcagacaatcagggttttagttgtcctgaaaagcaggtccttacactcacagtttgtgagtgtctgcatggcagcggctgcagggaagcacagcacgactcctatgtgggcctgggacccgcagcaattgcgctcatgattttggcctttctgctcctgctattggtaccacttttactgctgatgtgccattgcggaaagggcgccaaaggctttacccccatacctggcaccatagagatgctgcatccttggaataatgaaggagcaccacctgaagacaaggtggtgccatcatttctgccagtggatcaagggggcagtctagtaggaagaaatggagtaggaggtatggccaaggaagccacgatgaaaggaagtagctctgcttccattgtcaaagggcaacatgagatgtccgagatggatggaaggtgggaagaacacagaagcctgctttctggtagagctacccagtttacaggggccacaggcgctatcatgaccactgaaaccacgaagaccgcaagggccacaggggcttccagagacatggccggagctcaggcagctgctgttgctctgaacgaagaattcttaagaaattatttactcacagcgcctcac

SEQ ID NO: 164817 - DNA, 755 bp, Homo Sapiens
catggcatcagcttggaggtgtttgagccactggagagccccgtggactgtacatcctcatggacttctccaactccatgtccgatgatctggacaacctcaagaagatggggcagaacctggctcgggtcctgagccagctcaccagcgactacactattggatttggcaagtttgtggacaaagtcagcgtcccgcagacggacatgaggcctgagaagctgaaggagccctggcccaacagtgacccccccttctccttcaagaacgtcatcagcctgacagaagatgtggatgagttccggaataaactgcagggagagcggatctcaggcaacctggatgctcctgagggcggcttcgatgccatcctgcagacagctgtgtgcacgagggacattggctggcgcccggacagcacccacctgctggtcttctccaccgagtcagccttccactatgaggctgatggcgccaacgtgctggctggcatcatgagccgcaacgatgaacggtgccacctggacaccacgggcacctacacccagtacaggacacaggactacccgtcggtgcccaccctggtgcgcctgctcgccaagcacaacatcatccccatctttgctgtcaccaactactcctatagctactacgagaagcttcacacctatttccctgtctcctcactgggggtgctggaggaggccttcaatcggatccgctccaacctggacatccggggcctagacaggccc

SEQ ID NO: 164818 - DNA, 552 bp, Homo Sapiens
gaacaggctacgatgggcagtttcttcatagtgagctgctttgtggactcctggtagctatggcaaccgctgcacttgatcttggcgctgctgcccaagtgctctggtctggtgaatcgtcgcaggcagtccgtgagcgtggtggttcccgacacgtggctttccccgtttaccacgttgccctcgctccctgggctcaggggccagaatggggtggaagagccggggagatccaagctgatgtcccagaagcggtcgatggtggtggagactccatggcagacttggcaggtgacgtctgactgcaacccgcctgtgaaggatctggtctatgatgcagttgcagtggttggggttgttggccttcttcccattgtcatcacctttgcagtgtcggtggagcacgtccagggccgcgatgaggaactcgtgggcgtcctgctgctcgtagcctgctaggtgcctcgcgtgggtccacaccaggtgcagcaacttatacgggatgtgaggggaccggtgtccagagtaaaactcctgaaacagtgaggacat

SEQ ID NO: 164819 - DNA, 943 bp, Homo Sapiens
gtttacagcaagcatggagatctatggctctgctgtggcagataaactggacaatagcagaagcattcttaagaggagatattacagacagcactgcactttggagttgggcagctacatcaaggacctctctgtggtccacagtgacctctccagcattgtgatcctggataactccccaggggcttacaggagccatccagacaatgccatccccatcaaatcctggttcagtgaccccagcgacacagcccttctcaacctgctcccaatgctggatgccctcaggttcaccgctgatgttcgttccgtgctgagccgaaaccttcaccaacatcggctctggtgacagctgctccccctccacctgagttgggggttgggggggaaagggagggcgagcccttgggatgccgtctgatgccctgtccaatgtgaggactgcctgggcagggtctgcccctcccacccctctctgccctgggagccctacactccacttgggagtctggatggacacatgggccaggggctctgaagcagcctcactcttaacttcgtgttcacactccatggaaaccccagactgggacacaggcggaagcctaggagagccgaatcagtgtttgtgaagaggcaggactggccagagtgacagacatacggtgatccaggaggctcaaagagaagccaagtcagctttgttgtgatttgattttttttaaaaaactcttgtacaaaactgatctaattcttcactcctgctccaagggctgggctgtgggtgggatactgggattttgggccactggattttccctaaatttgtcccccctttactctccctctatttttctctccttagactccctcagacctgtaaccagctttgtgtcttttttccttttctctcttttaaaccatgcattataactttgaaacc

SEQ ID NO: 164820 - DNA, 877 bp, Homo Sapiens
gagtggagtgtaggggctggccagggcagagagggggtggaagaggtcagagccgtgcccaggcagtgcctgcacgtgggacaggggcatcaagcggcatcccaagggctcgccgcgcccgttccccgcccaccgccaactcagatggagggggagcagctgtcaccaagagccgatgattggtgaaggcttcggctccagcacgggacgaacatcagcggtgaacctgagggcatccagcattgggagcagcttgagaaggactggtgtcgctggggtcactgaaccaggatttgatggggatggcattgtctggatggctcctgtaagccccctggggagttatccaggatcacaatgctggagaggtcactgtggaccacagagaggtccttgatgtagctgcccaactccaaagtgcagtgctgtctgtaatatctcctcttaagaatgcttctgctattgtccagtttatctgccacagcagagccatagatctccatgcttgctgtaaacaccaccagctcgtaccactggctcaccacttccaggaagaaatccacatggggcctcttatgtacaaaaaaccggacaggatgtttgtctattaccaccttgaggatgaagtcaggaggcgtaccaggccggactgtgggcctcaggaccccatcatggtgggagtgaataagtgtctcatccagatccagcaccaggatcttcctcttcacctgggctagccgattccgggacacaggagataaggggaggatatcatatcgaacagtttggtactgaattaccgtgcggatctgcctccgcagaaggtaaatgaagaagctccagagcttggcggcgaaggccacgaacgtgcgcagcc

SEQ ID NO: 164821 - DNA, 303 bp, Homo Sapiens
catgcagcttgggattcagaactacttatgaaagctctcaggttgaggcagcaccatcagacccagaaagggttcccagtattacttctgctttcgggtcttacaggctgagtgggttttctcatgccgggtacagtttgacagccgaccaaatcttctcccacattttttgcaaccatatggtctctcagcctcatgactctgcagatgaagcacaaactcctcattctttggggaggttttcccacattctggacacttaaatatcttctcccttatatggattccttcatgacgactccg

SEQ ID NO: 164822 - DNA, 1128 bp, Homo Sapiens
gggtcagagaaaagaactttcttacgccaagctttggaggcaagactggtgtctttgtactttgataccaagaggtaccaggaagcattgcatttgggttctcagctgctgcgggagttgaaaaagatggacgacaaagctcttttggtggaagtacagcttttagaaagcaaaacataccatgccctgagcaacctgccgaaagcccgagctgccttaacttctgctcgaaccacagcaaatgccatctactgcccccctaaattgcaggccaccttggacatgcagtcgggtattatccatgcagcagaagagaaggactggaaaactgcgtactcatacttctatgaggcatttgagggttatgactccatcgacagccccaaggccatcacatctctgaagtacatgttgctgtgcaaaatcatgctcaacaccccagaagatgtccaggctttggtgagcgggaagcttgcacttcggtatgcagggaggcagacagaagcattaaaatgcgtggctcaggctagcaagaacagatcactggcagattttgaaaaggctctgacagattaccgggcagagctccgggatgacccaatcatcagcacacacttggccaagttgtatgataacttactagaacagaatctgatccgagtcattgagcctttttccagagtacagattgaacacatatctagtctcatcaaactctccaaggccgacgtggaaaggaaattatcacagatgattcttgacaagaaatttcatgggattttggaccagggggagggtgtcctgattattttcgatgaacccccagtagataaaacttacgaagctgctctggaaacaattcagaacatgagcaaagtagtggattccctctacaacaaagccaagaaactgacatagagttggatctgtagcggtcctttggagagtgtgtgtggcgggagagtgaaaccttgggggaaaatgctaggagattcttttttctttttgttctacttttcgctcggaaagtttttaaatcctcatttggtgcatctgtattccagccaataggtgtgccagttttcatgtaatctttactggcccaacttgggagtggggaaattgctt

SEQ ID NO: 164823 - DNA, 780 bp, Homo Sapiens
tggggcctgttcgatggaagttcatacccttccaaatgccttcataggaagtatgagtacgcaagtttttccagtcctttttctttctgctgcatgggataataccccgactgcatgtccaaaggtggcctgcaatttagggggggcagtagatggcatttgctgtggttcgagcagaagttaaggcagctcgggctttcggcaggttgctcagggcatggtatgttttgctttctaaaagctgtacttccaccaaaagagctttgtcgtccatctttttcaactcccgcagcagctgagaacccaaatgcaatgcttcctggtacctcttggtatcaaagtacaaagacaccagtcttgcctccaaagcttggcgtaagaaagttcttttctctgacttggcccattcgatgcactctaaacacagctcgacctcctgccctgtagctgcttccatatcaagaaacagatcaagaagagatcggaccaggcgagctgctttagccttgctgatggaattcaagaagggtcgtacatacttcaggagtcctccaagctctgcagcttgtccagtctttgccaggagagatcccagttccaggatgctctgctctttgacttgcactgcctcttcatcgttttcctgaatgtcacgcttcacgatggagtggaggatgtcgatggaggcctcccggtcggtgctgagtagagactgggctctctggaactccaccaccgccgccgccgccatcttaccgctctcacaccgtccccggcccc

SEQ ID NO: 164824 - DNA, 1348 bp, Homo Sapiens
  misc_feature (238)..(277): n is a, c, g, or t
  misc_feature (721)..(739): n is a, c, g, or t
  misc_feature (1090)..(1099): n is a, c, g, or t
  misc_feature (1107)..(1224): n is a, c, g, or t
gctggagcagcggtggccttttcagatcatggcatccaagagtgcgccgagtctgtctctgtcatggtagagaccgagcctctgtcactgcaggcactcaatgcagccagacctattcctcctgggccactcatctgctcagcagctatttgaatgagatgattcagaaggggaggggagacaggtaacgtctgcaagctgaagtttcactccggagtgagaagctttgccctcctannnnnnnnnnnnnnnnnnnnnnnnnnnnnnnnnnnnnnnntgtgtgggtctatgtaaatgcatctgtcctcatgtgttgatgtaaccgattcatctctcagaagggaggctggggttcattttcgagtagtattttatactttagtgaacgtggactccagactctctgtgaaccctatgagagcgcgtctgggcccggccatgtccttagcacaggggggccgccggtttgagtgagggtttctgagctgctctgaattagtccttgcttggctgcttggccttgggcttcattcaagtctatgatgctgttgcccacgtttcccgggatatatattctctcccctccgttgggccccagccttcttggcttgcctctctgtttgtaaccttgtcgacaaagaggtagaaaagattgggtctaggatatggtgggtggacaggggccccgggacttggagggttggtcctcttgcctcctggnnnnnnnnnnnnnnnnnnnctgcagtgaaagacaagctgcaaatcagccatatgctgcgtgcctgtggaatctggagtgaggggtaaaagctgatctggtttgactccgctggaggtggggcctggagcaggccttgcgctgttgcgtaactggctgtgttctggtgaggccttgctcccaaccccacacgctcctccctctgaggctgtaggactcgcagtcaggggcagctgaccatggaagattgagagcccaaggtttaaacttctctgaagggaggtggggatgagaagaggggtttttttgtactttgtacaaagaccacacatttgtgtaaacagtgttttggaataaaatatttttttcatnnnnnnnnnnaaacaacnnnnnnnnnnnnnnnnnnnnnnnnnnnnnnnnnnnnnnnnnnnnnnnnnnnnnnnnnnnnnnnnnnnnnnnnnnnnnnnnnnnnnnnnnnnnnnnnnnnnnnnnnnnnnnnnnnnnnncttttttaaccccttttttttgggggccgccgggccccaaaaaggaaagggggagcggggcccttaccccggccccaaaagtatttttcgggactttttcttggggcggcggggcccccccacc

SEQ ID NO: 164825 - DNA, 562 bp, Homo Sapiens
ggtgcggaaatagactctgatggatttaataggtggatgaggtcaaggatgcacaaagtagccaaagacagagggttaccaaactaaggaaaccactgactagggttcggagagagcctgatgttctgcagccatcagcagattgtggggcaggtggaagaggaagcagcagggctccaggcaaagacacaaaacagcaaacatggggggccactgagggctcagctccatgagccaacgtctccactatacttcacattgggcaggaagtgacctaagaaagagataagctctgactctgggagtactgggctcacacggaacacagggacagaggataggccaggccctaccaccatggtgagcccaggaataactgttatgagcccattgttggagaactccaagtaaggccattaaaaccattttcaagccaggtggggtggttcatatctgtaaccacagcaatatgggaggaaaacgacaggaggatcacttgagttcaggagttcaagaccagctctgggcacaatagcgagacacccgtctatactaagtattc

SEQ ID NO: 164826 - DNA, 444 bp, Homo Sapiens
tgcaagcttggcaaaaagattacctcatcagtgaggaaatgaaatttccagaagttttcgccagatctgggaccagagacaaatgctggatgaatttcctatgcaaacctcttttagaaccaccgcttcaaaggccgtccagagacttcaaattagatctggtgaaactgctcccggtaggggattggtagttcagcggtagaggtttttgtctcccacgccggcgactccggtacgactcccggccatgcaggacttctaactcttccggcaggaagggctactacgtttctacccaacaaagttattatattatacaggctgtactgcatttatggaccttggtcgtggcagctagaagctaacctgaggggcgtgccacctctggagcattctctgtgctcgaactaataatcccggaatttacgttcctgtgctcgaagc

SEQ ID NO: 164827 - DNA, 418 bp, Homo Sapiens
acccaggcatcagcttgggtatgataaatagactgttttggtgacagcattcacattgtaagggaagagcaatggtaaataaaagttgaaagtcaaatcatagaggatttagatttggccaatgattccctgtggtagtgttgatgctgtagcgagaggcaggggatggggaggaattgaagacaatgacacaatttcaagtctgggttacttgaaggaatgatgatacccagaatagagtcaggaaagacaacagcagtaggtttgtagtaaagacagtgaatttgactttagacatgttcaataggaagatatatatttgaaaataaattctactccaaataagactatgtcacaacctattataataaaaatgtcaaagatcaaagacaaagagagaattctgaaagcagtgaga

SEQ ID NO: 164828 - DNA, 386 bp, Homo Sapiens
tcccagttccattctctgcaaaggtctgtagcctggaggacattctgatgccccaccctgacaccatatttttgagcctgtgtcagcagcctttctactcactcttattatatcctttcatatgaccttgattcaacttgctatctttagctttgctctcttaaccacaggcacaggtaatgccaccactcaagtgatcactttatctacaggcctctgttttaaacatgtcttttatttatcatctacccaggaacctctctggtttgatcacatgattttcagacttcctgacatctgagtgcgggacataccaccctgcgtaatggtggctgattttaatcttcttggccacaataaatctgacacatacaccaagcttgcat

SEQ ID NO: 164829 - DNA, 546 bp, Homo Sapiens
atacgtttccatcctcctactactcagggtgttaaatgtagcacctgtgagccattgtgtagaaaatcaattatatcttgggcccagtgataagaattcatccccttagctcaatttttaaaaggcttcaaaaggcctcccacctctttccctttttccaatgcaaatgagcaacactcaggatatttgcatgtcaaattccagcatgggtttcaagcgagtaaatggtcatatttattagtaatagcggtggtagatgagtaagagggatttaataaatgtatgttcaatatgttcgtgttcctatagcacttaacagtttgcaaagccgtttttccccctgaaatcatgtatttgattcttaaacaagcaaacaaacccaaaaggcgctgcgatgaggacaaagagcaattatcctcgattttactgatgagaataaggcatagagaaagattttatgttagcccaacgtcatataacatgactcataggtgtcagagtagattagaaccttgagtttgtctaccagcttgatgcctggtccgc

SEQ ID NO: 164830 - DNA, 939 bp, Homo Sapiens
atttcactggcaagtgtttattgattgcagagagggatggtctatagagctcacacccatactcccagctgggacccagccttccctgatggctgccatccaagtcttcactgggagacaggagaggtgggtttccacaaggaggctggagtaagcacaagggcatccttggtcagtgaggactcagctgcctcgaatcccaaggccttcaccaatgacactgggaccccagatcttaatttgccattctggttcggcagcaggatggagtggatgatctcagtgatgatgtttttcagaacatcaggttggaaccagccaatcccagagttcatcagctggatccgatcagagctgatgttattcaagttgagtataagttggtcacctttggtgtaaaactgagcttccgagctggcttcgatgcccagggtgaacaaagggcggagggcttcactggagggaaacacttccagcacgatcagttgggccaccttggcatggccttggtctataaaaaactcgggagtgtcctgagttaggatcttcacgatctgggtagatcccagcttatctgcagccttttcattgatcagcccgatgcttgacttcagccgatgggcactctcaggaagcacagagtccaacaggaccatgaattcttctggagagagcacagcagccactgcagctttcaccacgtcctgactcacgatgaggctgaacgggatgttgtccagggtgggcattgtcagggaagctgcagagttattgaaccacttggtcacctttccctgtgagtccaacaacttggcccccaggtagagctgaatggtgtcacccttgatggcaggatacagaaggtcaaactccagacggtcaatgctgagggaaatgggcactgctcaaggacaagaagaaagttcgtgagtctggagt

SEQ ID NO: 164831 - DNA, 659 bp, Homo Sapiens
  misc_feature (35)..(35): n is a, c, g, or t
aactcacgatgaggtgaacgggatgttgtccaggntgggcattgtcagggaagctgcagagttattgaaccacttggtcacctttccctgtgagtccaacaacttggcccccaggtagagctgaatggtgtcacccttgatggcaggatacagaaggtcaaactccagacggtcaatgctgagggaaatgggcaccttcaccagctgcaggaggtctgcatacatgccattgaaggaagcctcgatcacgggacacagctggtttttcactagattgggcagggatggcactaggaggttcatgacctgcttagctaaggcgttcaccaggaaggagagcttatgcagcagttggatgcgcaggctcccacggctggtggcacagtcactgaggaccaggcgggtggggccacttgcactggtgtccatgcggatggtggcttgggcctcagtcgtcactgtggaactccacgatggtcttgaccaggggcgtgttgaatccagccaccatgtccagggagatcttgactagcagctcctggtcattggccgagggcttcacctgcagctggaggatgttagctgtgatgaccttcagccagatgatgtgcttcaggacggtggttcccagggctgccagcacgggatgctccggctgg

SEQ ID NO: 164832 - DNA, 999 bp, Homo Sapiens
  misc_feature (284)..(344): n is a, c, g, or t
aaggagcgaggcctgggtggcgaattcggacgaggatcctggatccggctgacccgacaggcaacctgggccacaatgcccgctgggacctgctggccaaggaagctgcagcctgcacatctgccctgtgctgcatgggacggaatggcatccccatccagccatggccagtgaaggctgctgtgtgaagttgagaaaatcagcggtcctactggatgaagagaagatggacaccagccctcagcatgaggaaattcagggtcccctaccagatgagagagatnnnnnnnnnnnnnnnnnnnnnnnnnnnnnnnnnnnnnnnnnnnnnnnnnnnnnnnnnnnnntttagtgaatctgctctcccagctcacacactcccctgcctcccatggcttacacactaggatccagactccatggtttgacaccagcctgcgtttgcagcttctctgtcacttccatgactctatcctcataccaccactgctgcttcccacccagctgagaatgccccctcctccctgactcctctctgcccatgcaaattagctcacatctttcctcctgctgcaatccatcccttcctcccattggcctctccttgccaaatctaaatagtttatatagggatggcagagagttcccatctcatctgtcagccacagtcatttggtactggctacctggagccttatcttctgaagggttttaaagaatggccaattagctgagaaaaattatctaatcaaattagtgatgtctgccatggatgcagtagaaggaaaagtggggggtacaagtggccatggattgatttaccaatggcctggcactgggataccggaaaaaaagaaaggggccttggcaaggttttacagtggtaatatggtggggcctattggaaagaaaccctttcggaacctccgggtttggctaacccgggaaaaaccttggcccccataattggggcttaaaactttgggccggggcccaccaaaa

SEQ ID NO: 164833 - DNA, 700 bp, Homo Sapiens
  misc_feature (247)..(308): n is a, c, g, or t
tcctggatccggctgacccgacaggcaacctgggccacaatgcccgctgggacctgctggccaaggaagctgcagcctgcacatctgccctgtgctgcatgggacggaatggcatccccatccagccatggccagtgaaggctgctgtgtgaagttgagaaaatcagcggtcctactggatgaagagaagatggacaccagccctcagcatgaggaaattcagggtcccctaccagatgagagagannnnnnnnnnnnnnnnnnnnnnnnnnnnnnnnnnnnnnnnnnnnnnnnnnnnnnnnnnnnnntttagtgaatctgctctcccagctcacacactcccctgcctcccatggcttacacactaggatccagactccatggtttgacaccagcctgcgtttgcagcttctctgtcacttccatgactctatcctcataccaccactgctgcttcccacccagctgagaatgccccctcctccctgactcctctctgcccatgcaaattagctcacatctttcctcctgctgcaatccatcccttcctcccatttggctctccttgccaaatctaaatagtttatataggggatgggcagaaagttccccatcttcatctggtcagcccaccagtcaatttgggtaactgggcttaacctgggaagccccttattcctttcctgaaaagggctttttt

SEQ ID NO: 164834 - DNA, 931 bp, Homo Sapiens
  misc_feature (281)..(342): n is a, c, g, or t
ggagcgaggcctgggtggcgtttcggacgaggcatcctggatccggctgacccgacaggcaacctgggccacaatgcccgctgggacctgctggccaaggaagctgcagcctgcacatctgccctgtgctgcatgggacggaatggcatccccatccagccatggccagtgaaggctgctgtgtgaagttgagaaaatcagcggtcctactggatgaagagaagatggacaccagccctcagcatgaggaaattcagggtcccctaccagatgagagagannnnnnnnnnnnnnnnnnnnnnnnnnnnnnnnnnnnnnnnnnnnnnnnnnnnnnnnnnnnnntttagtgaatctgctctcccagctcacacactcccctgcctcccatggcttacacactaggatccagactccatggtttgacaccagcctgcgtttgcagcttctctgtcacttccatgactctatcctcataccaccactgctgcttcccacccagctgagaatgccccctcctccctgactcctctctgcccatgcaaattagctcacatctttcctcctgctgcaatccatcccttcctcccattggcctctccttgccaaatctaaatagtttatatagggatggcagagagttcccatctcatctgtcagccacagtcatttggtactggctacctggagccttatcttctgaagggttttaaagaatggccaattagctgagaagaattatctaatcaattagtgatgtctgccatggatgcactacaggaaagtggtggtacaagtgccatgattgattaccaatgtctgcactggatacggaaaaaagaaggtgcttgcaggctttacactgtatatgtggggctattgaaggacccctctgagctcggttttgctaggcaggagagcatgccccatattg

SEQ ID NO: 164835 - DNA, 923 bp, Homo Sapiens
  misc_feature (247)..(308): n is a, c, g, or t
  misc_feature (676)..(676): n is a, c, g, or t
tcctggatccggctgacccgacaggcaacctgggccacaatgcccgctgggacctgctggccaaggaagctgcagcctgcacatctgccctgtgctgcatgggacggaatggcatccccatccagccatggccagtgaaggctgctgtgtgaagttgagaaaatcagcggtcctactggatgaagagaagatggacaccagccctcagcatgaggaaattcagggtcccctaccagatgagagagannnnnnnnnnnnnnnnnnnnnnnnnnnnnnnnnnnnnnnnnnnnnnnnnnnnnnnnnnnnnntttagtgaatctgctctcccagctcacacactcccctgcctcccatggcttacacactaggatccagactccatggtttgacaccagcctgcgtttgcagcttctctgtcacttccatgactctatcctcataccaccactgctgcttcccacccagctgagaatgccccctcctccctgactcctctctgcccatgcaaattagctcacatctttcctcctgctgcaatccatcccttcctcccattggcctctccttgccaaatctaaatagtttatatagggatggcagagagttcccatctcatctgtcagccacagtcatttggtactggctacctggagccttatcttctgaagggttttanagaatggccaattagctgagaaagactatctaatcaattagtgatgtctgccatggatgcagtaaaagaaagtggtggtacaagtgcccatgattgattagcaatgtctgcactggatacggaaaaaaagaaagggcttgccaggtttacaggggtatatgttggggctattgaagaagccctcctgaacttcggttgctagcaaggaggacatggccccaaattggccttacttttgccctgccac

SEQ ID NO: 164836 - DNA, 639 bp, Homo Sapiens
  misc_feature (132)..(161): n is a, c, g, or t
  misc_feature (165)..(197): n is a, c, g, or t
ctggattgcgaatgcttggggactctgcggccctcagcccccttgcaagttcatggcctgtccctcccagacccctgctccactggcccttcgaccagtcctcccttctgttctctctttccccgtccttcnnnnnnnnnnnnnnnnnnnnnnnnnnnnnnttcnnnnnnnnnnnnnnnnnnnnnnnnnnnnnnnnntttgtgctctcctcagacctttctcgcttctgagcttggtggcctgttccctccatctctccgaacctggcttcgcctgtccctttcactccacaccctctggccttctgccttgagctgggactgctttctgtctgtccgggcctgcacccagcccctgcccacaaaaccccagggacagcggtctccccagcctgccctgctcaggccttgcccccaaacctgtactgtcccggaggaggttgggaggtggaggcccagcatcccgcgcagatgacaccatcaaccgccagagtcccagacaccggttttcctagaagcccctcacccccactggcccactggtggctaggtctccccttatccttctggtccagcgcaaggaggggctgcttctgaggtcggtggctgtctatccattaaagaaacaccgtgcaacgtg

SEQ ID NO: 164837 - DNA, 631 bp, Homo Sapiens
  misc_feature (287)..(318): n is a, c, g, or t
tgcacacgccgagggaccacacccaggaatattgaaatagctacatgaccataatgtgtttaaaatgtggtatgctcttgagatatttaaagttttggcagtaaaatactctgtttttaagtatgaatgtatttcattcatatttcctctcacaaaggaaaatgacttcagtatggatgttcggcgtgtgcagtatggtcgttcggcgtgtgcagtctggatgttcggcgtgtgcagtctggttattcggcgtgtgcatgcacacgccgagggtccatacacagaannnnnnnnnnnnnnnnnnnnnnnnnnnnnnnngaaggacggggaaagagagaacagaagggaggactggtcgaagggccagtggagcaggggtcttggagggacaggccatgaacttgcaagggggctgaggggagccgcagagtcggggagggttgaaaggctggaaatgcatgaggaggaggaacagaacatgtgtgtctggacaggtgcggcagccctggcagagcccactgtccccatccttatggaccgcctcctggctgctgacccagggactgttctcctaggactggagccttggacacttgggtttgggagtgaacgaaaacggcatcttcatcgg

SEQ ID NO: 164838 - DNA, 503 bp, Homo Sapiens
cgcgggcctcagtggggtctctgggaacacagccagacatcctgatggggagcagagccaggaagctaagcagggcccagctgcgtccaacccagccccccacctcggtccctgaccccagctcgatgccccatcaccgcctctccctggctcccaagggtgcaggtggcgcaagcccggcccccatcacatgttcccttggcctcagagctgcccctgctctcccaccacagccacccagaggcaccccatgaagcttttttctcgttcactccccagcctgccctgctaaggccttgcccccaaacctgtactgtcccggaggaggttgggaggtggaggcccagcatcccgcgcagatgacaccggttttcctagaagcccctcacccccactggcccactggtggctaggtctccccgtatccttctggtccagcgcaaggaggggctgcttctgaggtcggtggctgtctttccattaaagaaacaccgtgcaacgtg

SEQ ID NO: 164839 - DNA, 897 bp, Homo Sapiens
gggccgccgcgcacgccatgggagccgtgactgacgacgaagttatacggaagcgtctcctcattgatggagatggtgctggagatgatcggagaattaatctgctagtgaagagtttcattaaatggtgcaactctgggtcccaggaagagggatatagccagtaccaacgtatgctgagcacgctgtctcaatgtgaattttcaatgggcaaaactttactagtatatgatatgaatctcagagaaatggaaaattatgaaaaaatttacaaggaaatagaatgtagcatagctggagcacatgaaaaaattgctgagtgcaaaaagcaaattcttcaagcaaaacgaatacgaaaaaatcgccaagaatatgatgctttggcaaaagtgattcagcaccatccagacaggcatgagacattaaaggaactagaggctctgggaaaagaattagagcatctttcacacattaaagaaagtgttgaagataagctggaattgagacggaaacagtttcatgttcttcttagtaccatcccatgaacttcagcaaacattggaaaatgatgaaaaactctcagaggtagaagaagctcaggaagcaagcatggaaacagatcctaagccatagacaggctaattgcccaccactcccaggaatattgaaatagctacatgaccataatgtgtttaaaatgtggtatgctcttgagatatttaaagttttggcagtaaaatactctgtttttaagtatgaatgtatttcattcatatttcctctcacaaaggaaaatgacttcagtatagatttgtttttattaaaatgcattttttattcttaagtggtaggaagcaacatccaaaaatgcttaataaaatgcttttaagctgcaaa

SEQ ID NO: 164840 - DNA, 1026 bp, Homo Sapiens
  misc_feature (874)..(946): n is a, c, g, or t
taaaaaggtataggtgaaacatatattgaatggttccttgaaacttctttggaatgttaggtaagagttcaacgaaatttatataggaccccaacagagtaaccggcatgcacagcatgactagaagagagatggtgtatttctcaccatgaaggttaggcaggttaatgctgtaaaacccagagtgttcatctccaaagtgaggaaaagcacatctgatctttgaatgctacctccaatccccacagccacaaaaatcagggctctatgtaggggaagtccctctccagaatggagaagggaacaaaagtgactctgaaccctaaagccaaaaccaacaaaggttaaggcatctctgggaaaataagggtttcacccagctagaccagatttgcccatccttcctctgaagttaacgtgtgtttttaaaaagcataaacgcaacatttccagtgtataaaccacccaccactcttcttgggatggtctctggcctttggacaaaggagaaaaaacatctggccagatcgacaaagctgtcttaactaatacactatctacaaatcttgaaaatggtggacttagagagaaagggaattttagcaaacaagcgggcggaggagcactaggaggcactttcttatatcttatctgctataggaactgcaggagttatactcacagaaggagagtttccggcataaatttaataggaacggtggatgatttgagaaagtgattttatgcctggttgcaaacagcaagcataattgatacccggccctggttctactcttacccattattgaaatgtggaaagacttacctagaaatctaaggtattatttcagctgcagttttgcatgtctgcaannnnnnnnnnnnnnnnnnnnnnnnnnnnnnnnnnnnnnnnnnnnnnnnnnnnnnnnnnnnnnnnnnnnnnnnncttttgccagtgcccaacaaaaatcacataatctaagagaaaacaatgtagtccaaacagttccacccaacactccctcc

SEQ ID NO: 164841 - DNA, 1147 bp, Homo Sapiens
  misc_feature (20)..(20): n is a, c, g, or t
  misc_feature (604)..(676): n is a, c, g, or t
  misc_feature (1050)..(1050): n is a, c, g, or t
  misc_feature (1071)..(1071): n is a, c, g, or t
  misc_feature (1088)..(1088): n is a, c, g, or t
  misc_feature (1106)..(1106): n is a, c, g, or t
  misc_feature (1117)..(1117): n is a, c, g, or t
  misc_feature (1126)..(1126): n is a, c, g, or t
  misc_feature (1136)..(1136): n is a, c, g, or t
tctgctgtccccccgggtantgcgagatcgttgacccggcgtcggtaagtaagtagctgtctgatgtgtgagggggaatcgtgaaaatggagttttagaggaaaagtcaacatataactagtgaggaaaagtgcctaatacaattagaatctccctcactccatagtgagcccagttgaaaggataaggaggaggggtggcttttatggacttccactgagagaaggaaagaaatatttcaggtaagcttctcagggctggccctttttgggatttggatgagaaattggaagtactaactactttctagcatatctttaagaaaattgattgttatttactcccagatcctcttgcagacccagaattatcaggaacatagctctgtgattcatgagtgtccccatactgatgaattggagcatccatatggaaagcaaaggcagaattatcccagctgtattattttgatcttttggatgcaggtgccttaatgaagctctcaaaatattttaggagctgctcagggagtgttgggtggaactgtttggactacattgttttctcttagattatgtgatttttgttgggcactggcaaaagnnnnnnnnnnnnnnnnnnnnnnnnnnnnnnnnnnnnnnnnnnnnnnnnnnnnnnnnnnnnnnnnnnnnnnnnnttgcagacatgcaaaactgcagctgaaataataccttagatttctaggtaagtctttccacatttcaataatgggtaagagtagaaccagggccgggtatcaattattgcttgctgtttgcaaccaggcataaaatcactttctcaaatcatccaccgttcctattaaatttatgccggaaactctccttctgtgagtataactcctgcagttcctatagcagataagatataagaaagtgcctcctagtgctcctccgcccgcttgtttgctaaaattccctttctctctaagtccaccatttttcaagatttgtagatagtgtattagttaagacagctttgtcgatctggccagatgttttttctcctttnttccaaaggccagagaccatnccagggaagagtgggtngggtggtttataacactnggaaattgttngcgttttanggcctttttnaaaaatcacaa

SEQ ID NO: 164842 - DNA, 478 bp, Homo Sapiens
cagagcatgcagtgttggagatgtgaccaccatccccatcttgtgggaaggtagtttggaagaagggaaggccatggatcttccagtcctggtgtggcaggcagtgcagagtcctcttcttccagcactgcaggggtttaatccaagggcatgagcatctcaggggcctgggagggagtaaggatggtgagaacaatatttgaaaatgtctgtcgtagggttgatgtgaagatggcctgaaagccctcttttcttcctgttttcctacagaatgcactgtcctgcaggcaccacagacaccaggcagtggatacctttgctgaatcctaaggagccaaagcatttttatgacaaacatgacctcctccctgcaatcgtcacatcctgggtagtctggacaatgcataaaccagaactgaaccaaggtgaaaataggtaaaagagacacatccacacttcactccctttggtgagttca

SEQ ID NO: 164843 - DNA, 323 bp, Homo Sapiens
ttgcaaggcttgggtcactgacattgagttctcacgagtaaatgaccggtcggattgtggatgggatgttttgctgtctgatggtgttcctgaaagcaagttccgtgccatctgctcctccatagataaactagacaacatggcttggaaagatgtgagacatgagatggtggtgaagaaaagactggctcctgaggtggctgatcgaattggggactatgtccagtgtcatggtggggtatccctagtagagcaaatgtttcaggatcccagactatcccagaacaagcaggccctggagggcctgggagaccaagcttgca

SEQ ID NO: 164844 - DNA, 527 bp, Homo Sapiens
tgcaagcttggggactggtggggaagagggccaggacatcttctgagccaggacgtccctgaggctccacctccaagctcagacagggcccaggcttggggaacagagagagcaggtgtacacccaaccaaagtgattgtgcccttggttggggggcgcgggcatataacctgtcagaagcaaacaggagcggcaacttctaactttgctccaagccactctcttgttaaacagcaacaatttaaagctatgaagtcacctggagaaaaggaacgttgctcttggacagcaagcaaaccatttctctccgtctgttctgtttttctcactagtccctcgtcctgccacctctcccaagacttcgcgtgggacacccacttccctctgtcctagttctctttgtccaatcagatggcaagggcagtgcgtggaaaggccggggaggtgcagaaaccagagcccagggcaatggtgtctgtccagcccctccctctgtccctgtgctccaagctgcatgcctccaagat

SEQ ID NO: 164845 - DNA, 551 bp, Homo Sapiens
  misc_feature (90)..(101): n is a, c, g, or t
ctaggcatgcagcttgggaaggtgattgcccctttatttcattcagtgccatggtccctgttgttgtagtaatttatttgtttagttcannnnnnnnnnnncttaacagtcaaggggaagagtgattcctcacactgctttcaagctggactgagccagtctcattctgggaaagaaacgctgtgtccagaactcagcagctccatctattttttccagtcgaaagaaactgatctttaggcagtttttacttggccagaaagcagtgctgaatacttgaaactgtgtgctctgttctacttaatgttctgtcagaatgttcttttgtaggcagtatgtcatgatgtaatcatctatctccttgtctgtttccaagttacactgtgaagtctgcgacccttttgaggtggtcatcaaagacacagattccttgtttaaccaagtgtcccaaagcatgtacctgaagttatatcattttttattctaaaaagctatgcagcttatattctgaaactattaaaacatataccactactaagctttcgaagcgt

SEQ ID NO: 164846 - DNA, 610 bp, Homo Sapiens
  misc_feature (12)..(12): n is a, c, g, or t
acccctatgcgngcaccaacccaccccacatggcccacgtacctcaggctcatgtacagtcaggaatggttccttctcatccaactgcccatgcgccaatgatgctaatgacgacacagccacccggcggtccccaggccgccctcgctcaaagtgcactacagcccattccagtctcgacaacagcgcatttcccctatatgacgcacccttcagtacaagcccaccaccaacagcagttgtaaggctgccctggaggaaccgaaaggccaaattccctcctcccttctactgcttctaccaactggaagcacagaaaactagaatttcatttattttgtttttaaaatatatatgttgatttcttgtaacatccaataggaatgctaacagttcacttgcagtggaagatacttggaccgagtagaggcatttaggaacttgggggctattccataattccatatgctgtttcagagtcccgcaggtaccccagctctgcttgccgaaactggaagttatttattttttaataacccttgaaagtcatgaacacatcagctagcaaaagaagtaacaagagtgattcttgctgctattactgccaaac

SEQ ID NO: 164847 - DNA, 223 bp, Homo Sapiens
catcattggcgcatgggcagttggatgagaaggaaccattcctgactgtacatgagcctgaaacagagagctcttttacgcatacaggcaacatctccggcttcaacaacatgtcaactgtgttcctttcactgggctgggactctcaggaaagggcaacggtgggcctcagggcccagttctgttctctggggacaatctctagtagattatctattgaccc

SEQ ID NO: 164848 - DNA, 1930 bp, Homo Sapiens
  misc_feature (1570)..(1628): n is a, c, g, or t
caggcatgcagcttggggagtttgccaaggtgctggagctggacaacgtcaagagtgagatcatccccatgttctccaacctggcctctgacgagcaggactcggtgcggctgctggcggtggaggcgtgcgtgaacatcgcccagcttccgccccaggaggatctggaggccctggtgatgcccactctgcgccaggccgctgaagacaagtcctggcgcgtccgctacatggtggctgacaagttcacagagctccagaaagcagtggggcctgagatcaccaagacagacctggtccctgccttccagaacctgatgaaagactgtgaggccgaggtgagggccgcagcctcccacaaggtcaaagagttctgtgaaaacctctcagctgactgtcgggagaatgtgatcatgtcccagatcttgccctgcatcaaggagctggtgtccgatgccaaccaacatgtcaagtctgccctggcctcagtcatcatgggtctctctcccatcttgggcaaagacaacaccatcgagcacctcttgcccctcttcctggctcagctgaaggatgagtgccctgaggtacggctgaacatcatctctaacctggactgtgtgaacgaggtgattggcatccggcagctgtcccagtccctgctccctgccattgtggagctggctgaggacgccaagtggcgggtgcggctggccatcattgagtacatgcccctcctggctggacagctgggagtggagttctttgatgagaaacttaactccttgtgcatggcctggcttgtggatcatgtatatgccatccgcgaggcagccaccagcaacctgaagaagctagtggaaaagtttgggaaggagtgggcccatgccacaatcatccccaaggtcttggccatgtccggagaccccaactacctgcaccgcatgactacgctcttctgcatcaatgtgctgtctgaggtctgtgggcaggacatcaccaccaagcacatgctacccacggttctgcgcatggctggggacccggttgccaatgtccgcttcaatgtggccaagtctctgcagaagatagggcccatcctggacaacagcaccttgcagagtgaagtcaagcccatcctagagaagctgacccaggaccaggatgtggacgtcaaatactttgcccaggaggctctgactgttctgtctctcgcctgatgctggaagaggagcaaacactggcctctggtgtccaccctccaacccccacaagtccctctttggggagacactggggggcctttggctgtcactccctgtgcatggtctgaccccaggccccttcccccagcacggttcctcctctccccagcctgggaagatgtctcactgtccacctcccaacgggctaggggagcacggggttggacaggacagtgaccttgggaggaaggggctactccgcccacgtcagggagagatgtgagcatcccgggtcactggatcctgctgctgtaatgggaacccctcccccatttacttctccacctcccgtcctccccatcattggnnnnnnnnnnnnnnnnnnnnnnnnnnnnnnnnnnnnnnnnnnnnnnnnnnnnnnnnnnncacagagaaataaaggtctagaagtaaacccctgcaagacagacatgaaagactaaaaatagtaatacacaaaactctaaaaggcaaaaatgacacgcataaactccacgccaagaacatcaaaccaaacaaaataaacttcgtggcgtcgcgggctccccccgccactaagaatattttttaaacgcttttggtgggcggccgccccgcccataagagagaaggtggtgagccccccaattttcctttttcaacaaaaactcccctttgcgccactacacacgcgcctcttctcccccccc

SEQ ID NO: 164849 - DNA, 677 bp, Homo Sapiens
  misc_feature (451)..(451): n is a, c, g, or t
caggaaagggacggagccaagatggcggtttccgacggcgacgactcgctgtaccccatcgcggtgctcatagacgaactccgcaatgaggacgttcagcttcgcctcaacagcatcaagaagctgtccaccatcgccttggcccttggggttgaaaggacccgaagtgagcttctgcctttccttacagataccatctatgataaagatgaggtcctcgctggccctggcagaacagctgggaaccttcactaccctggtgggaggcccagagtacgtgcactgcctgctgccaccgatggagtcgctggccacagtggaggagacagtggtgcgggacaaggcagtggactccttacgggccatctcacacgagcactcgccctctgacctggaggcgcactattgtgccgctagtgaagcggctggcgggcggcgactggttcacctnccgcacctcggcctgcggcctcttctccgtctgctacccccgagtgtccagtgctgtgaaggcggaacttcgacagtactttcggaacctgtgctcagatgacacccccatggtgcggcgggcccgagccttcaagctgggggagtttgccaaggtgcttgaggctgacaacggtaagagtgagatcattcccattgtcttcaaccctgcccttgactgcgggtct

SEQ ID NO: 164850 - DNA, 1087 bp, Homo Sapiens
agcattgccccccccacgtttcagcacagcgctggccgcagtctgacaggaaagggacggagccaagatggcggcggccgacggcgacgactcgctgtaccccatcgcggtgctcatagacgaactccgcaatgaggacgttcagcttcgcctcaacagcatcaagaagctgtccaccatcgccttggcccttggggttgaaaggacccgaagtgagcttctgcctttccttacagataccatctatgatgaagatgaggtcctcctggccctggcagaacagctgggaaccttcactaccctggtgggaggcccagagtacgtgcactgcctgctgccaccgctggagtcgctggccacagtggaggagacagtggtgcgggacaaggcagtggagtccttacgggccatctcacacgagcactcgccctctgacctggaggcgcactttgtgccgctagtgaagcggctggcgggcggcgactggttcacctcccgcacctcggcctgcggcctcttctccgtctgctacccccgagtgtccagtgctgtgaaggcggaacttcgacagtacttccggaacctgtgctcagatgacacccccatggtgcggcgggccgcaacctccaagctgggggagtttgccaaggtgctggaactggacaacgtcaagagtgagatcatccccatgttctccaacctggcctctgacgagcaggactcggtgcggctgctggcggtggaggcgtgcgtgaacatcgcccagcttctgccccaggaggatctggaggccctggtgatgcccactctgcgccaggccgtgaagacaagtcctggcgcgttcgctacatggtggctgacaagttcacagagctccagaaagcagtggggcctgagatcaccaagaaggactggtccctgcttccagaacctgatgaaagactgtgaggccgaggtgagggccgcaggctcccacaaggtcaaagagttcctgtgaaaacctctcagctgactgtcgggagaatgtgcatcatgtcccagatcttgccctggcatcaaaggaagctggtgttcgatgccaacaaaa

SEQ ID NO: 164851 - DNA, 878 bp, Homo Sapiens
caggctggtacggcccggaattacgggatatcgtcgacccacgcgtgcggacaagttcacagagctccagaaagcagtggggcctgagatcaccaagacagacctggtccctgccttccagaacctgatgaaagactgtgaggccgaggtgagggccgcagcctcccacaaggtcaaagagttctgtgaaaacctctcagctgactgtcgggagaatgtgatcatgtcccagatcttgccctgcatcaaggagctggtgtccgatgccaaccaacatgtcaagtctgccctggcctcagtcatcatgggtctctctcccatcttgggcaaagacaacaccatcgagcacctcttgcccctcttcctggctcagctgaaggatgagtgccctgaggtacggctgaacatcatctctaacctggactgtgtgaacgaggtgattggcatccggcagctgtcccagtccctgctccctgccattgtggagctggctgaggacgccaagtggcgggtgcggctggccatcattgagtacatgcccctcctggctggacagctgggagtggagttctttgatgagaaacttaactccttgtgcatggctggcttgtggatcatgtatatgccatccgcgatggcagccacagcaacctgaagaagctagtggaaaagttcgggaaggagtgggcccatgccaaatcatccccaagtcttggcatgtccggagaccccaatacctgcacccgatgactacgctcttctgcattcatgtgctgtctgaggtctgtggggcagggaattaccacaagcattgctacgcaaggtctggcatggctggggaccggtgcaaggtccgtcatgtgccaagctctgaacag

SEQ ID NO: 164852 - DNA, 447 bp, Homo Sapiens
acaccctcagggtccatcagtagcaaatgcttaggctgcccactctgcaagccagtgagcacatactggccaggtgtggtcgtgctctcccgtaccaggaaatccccattgaagctgccagcagtgcctcagcctcccgccggctcagcttcccatggaacccagggctcccctcggagctgctcagccatggacaccgactggggaggtggaggcacgcgaagagcatcttcgaagggcttcatgtcaaacaggtcccggggtgcactgccattgatagcaggattggggggcccagcaccacccactgcttgccgggccttgtctaggttctggacgttgacataggagggatcatcaaaaagctctctgcctggacaggatggtggaggtggcatctgtttgcggacttctggatctcccccaacaggctgtcctacaggcaat

SEQ ID NO: 164853 - DNA, 486 bp, Homo Sapiens
tgtattggtggtgctctctggaagagagcgctagggcagatcacagtttccgctccacaggttgctgtagacacagttcgctgcccgcagagatgatgggcaagtgattgtccatgtggtagctgataaggtgactgacactttcaaagcggtgatccttagtccgaaccacaccctcagggtccaccagtagcaaatgcttaggctgcccactctgcaagccagtgagcacatactggccaggtgtggtcgtgctctcccgtaccaggaagtccccattgagctgcagcagtgcctcagcctcccgccggctcagcttcccatggaaccagggctcccctcggagctgctcagccatggacaccgactggggaggtggaggcacgcgaagagcatcttcgaagggcttcatgtcaaacaggtcccggagagcaccaccaatacactctgaacaacaaaggttttattcgcaaagcccgtcccaaa

SEQ ID NO: 164854 - DNA, 1093 bp, Homo Sapiens
tgtttgatcaataaatcaatggggttaatttaatatgttacaattaattacactaagtgacattaccaaacaattttagagtggttagctctagaacaaggaatgaaagaaacaatgttagccattattgtgtctgtgtattttctcttcacatttcttaaatcacaaataaaaaatacaagatactgcagtgaaaatacaattagagtttctctgaaataaattaaatgtgcatggcctgggaaaaactgaagcccagctcactggcttaaaagggggtcatgatataaaattaatgtccaagtttagcaggcggccaagtgcccccaccccgtatcactcccctctttgattctattccttaccacagccctgaccttcccacataccctagattattgctgaggagtgagctgatgctgtcctggcagcaaagagggcctggcgtgatgtgctcaggtttaggggaacaggaagtcaagaggtggacctggaagatggggagctagagaagcatacccactatctctcttctccctccctctctctgagtgttctatcacatcatcctcccaaaggaagctactgtgacacaatgaagctggtgaagaaacagcagtatgctggggtcaacagatcaaacagcttctactgctgaatgaatctagccaaacagtatgatggcgagaagggagagcacagcagtccctcctggtatggaaaattcaggtcaactaggatgcagtccccttcaagaaaactacctcctaggagcccagcccagaagttggcaaattctgagataggagagagtttcatctcctgtcagtgccctattttgctgctccaagtgctgggtttggagctacaggaagggataacccaaagctactggcctgggtaactaaaggatgaaactaaatgggccaggcatgaggatgttggaatatttatctaattcccccctgagagctcagtccaggcctaggagctgccctgagcatgcacatatctgtacctgtgtttaggcctagggtaaggacggggtggaaaaatggagaatagaataaacatataaagagcagagggcccc

SEQ ID NO: 164855 - DNA, 274 bp, Homo Sapiens
tgcaagcttggctaatctcgtgctctcactgaaaatggataattagggaatgggaaaggaacatttggaagggacaggatactaaaggtaatagagaagaagatcttttaagggtgaccttctacgagtggggctttggaattgatgctgggacccttgccaactgctgttgggagtttctgcctgagatcatctccacactatcagaactgccacttctattccttgctaaggtcacctcccctcttgagcccaagctagcaggtaccgagct

SEQ ID NO: 164856 - DNA, 369 bp, Homo Sapiens
gcccctcggataagggccaaggggaaagaaggagaacttctcaagaagggaagagctaacagtgtcacatgtcacagcaatgccaaataaaatagaaaggtgtcctttgaacgtcactggaagtcttgcctagagcagtttcagtagagtggcagggataggcactagaatgtcatgattgtacctgtgattcaggaagatgactgtcctcactatgggcagaatgacttagggaaggaagagacaataatgtgggagacaagtgtggtgaagatgggatcaggaccccagaaaggagataataaaggctaacccaaggcaggcaccatggtatcgaaagaaggggcctgggtagtggattaccaagcc

SEQ ID NO: 164857 - DNA, 570 bp, Homo Sapiens
agtaggcggccaagctggtggctgtgaatctgttccacgacaggattctgcttaggcatttgtggctggctctctttatcctcgattactaaagaacctaagttgatgatattttgagcccagaaactaggatcacagtgaaattggatggtgttgttggtcactggggatgcatcacaccttgcacgaaggaggtgccgtaaccggtatgtaatcagtcgtttgctataaagtaatgctgtactgctgccactggaaactgcccatttagaaaaatgcatgacatgctccaattgtttagagagtccagccacttcctgttgttgttgcataagtttcatgcgatggtcctttgcaaggctctctaactgatgcagtagagcttttccttttttatttatttctaccatcagtgtaaatatagcaactttaatatcctgttccacctgcttttgattttgatttacttcaataattctgttttggatctgatttcctgtgaattttatgtattttgttttttccatcagtttggtgattagtgtatctatgatcactttctgatgggga

SEQ ID NO: 164858 - DNA, 1579 bp, Homo Sapiens
ggaggaccaagaaacctgtggttattcgtgccagcaagcagtggtttataaacatcacggatattaagactgcagccaaggaattgttaaaaaaggtgaaatttattcctggatcagcactgaatggcatggttgaaatgatggacaggcggccatattggtgtatatcaaggcaaagagtttggggtgttccaattcctgtgtttcatcataagaccaaggatgaatacttgatcaacagccaaaccactgagcatattgttaaactagtggaacaacacggcagtgatatctggtggactcttcccccgtgaacaacttcttccaaaagaagtcttatctgaggttggtggccctgatgccttggaatatgtgccaggtcaggatattttggacatctggtttgatagcggaacttcatggtcttatgttcttccaggtcctgaccaaagagcagatttgtacttggaaggaaaagaccagctcgggggttggtttcagtcatccttattaacaagtgtggcagcaaggaagagagcaccttataagacagtgattgttcatggatttaccctttggagaaaagggagaaaagatgtccaagtctcttgggaatgtcattcatcctgatgttgtcgttaatgggaggacaagatcaaagcaaagagcctccgtatggtgctgatgtccttcgctggtgggtagctgattccaatgtcttcaccgaagttgcaattggcccatccgtgctcaatgctgccagagatgatattagcaagcttaggaatacacttcgctttcttttgggaaatgtggctgatttcaacccagaaacagattccatccctgtaaacgatatgtatgtcatagaccagtacatgctacacttactgcaggatttggcaaacaagattaccgaattatacaaacaatatgattttggaaaagttgttcggctgttacggacgttttataccagagagctctctaacttttatttcagtataatcaaagataggctctattgtgaaaaggaaaatgaccccaaacgacgctcttgtcagactgcattagttgaaattttggatgtaatagttcgttcttttgctcccattcttcctcacctggctgaagaggtgttccagcacataccttatattaaagagcccaagagtgttttccgtactgggtggattagtactagttctatctggaaaaagcccgggttggaagaagtctgtggagagtgcgtgtgcaatgcgagactcatttcttggaagcatccctggcaaaaatgcagctgagtacaaggttatcactgtgatagaacctggactgctttttgagataatagagatgctgcagtctgaagagacttccagcacctctcagttgaatgaattaatgatggcttctgaggtcaactttactggctcaggaaccacgagagatgactgcagatgtaatcgagcttaaagggaaaatcctcatcaacttagaaggtggtgatattcgtgaagatcttacctataaagtaattgtcatgcctgggtacagagctcgattcgatcattgtcaa

SEQ ID NO: 164859 - DNA, 580 bp, Homo Sapiens
  misc_feature (385)..(440): n is a, c, g, or t
aatcgagcttaaagggaaattcctcatcaacttagaaggtggtgatattcgtgaagagtcttcctataaagtaattgtcatgccgactacgaaagaaaaatgcccccgttgttggaagtatacagcggagtcttcagatacactgtgtcctcgatgtgcagaagttgtcagtggaaaatagtattaacagctcactcgagcaagaaccctcctgacagtactggctagaagtttggatggattatttacaatataggaaagaaagccaagatttaggtaatgagtggatgagtaaatggtggaggatgggagtcaaaatcagaattatagaagaagtatttcctgtaactatagaaagaattatgtatatatacatgcagaaatnnnnnnnnnnnnnnnnnnnnnnnnnnnnnnnnnnnnnnnnnnnnnnnnnnnnnnnnccatagtggacttatccagaacatagatatgtatccagcttgtcttcaaatacggccaagcagaaaatgttttatattttataaaccatcttttgaccctgtatttaaattctatgatactgaaaataaaggcattctgg

SEQ ID NO: 164860 - DNA, 580 bp, Homo Sapiens
  misc_feature (385)..(440): n is a, c, g, or t
aatcgagcttaaagggaaattcctcatcaacttagaaggtggtgatattcgtgaagagtcttcctataaagtaattgtcatgccgactacgaaagaaaaatgcccccgttgttggaagtatacagcggagtcttcagatacactgtgtcctcgatgtgcagaagttgtcagtggaaaatagtattaacagctcactcgagcaagaaccctcctgacagtactggctggaagtttggatggattatttacaatataggaaagaaagccaagatttaggtaatgagtggatgagtaaatggtggaggatgggagtcaaaatcagaattatagaagaagtatttcctgtaactatagaaagaattatgtatatatacatgcagaaatnnnnnnnnnnnnnnnnnnnnnnnnnnnnnnnnnnnnnnnnnnnnnnnnnnnnnnnnccatagtggacttattcagaacatagatatgtattcagcttgtcttcaaatacggccaagcagaaaatgttttatattttataaatcatcttttgactctgtatttaaattctatgatactgaaaataaaggcattctgg

SEQ ID NO: 164861 - DNA, 969 bp, Homo Sapiens
cggacgcgtgggtcgacttcctcacctggctgaagaggtgttccagcacataccttatattaaagagcccaagagtgttttccgtactgggtggattagtactagttctatctggaaaaagcccgggttggaagaagctgtggagagtgcgtgtgcaatgcgagactcatttcttggaagcatccctggcaaaaatgcagctgagtacaaggttatcactgtgatagaacctggactgctttttgagataatagagatgctgcagtctgaagagacttccagcacctctcagttgaatgaattaatgatggcttctgagtcaactttactggctcaggaaccacgagagatgactgcagatgtaatcgagcttaaagggaaattcctcatcaacttagaaggtggtgatattcgtgaagagtcttcctataaagtaattgtcatgccgactacgaaagaaaaatgcccccgttgttggaagtatacagcggagtcttcagatacactgtgtcctcgatgtgcagaagttgtcagtggaaaatagtattaacagctcactcgagcaagaaccctcctgacagtactggctggaagtttggatggattatttacaatataggaaagaaagccaagatttaggtaatgagtggatgagtaaatggtgggaggatgggagtcaaaatcagaattatagaaagaagtatctcctgtaactatagaaagaattatgtatatatacatgcagaaatatatatgtgtgtgtgtatctgtggatggatatatgtatatctcttcctatatatatccatagtggacttattcagagaatagatatgtattcagcttgtcttcaaatacgggcaagcagaaaatgtgcatatgttataaatcatctttgactctgtatgtaaagttctatgatactgaaacatacaggcattctggaaaaataccaaagacaaagagaag

SEQ ID NO: 164862 - DNA, 877 bp, Homo Sapiens
gacagcagcactcccgaagagatgccacctccagagcccccagagccaccacaggaggcagctgaagctgagaagtagcctatctatggaagagacttttgtttgtgtttaattagggctatgagagatttcaggtgagaagttaaacctgagacagagagcaagtaagctgtcccttgtaactgtttttctttggtctttagtcacccagttgcacactggcattttcttgctgcaagcttttttaaatttctgaactcaaggcagtggcagaagatgtcagtcacctctgataactggaaaaatgagtctcttgggccctggcactggttctccatggcctcagccacagggtccccttggaccccctctcttccctccagatcccagccctcctgcttggggtcactggtctcattctggggctaaaagtttttgagactggctcaaatcctcccaagctgctgcacgtgctgagtccagaggcagtcacagagacctctggccaggggatcctaactgggttcttggggtcttcaggactgaagaggagggagagtggggtcagaagattctcctggccaccaagtgccagcattgcccacaaatccttttaggaatgggacaggtaccttccacttgttgtatttattagtgtagcttctcctttgtctcccatccactcttgacacctgaagccccactcttttccccattaagatatatataagtagttgtagtagagataataattgacatttctcgtagactacccagaaacttttttaatacctgtgccattctcaataagaatttatgagatgccagcggcatagcccttcacactctctgtctcatctctcctcctttctcatta

SEQ ID NO: 164863 - DNA, 792 bp, Homo Sapiens
cattgcagcttggtctgattcagattccatcctttccctgaaatcaggaatctctctgtggatcaccatttcatcttacacctgatcaagaagaaaaaccctttacaagtaataaaggcccacgaattctaaaaccaggggagaaaagtacattggaaactaaaaagatagaatctgaaagtaaaggaatcaaaggaggaaaaaaagtttataaaagtttgattactggaaaagttcgatctaattcagaaatttcaggccaaatgaaacagccccttcaagcaaacatgccttcaatctctcgaggcaggacaatgattcatattccaggagttcgaaatagctcctcaagtacaagtcctgtgtctaaaaaaggcccaccccttaagactccagcctccaaaagccctagtgaaggtcaaacagccaccacttctcctagaggagccaagccatctgtgaaatcagaattaagccctgttgccaggcagacatcccaaataggtgggtcaagtaaagcaccttctagatcaggatctagagattcgaccccttcaagacctgcccagcaaccattaagtagacctatacagtctcctggccgaaactcaatttcccctggtagaaatggaataagtcctcctaacaaattatctcaacttccaaggacatcatcccctagtactgcttcaactaagtcctcaggttctggaaaaatgtcatatacatctccaggtagacagagagccacacagaaccttaccgaacaaacagtttatccagcttggacgg

SEQ ID NO: 164864 - DNA, 1931 bp, Homo Sapiens
ccgccagaacaagccaaagtcgtggcatcagttcatgcatctatttcagggtcctctgccagtagcacaagcagcacacctgaggtcaaaccactgaaatctcttttaggggattctgcaccaacactgcacttaaataagggcacacctagtcagtccccagttgtaggtcgttctcaagggcagcagcaggagaagaagcaatttgaccttttaagtgatctcggctcagacatctttgctgctccagctcctcagtcaacagctacagccaattttgctaactttgcacatttcaacagtcatgcagctcagaattctgcaaatgcagattttgcaaactttgatgcatttggacagtctagtggttcgagtaattttggaggtttccccacagcaagtcactctccttttcagccccaaactacaggtggaagtgctgcatcagtaaatgctaattttgctcattttgataacttccccaaatcctccagtgctgattttggaaccttcaatacttcccagagtcatcaaacagcatcagctgttagtaaagtttcaacgaacaaagctggtttacagactgcggacaaatatgcagcacttgctaatttagacaatatcttcagtgccgggcaaggtggtgatcagggaagtggctttgggaccacaggtaaagctcctgttggttctgtggtttcagttcccagtcagtcaagtgcatcttcagacaagtatgcagctctggcagaactagacagcgttttcagttctgcagccacctccagtaatgcgtatacttccacaagtaatgctagcagcaatgtttttggaacagtgccagtggttgcttctgcacagacacagcctggcttcatcaagtgtgcctgctccatttggagctacgccttccacaaatccatttgttgctgctgctggtccttctgtggcatcttctacaaacccatttcagaccaatgccagaggagcaacagcggcaacctttggcactgcatccatgagcatgcccacaggattcggcactcctgctccctacagtcttcccaccagctttagtggcagctttcagcagcctgcctttccagcccaagcagctttccctcaacagacagctttttctcaacagcccaatggtgcaggttttgcagcatttggacaaacaaagccagtagtaaccccttttggtcaagttgcagctgctggagtatctagtaatccttttatgactggtgcaccaacaggacaatttccaacaggaagctcatcaaccaatcctttcttatagccttatatagacaatttactggaacgaacttttatgtggtcacattacatctctccacctcttgcactgttgtcttgtttcactgatcttagctttaaacacaagagaagtctttaaaaagcctgcattgtgtattaaacaccaggtaatatgtgcaaaaccgagggctccagtaacaccttctaacctgtgaattggcagaaaagggtagcggtatcatgtatattaaaattggctaatattaagttattgcagataccacattcattatgctgcagtactgtacatatttttcttagaaattagctatttgtgcatatcagtatttgtaactttaacacattgttatgtgagaaatgttactggggaaatagatcagccacttttaaggtgctgtcatatatcttggaatgaatgacctaaaatcattttaaccattgctactggaaagtaacagagtcaaaattggaaggttttattcattcttgaatttttcctttctaaagagctcttctatttatacatgcctaaattcttttaaaatgtagagggatacctgtctgcataataaagctgatcatgttttgctacagtttgcaggtgaaaaaaaataaatattataaaa

SEQ ID NO: 164865 - DNA, 1515 bp, Homo Sapiens
gggcctcaggtctcattctgtgcctgtgaacatggcggcgcccgttgtcacggccccgggcagagctctgctgcgggcgggcgctggacggctgcttcggggaggcgtccaggagctactgcggccgcgacatgaagggaacgcccctgacctggcctgcaacttcagcctttctcaaaatcggggcacggtcatcgtggagcgctggtggaaggtaccgctggccggggagggccggaagccgcgcctgcaccggcgacatcgcgtctataagctggtggaggacacgaagcatcggcccaaagaaaacctggagctcatcctgacgcagtcggtggagaatgttggagtccggggtgacctggtctcagtgaagaaatctttaggccggaatcgactccttcctcagggactggctgtatatgcatcccctgaaaacaagaaactgtttgaagaggagaaattgctgagacaagaaggaaaattagagaagatccagaccaaggcaggtgaggcgacagtgaaatttctaaaaagctgtcgcctggaggtagggatgaagaacaatgtcaaatgggagctgaaccctgaaatagttgcccgccacttctttaagaatcttggtgttgtggttgccccacatacattaaagttaccagaagagcctatcacacggtggggcgagtattggtgtgaggtgacggtaaatgggcttgatactgtgagagtgcctatgtctgtcgtgaactttgagaagcccaagaccaaaagatataagtactggttagcccagcaagctgccaaggctatggcccccaccagcccccagatctaaatctactctccctccaaggcagcaaagcagaatcgggagcagtggagcagaaatgtgcaagcaccctgatctcactcccagctctgaccaaatacagaattttagagaacatctgaagacatcagactgcactgcgtatacatgttgaattcttcatttttgccatctttaactgtcatcactggggcagggaagtcctgttccagaagtaccaggctgtagatttgataagctagatgcagtagaccgaaaccatccaaaacctgtttagcttcttcctccattggagtttattgggacaaacaggagagccagccattgtctccagtacttgcctcattctcatcatccaaactgaacatttgtatcccaagcagaaataaagagaatatgttctttttaaccacccctccaccccccctcaccacaaaggggggcgcgccctaaagatttccctccgggggcccaacttttacggcttcccacgctctctcgtcccaggtggttcccctaatgtggagtccctgttttaagcgccacgccctgccacgcccttttcaccacgctctgcactgtgcacaccccgctccccgcgcgaactctgtgaacgcaccctctcctctggggcgcgcacatatctctgcccgcctccctccagacttgtcgcgtctcggctcttt

SEQ ID NO: 164866 - DNA, 373 bp, Homo Sapiens
atgagccaccatgcccagctgctcctttattttaatccctaaatataatccctaaatatagttatatttcatacttagtttgtttttaaaaagttttctctgtagaaaattttaatcattcataccctttacctttaggtttttctttctatacattcagtcaggcactgggatcatctgtttacaggcattatatttatttggcactcctggaacaagtatatctaacccattcttgatttttggactattcaggtgaactatttgaggggtatggggtctagaagttaaaagatacgcatgtcttctgttcttttcccgacatcttctctccttcatgttctcgcgctctagcgactgtagatgcttagtc

SEQ ID NO: 164867 - DNA, 1508 bp, Homo Sapiens
gcatgctccagaaaggtacagaaagggagctcctctcagatcagcctaactcagagtggatacagtgcttcctctggacgggttaaagggcacagcaaggaccctcagctactcctggcctccccgggatacagctgtacccggggagcagagtttgatcctgtctacttcacaaacaacagcgcctgatgcccctcctgacccgactgtggaccaagttgatgacacctcaattgttgttcgctggagcagaccccaggctcccatcacagggtacagaatagtctattcgccatcagtagaaggtagcagcacagaactcaaccttccagaaactgcaaactccgtcaccctcagtgacttgcaacctggtgttcagtataacatcactatctatgctgtggaagaaaatcaagaaagtacacctgttgtcattcaacaagaaaccactggcaccccacgctcagatacagtgccctctcccagggacctgcagtttgtggaagtgacagacgtgaaggtcaccatcatgtggacaccgcctgagagtgcagtgaccggctaccgtgtggatgtgatccccgtcaacctgcctggcgagcacgggcagaggctgcccatcagcaggaacacctttgcagaagtcaccgggctgtcccctgggtcacctattacttcaaagtctttgcagtgagccatgggagggagagcaagcctctgactgctcaacagacaaccaaactggatgctcccactaacctccagtttgtcaatgaaactgattctactgtcctggtgagatggactccacctcgggcccagataacaggataccgactgaccgtgggccttacccgaagaggacagcccaggcagtacaatgtgggtccctctgtctccaagtaccccctgaggaatctgcagcctgcatctgagtacaccgtatccctcgtggccataaagggcaaccaagagagccccaaagccactggagtctttaccacactgcagcctgggagctctattccaccttacaacaccgaggtgactgagaccaccattgtgatcacatggacgcctgctccaagaattggttttaagctgggtgtacgaccaagccagggaggagaggcaccacgagaagtgacttcagactcaggaagcatcgttgtgtccggcttgactccaggagtagaatacgtctacaccatccaagtcctgagagatggacaggaaagagatgcgccaattgtaaacaaagtggtgacaccattgtctccaccaacaaacttgcatctggaggcaaaccctgacactggagtgctcacagtctcctgggagaggagcaccaccccagacattactggttatagaattaccacaacccctacaaacggccagcagggaaattcttgggaagaagtggtccatgctgatcagagctcctgcacttttgataacctgagtcccggcctggagtacaaggtcagtgtttacactgtcaagga

SEQ ID NO: 164868 - DNA, 2644 bp, Homo Sapiens
  misc_feature (1810)..(1810): n is a, c, g, or t
cctgtgcctggggacagcggtgccctccacgggagcctcgaagagcaagaggcaggctcagccaatggttcagccccagtccccggtggctgtcagtcaaagcaagcccggttgttatgacaatggaaaacactatcagataaatcaacagtgggagcggacctacctaggcaatgcgttggtttgtacttgttatggaggaagccgaggttttaactgcgagagtaaacctgaagctgaagagacttgctttgacaagtacactgggaacacttaccgagtgggtgacacttatgagcgtcctaaagactccatgatctgggactgtacctgcattggggctgggcgagggagaataagctgtaccatcgcaaaccgctgccatgaagggggtcagtcctacaagattggtgacacctggaggagaccacatgagactggtggttacatgttagagtgtgtgtgtcttggtaatggaaaaggagaatggacctgcaagcccatagctgagaagtgttttgatcatgctgctgggacttcctatgtggtcggagaaacgtgggagaagccctaccaaggctggatgatggtagattgtacttgcctgggagaaggcagcggacgcatcacttgcacttctagaaatagatgcaacgatcaggacacaaggacatcctatagaattggagacacctggagcaagaaggataatcgaggaaacctgctccagtgcatctgcacaggcaacggccgaggagagtggaagtgtgagaggcacacctctgtgcagaccacatcgagcggatctggccccttcaccgatgttcgtgcagctgtttaccaaccgcagcctcacccccagcctcctccctatggccactgtgtcacagacagtggtgtggtctactctgtggggatgcagtggctgaagacacaaggaaataagcaaatgctttgcacgtgcctgggcaacggagtcagctgccaagagacagctgtaacccagacttacggtggcaactcaaatggagagccatgtgtcttaccattcacctacaatggcaggacgttctactcctgcaccacagaagggcgacaggacggacatctttggtgcagcacaacttcgaattatgagcaggaccagaaatactctttctgcacagaccacaccgttttggttcagactcgaggaggaaattccaatggtgccttgtgcccacttccccttcctatacaacaaccacaattacactgattgcacttctgagggcagaagagacaacatgaagtggtgtgggaccacacagaactatgatgccgaccagaagtttgggttctgccccatggctgcccacgaggaaatctgcacaaccaatgaaggggtcatgtaccgcattggagatcagtgggataagcagcatgacatgggtcacatgatgaggtgcacgtgtgttgggaatggtcgtggggaatggacatgcattgcctactcgcagcttcgagatcagtgcattgttgatgacatcacttacaatgtgaacgacacattccacaagcgtcatgaagaggggcacatgctgaactgtacatgcttcggtcagggtcggggcaggtggaagtgtgatcccgtcgaccaatgccaggattcagagactgggacgttttatcaaattggagattcatgggagaagtatgtgcatggtgtcagataccagtgctactgctatggccgtggcattggggagtggcattgccaacctttacagacctatccaagctcaagtggtcctgtcgaagtatttatcantgagactccgagtcagcccaactcccaccccatccagtggaatgcaccacagccatctcacatttccaagtacattctcaggtggagacctaaaaattctgtaggccgttggaaggaagctaccataccaggccacttaaactcctacaccatcaaaggcctgaagcctggtgtggtatacgagggccagctcatcagcatccagcagtacggccaccaagaagtgactcgctttgacttcaccaccaccagcaccagcacacctgtgaccagcaacaccgtgacaggagagacgactcccttttctcctcttgtggccacttctgaatctgtgaccgaaatcacagccagtagctttgtggtctcctgggtctcagcttccgacaccgtgtcgggattccgggtggaatatgagctgagtgaggagggagatgagccacagtacctggatcttccaagcacagccacttctgtgaacatccctgacctgcttcctggccgaaaatacattgtaaatgtctatcagatatctgaggatggggagcagagtttgatcctgtctacttcacaaacaacagcgcctgatgcccctcctgacccgactgtggaccaagttgatgacacctcaattgttgttcgcctggagcagaccccaggctcccatcacagggtacagaatagtctattcgccatcagtagaaggtagcagcacagaactcaaccttcctgaaactgcaaactccgtcaccctcagtcccttgcaacctggtgttcagtataacatcactatctatgctgtggaagaaaatcaagaaagtactactgaggtgtaag

SEQ ID NO: 164869 - DNA, 622 bp, Homo Sapiens
aagcttggttaaaggagtttaggatggaatgaaactgagtctagttctgtttgaagggggcagctttttactcagctttgtgcactttggggtgctcgctcggggtgtccgcatttctcagaccttggtttggttccctgcacagtaagtactaatggttaggcctagaaacaggtgccagaagcccagggaactcctccctccctccggggcagctcagcttgtacaaggggcccattttcagttccttagtaagctaatcactacgaaagcctgagtagggaactacattctctttattcttccgaggcaggggtggggagcagacctgcggaaacctccccaaaccactaccgtgctatgccagtgcctgctacctccccatgttagcagaaagctcggtctgactgctctctctccccgacgtctggtgagtcacgtcgacaataaaggcaaaagggtggggtcctaacagctggttgtggagctgagccctggaaagccctcttttgaaagtaccttctaatcaaagccacagacccagctcccaaacagaagagtgactcacagaccaagactttgaagcttttgaaaatccagctgatgtgtatcgaagggggct

SEQ ID NO: 164870 - DNA, 960 bp, Homo Sapiens
aagaaaggcacatggaaggacgagaggagatgcaccacaggccaaaggcacaaagaagaggcaaagccaggggcaatccccaaccttgtaagggaaaagggacaggagttatgtacatcaagtcctttagtttgccaaccaatccagggcagaggcaagggacaggcctataaggataggaaaaggagaaacgggggagtggggaagccagtttcagactaattgcttcatgtacattcctactagctcctcctaaaggtcttcttcttcccaaaaacacatctttctgctccttctctaccaaaagtcttccttgacattctcccctttctacagcctcttggaaatggccaggccaactcagcagacatatcacagggcaggagaggtgggttaaggacagcctgtgtttaaggggcagcagcaatagcccagggttggcatgaggcttgcagaagagatggagtctgtaggttcttgatggtccctgccttggagatgaggagagcaaggttccttaatcccagttttaggagaccttcacttactcaagggtcctttgccaggtggcatgtgccaatgttgctggccttctttgcttcaaaaatagccattaggaataagggaagagctcacactttcccctctctaaaagaaaataaaagtcccttccccatcaggaaaaaaatcttgattaagaatcgtcagtttatcagactgctggacattgcatatacagcatgtaacttccaattcttcccacggcttctagtgaagattcctattctctccatccctcccctccacaaaaggccaggagttcccagggaaacactggcaaaaagaactaatctgcagcagtttctccaaacattatgcaaattattgcagtcaggtttctttgggagcaccacatggcaggcgaatggagggcaaagggatggatccgggggcatcctc

SEQ ID NO: 164871 - DNA, 1129 bp, Homo Sapiens
tgccgtcttgaccacaaagactctctctggcgaaagaatgcaaatggcggatatgtatgcaacgcgtgtggcctctaccagaagcttcactcgactcccaggcctttaaacatcattaaacaaaacaacggtgagcagattattaggaggagaacaagaaagcgccttaacccagaggcacttcaggctgagcagctcaacaaacagcagaggggcagcaatgaggagcaagtcaatggaagcccgttagagaggaggtcagaagatcatctaactgaaagtcaccagagagaaattccactccccagcctaagtaaatacgaagcccagggttcattgactaaaagccattctgctcagcagccagtcctggtcagccaaactctggatattcacaaaaggatgcaacctttgcacattcagataaaaagtcctcaggaaagtactggagatccaggaaatagttcatccgtatctgaagggaaaggaagttctgagagaggcagtcctatagaaaagtacatgagacctgcgaaacacccaaattattcaccaccaggcagccctattgaaaagtaccagtacccactttttggacttccctttgtacataatgacttccagagtgaagctgattggctgcggttctggagtaaatataagctctccgttcctgggaatccgcactacttgagtcacgtgcctggcctaccaaatccttgccaaaactatgtgccttatcccaccttcaatctgcctcctcatttttcagctgttggatcagacaatgacattcctcaagatttggcgatcaagcattccagacctgggccaactgcaaacggtgcctccaaggagaaaacgaaggcaccaccaaatgtaaaaaatgaaggtcccttgaatgtagtaaaaacagagaaagttgatagaagtactcaagatgaactttcaacaaaatgtgtgcactgtggcattgtctttctggatgaagtgatgtatgctttgcatatgagttgccatggtgacagtggacctttccagtgcagcatatgccagcatctttgcacggacaaatatgacttcacaacacatatccagaggggcctgcataggaacaatgcacaagtgg

SEQ ID NO: 164872 - DNA, 859 bp, Homo Sapiens
ggcttgtgagcttggggcatgaaacttggctttgcactgcacaaatggcacaaagtcctgtactcctattgtgaaaatattgctgccagccagagaaattcggtctgcccacagcttctgagcagtattcacagctaagatatcacagtcgggttctggatcaggactttcattcattaaaacatttatgaggttcttttctatccgagacttctggtcatctttcagagttgaagctctaccaaggagttctagggagtaagtaatgtaatcctttaattgggccatgaggtaggagcacttcagagctgtagttaatacagaagtgagcagagtccaccatccttcactccgataatcacacatcacataacccagcaacttcaaagctttggtataatcctttgcgtaataatattcctctcccatctgaaccattaggtgacttttcattcgcgggcacttatacttcttgaactgtgcaacagcattgctcagaagagttatgattatctcagagtgaacaacatttctctccttcagctgaatggcaagaattcccaccttttctttttcaggatcagaaagatcaaaacttagtattccttgtcgccatgatctttgtccataaaagtcaagaacgcctgtttgtgtttctaagggatcaggattgggatacattacagaagcttcgtggttacagagggtttttgcaagctgtttccgctcctgggcatagtatgctgcctgctggtaatagaaaccaggattctgagtttgaatagctgttaaccctaacttaatagcttcatcaaataaatctccaaaggcctggaattgtttagacatccaagctgca

SEQ ID NO: 164873 - DNA, 492 bp, Homo Sapiens
tttatacattagggagacatgagacatcaatcaatatatgtaagatgaacattggttccatccagaaaagcaggacaactcaagcagagagggatcttccaggtcacaggtaggtgacagtcaaatggttgcattattttgagtttctgatgagcctctccaaaggaggcaattagataagcatttatctcagtgcacggagggatgactttgcatagaatgggaggcaggtttgccctaagccattcccagcttgacttttccttttagcttagtgattttgggggcctcaagttttcttttcctttcacatttccccctttttctgtttaaaaatcttttggagaaagcattttagaagaaaacgagtctctggtctcaggtttcgtctggtctctcacagctgggatggtttattcctaggcagatgggtcttgagttattaggaaagctcatttttatcaggttgagaatcctcatgtcaaatagttt

SEQ ID NO: 164874 - DNA, 411 bp, Homo Sapiens
gatgttgtgtggataaagataatcacgatgaacaatgcatctgcagtagtggactacatgtagtaagacaaaagagaccttcttcaggaacaatttttactgatgctttctggctggatttaaattatctagaagttgccaagccaagcttgcatgcctaccaagcttgcatgcctgaccaagcttgcatgcctgaccaagcttgcatgcctgaccaagcttgcatgcctgaccaagcttgcatgcctgaccaagcttgcatgcctgaccaagcttgcatgcctgaccaagcttgcatgcctgaccaagcttgcatgcctgaccaagcttgcatgcctgaccaagctgcatgcctgaccaagcttgcatgcctgaccaagcttgcatgcctgaccaagcttgcatgcctga

SEQ ID NO: 164875 - DNA, 1045 bp, Homo Sapiens
ccagtgtccactgagcttggagggggtggagccgggaccagccccctaggaaaaggtgtaggaatagaaggcaatggcattggcgctatagtccatggggaggaggtgcccgatgtgcctggcccctaggctggccccacccagagcggaggagtgcctcagcttcatcagggtgaagctggagaagaagttctgagcctggatctctctgccctgggtcagcgccaaaagaaaaccttccttcagcagctcccagctcttccacacagagcccacgcacaggatgggagtccaatcttgccctggaacaagaccgggtcaatctcgggcaacactgctacgatgtgtctgcccagcatctccccagccttcctgaagatatagcgggaaagggggtctccctgctgagcaccttctgcaattttccggcaaaacccagcaaacctgcatttatcaaagtccctatacaggtgagtgagtatccctagccgatctggcacctggaaatagtggaacatggcctgtttgacgtagccgatatcatgaggagccgcctctaggttgtcaatggagtcaaacactattttcactgcttggtgtgcgatccagtaggctgaaccctcatcacccatcatatggccccagccgccgcagccactctcggagccatcagggttgatgagcctgcagttggagcctgttccagatatgagcacaactccaccatccggtgtagctgtggcgatggagccggcggcatcggtggtgattaagtagctttcactcaggtagggaaatcggtccctcagctcctcgatcaggatcctccccgcgtcctcctggtccccaccgctcagagataggcccaagcttcgcagcggtaccagaggatccacccctgctttccgtttggccctgttcaccatctcattgatcctctccacacacttgtctgtcccgatcagccagtggtttgtgctcagtccatctgcttctgccaggatcttcccatcctctgagactaaaaggacctcggatcgtgtgc

SEQ ID NO: 164876 - DNA, 1110 bp, Homo Sapiens
ggggcgtttacaggcaggcaggtcagtgatgtgtcctaagggtccgaccgacctagatacccctctttgattcctcctcttgggattagtgtccatctctggaagcaggatccaggaggacgggaggggccgctgcggaccgcagtcgctccacctggaggagacaccagaaggaagacagcctgagggacgcagccatccccggctcctaccggcgccccgccccgcgcatgcgcacgcgcacagggagtcagctggctgcgcgggaggtcacgggaagtggggcggtgcccagacagctggagggaaggaggtgtcaggcggggagagacgcaaacggcgggaccagcagcgacggtagcagcagcatggccgcgatctatgggggtgtagaggggggaggcacacgatccgaggtcccttttagtctcagaggatgggaagatcctggcagaagcagatggactgagcacaaaccactggctgatcgggacagacaagtgtgtggagaggatcaatgagatggtgaacagggccaaacggaaagcaggggtggatcctctggtaccgctgcgaagcttgggcctatctctgagcggtggggaccaggaagaacccggggaggatcctgatcgaagagctgagggaccgatttccctacctgagtgaaagctacttaatcaccaccgatgcccccggctccatcgccacagctacaccggatggtggagttgtgctcatatctggaacaggctccaactggaggctcatcaaccctgatggctccgagagtggctgcggcggctgggggccatatgatgggtgatgagggtgcagcctactggatcgcacaccaagcagtgagaatagtgtgtgagtccattgagaaccataagaggcggggtcctcatggatatcgggctacgtcataacaggggcgctggttgcccacctaattatcccacggggggacgacgaatctgagcgtaaggagataatcacatcaaaccatgtctgaaagggagagacgatagaatagcacggaaggaagagagagaagccgggaaaggaaggacgcgcgaggggaggtgcacaaggaggagaacgacg

SEQ ID NO: 164877 - DNA, 673 bp, Homo Sapiens
  misc_feature (365)..(375): n is a, c, g, or t
  misc_feature (575)..(575): n is a, c, g, or t
  misc_feature (626)..(626): n is a, c, g, or t
  misc_feature (647)..(647): n is a, c, g, or t
  misc_feature (660)..(660): n is a, c, g, or t
agtccgttaactctgcctcgagtctcaggttgatgctgcagagcctgcgggtgaacagagttgggcctgaggagctgcctgttgtgggccagctgcttcgactgctgcttcagcatgcacccctcaggactcatatgttgaccaatgcgatcttggtgcagcagatcatcaagaatatcacggtaagaagcatggtaccggaggctttgcagtattagcataagaatgaatttatgacgggggcatgggggaaagtgtgttttgagggaggaaagggatcccatacattgagtccaggaattaatcccaatatggtagtttctcaggctctcccgtgctgtccagcacctgactgtgacttaatnnnnnnnnnnntgtgtctgtaattccagaattagtaataaaagtcttaaaataatcaaactcaatgaaggtgacaaagcttaggttagtttgaaaaggtaagggcatcagagtcattcctacctagactgtgatacagactctattaatgaactgtgacagcttgggcaagtttttttctttctttcttacctatccaagcttgttttccnatctgtaaaaatgggggataatgcccactttattgtgtttttggggatccnttaaagggggttaaccccagnaaagttttagggntaccccgacattt

SEQ ID NO: 164878 - DNA, 1826 bp, Homo Sapiens
gggcccagaatggggccccctcactgtggggcccctttccaagaattggggggaatggggctggtgcccaagcttgtgtggagggatttcccttcccatttggggggtccccttcctctggggaaaaccgttcgagagaaagggatcgggatgaaggccccaccaagcttaccccctttggtatttccaagaaaggtgcaaggttttgagcctttccaagggtgaagttttggggctgtaaccaaggagctttcggaggattcctttagcgcagcaagccacggtgtcccttgaggggtgagggagccatttgggggggcgcatcaagtgaccgttggcataccccctggtacaggggcccgcccctccgggccacaatcccccggtggacttcagccacttgaagtcttccgcagggagcgcttctagagcaggcttgcccacagaccgggatcttgctgcggtcgaggcggacccgggcatctgggcgcccatcggagcctgtggtgggagtgatggtaacgagtccctcgccagcctccagcaagactctcaggatcacaaaccggggcctgcatatgggcctgtcgccagttgaaggcctcaggtgtgtagaactccagagcgagcagcccggcccgaaccatgttgagccagttcacgtagatcacgtcctccgcatcagccccctcaaagccaaagatctccagcacttgcgggtggagacagaggtagagacccacgctctcagcccggcactcttcgtagctggaggcgatggtgctgaacttgctatcccaggtctccccgctccgataccagctctgaatctgctcgcccgtctctgggttgatcactgtttcctggtcaaagttgaatgctcctttttcgtcctgtacgaagagcttgccactgccatggcccagcagctcgtgcaggcccacctgcacatcgaaggagggccccttccagaggatgtacaggtccttgccatcctcctccagaaaggtaagcttctcccgctgcggggcgtaggccacagccagcacattccccagcgacacgttcttaaagccttccgtctgcctcagatcatcgtagttggggatgttgatgccggcagggatgccggagccagcgaaggtgagaacatccagggaggtgaagccaggggtgaggaacttgtccttctcaaaggttgggggccagggcagctccttcagcagctgctctgcgctcgccaccagccgctcaaacttggcactcatggccttgttcaccacagctacgaaaccttcaaattctcctcgggaaccaaaggggtcgcggtagctctcgatgaacccgatgtaactctccacgatggggcctttgtcctggatccagaagcgggagcccctcttgtgggcctcgatggagccctgggtgaagctctctatatactgggccagcatctgcccctggtggctgttggctgcataggccttggctttctccagctgctccaccaccttctggaggatgggcgcgtagtccccccgggtcacctggaaagggcttccccggaattcatagctcttcagcttggaagtcacctcagagtccagggaaggctctgagccaagcacagaagccagccgcacctcgtagtagggcttcccttctccatcgacctctttgaagagccgggtgttgtaggcactgaggttctgtgagtccagaaagtcctgggccaatttggcatcttccatggtacaattcccagagaaataggtggtgattccctccttccccagtccgaggtgtcgaagccttggctccagaga

SEQ ID NO: 164879 - DNA, 327 bp, Homo Sapiens
gggttgggggtgagggacttaaaagtagacatgctacacctaatgtcaagaagcagcttggcttcctttgccagatatccttgtgacgacatggattgtagattcaatggtcctacacagggtatctaaaatgtcatgttgctgcatatgactaaagagtcctctggaatggccacaaactgagagataaagcaacctcagggtcctgggagggcaaagcttggccatcacagcttctcaagtcagctaagtcagacagaactgcagagatagaagatagaagggaactcagattccctcagcctagggtagaatccttgccagctt

SEQ ID NO: 164880 - DNA, 864 bp, Homo Sapiens
catcagtatgctgcccaggaggatcatcagtttattttctttgctgtctaaaaaacacaacaaagttctggaacaagccacacagtccttgagaggttcgctgagttctaatgatgttcctctaccagattatgcacaagacctaaatgtcattgaagaagtgattcgaatgatgttagagatcatcaactcctgcctgacaaattcccttcaccacaacccaaacttggtatacgccctgctttacaaacgcgatctctttgaacaatttcgaactcatccttcatttcaggatataatgcaaaatattgatctggtgatctccttctttagctcaaggttgctgcaagctggagctgagctgtcagtggaacgggtcctggaaatcattaagcaaggcgtcgttgcgctgcccaaagacagactgaagaaatttccagaattgaaattcaaatatgtggaagaggagcagcccgaggagttttttatcccctatgtctggtctcttgtctacaactcagcagtcggcctgtactggaatccacaggacatccagctgttcaccatggattccgactgagggcaggatgctctcccacccggacccctccagccaagcagcccttcaagttcttttatttctgggtaacagaagtagacagacaggttacttggtgtatcttctgttaaagaggattgcacgagtgtgttttcctcacacactttgatttggagaaatgggttgctagatgggcaaatagcataactcaagcgttagattagtattgccaaacagggcgaggacacaatacacaaacaataactaaacctggtacaaaccctgctaccaaagaacaacaaagg

SEQ ID NO: 164881 - DNA, 1404 bp, Homo Sapiens
cgaaagtccacggcaggcagtgctgctgcaatggcaggagccaaagccggggctgcagcggcctctgcagctgcctatgccgcatacgggtacaacgtgtctaaaggaatctccgccagcagtcctctgcagacatcccttgttcggcctgctggccttgctgactttggaccttcaagcgcctcttctcctttgagttcccctttgagcaagggaaataatgttcctgggaatcccaagaacctccacatgaccagcagcctagccccagactctctggtccggaaacagggcaaaggcaccaacccctctggaggacggtaaccatctgggccctccgacttccttcaaccaaaccagggctagagtcctgacctgccagtggtctttggatggcttgcccgtgcagcatcttgcatcctgagtcagaagtggaaatgtccagcaggggaaggacaggcaggtggatggtgtgagcacttttatcatctgtgtctcatcaggagcatctggggtgcctgtaggaggaaggccacagggcatggatcagccccactgcatctcaagtgaactgtatagccaagtcttaaacctctcacggggcaagcctgacacagaccccctttagatgctcaggcatactgtttccatcccgattccactcttcggctctgacacgtcccttgcaaagtctccgcaggtgctgtgaagagccttccatggtagagatttctcttaagagtgtgatttctcatagggctagtaagggagattgtatacctgttgtccacagtcttcaggcagctccccaggtctctgaaccccagagtgtcatcattggagagagcagtgactgcgagagatggtggaggccgctaagcatggtagaggctataggaagtctatccacaggcagttgtgttcccagcaattcctcccatcctgcatggttcacaccaagagaaccttcagatcctaccagcaaccgtagcaccttccacccaggggactcccagaagccagtaaagagaccaggagccacctcaatcagcaggacagcctcactgcccctcttgcagagtcccctttgcccatcctgaatgcacagtctccctgctcatgcccttcagtcccctgcttggctgtatgcactgtctatattgcactgagagaggaagggacaacaggagtgaggtgaagagggcggagagagggggcaggctcggcaccggccctcccagcccggccagcctgagcttgctgccctccagtagagacagaggggcagtgtttgcatgggaggtgtttctgcctgtccctgcctgatgtccctggtggagcaggtacctccgggcgggcaagcctctgatttgcacacctgaaaatcgcggaattgagtttcga

SEQ ID NO: 164882 - DNA, 805 bp, Homo Sapiens
  misc_feature (565)..(583): n is a, c, g, or t
  misc_feature (585)..(588): n is a, c, g, or t
  misc_feature (590)..(593): n is a, c, g, or t
  misc_feature (595)..(597): n is a, c, g, or t
  misc_feature (599)..(602): n is a, c, g, or t
  misc_feature (607)..(610): n is a, c, g, or t
  misc_feature (613)..(614): n is a, c, g, or t
  misc_feature (616)..(619): n is a, c, g, or t
  misc_feature (621)..(634): n is a, c, g, or t
gggccggcgctgcggcagtccagatcaaaaatggcggtagttggtgtgtcctcggtttctcggctgctgggtcggtcccgcccacagctggggcggcctatgtcgagtggcgcccatggcgaagagggctcagctcgcatgtggaagactctcaccttcttcgtcgcgctccccggggtggcagtcagcatgctgaatgtgtacctgaagtcgcaccacggagagcacgagagacccgagttcatcgcctacccccatctccgcatcaggaccaagccgtttccctggggagatggtaaccatactctattccataaccctcatgtgaatccacttccaactggctacgaagatgaataaagagaatctggaccactacccgggcaccagggaccacagcactggtttggaccgttactctgcacatggaccagaaaaagtatatgggaccttaagctcaccttctttacttgtatcaaatgatgactggtatactggtctcccatccctttgcttgtggcaggagatggcttaaataaataacttaaacttagattggtcatgnnnnnnnnnnnnnnnnnnncnnnntnnnntnnntnnnnttttnnnnctnntnnnntnnnnnnnnnnnnnntcctttgtcggccgccctccgccccctcaaaaaactttttcaaaaccatttcgttttgggggccggggcccccactaagggaaaagggaaaccgggtcgccataagctgtgttccctaaagagaaatcccgtgggcacagagaactaaggggcttgtgaaatctccccacc

SEQ ID NO: 164883 - DNA, 841 bp, Homo Sapiens
  misc_feature (193)..(235): n is a, c, g, or t
  misc_feature (818)..(818): n is a, c, g, or t
  misc_feature (823)..(823): n is a, c, g, or t
agaaaatatgctgtaaagagagaaaaatgtggtttggccttgctgctgttttgatttatggaatttgaaaaagataattattatgcctgcaatgtgtcatatactcgcacaacttaaataggtcatttttgtctgtggcatttttactgtttgtgaaagtatgaaacagatttgttaactgaactcttaattnnnnnnnnnnnnnnnnnnnnnnnnnnnnnnnnnnnnnnnnnnnatattacgtgaagtgatgaaatttagaatgacctctaacactcctgtaattgtcttttaaaatactgatatttttatttgttaataatactttgccctcagaaagattctgataccctgccttgacaacatgaaacttgaggctgctttggttcatgaatccaggtgttcccccggcagtcggcttcttcaatcgctccctggaggcaggtgggcactgcagaggatcactggaatccagatcgagcgcagttcatgcacaaggccccgttgatttaaaatattggatcttgctctgttagggtgtctaatccctttacacaagattgaagccaccaaactgagaccttgatacctttttttaactgcatctgaaattatgttaagagtctttaacccatttgcattatctgcagaagagaaactcatgtcatgtttattacctatatggttgttttaattacatttgaataattatatttttccaaccactgattacttttcagggaatttaattatttcccaggataaatttctttatttttatattgtaccatggaaaagttttaaaggtatgtttaagncccangtttatttaaaaggtttt

SEQ ID NO: 164884 - DNA, 701 bp, Homo Sapiens
tgcgcagcgtgcttcaagccatcaacttgcaggtgcagatctacaacacctgccagtgacccctgcccaagggcagtggctgacacacgggacacagagacagaccctttaccaggtacagcgagaggaaggcaggtgcagagcgggcactgagctctgcaggtgaaagggctcggcagttggatgctctcctggaggctctgaaattgaaacgggcaggaaatagtctggcagcctctacagcagaagaaacggcaggcagtgcccagggtcgtgcccaggaggctgagcagctgctacgcggtcctctgggtgatcagtaccagacggtgaaggccctagctgagcgcaaggcccaaggtgtgctggctgcacaggcaagggcagaacaactgcgggatgaggctcgggacctgttgcaagccgctcaggacaagctgcagcggctacaggaattggaaggcacctatgaggaaaatgagcgggcactggagagtaaggcagcccagttggacgggttggaggccaggatgcgcagcgtgcttcaagccatcaacttgcaggtgcagatctacaacacctgccagtgacccctgcccaaggcctaccccagttcctagcactgccccacatgcatgtctgcctatgcactgaagagctcttggcccggcagggcccccaataaaccagtgtgaaccccc

SEQ ID NO: 164885 - DNA, 692 bp, Homo Sapiens
gtaaggttggggtataggtcaggcctggcctttctttgtcatctgcttatagtctagtgctaagtatgccactaagtttcagatatatggaatactttatttttttaaaggtatataaactctgagttattgagaattaagtattcactgtatattaaggggaagcttttgccaagttgtggtcttcaaatttatgtttactcttcctattggcagaataggtgctatttaagagtaaaccaaaggataagcagagggagtccctataaccaaagatggacagcatagccctggatagccagataaaccactctttgtattaagaaatgtttctttcctagtggtgaggggtgggtaactgtgaaagagctttatatcttgtctattcatggtattatagctgtatattcccaggatgataagcttgattgaaatcctgtatttagtcatatataatttgcgctgcttcatttgtatcatgtgcaatctctagaccaaccctatttttaaactctggtacagcatcattttgtacatattcccagctgcagaactagtatcacttatctcagcaaaagagattgtttgcatggaaagattaatagcactgattagatttctaatattttgcatttttgaaatgtttgttttctacgtgattatatttaaaactttagtaaatactaaaatga

SEQ ID NO: 164886 - DNA, 1865 bp, Homo Sapiens
ccacaagcaggaggaggacatgaagcggaagcagcagcggaccacatacatcaagagagtgatcgcacacccatccttccataatatcaatttcaagcaagcagaaaagatgatggagaccatggaccagggtgatgtgattatccgaccaagcagcaagggcgagaaccacctgacagtgacctggaaagtcagtgatggcatctaccagcatgtggatgtgcgggaggagggcaaggaaaatgccttcagcctgggagccactctgtggatcaacagtgaggaattcgaagatttggatgagattgttgctcgctatgtccagcccatggcatcctttgcccgggaccttctgaatcacaagtattatcaggactgcagcggtggggaccgcaagaaattagaggagctgctcatcaaaactaagaaggagaagcccaccttcatcccttatttcatctgtgcctgcaaggaactgcccggcaagttcctactgggataccagccccggggtaaacccaggatagaatatgtaacggtgactccagagggattccggtaccggggccagatcttcccaaccgtgaatggactgtttagatggtttaaggatcactaccaggatcctgtaccaggcatcacccctagcagcagcagcaggacccggacacctgcctctatcaatgctaccccagccaacatcaaccttgcagatctgacacgggctgtgaatgccctgcctcagaacatgacttcacagatgttcagtgccattgctgcggtgacaggccaaggacagaaccctaatgccaccccagcccagtgggcctccagccagtacggctatggcggcagtggaggcggcagcagtgcttaccacgtattcccaacgccagcccagcagccagtggccacaccactaatgacccctagctactcctacacgaccccaagccagcccatcaccacccctcagtaccaccagctccaggccagcaccaccccacagtcggcccaggcccagccccagccctcttccagctcccggcaacggcagcagcagccaaagtccaacagccatgcagccatcgactggggaaaaatggcggagcagtggctgcaggaaaaggaggcagaacggcggaaacagaagcagcggctgacacctcggccctcccccagccccatgatcgaaagcacccccatgtccattgctggcgatgccaccccactcctggacgagatggatcggtagggggcctgcttcctcggactctggttacctctgaggctgggaaaggcctggctgcccactgcctccctccctgcccctccttttatgtccataaagtggcgtgaagtgagacgttctctttggtggtcaacccggatgggtgacaggctggatggccttgtgaacttgagctcagtgtatgctaggcaacaattctcccgctccagacccctcaccgaccacctgtcctgggaccaggctgggaggggagtgtggcagggaggaggaagaggaaggtgagaatgagtagaacagttttgtattctactccctacaagccattttgaacttctgccctcaccggactctgggctgtgactggggcaccaaactcagcacatgagtctcccctagctctcgtggggagagggatgctatttattcagtttggggcaggagggagaggagggaaagtatttctgaccctgatgccaacagccgggtggctgtccaagcaggattgcaggggacacagggaagcactgcccagcccctgcctggctgccctttcccccccgctgctgccaccgcttcctgcctgtcatttgaataaacagtgtttctattgaaa

SEQ ID NO: 164887 - DNA, 857 bp, Homo Sapiens
gggatggatgcaggtcagtttgaattgctatacttaactaaatgcctaacatgtactatagcttcacacttagtgtgcttttataatctttatggattttgccgtgttcaaggttttcagagttgagcatatgatacagtattccatcaacaaaataaggctactgaatgtgctatctgcagaagagctcatttaataggaactgacctaaaagttccatcatgaagcacacgtggcataaaagtcaaccggggggcagaactgtgcttggaaaataggcattggaatactttaagcaaaacacatataaatggttattcatatgaggaaggtttcctagtagtaaatctaaaaaagtctaggtgaatcctcattttcaaaactgcatattgaaaacatgaaaactacttattcaagtaatttcttcaaaaaagtttgcatgttctgactgtggaattagtctactgggcaattaaaggcaattttaaccaccttttaaaaaatttttcatagaaaggagagatgttatgtgtttctcaaataaacggcattatgtaagtccaataaaaaaatctaacagaattgaatgaagacctacaaatgcttatgccaagcaggaatctgcctgccacctgtggtctcacattaattcaaaataggtgctgaattcaggattctgaaactaagtttctattacttgagctctagcaaaatgtaaggttcggtagcctcaactagtgtaatgtcttccctgtccaaatccagaatgattatactgataacctccatgctggaaatgctgttcaaattcgcacgcgtgggtcgacgatatcccgggaattccggaccagtaccag

SEQ ID NO: 164888 - DNA, 679 bp, Homo Sapiens
  misc_feature (521)..(521): n is a, c, g, or t
  misc_feature (574)..(574): n is a, c, g, or t
  misc_feature (588)..(588): n is a, c, g, or t
  misc_feature (615)..(615): n is a, c, g, or t
  misc_feature (625)..(625): n is a, c, g, or t
tctgaatcctttctgccttcatcttcttcctcttcatcatcctctgcttcatactcatcctcctccccatcgtggtagctggtatcaccatacttatcagatgaaaggttcttccaataagcatcatacccagaagctccatctccctcttcacctccagtctgcctgccaaatttcagggagcgtgttgacatgctaaggtccttagtctcctgagtttcatgcccacatttaggacaaggaggctgttttcctttttcttgcttaaacactttgctccttgtatgatcatcacagaaacaagccttacaacggagacatgagtgctgaccaagccgattgcatgaaacacatttaaatgtttctgcctctaaaacctggcagctggcttgatgctcaaattgatcatcttcacagagaaagttatggcaaaaagaacaactgaatattctgcctccatggtcccacacgcctcgttcacattcaacacactcagcatcggtaagagggctaggagcctnctaccctcttaccatctataaatttagaatatgaatatcaactttgaaagtgntgctgtgaaaattnaataaaaccatatatggcggaataggngcccaaaatnggttaatcatgaaaaattaccatcatcaagaagtaaaattattacctggtggtg

SEQ ID NO: 164889 - DNA, 966 bp, Homo Sapiens
gggaaggcgctgctgtcgtaaaaggacgtccggtccgtctcctagtgtccggaatcggctgtcagcctccctggctgttagtaccttctttcccggagtcctggtccacgagttggatttactgctgtcgcgggtgggcctcacgccattccctgtccctcggccccctgagtgagtccggtctcccggcgaaagtgagcgaggtttgcccggagcgcgcacgaggggaaaatgcctaaaaaaaagactggtgcgaggaagaaggctgagaaaccgccgagaacgtgaaaaacaactaagagcatcaagaagcactatagatttagctaaacatccatgtaatgcctcaatggaatgtgacaagtgtcagaggcggcagaagaatagagcattttgctacttttgtaattctgtacagaagttaccaatttgtgcacagtgtgggaaaacaaagtgcatgatgaagtcttcagactgtgtcataaagcatgctggtgtatacagtactggccttgcaatggtgggtgcaatatgtgacttctgtgaagcttgggtttgccatgggaaggaaatgtctcagtacacatgcttgtgcctgccctcttaccgatgctgagtgtgttgaatgtgaacgaggcgtgtgggaccatggaggcagaatattcagttgttctttttgccataactttctctgtgaagatgatcaatttgagcatcaagccagctgccaggttttagaggcagaaacattttaacatgtgtttcatgcaatcggcttggtcagcactcatgtctccgtcgtaaggcttgtttctgtgatgatcatacaaggagcaaagtgtctaagcaagaaaaaggaaaacagcctccttgtcctaaatgtgggcatgaaactcaggagactaaggaccttagcatgtcaacacgctccctgaacattggcaggcagactggaggtgaagaggg

SEQ ID NO: 164890 - DNA, 542 bp, Homo Sapiens
ttgggtcatgccctcaaagcctcttcacctgtccaatgtccctgagggactgctttttgcaggtagggccccgaggtgggcccctggggtgggacccaagagcgaaagggaatctatcgcatcatttctgtcgccttcaccagcaccttgggtccatcactgagtctggggggttctactaggcaagtgtctctggcctcacccagacaccatggccaactctagccatcactccaggcgcaagtgactgggttaccttcaggtgtgaccacacctgtcaccttttgcaggtcggtgccaacagttctccaaacaggagctcaagccaccgtcccacttgccctgtgaagaaggaactgtcatcatcacattttacagaccaggtaactgaggctcagagagggtaagtgactggcacagctggtaacaacagagtcagggtttgagcccagtctgtccagttccaaatctcccctttagtagctttctggacatcaagtggtcatcctgcaaccacaggtagccaaagagcctctctaaag

SEQ ID NO: 164891 - DNA, 695 bp, Homo Sapiens
gatcctagaggtataccccaggctgcagctggcatcaagctgtgaacattggttatttctttctgctttacttaagtaacgatgtaagaaacaatagatttccattctttcccagcacatgacactgcctacatctttcgttatgaaaaaatattctcccaacttctccaagtgtccccgtctgcaaagtgaaagtattaattaataactgttctaagagactcacaacactgctggaaaaatcgaattagaaaatgcacagaactagctgaggtaatggcacaattctaaagacagggaaaggttcaagtttccttcgtctaaatttctggcttgagcaacactgaggagaatggttacctttcctgtgtgaaaggaaaataaatcttgcgaccccaaaatcactaagccaaagggaaaagtcaagctgggaactgcttagtgcaaacctgcctcccattctagtccttaaaaaagtagctaccaagatttttttaaaaagctacatacctccctcacattttgtccacacggaaattcctcatggacaaagaacagacagaactcaacgtcatccctctggtcactgagattaatttgtatctgattgcttcctttggaaaggctaatcagaaactcaaaagaatgcaactgtttgttctatctatctatgacccagagcccatccagctatg

SEQ ID NO: 164892 - DNA, 513 bp, Homo Sapiens
  misc_feature (45)..(61): n is a, c, g, or t
ctcggacctgcatgcttgggcacaagagcagaattctcgagtctnnnnnnnnnnnnnnnnngataatacatggacaaatattaaaacagtattataattttggtctgtaactctactttttttcctacaggatttaaaatacacattcattaaaaattacaaatctatgttaatggccacacagtatataacaacgtagtttgtgaatgatgtcagtaacatagagggggtgaagctgtaaagaagtagcatttttttatgtgactgaagttgttatcaatgtaagatagaatgtcgtaattctaagatgttatttgtaattcctatggaaacaaacaaaaaatccgtagaatctgtgaacaggcatatgcaaacctacccccaaaagctggggaagctcagaggccaaagaaagaggctgacaaacccagtttctcagagagaaatattttataggaacttaaaaacagaagcaatgtcttgggtggctgtccacacctgccatccagaaag

SEQ ID NO: 164893 - DNA, 457 bp, Homo Sapiens
aacccgcagcggagagacgtggtgacatgtgaccgagggctgcccccagtggtcttcctccttatccggctactcactcacttggctctgcttctgggagcgtcccagagttcccaggctctgataaacatcattaagcctccagtgagggatccaaaaggctttctgcagcagcacatcctgaaggacctggagcagttggccaagatgctgggacacagtgccgacgagaccatcggcgtggtccacctcgtcctgcgcaggcttctccaagagcagcaccagctctctagcagaaggcttttaaattttgacacagaattgtcaactaaagaaatgaggaacaactgggaaaaggaaatcgcagctgtgatttctcctgaactggagcatctagataaaacccttcccaccatgaataatctcatcagccaagataagcgtatcagctctaacc

SEQ ID NO: 164894 - DNA, 661 bp, Homo Sapiens
caggcatcaagcttggagaacagggaatggttttcctctaaagtagatcttgtcaaactcacgggtcttggagaaagaagtgtcccgtagaccctaccaccagtcagctattaccagtggctacttttcccacagtgcctccaatgccaccctgtctgacatggtggtcccttctagtgacagctcagaccagctggccattcagacgaaggatgcagactccaccgagcactccacaccatcgcttgtgcatgatttcaggccgtcctcaaacaaagagttgacagaagtcgaaaaaggcttggtaaaggacaagataattgtggtgccactcaaggaaaacagtgccttagccaaagggagcccatcatcccagagcatccctgagaaaaactccaaatcactgtgcaggactggctcatgttcagaactagatgcctgccccttcaagattagccagttagcgaggggattctgccccagggaggtgacggtagaacacaccaccaacatccttgaagaccattctttcacagaatttatgggagtgtcagaaggaaaagattttgatggtttgacagattcttctgctggagagctttccagtaggaggagtctaccacataatacagcggcaagactgtctccgatggctctaacc

SEQ ID NO: 164895 - DNA, 453 bp, Homo Sapiens
ccctgaattcctgccaagtcgactcttgaggagtcccccaagttggggtcctagattgcatgtcatcctgcttaccaggcgtcacaaggccatgctgggggcatgaggaggttggggcagcaggagagtggggagaaactaggagagtgcctgagtattttagaaagaaccaagttatgctgggtcagctgtgccgagctgccccagccatgagaagagaagcctgcccttgtctggcaggtggctatggccggcccagagccttcctgcccagctcctgcagccctgctgcctgggatcaggctgggagatgggccttcctgaccgccagccttcctctccccgagcacacgcacatgtagattcggggggaagctgcctgctcttccttagaggagccggggcagctatctgctggtccctttctgaacaactgttgatgtgtgagctgtg

SEQ ID NO: 164896 - DNA, 939 bp, Homo Sapiens
tggtctgcctgtgtcacgagaggggcacggtgctgccccagggcccctgctgctgagtcccagcagcctcttctctgccctgcacagagaagtgattgaaaagaagccagaaaagtttaaagtccagtgtttgacagacatcaaaaacctgtttttccccaacacagaacccttttatgctgctttcggaaaccgaccagctgatgtgtattcatacaagcaagtaggagtgtctttgaatagaatatttaccgtcaaccctaaaggagagctggtacaggaacatgcaaagaccaacatctcttcgtatgtgagactctgtgaagtagtcgaccacgttttcccgttgctgaaaagaagccattcttcagactttccctgttcggataccttcagtaacttcaccttttggagagagccactgccaccttttgaaaaccaggacattcattctgcctcagcgtaaaatgtcccaagcagcctcttgccagcagtgcagagcctggttgtcacccattaaaggataggtctccccggagtgcacagctccacctgggagcctggcgcgtcatcattggcctgacagcagagagaattgagaagcatttctcccctgccccaccccggggctgacatttctaagcaagataggaagggagcactttctaggctaggagttgggtgcatttgtaccgtgaaaagcattcctcagttgtggcttaatgccagttacgacgctgcctttccggcctgctccagcaagtagctactggttcacgtgcagtttggggctgtgaaacctacgcagaaggcggctgtctgagggctgtccccgcctaggacagggtcaatcgaggaatgccagatgtgcacggtttttggcaaagtagggggcacatttccattatagcaatgttagtgccaccaccttctgaacac

SEQ ID NO: 164897 - DNA, 1008 bp, Homo Sapiens
  misc_feature (40)..(40): n is a, c, g, or t
catctgggcaaaaaaaaggggaaaccagggtaaggagagnagtgacattttaaacacattactaaaaatgtttaagcttttatttacacatccccttctctcagtttcccaggttatatgaacattacagcaatagaaaggggttatcatcacagcatccccttgcaaattccagtttacaggtaacttggtcaggggaaaaatatgggtcaacgaagtaagatctcagctctcccataagctattgctctcttcttctctttcccccttctcttaatgttagctgcctgttacagagagggatcatcaagactgtgtggacatgctagctgaattgacagggtgggttccagtgtcctgtgaagaaccagcaaggatgctttttataattccaaccattggcttcacatcactgaggtaacaagacttaatgttaagggtaaagacaccacgccaccctagtcagtgacatgtactccactttccaggaagacctgggccaaatgaccaagctttgcaaaagaaacctgggaagagcgttggaaaaagcagactctgagttggcttgagtctcctcgtgcatagaagcattcactcatccatgcagagggcaacaaggcaggacactcagaaagcataagatcaaggtactgctcttatctgcacctttcattcaagctcccctcaagtgctccaaaagaacagagctttgggtattgcttcattaagaacacagtaactgcagtttaaaagccattgcattctttagggtcagtttattataacttatcctaccagaaagaatcacagtttaaggccatttatcatgtgcactatgtagtaaacaaaaccttgtccccagctccaccaagccactcccaagggtggactgtgaatgtgacacttccagactcaccagagattagaaaaaacatttctattagggtcttaacctagcccctttggtttcctccctagaaaagagctgcttagaaaacagatgtcact

SEQ ID NO: 164898 - DNA, 1146 bp, Homo Sapiens
acagaggacatggacatgaccatgagcatagccatggaggctatggggagtctggggctccaggcatcaagcaggacctggatgctgtcactacctgggcttatgcactgggggccacagtgctgatctcagcagctccattttttgtcctcttccttatccccgtggagtcgaactctccccggcatcgctctctacttcagatcttgctcagttttgcttccggtgggctcctgggagatgctttcctgcacctcattcctcatgctcttgaacctcattctcaccacactctggagcaacccggacatggacactcccacagtggccagggccccattctgtctgtgggactgtgggttctcagtggaattgttgcctttcttgtcgtggagaaatttgtgagacatgtgaaaggaggacatggtcacagtcatggacatggacacgctcacagtcatacacgtggaagtcatggacatggaagacaagagcgttctaccaaggagaagcagagctcagaggaagaagaaaaggaaacaagaggggttcagaagaggcgaggagggagcacagtacccaaagatgggccagtgagacctcagaacgctgaagaagaaaaaagaggcttagacctgcgtgtgtcggggtacctgaatctggctgctgacttggcacacaacttcactgatggtctggccattggggcttcctttacgagggggccggggactagggatcctgaccacaatgactgtcctgctacatgaagtgccccacgaggtcggagactttgccatcttggtccagtctggctgcagcaaaaagcaggcgatgcgtctgcaactactgacagcagtaggggcactggcaggcacagcctgtgcccttctcactgaaggaggagcagtgggcagtgaaattgcaggtggtgcaggtcctggctgggtcctgccatttactgcaggtggctttatctacgtagcaacagtgtctgtgttgcccgagctgctgagggaggcatcaccattgcaatcacttctggaggtgctggggctgctggggggagttatcatgatggtgctgattgccccaccttgagtgaggggtggataaactacccctggcccaaacctctacccctaa

SEQ ID NO: 164899 - DNA, 247 bp, Homo Sapiens
  misc_feature (1)..(1): n is a, c, g, or t
natgagccaccatgcctggccaggacatgtgttcttaaggacatgctaagcaggagttaaagcagcccaagagataaggcctcttaaagtgactggcaatgtgtattgctcaagattcaaaggtacttgaattggccatagacaagtctgtaatgaagtgttatcgttttccctcatctgagtctgaattaggtaaaatgccttcccatcagccagtgctcttgagggtattcaagttctaaatttg

SEQ ID NO: 164900 - DNA, 685 bp, Homo Sapiens
  misc_feature (76)..(76): n is a, c, g, or t
ggcatctgcggagccaaaacccagccatcggggaagggtcagggcttctgtggaacttggaacgtgccaggaccancctgcaaaagccagggtgcgttgatcattctcagatcattgattggcctccacttgggtatgtgaattattcatgtcccagaagaccaaaaagtgctctggttctgagatgagtattttattcgtgttctgtttccgaaacacttagcaaagaaggtcacagtgatgtggagtcgccgcacccatctttgaagatagccagtgtccctggatgaggtgatgatttcccgtcccaaggactctgtgaagtttagagtacagtttgttggggtccaaaagacaccatctctaccccacccaaataaaaatgcactcatctctgtagaacatctgctgtcaaaggccagcctgtcgttagggcatggcttatgcttgacaaaccagtaacaactgtgggatggcgatggtgggatgtgtcgcaagcaattcactagacaatcttcacatgaatgtcggtagccagggtctctcccgagggatggctttagtcttgatgaatgtgaaccatgtcggaattgttaggtagaaacctgggctgggaggcctcggaccccaggctccatccctggcttccccagcctgcggccgcaagcaaaaccagcttgatgct

SEQ ID NO: 164901 - DNA, 1358 bp, Homo Sapiens
ggtggttcacacgctgtgtcccgattctataacaatagctgaggatgtatcaggaatgccagctctgtgctctccaatttcccagggagggggtggttttgactatcgactagccatggcaattccagataagtggattcagctacttaaagagtttaaagatgaagactggaacatgggcgatatagtatacacgctcacaaacaggcgctaccttgaaaagtgcattgcttatgcagagagccatgatcaggcattggttggggataagtcgctggcattttggttgatggatgccgaaatgtatacaaacatgagtgtcctgactccttttactccagttattgatcgtggaatacagcttcataaaatgattcgactcattacgcatgggcttggtggagaaggctatctcaatttcatgggtaatgaatttgggcatcctgaatggttagacttcccaagaaaaggaaataatgagagttaccattatgccaggcggcagtttcatttaactgacgacgaccttcttcgctacaagttcctaaataattttgacagggatatgaatagattggaagaaagatatggttggcttgcagctccacaggcctacgtgagtgaaaaacatgaaggcaataagatcattgcttttgaaagagcaggtcttcttttcattttcaacttccatccaagcaagagctacactgactaccgagttggaacagcattgccagggaaattcaaaattgtgctagattcagatgcagcggaatatggagggcatcagagactggaccacagcactgactttttttctgaggcttttgaacataatgggcgtccctattctcttttggtgtacattccaagcagagtggccctcatccttcagaatgtggatctgccgaattgaagaggcctgatttcagctccaccagatgcagatttgtgtttcgttttcttgttatcactgtcacacagcttataacatgtatgcttttcagaatacagttgtctagccaagccatcaagtgtctgaaattcaatatgggtttatgcaaatacagcaaacttttatttaagtagataggagaatatgtttaaaatcattaggaatcctagaccatattttcaagtcatcttagcagctaggattctcaaaatggaagtgttatcatataatatgttaaaaacatttggctttcctggctaattattggatccttttaaattccaaattgaatcattggtcatgtatgattatctcctgttaaatgttcacagtattaaagaaggatattcggtggctctattggtctgaaatcttagggccaaattatgaggtaccaggatcc

SEQ ID NO: 164902 - DNA, 743 bp, Homo Sapiens
caggcatcaagcttggggcatactgacaaacacttcattggttagaagatgaataattgcaaaaatcaaataaaattgaggctggcataggaagtacagattaaatacaggttaaatagctaccagaaacacagaagaggtggttaataaaaactgagattgcttcagaggacacaggagggttgatgagacagtctattttccttccaccatcttccatgagagtcaggaaaagggttctgtgagcacccaacctggagcggtcacctgtctcttccatacacaggaggatgctaagacccagttagctttaaatggtttttagaaagacttacctagtcaaaagtggttaatttgaacttttcaaacttgcaaaagcatatacatttgatatcatcatctgagaagcaattcttagaaaaaaatgtttgcttcaatgtctaaagaaatccagtgaaagttttagaaacattgccagctagacgtctccgagttagagttgattgatatactggattgggatggagaggatgagaactgaaaaagaactgctccagcctctgcctcagaagaggaaactcagcttggagatgacagaattgggtagcggagtagatgctagagcccatgacagatagaaaactacccccatttaaaaaacacactcataactctatctcttgggttttggaaacgaagtttattgaattatgaccgtcatataagacattcatactacccat

SEQ ID NO: 164903 - DNA, 427 bp, Homo Sapiens
ctgggcacacaggcattgcttccagtgttctcccccttgtagaaaatcttcatgtccatgagccccgtgagctggtttgccagaatctccatctgggacccactgtatttggaagctcggaatatgctgagctgtgaccagtcatcccagtagatttcattcttaaagacagcaatggcataggggtgcgggaggttgtccagaatgacagagcgctgctggccactgaacgtgatccgctctatgcactccaggtaggcatccgtccagtaaatccactggtcgtccacagagatgccattgggccacttcacatcctcagacaccaggtgataggcagcagaaccatccatattgctccgataaatcccaggcttcaggtctccccagtctgtccagaacatcaccccctcttggggcacgagga

SEQ ID NO: 164904 - DNA, 437 bp, Homo Sapiens
  misc_feature (23)..(23): n is a, c, g, or t
aacgggtcaaaagatgtgttcgnggcaatccccgggtaacaggtgtgtatgtaaagttaaaaataggctttttaggaactcactctttagatatttacatccagcttctcatgttaaatatttgtccttaaagggtttgagatgtacatctttcatttcgtatttctcataggctatgccatgtgcggaattcaagttaccaatgtaacactgccagcgggcccagcaatctccatgtgtacttattacagtcttatttaaccaggggtcctaaccactaacattgtgactttgctttgagacctttcctctcctgggtactgaggtgctatgaagccaactgacaaagatgcatcacgtgtcttaggctgatgccactacccgatttgtttatttgcaatttgagccatttaaagaccaataaaaatcctttttta

SEQ ID NO: 164905 - DNA, 541 bp, Homo Sapiens
  misc_feature (526)..(526): n is a, c, g, or t
tactgattctgatagtcgtctctagaggtccccatgcgagtgggcggctcactgctggggcagatccccttcctgcagaactgcgaggacgaagacagcgacgaggacgatgagctggacagcgtgcagcacaacgaagcagcgtgtgaagctcccatccaaggctctggtgcccgaaatggaagacgaggatgaggaagacgactctgaggatgctatcaatgagtttgatttcctgggctcaggagaggatggggaaggggctccagaccctcggcggtgcactgtggatgggagcccccatgagctggaaagccgtcgggtcaaactccaaggcattctggctgacctgcgggatgtggatgggctgcccccaaaagtgactggcccgcctcctggcacaccccagccccggccacatgaagacgtcttcatcatggacactatcgggggcggggaggtgagcctgggggacttggcagatctcaccgtcaccaacgacaacgacctctggccgccgtcaaangaccgagctgaattg

SEQ ID NO: 164906 - DNA, 687 bp, Homo Sapiens
tgacagtaaaatgaacacattgcagcaaatctacagtggtgatgaagattagtcagcagctggtaaagtcattggctcagtgactcctggttcactgtggcaatctaaacatttaaataattggctattctacttgtaaacagaaaatcacataagccaaaaggagataacaattatgtctatgtagtgtgacgagaatttcaatagatggcaatttgcaaatatggcatcaaacacctccggcatttgatttgtattggctatatgtctttgtttttgtacaaacaaagtaaaagtactgtttggggtcttgggcattatagagcttagctaggatgagatatcacagtataagcaacaaaacgtcaggacacgtaagcttcatctcctcactctgctgcgggacatacccaccatatgaactttcagggcccctctcacccttctggtcttccccattgaaggctcataggtttgttaatgcaatcctcacacaacttgtgatctccttaagtacccccatcttatcataatacaaagaaggcacaattgaatggacaaaaatcactcacaagcctatgacgcattcaggaaaaaagaaaaactaagttgtaatctactctctgaaaaaatgcaaatgaagtcctgaagtgctcatggacttctacacttgatcttacccaaaag

SEQ ID NO: 164907 - DNA, 872 bp, Homo Sapiens
aaatactttccgggattctttaaaaaatggggggaaaaattgtttccattatttaaattccaggccgggtgtgggaatcctataccaaatggttggtgccaggtctaataggaaagtctcaagggtgccagaattggttcagatttttccattttcctgttttccattttaacactgacagtcaagttgcgtaaagtgttgaacaaatactgacatgtaaagggagtttcactctatgtctttgtgaaggaggaccttaaagagattttttttctgtattatacgttgatacagtacactgccaggtgaaacaagagccttaataaagcatgcatcgcccacacccctgtatgagacccccacagaagggatcgcttgcgtaaggcaccattatgaaggtcaacagtgcattaacagctagaaaaccagaaattagtcctcaaggcataaataagagaaacatagctgcatgagaaaacagtttctaagcgttagtggttttatccacccaactgagaaaaattttaggttcttaagtctaatgaaacattagaccagcaattcccagccccagctttgtgacactcaatacgtgtccaatttcttctaagggcatcacagaattctccaaaaagttaattcaaattcagaatcatttaaaaataatcctgtgttgcacaatgcctttctggaaggggagtgttacaaacttggaggggaaaaaaaattgtatattgccaggcccggatggctagggggtcactgtattagacagattggatcttagctgctcattaactggaatcagtattgcagtcctgacttaaaaatggaaaagcatatagtcccacagctgcatgcctggtaccgca

SEQ ID NO: 164908 - DNA, 1028 bp, Homo Sapiens
gtaccggccggaattcgggatatcgtcgacccacgcgtccgagaaataggacacgtattgagtgtcacaaagctggggctgggaattgctggtctaatgtttcattagacttaagaacctaaaatttttctcagttgggtggataaaaccactaacgcttagaaactgttttctcatgcagctatgtttctcttatttatgccttgaggactaatttctggttttctagctgttaatgcactgttgaccttcataatggtgccttacgcaagcgatcccttctgtgggggtctcatacaggggtgtgggcgatgcatgctttattaaggctcttgtttcacctggcagtgtactgtatcaacgtataatacagaaaaaaaatctctttaaggtcctccttcacaaagaacatagagtgaaactccctttacatgtcagtatttgttcaacactttaggcagacttgactgtcagtgttaaaatggaaaacaggaaaatggaaaaatctgaccaattctgccaccttgagactttcatatagaccttgcacaacaatgtatagatcacacaccggctgtatttaatatgtaaacattttcacacatattaaagatacagaagtattaaaaaaacccccaatgttaatgtattgcttaaaaaggcacaagtttcacatatctgtcctagctatctgttggtaatacagaaagttactactttttaaacaaaggtgcggaatcccgcgtcagtatattgcgcgcaccggaagtggcaggcgcgggaaacaacctaatttccagccatgcacaaacaaacatggcaacaaaagcaaaggtggtacacaaccagcgcgcacgaacatagcgcagccatcgcacgaacagcaacaacgagtagagaaccactccaacaagccgagaagcccacgcgccacaccccaacgcaagacaaacaacgacggcgacaacgaacgacccaaggagcagcacaacaccgaccagacagacacacgacgcccaacgacagga

SEQ ID NO: 164909 - DNA, 881 bp, Homo Sapiens
  misc_feature (815)..(815): n is a, c, g, or t
atgtgcggaagctttactggttaatgaaaagtagcctgaatggagataacttccgaacacagaagctgtcttttatcattagaacagtgggtcgacattttcctggacacttactggcatgggattttgtcaaagagaactggaataagcttgtacagaagttccctctggggtcctataccatacaaaatattgttgctggatcaacttacctgttttcaacaaagacacatttatctgaggttcaggcattctttgaaaatcagtcagaggcaaccttccggcttcgttgtgtccaggaggctttggaagtcattcagttgaatatccagtggatggagaagaacctcaaaagtctcacatggtggctgtagcatgcacaaccgcacctcattttgttgcccattcagagagcttgtaagcttgggctctgccgcttttgcaaaagccaaggtaaagccaggatcgctgccaagttgtttgcactctttggagttctagttagctcagggcctgactgtatttttcatccatcttttctgaagtgtctttgggcagtatgtagttatttattacaaaattatattcacgtaaatgccaaccatctacaaaaacaatgagtaatttttctactttgaagatacacagatggggacaaaaaccctgttttggaattctgttctattcctcagtatccagaaagttactgacacagtaaaacaaggaaagttctaccctaagagccgccatcacttcagggccgctggtttgtcagccatctgttgcttcttaatgatagatggcattggaaaggnggtacaaagttagctctggaagaatatgggtaacgaagacaataaagcatgcactggtaagaactg

SEQ ID NO: 164910 - DNA, 705 bp, Homo Sapiens
  misc_feature (461)..(490): n is a, c, g, or t
accagaaaaaaaccgccatttacacaacaaactgaacctgaaaaaggaacggaacatggtcttccgccgtgaacaaaatcagcaagtgaatccgttttcctttcccgggctgttcgaaaaagattcggctagagaaaagggggcactgtgggcagcccgtaggggatggcctggagctgtggggcccacggctgagccctccctgccttttaactgcaggatgtaaactctatggaaatgtatagaacttcagtttctcccaaccctccacaacctcaactcttgagaccaccaaataactgttaggaaacgcagaagagagtccttcaaatgagctacacccaggttcagagcgcagaaccaacagtgtgactggggcatggaggtaaattctgacacgattggaggggaatttcacaaaacaaaattccatgcaagtcaacacgcacacgcgcgcgtgnnnnnnnnnnnnnnnnnnnnnnnnnnnnnnaagtcaacattcaacgtgaagagttcccttttctttctcgaaggttggtttttgcaagccctgacaagcaaagagtcccttgcggtggccaggggggccaagacctcagaatgaaaagcccacagctgctctgtcctcacccgctctggaggccagccctggtacaggcatgggggtgggggtcctaaaacccttcgtcagcgttcctagagcct

SEQ ID NO: 164911 - DNA, 349 bp, Homo Sapiens
ccctgagagcagatcttcagagaaaaaaaacttgagtgcagtagtttatttggcgtttggctccaggatgcaggagtgggaaagatggtagagagacagaagaaaaatcaatagaaaggtattacggaggttggatatataatgcttcccagaattgtctgactgaacaggaggctgaaatatttatccgctggctcctgtttccaattgattgagggatgcccccaaggaagttaacttcactgcaattctgagctgtaattgactttaataagctccaacagcactgaaagacgtttggattattttcagtttgggataatactactatgacattcctgcaatgtat

SEQ ID NO: 164912 - DNA, 1118 bp, Homo Sapiens
  misc_feature (115)..(126): n is a, c, g, or t
tcaccagcaacaacaacaaaaaaaatcctcatcaaatcctcacctaagctttcagtgtatccagatccacatcttcactcaagccaggagagggaaagaggaaaggggggcaggnnnnnnnnnnnncccaacaacttagcggaaacttctcagagaatgctccaaaactcagcggtgcttctggtgctggtgatcagtgcttctgcaacccatgaggcggagcagaatgactctgtgagccccaggaaatcccgagtggcggctcaaaactcagctgaagtggttcgttgcctcaacagtgctctacaggtcggctgcggggcttttgcatgcctggaaaactccacctgtgacacaggatgggatgtatgacatctgtaaatccttcttgtacagcgctgctaaatttgacactcagggaaaagcattcgtcaaagagagcttaaaatgcatcgccaacggggtcacctccaaggtcttcctcgccattcggaggtgctccactttccaaaggatgattgctgaggtgcaggaagagtgctacagcaagctgaatgtgtgcagcatcgccaagcggaaccctgaagccatcactgaggtcgtccagctgcccaatcacttctccaacagatactataacagacttgtccgaagcctgctggaatgtgatgaagacacagtcagcacaatcagagacagcctgatggagaaaattgggcctaacatggccagcctcttccacatcctgcagacagaccactgtgcccaaacacacccacgagctgacttcaacaggagacgcaccaatgagccgcagaagctgaaagtcctcctcaggaacctccgaggtgaggaggactctccctcccacatcaaacgcacatcccatgagagtgcataaccagggagaggttattcacaacctcaccaaactagtatcattttaggggtgttgacacaccagttttgagtgtactgtgcctggtttgatttttttaaagtagttcctattttctatcccccttaaagaaaattgcatgaaactaggcttctgtaatcaatatcccaacattctgcaatggcagcattcccaccaacaaaatccatgtgaccattct

SEQ ID NO: 164913 - DNA, 395 bp, Homo Sapiens
  misc_feature (36)..(36): n is a, c, g, or t
ggttgaaaagtcaaacccgtggggtgtggtttgggncaacaatgggtcctgtcctgccagaatgtgggaaaaaggcctgcccatgttaggcccaaatttcctcccatcaggctgtctctgattgtgcctgactgtgtccttcatcacattcccagcaggcttcggacaagtctgttatagtatctgttggagaagtgattgggcagctggacgacctcagtgatggcttcagggttccgcttggcgatgctgcacacattcagcttgctgtagcactcttcctgcacctcagcaatcatcctttggaaagtggagcacctccgaatggcgaggaagaccttggaggtgaccccgttggcgatgcattttaagctctctttgacgaatgcttttcc

SEQ ID NO: 164914 - DNA, 456 bp, Homo Sapiens
tctgaggatcccggtcgctcggacgaggaacttcattgtggacagagctgtgtgactggctacgtgttaatgaaagctattttaagccatcccctacgtgtagctccattggacttcacaagacatctttaaatgcttatgtaaagagcattgttcaagagtatgttaagtcatctgcttgggaaacaggagaaaactgctttatgcctgattggtttgaagccaagcttgtttctctgatggtcttgctggctgtggatgtggaaggaatgaagactcagtatagcggaaagcagagaacagagaatgtattgcggatattcttagaccctcttctggatgtgcttatgaagtttagtaccaatgcctacatgcccttgctgaagactgacagatgcctccagctgctgttgaagctgttgaacacatgcaggttgaaaggttcctgtgcccaag

SEQ ID NO: 164915 - DNA, 400 bp, Homo Sapiens
aaggacttggggggcctgatatggcttggaatggggaatgggttggcttagcctcagacggagaggaagtgccactccctgagatgggctgcagtgctcacgggcctgggagaactggctagagcagcagatgagccaggaaagacggagagcagtgggggcctggctgcccaggccacacaccaggtcagtcttttcagaactcacgggcccggctgcctctcagcctctcaagggctgtctactgcaccccccactccaaactcttggcatgtgactctgcttgtcttcacttggcacactcactgaacagacccaatgcaagactcagtggacctgcatctctggcccctcctgggctcccctaaccccaggttcttgatctcagcaccctcccaag

SEQ ID NO: 164916 - DNA, 422 bp, Homo Sapiens
tgcaagcttggaaatgtgtaatagtttactgttgtaattcgtttataccatgtgttggacaactcagctaatatgttaattgatttatacaattcctttcaatttaatctaaaaataagcagaccaaaattaaataagaaagttacataagattccatttgagcatacataaggccatgatactttaatgtgaaccaccatttcttggaagaaagaagacatccaaatgtccgattcagagagaaagttcctggccagtcatccagtagactctctccactcttcaatgggaaggtaatgctaatatttttaaaaatctctacaaagctcacatacaacaagacagtacatcctagatttgtgactgatatgagcatttaaggctgtcattttcaagtataaagtctagtgttccattacca

SEQ ID NO: 164917 - DNA, 681 bp, Homo Sapiens
ccctggctttacggttgtgtagggatcagtggaggtttgatcagctggagctggtcacagttgccttattttcatgggttctgaacactgaaaatgcttatggtgccaacacagggaaagagaaagtgtcccagtctctccctgaacctgacactacctgtgtggtgtctgagattagtggtgtcttgagtgttcacttagatgttttcccagttcttggcgtggagaacctgtggatacaccaagctcagagtcctgaataccagccaaggattaatagaagtgttcttatttctggcaaccaatggaaacaggtgtagaaagctattttaggaattcataccattttgtgcaaatgctttgagatgtgactgagctgggacctatgtacgacaggcatctattctttctcataggaacaaagaaagcccgggttccaagattcagggccctgttaatgtgtttgccttaaaagctggggccatttggttttggaaattcctggggaatgcttggaattgggaaaaaaggttggtctaaattcccaaaattttccataggattctattcgggttgccccctggaagaaaaacagactcctgggaattaatgaggaggcagttagcacggagggaagtttaccagcataattcagatgagttgatggaccaggtgaatgcc

SEQ ID NO: 164918 - DNA, 424 bp, Homo Sapiens
ggcccggcttcagctggaaatgagtccccgtagcaagaataagacaagatgtgtctaaaaagattattgaaagtattattgaggagagtcagaaagtactacagcttgaagatgactctttggattccaaaggaaaagaactctctgatcaagctactgccagtcctattgtggctagaacagatctgagcaatatacccggactgttagccatagatcaagtactaccggaagaatcccaaaaggcagagagtcagaatacatttgaagagactgaattagaattaaaaaaatgctttccttctgatgaaacctgtgagaaaccagtagatgaaaccacgaagttaactcaaacaagttcaactgagcagcttaatgtgcttgaaactgaaacagaagtattgaacaaggaagcagtggaagt

SEQ ID NO: 164919 - DNA, 709 bp, Homo Sapiens
gggtagagggataggttagtaagatgtattgttaaacaacaggttttagtttttgctttataattagccacaggttttcaaatgatcacatttcagaataggtttttagcctgtaattaggcctcatcccctttgacctaaatgtcttacatgttacttgttagcacatcaactgtatcactaatcaccatctgtttttgtgggatgtgctgcagcatttcccaaaaaaactttacgtgtaatgttgcaaaatgaatgtactcagacattcttaatttttacttagggcagaccaactctttgagtctctcttggactaatatatacagatatcttaagagtgggaatgtaaagcataacctaattctctttcctatagagattctattttatttaaaatccatttttacactagttagaatcctgctgttttggccaagtacttgtcttgcatgtctgaccttgcagaagctggggtggatcatagcatactaatgaagagaattagaagtagtttacaaagctcgctcactcctcatttctctgtgatcccttctatccagtgggcccaccaccacctgggaaaacagatttttcagtacaggtgggataaatgctcctgaaaggctgtgcccagaaggaatgaaccaattaggcaagtggttttcccaaactaccttgggagttttacgaaaaaaatatggtcccc

SEQ ID NO: 164920 - DNA, 1148 bp, Homo Sapiens
agcccatgacgcaagaggctgaagaaagatgtggaaccaagctgcagtgggagcagcctgggacccgacaagggcctggcccagagccctcccagctcatcacttaccgcgacaccgcagaagccttcccagagcccctctgcccctcctgccgacgtcaccccaaagccagccacggaagccgtgcagagcgagcacagcgacgccagccccatgtccatcaacgaggtcatcctgtcggcgtcaggggcctgcaagctcatcgactcactgcactcctactgcttctcctcccggcagaacaagagccaggtgtgctgcctgcgggagcaggtggagaagaagaacggcgagctgaagagcctgcggcagagggtcagccgctccgacagccaggtgcggaagctacaggagaagctggatgagctgaggagagtgagcgtcccctatccaagtagcctgctgtcgcccagccgcgagccccccaagatgaacccagtggtggagccactgtcctggatgctgggcacctggctgtcggacccacctggagccgggacctaccccacactgcagcccttccagtacctggaggaggttcacatctcccacgtgggccagcccatgctgaacttctcgttcaactccttccacccggacacgcgcaagccgatgcacagagagtgtggcttcattcgcctcaagcccgacaccaaacaaggtggcctttgtcagcgcccagaacacaggcgtggtggaagtggaggagggcgaggtgaacgggcaggagctgtgcatcgcatcccactccatcgccaggatctccttcgccaaggagccccacgtagagcagatcacccggaagttcaggctgaattctgaaggcaaacttgagcagacggtctccatggcaaccacgacacagccaatgactcagcatcttcacgtcacctacaagaaggtgaccccgtaaacctagagcttctggagccctcgggagggcctggctactgtgcctcaacggttcggctcctcaacagacagtcctgcggcagaagtgggtgtggccgtgacctctgcaggctcaagagtgttgtccagatgtttctgtactggcatagaaaaaccaaataaaaggcctttatttt

SEQ ID NO: 164921 - DNA, 288 bp, Homo Sapiens
ttcatcgagctcggtacctgcaagcttggggtgctgcgggaggggcggacagccagccggcttcccggcggcggtacgagagcccaacaggagaggatgagctgtgccaaggaacacagccactgctgcctgtatactgcccgccttctctccacttccatttttgcctttgtttttaacttgtgctcttgtgagttcttggtgtgtttctttgtgagttcttattgaattgtgtaactttgttgttgccgtgtactgtgaaaccaagttgcatgctggggatactct

SEQ ID NO: 164922 - DNA, 852 bp, Homo Sapiens
  misc_feature (772)..(791): n is a, c, g, or t
  misc_feature (793)..(795): n is a, c, g, or t
ggggcttcatcggcgctttgccacttgtacccgagtttttgattctcaacatgtccgagactgctcctgccgctcccgctgccgcgcctcctgcggagaaggcccctgtaaagaagaaggcggccaaaaaggctgggggtacgcctcgtaaggcgtccggtcccccggtgtcagagctcatcaccaaggctgtggccgcctctaaagagcgtagcggagtttctctggctgctctgaaaaaagcgttggctgccgccggctatgatgtggagaaaaacaacagccgtatcaaacttggtctcaagagcctggtgagcaagggcactctggtgcaaacgaaaggcaccggtgcttctggctcctttaaactcaacaagaaggcagcctccggggaagccaagcccaaggttaaaaaggcgggcggaaccaaacctaagaagccagttggggcagccaagaagcccaagaaggcggctggcggcgcaactccgaagaagagcgctaagaaaacaccgaagaaagcgaagaagccggccgcggccactgtaaccaagaaagtggctaagagcccaaagaaggccaaggttgcgaagcccaagaaagctgccaaaagtgctgctaaggctgtgaagccgaaggccgctaagcccaaggttgtcaagcctaagaaggcggcgcccaagaagaaatagggcgaacgcctacttctaaaacccaaaaggctcttttcagagccaccactgatctcaataaaagagctggataatttccnnnnnnnnnnnnnnnnnnnnannnaaaacatgtcggcccgcctcgggccctcaagaaagcttttctagaccatttccggtt

SEQ ID NO: 164923 - DNA, 597 bp, Homo Sapiens
atgcagcttggcttcacggtgatcgtggactgctgggtcaagtgggactccatcaagccccttctgaagatcctgcaggagtccttcccccgctgcatccatgtggccctgatcatcaagccagacaacttctggcagaaacagaggactaattttggcagttctaaatttgaatttgagacaaatatggtctctttagaaggccttaccaaagtagttgatccttctcagctaactcctgagtttgatggctgcctggaatacaaccacgaagaatggattgaaatcagagttgcttttgaagactacattagcaatgccacccacatgctgtctcggctggaggaacttcaggacatcctagctaagaaggagctgcctcaggatttagagggggctcggaatatgatcgaggaacattctcagctgaagaagaaggtgattaaggcccccatcgaggacctggatttggagggacagaagctgcttcagaggatacagagcagtgaaggctttcccaaaaagaactcaggctcaggcaatgcggacctgcagaacctcttgcccaaggtgtccaccaatgctggtccgagcgga

SEQ ID NO: 164924 - DNA, 659 bp, Homo Sapiens
tagcaaagtccggacatgtacattggaatacatatataacaacattcaggacaacactgttcaaaagagcaaaaacctactcaaaatccaaaaatccactgacagaagaatagaaaattctaattgtggtatattctgaatccctacggcggctcattattttccgctgcaggggtgctgaaggggggacgcgggtcggacgcgtccggctgtggaagagagcggcggccgctcacaacatgcacagcctggcgacggctgcgcctgtgcctactacactggcacaagtggatagagaaaagatctatcagtggatcaatgagctgtccagtcctgagactagggaaaatgctttgctggagctaagtaagaagcgagaatctgttcctgaccttgcacccatgctgtggcattcatttggtactattgcagcacttttacaggtgattgtgatgcaagtgatctaagaactacgctttgacgaacaccgctttaggagtactgtaagataaatctacatgacagggggaggaaggtggaaagtagagtataaggaccacaaggaaattgtaaatatttatccatctatcaacccacccaccttgacagcacaccagtctaacagagtttgcaatgctctggcattactgcaatgtgta

SEQ ID NO: 164925 - DNA, 917 bp, Homo Sapiens
ggggagccggagtcggatggcggctacggcggctcattattttccgctgcaggggtgctgaaggggggacgcgggtcggacgcgtccggctgtggaagagagcggcggccgctcacaacaagcacaccctggcgacggctgcgcctgtgcctactacactggcacaagtggatagagaaaagatctatcagtggatcaatgagctgtccagtcctgagactagggaaaatgctttgctggagctaagtaagaagcgagaatctgttcctgaccttgcacccatgctgtggcattcatttggtactattgcagcacttttacaggaaattgtaaatatttatccatctatcaacccacccaccttgacagcacaccagtctaacagagtttgcaatgctctggcattactgcaatgtgtagcatcacatccagaaaccaggtcagcgtttctcgcagcacacatcccactttttttgtacccctttttgcacactgtcagcaaaacacgtccctttgagtatctccggctcaccagccttggagttattggggccctggtgaaaccgatgaacaagaagtaccccactttctattaacaaccgaaaattatccctttttggtttgcgcaatctatggaactcgggaaggggaaactttcctaacaaacgggggcccacattcgttccctccaagaaaaaatccctggggccgcacgcccacctgggtgtcggcccctttgcctatggcccgccaccccgccggaagcggcactctccccacggggtgccccacttagtcccacgcggggaagaattggggtcgcgtgcccgcccacgatctccacgcgcagccctcttgtgcgggctcgacttcttcttctgcacaccccgcggtgtgcgccgtagcagtctctttcc

SEQ ID NO: 164926 - DNA, 574 bp, Homo Sapiens
ggtgttaattggtgtggcaacgggatctgttctgggatttttcattcagtacttcccaagccgtgaccaggacaaacttgtgtgtaagagaacattccttgtgttggggttgtctgtgctagctgtgttcagcagtgtgcattttggtttccctggatcaggaggactgtgcacgttgatcatggctttccttgcaggcatgggatggaccagcgaaaaggcagaggttgaaaagataattgcagttgcctgggacatttttcagccccttctttttggactaattggagcagaggtatctatggcatctctcagaccagaaactgtaggcctttgtgttgccaccgtaggcattgcagtattgatacgaattttgactacatttctgatggtgtgttttgctggttttaacttaaaagaaaagatatttatttcttttgcatggcttccaaaggccacagttcaggtatgatggataggatggcttagcattttaactgctatttctgcatgacaccttgaaatattgaataagagggcttgtttaaatttatgaaaatcaatcagtgaaagt

SEQ ID NO: 164927 - DNA, 527 bp, Homo Sapiens
  misc_feature (14)..(14): n is a, c, g, or t
gagctcggtaccgnttcatcttctgaatcccaattcttacatgtattgcatgatgaattcagatgccagtggcctgcctggaaagaccagtcttaacgcaacaaggagtctgccaatccacgttaaaaacacaaaccacaagagaaaaaaatccaaaacctctatgttaatgaagcagcaactgtggccccctagcctcctccacttcaagtacatggtgttcctagcacattaatgtcccttaatcctcccagcgacccctaggcatctgatgtgctatctgcattggctccgtgtcagtatcagctctggccttgagctgcatagcttccaattgaagagactgtaatataagaagccagaaggaaaaaactgacacggctacctggcggtatttcaagactgtcgtaagtgttcctgaatcggtggcaattgatctagaggccatgttctgccgtgggagagcaatgggcttgacatcacagggaccaagagtcagttgccggctctgagggttcctctctagg

SEQ ID NO: 164928 - DNA, 359 bp, Homo Sapiens
  misc_feature (215)..(249): n is a, c, g, or t
tggtttgtcttttccttctggcttcttctattacagtctcttcattggaagctctgtaggccaaggcagagctgatactgacacggagccaatgcagatagcacatcagatgctaggggtcgctgggaggattaagggacttaatctgctaggaacacctgtacttgaagtggaggaggctagggggccacagttgctgcttcattaacatagannnnnnnnnnnnnnnnnnnnnnnnnnnnnnnnnnnaagtggattggcagactccttgttgcttaagagtggctttctaggcaggccactggcatctgaattcatcattgacaataaatgtaagaaattgggaataaaaaagagag

SEQ ID NO: 164929 - DNA, 375 bp, Homo Sapiens
  misc_feature (56)..(56): n is a, c, g, or t
  misc_feature (66)..(66): n is a, c, g, or t
  misc_feature (80)..(80): n is a, c, g, or t
  misc_feature (86)..(86): n is a, c, g, or t
  misc_feature (123)..(123): n is a, c, g, or t
  misc_feature (174)..(174): n is a, c, g, or t
  misc_feature (230)..(230): n is a, c, g, or t
  misc_feature (330)..(330): n is a, c, g, or t
ggaacacccgtacctgaagtgggaggaggcctagggggccccacagttgccgcctncattaaccanagaggttttgggantttttnccccttgtggtttgttttttaagtggattggcagacncccttgttgccttaagagtggctttcctaggcaggccactggcatctgaantcatcattgacaataaatgtaagaaattggaataaaaaagagagacctgctgttantcgcttttgttctccagtgatttgattaactcagggcaaggctgaatatcagagtgtatcgcactgaagaataataatccattcagtaatgttatagttntcctcaatctaaatatgtcaactgtcattttgctgcttttcaaat

SEQ ID NO: 164930 - DNA, 783 bp, Homo Sapiens
catcacgagagataacacatgcagcgaatagcattgtgagtcaaactattccaaaagcacagattcagcaatcaacacacactcatctggatatctcactttttccattgggtttaactgatgaaaaaaagtaatggaacaattgcccttgtggatggttctgaggatcctggagccaatgtacctaacatacagcttcagcaaaaaatttcaagtctggagattaaactcaaagtatctgaagaagaaaaacagagaattaaacaggatgtggaatcattgatggaaaagcataatgtcttagaaaaaggctttctaaaagaaaaagagcaagaggccatttcttttcaagatagatacaaagaacttcaggaaaaacataaacaagaattggaagacatgaggaaagctggtcacgaagccctcagcattattgtggatgaatataaggcactactgcagtcttcagttaagcaacaagtagaagctattgaaaaacagtacatttctgcaattgagaaacaggcacacaagtgtgaggagtcgctaaatgctcagcatcagaggctccttgaaatgctagatacagagaaggaactgttaacaagaaaaaataaacggaagctttgattcagcaatctcaagaacagaaggaaatattggaaaagtgttctggaggaagaaaggcaaagaaactaaagaggcattagtatccgctgcaagcttgaaaaagaagcaatgaaggatgcagttttaaaagtcgtagaaacaaacaaacacaag

SEQ ID NO: 164931 - DNA, 1124 bp, Homo Sapiens
  misc_feature (91)..(91): n is a, c, g, or t
agatgcagtgattcaaaagaaccaatagaaagccgagaggagaaacccaaaaaggaaggctttatacgatcttctgaaggaccaaaacctngaaaaagcatataaatctaaatcagaaactcgttggggcccacgaccaagctctaacagaagggaagaagttaatgatagacctgtgagaagatcaggtccccattaaaaaacctgtacttagagatatgaaagaggaacgggaacagaggaaggagaaagaaggagaaaaggccgaaaaggtcactgaaaaagtagttgtaaagcctgaaaagacggaaaagaaggatcttcctcctcccccaccaccacctcagccaccagcaccaattcagccacagtcagttccaccaccaattcaaccagaagcagagaaatttccttcaacagaaactgcaactttggctcaaaaccatctcaggatactgagaagcctctggaacctgtgagtactgttcaggtagagcctgcagttaagactgtaaaccaacagactatggcagcaccagtagtcaaagaagaaaaacaacctgagaaagtcatcagcaaagaccttgttatagagaggcctcgaccagattcaagaccagcagttaaaaaagaatcaactttgcctcccaggacctattggaaagaagctagagagagagattggtttccagatcaaggatacagaggtcgaggccgaggtgaatattactccagaggtcgaagctatagaggttcttatggagggcgtggcgggggtggtaggggacacactcgagattatcctcagtatagagacaataagccaagagcagagcatataccctcagggcctctcagacagcgagaagaaagtgaaacacggagtgagagctctgattttgaagttgtccccaaaagaagacgacagcggggttcagagactgacacagacagtgaaattcatgaaagtgcaagtgacaaggacagtttaagtaaaggcaaacttcccaaaagagaggaacggcctgaaaacaaaaaacctgtaaagcctcattcttctttcaagcctgataatcatgttcgaatagatcatagactgctagaacagccttatgtaagggatg

SEQ ID NO: 164932 - DNA, 533 bp, Homo Sapiens
gatcgagctcgtaccgttcatcttctgaatgccgcctcgccgccgctaggtcggcggctccgcccggctgccgcctaggatgaatatcatggacttcaacgtgaagaagctggcggccgacgcaggcaccttcctcagtcgcgccgtgcagttcacagaagaaaagcttggccaggctgagaagacagaattggatgctcacttagagaacctccttagcaaagctgaatgtaccaaaatatggacagaaaaaataatgaaacaaactgaagtgttattgcagccaaatccaaatgccaggatagaagaatttgtttatgagaaactggatagaaaagctccaagtcgtataaacaacccagaacttttgggacaatatatgattgatgcagggactgagtttggcccaggaacagcttatggtaatgcccttattaaatgtggagaaacccaaaaaagaattggaacagcagacagagaactgattcaaacgtcagccttaaattttcttactcctttaagaaactttatag

SEQ ID NO: 164933 - DNA, 848 bp, Homo Sapiens
  misc_feature (837)..(837): n is a, c, g, or t
tgctgatccattattactttagggcttgattctcttggggagtgacttggctaagcttcaggtgtaaactgtggtcacggagcaaaaacattaaccagctgcccagggttcaagcttgagcctttaggtgatctttaaactatggtagtaaaataagcctcactcaaacatagctgacttcctattggtacagcttgaaaagcactttttactacatacacatttttatgcttaaaaagttaacatgatacgaaactgtgattagaaaatatctggtctggatgtgattagtaaggatacaagataatgttctaagactgcctaatgctttttgtttgattttcatctgccaggcgttgttatgtgctatgagggtagcaagtacgtctttgtcttaatgatctaaggctggtgtagaaacaaagggcctaatgagaaccaatcatcatggaagtcagttgcgggggcagcccataaggaaagggaaagtgagtggggttgggcataggctgagtgaggtggcctgaatgacacctcttagaggactgtgaagtacaggcacagcccgactgcagggagggatgcacccatcattttacccatgggagcatctgtaggaccatctctctcccacttcttctcccctcccccaccgcatctggccagatggactgtcctacagcaatcgtttccatctgtcaccctcttccctcccctttcataccagtcactatcttgggtaacaaatttatacaggacagtggtacagaaatacatctttgctctgagaatacagcaaatattaacttaaattattataactgaacaaataataanacctgaatttt

SEQ ID NO: 164934 - DNA, 841 bp, Homo Sapiens
tggcatgataacgctcgtgcgatgccctccacaatttcatcgatggaccaggcgagtggggcttcctgcaccttgtctctccttcaggaactcagtacttccatagcaatcctatgtgaggagtttccccacgagttaggagactttgtgatcctactcaatgcagggatgagcactcgacaagcctggctattcaacttcctttctgcatgttcctgctatgttgggctagcttttggcatttgggtgggcaacaatttcactccaaatattatatttgcacttgctggaggcatgttcctctatatttctctggcagatatgtttccagagatgaatgatatgctgagagaaaaggtaactggaagaaaaaccgatttcaccttcttcatgattcagaatgctggaatgttaactggattcacagccattctactcattaccttgtatgcaggagaaatcgaattggagtaatagaaaatggaagatggtgttgttaataaaggcatttaatagataaaaacatctccaaaaaggattttgaagctgatcctatttagttaaaaagataattttgctttcaaccgtaggtccagaaaactaattattggcatcagtctgtgaaatagtccattatttgttgttaaaaatgcttcaaaaggttttcagtgtcagtctgagatgcctggtatataggagcctttgggaaatacctatttttcagtattccatgcatattggatatcaccatgaagcaagagacatgcattctataatcatgtagacactcagactcaggggaaaatactagttatatcctgaaagcctttaaactctcgca

SEQ ID NO: 164935 - DNA, 271 bp, Homo Sapiens
ttagaggtcccctcctcagcagacgcagctccactacccctaacctgccaggatgctcaagtccactgtcacaatccctttcagaaaacattagtggccgctgccccagctacagagacggccgaaatgctttcactccttagctttgccaactccatcctccaaaacttcccagaatacctccctttccagttctaccaaatctgtacttgggagcagcctgctggatccagaacatgacaacagagagctgcgtctgctgaggaggggt

SEQ ID NO: 164936 - DNA, 1020 bp, Homo Sapiens
  misc_feature (878)..(878): n is a, c, g, or t
  misc_feature (896)..(896): n is a, c, g, or t
agatgaccttagagaagatcgtcaaagccggattgaaatgtggacccattacatcaactacaaggttcatttttgagaaaaaattggctcaggctttactggagtcaaggaggaaggctgtcttctttctactaccatgaggcaggtgtcacagctctcagccaggacccacaaaggattttgaagccagctgaagggaacccaactgatcaggctggtttttctgaagacagagattttggttacagtgtgggcctgaatcctccagaggaggaagctgtgacatccaagacctgctcggtgccccctagtgacaccgacacctacagagctggagcgactgcgtctaaggagccgcccctgtactatggggtgtgtccagtgtatgaggacgtcccagcgagaaatgaaaggatctatgtttatgaaaataaaaaggaagcattgcaagctgtcaagatgatcaaagggtcccgatttaaagctttttctaccagagaagacgctgagaaatttgctagaggaatttgtgattatttcccttctccaagcaaaacgtccttaccactgtctcctgtgaaaacagctccactctttagcaatgacaggttgaaagatggtttgtgcttgtcggaatcagaaacagtcaacaaagagcgagcgaacagttacaaaaatccccgcacgcaggacctcaccgccaagcttcggaaagctgtggagaagggagaggaggacaccttttctgaccttatctggagcaacccccggtatctgataggctcaggagacaaccccactatcgtgcaggaagggtgcaggtacaacgtgatgcatgttgctgccaaagagaaccagggcttccatctgccagctgnactcctggacgtcctggnagaaccctgacttcatgagggctggatgtacctgaatgacgaccagggccatggctgcagaaagccgtatcccgtttacggggggcgggaacctggtaacctccaacaccccccccgaaaaagc

SEQ ID NO: 164937 - DNA, 945 bp, Homo Sapiens
tgtgacggtgtggctatggctttcccttaggctgtcggaggaaaccaggctgctgttactgccactactgcttccattggtggttggcagagaagtactgcctcctgcacttaactgatcaagaaacatctgtgaggaggtatacgggaaaaaccgagacgagtgtaggaggtcttgatcatctgaaactgctgctgctgcagcggcaagcaaggaggtgttgtaatgctgattgtctcctgataagaaaggaaagaaatctaatccttgtaagtcgtaaggcatgggtgtcatgtggaaaggatgcctatagtcttggatgagggaggtattaatgtagcttgtgtctacagcaggaaggcttggggtgcgggatactggagatgcttgatgtggaagacttaaaatgcctttattatttagtggtgatgtgggagatagggaaggacaggtcctcttggcagatggctcttcttcctcttcatcagatgaactgtctatggttaggtcaatcacttctactttcttgtttttatttgaggactggtggtgagacgctacctgatgctccaatgtggagctcaagcatccatcgactccattgtaagaggcagaaacttcctgtacttccttttttgatctcatcggtgcccaagtgccatcctccttaaattgtatttcatcacagtctgtacagtactttaggatttccataaacaagccatcaataataaggtgttcatatggagccttcttatcacagacaggacaaacccaggttggttttttctcattcatctgaatgtaaagagttgcgtcaaaacattgtagatgagaacatgtaagggcccgacacggaattgtcagccgcattttaccaagtggacatagtagagaaacccttaggctggttgtagctatttcactgtctggatccgcagtccc

SEQ ID NO: 164938 - DNA, 484 bp, Homo Sapiens
aatcatgggatgagctgaagagtctacaaccattttcttctttactatggccgagacatccctaagatgcagaacgccgccgaagctagccgcaagaagctgaagcgtgtcagggaagagggagatgaagaaggtgaaggtgacgaggcagaagatgaggagcagagggggcctgagctcaagcaagcctctcgccgagacatgtacaccatctgccagagtgctgggctagatggtctggccaaaaagtttgggcttactcccgagcagtttggggagaacctgcgggatagctaccagcggcacgagacagagcagtttcccgcggagcccttggagctggccaaggattacgtttgcagccagttccctactccagaagctgtgctagaaggcgcccgctacatggtagccctgcagattgcccgtgagccccttgtccggcaggtgctgaggcaaacctcctaagttcagagccaggggg

SEQ ID NO: 164939 - DNA, 740 bp, Homo Sapiens
ggtacctgtggtatccatctcgggtgctctgtgggcatgatcaggcagcccaaaagatttaaatgatctataataatttccaagcggtagattatgtggcattttattgctcaggcaataattggtttaatgctggtagtgtcaaattctgaagtgttaattttgtcttagaaccttccagtaagtgaaatacaacctagttttatcaccatatccaccagcaggcatggataattattttaacaatgctaatatttgagttttgcagtatattatagaaaatagtccagttaaatctttggtttcagtatgtctgaagagtacagtgagaggttaatttctgctcaagtggtaccacttaaaggcatgtattcttttagtatgtaaaatgaaatagtaccttgagtttaaatagaatgcatttaggcattgtagagatctgaaatagttttcttccactacattgttgaaatcaatgaagcaattagtttctcattcagaaatgtgcacactaatatttagttttgcttactcgtggataatattaagcacttactctgcagtgtcctggaagttgtgtcaactgcagtgatactattcaggatggtgggaaatccccaaaaatatgtatgtgtgggcttgcttagattactatatttcatagttaatcttttgtctcttgcggtgctcatgatgtgtggggcacacggaaggcattgctgtagacagccatttaggta

SEQ ID NO: 164940 - DNA, 631 bp, Homo Sapiens
aaagaggaattttttaattctcctaagcaggacctacccaaccactgcagacatgagcattaattcttatgccagacaaggtaagcgtgtcctttgaaatcaaagctaagcttgacaaataactgtactggataaactggatacatgaaccacctcaacaaagatggtactttaagcatttatacacatgaaaatgatgaagtgtattatttagatatggtctttcttcatctttctctgaatcctgaaaggttagcaagtcattatactcatacatcttgtaatccctttctccacaaaatacatacacatatacagcttcatatgtcaatataatatcatcaacacagcataaagatttaagcagtagacacaagtcacatgaaagaggctctatgcatcatgtggcctgtccgaataaaaagcaaacattagaatgccatttcagcagttacagtgttgatatgatcaatatagctaatttttttatacccgtcatatatttttagaagtcatccgtagggaagaagcaaacaacaaagactgcttttttttagaaaagttatgtgccaacttcaaaatgacatactaaccagatatcagcattcgaaagctaggttgaataggactg

SEQ ID NO: 164941 - DNA, 769 bp, Homo Sapiens
  misc_feature (758)..(758): n is a, c, g, or t
ccgtgtcagctttgctcaatgtggtggatagattaagcataactgttgtagaatgctgccttatagtacggattgacaagagcataattctctcataacagactttccaatcattacagtagcttagctactttagttgatgtgaccgaggaatcccttctagaatcataggtggcaagggagggtttgctagctctccatttgcactggccattgtgaaaaaccagcttctgtattcaaatctttccttcattatttaaaattttatttttggcagcgcttgtgctggaacttactcattgtaactgaatcctcagggcttttcttgttttagatcatggactgtgcacgtgacacttaaataattttctatgtatttaaagaaaaatgcaccaggatggtgtctgtgcacgtgactattagaggagcgtctgtagaagtacctggtttggtcagtgcagttgtgcaatctgagggccttgtttcctcctcccctttccccttctccccaccaaaggaaaatatccctcttaatgatttcgtagttcagtttactgaatgattaccacctgtaattcctctttggattgtgtagactcaacatgagacattcctttctgctttctggagggcaccaggggcctttctctttgataaattttttttgtctgttgacaaaaacaaaaatcttttttcaaatgtagtgctggtgaaaaggtagggctgagtgattaccttagccacagggttcttgaagncagggaacttt

SEQ ID NO: 164942 - DNA, 911 bp, Homo Sapiens
  misc_feature (42)..(42): n is a, c, g, or t
  misc_feature (87)..(87): n is a, c, g, or t
  misc_feature (99)..(99): n is a, c, g, or t
acaagagacgctcggcttgacacacattcactcgttcttctnggcgcgcctaaaatgtcgagtgtttgggggcgcgcgcatgttgtntctgtttgttcnccggtgcgacatgctgtttccgagtccgtcgggttggattcaaagatactcgatcgcaaaaatctttagacagcggagtcggatcagtcaatgcataatcacatagaggggtatagatgagcatgactttaacctatatcactatctttagactttagttagaacaaaagcagtaagttagtccaggcttctcgatgactttctgatgttagagtgaggaagtaacttagtgcttcactgcagacattcaaaagcctctgctggacctcctcccaggcactaacgcggctctcatccatgtacatccggaagagaatgcgcagcccacaggccaggctgctggtctcctgcttcagaaggttgggcttggatttgcctttgaatcctgctttccacagggcagtcctctgttcgttgttggaattaaacgctatgggcaaatctatgtgactctaataagcagtccagtagcgtaaaaagttgttgtgatgataaaaagcggtacagtccatggtcttgagtatcaacgcgaacatcaaagtccaccgcatctctctgtgctgcagctaagttttctgcatcttctttcttacttgtggctgggaagaagacaatgttgtcgatagtctggatgagttccagctgcacaacacatttaatcaacagggcagcaaacaatttttgttctggaaattttgctgtagatttaattttgctgacttcttcattaacagcagacgcagaaaccagtggtgcttgtggtctgttatccacagaccttggttgaatagaatcatgaatatctacagacc

SEQ ID NO: 164943 - DNA, 1783 bp, Homo Sapiens
ggcaaagaagactgcagagatgaatgaaaagctctccaagatgggcgaaagttcacttagaaactttacaatggatacagagtcaagtgtttataacttcgaaggagaagactatagagaaaaacaaaagattgcattcacagagtggattgaaccacctaaacgagaaagaaaagccaactatgccgttgatgcatatttcagggaagctcttcgtgttagtgaacctaaagcacccaaggctcctcgacctccaaaacaacccaatgttcaggatttccagttctttcctccacgtttatttgaattactggaaaaagaaattctgttttacagaaaaactattgggtacaaggtacctcgaaatcctgagctgcctaacgcagcacaggcacaaaaagaagaacagcttaaaattgatgaagctgaatcccttaatgatgacagagttagaggaaaaagagaagcttctaacacagggatttaccaattggaataagagagattttaaccagtttatcaaagctaatgagaagtggggtcgtgatgatattgaaaatatagcaagagaagtagaaggcaaaactccagaagaagtcattgaatattcagctgtgttttgggaaaggtgcaacgagctccaggacatagagaagattatggctcagattgaaaggggagaggcgagaaattcaaagaagaataagcatcaagaaagcacttgacacaaagattggacggtacaaagcaccttttcatcagctgagaatatcatatggtactaacaaaggaaaaaaactatactgaagaagaagatcgttttctgatttgtatgcttcacaaacttggatttgacaaagaaaatgttcatgatgaattgcgacagtgtattcgcaactctcctcagttcagatttgactggtttcttaagtccagaactgcaatggagctccagaggagatgtaataccttaattactttgattgaaagagaaaacatggaactagaagaaaaggagaaggcagagaaaaagaaacgaggaccaaagccttcaacacagaaacgtaaaatggatggcgcacctgatggtcgaggaagaaaaaagaagctgaaactatgaatatgtttttgtttcataatcactaactttaaaccagtagttctttaatttacgggtcttcataagatgtactgtacaatgctcaattgttatgtcatttaaagacatcaggttcatctgtttactgagctagaaacatagtatgtagtttcacttttttaaatgcaacagctgtgctgaaatttttttatcattaacacttgaagtaataaaataggcttcatttattactaagtgtttcatttgatttatttttctattgtagttccatttgtgaagattgcgactttttgtttattagctataatttctacacttgtaaggcttaaaaaccagttaaaaagaaaattgccaataacatttgtccctttcagtcttcacctagttgtgtaattattttaattcactttgcctttgcagaaatttgggtattttctttgtagtgctattgagtctcatctggaaagattatataaattgcattctccttgcttatgtgggtagaatgggaaaagaaggccagaccaagtatacttaaattctatgcatatttctgttatgctttctgtttttttagcttgattctgaaatgaatatgccctattcttttgaaagaatggccttttagttgtatagccaagaccttagtatttccctatcagg

SEQ ID NO: 164944 - DNA, 1941 bp, Homo Sapiens
gggagggaaagggtgggctaattggagagccaggaagagcgtgaggcggccccacgctgctttcccagaaggctgtgcgtgctcctcgcttcctccgcggtcttccgagcggtcgcgtgaactgcttcctgcaggctggccatggcgcttcacgttcccaaggctccgggctttgcccagatgctcaaggagggagcgaaacacttttcaggattagaagaggctgtgtatagaaacatacaagcttgcaaggagcttgcccaaaccactcgtacagcatatggaccaaatggaatgaacaaaatggttatcaaccacttggagaagttgtttgtgacaaacgatgcagcaactattttaagagaactagaagtacagcatcctgctgcaaaaatgattgtaatggcttctcatatgcaagagcaagaagttggagatggcacaaactttgttctggtatttgctggagctctcctggaattagctgaagaacttctgaggattggcctgtcagtttcagaggtcatagaaggttatgaaatagcctgcagaaaagctcatgagattcttcctaatttggtatgttgttctgcaaaaaaccttcgagatattgatgaagtctcatctctacttcgtacctccataatgagtaaacaatatggtaatgaagtatttctggccaagcttattgctcaggcatgcgtatctatttttcctgattcccggcccattcaatgttgataacatcagagtttgtaaaattctgggctctggtatcagttcctcttcagtattgcatggcatggtttttaagaaggaaaccgaaggtgatgtaacatctgtcaaagatgcaaaaatagcagtgtactcttgtccttttgatggcatgataacagaaactaagggaacagtgttgataaagactgctgaagaattgatgaattttagtaagggagaagaaaacctcatggatgcacaagtcaaagctattgctgatactggtgcaaatgtcgtagtaacaggtggcaaagtggcagacatggctcttcattatgcaaataaatataatatcatgttagtgaggctaaactcaaaatgggatctccgaagactttgtaaaactgttggtgctacagctcttcctagattgacacctcctgtccttgaagaaatgggacactgtgacagtgtttacctctcagaagttggagatactcaggtggtggtttttaagcatgaaaaggaagatggcgccatttctaccatagtacttcgaggctctacagacaatctgatggatgacatagaaagggcagtagacgatggtgttaatactttcaaagttcttacaagggataaacgtcttgtacccggaggtggagcaacagaaattgaattagccaaacagatcacatcatatggagagacatgtcctggacttgaacagtatgctattaagaagtttgctgaggcatttgaagctattccccgcgcactggcagaaaactctggagttaaggccaatgaagtaatctctaaactttatgcagtacatcaagaaggaaataaaaacgttggattagatattgaggctgaagtccctgctgtaaaggacatgctggaagctggtattctagatacttacctgggaaaatattgggctatcaaactcgctactaatgctgcagtcactgtacttagagtggatcagatcatcatggcaaaaccagctggtgggcccaagcctccaagtgggaagaaagactgggatgatgaccaaaatgattgaaattggcttaatttttactgtaggtgaaggctgtatttgtagtagtactcaagaatcacctgatgttttcttattctccttaaattaagagttattttgtgtttgtattcttggctggatgttataataaacatattgttactgtcaaaaaa

SEQ ID NO: 164945 - DNA, 894 bp, Homo Sapiens
gtccgtctcatctctgaatcctccatcagctctaaccggtccaaatcatcttcctcatacaggcgcatatccaaaccaggtttaaatcctttcttagatgcacttcctgatgcctgtcccaattccattggacaaacatattcttcaccatcttcctgtttcttctttctcaaattcccaaaattgctaaaggcaagtttctttggcttcactttggcagtagctgttagaagtacataatccggcagctccatggcatctcgcttctggtgctgtgcctcagccccaatcagaaggttgaaatgagtggccaaatgtcttcgcagcaaagtcttattgggtgggatgttcaataactgagccattgtttctacgttaaaacgaggctctagaaccatgagcccaccatggacaccactgcctctgagattgggcgcatattctgccaagtccacggagcgcagccactccatcactcgatggttagtccacttctgaacttctgatggggcgatggtattctcatcagatggccgcctccgtagacagtttggttcaaagttattgatcctcaggacctggatggcccttttgatactgagatggtgtagcacacttacaaccttcagagacagtaagtcatcaacagtcatgtaatgtagcattcgaccatcaacccgtccttcatcaaactgggtcttatattgagggaggccaatgtcatccaaccatctagtgacccagttgaaatccagcttcccatgattggtttcttcttcagatacccagggcttggagtgctagctggagtttctttcgatgaagtgaatgcttgattccaagttccttctctagatcttgttgagaagcctgcaaaagcgtttgggattcaga

SEQ ID NO: 164946 - DNA, 1028 bp, Homo Sapiens
gatctagagtatccccgtcgcatcttcttgaatcctatcgaagatggcggcgcgatctgtgtcgggcattaccagaagagtcttcatgtggacagtctcagggacaccatgtagagaattttggtctcgattcagaaaagagaaagagccagtggttgttgagacagtagaagagaaaaaggaacctatcctagtgtgtccacctttacgaagccgagcatacacaccacctgaagatctccagagtcgtttggaatcttacgttaaagaagtttttggttcatctcttcctagtaattggcaagacatctccctggaagatagtcgtctaaagttcaatcttctggctcatttagctgatgacttgggtcatgtagtccctaactccagactccaccagatgtgcagggttagagatgttcttgatttctataatgtccctattcaagatagatctaaatttgatgaactcagtgccagtaatctgccccccaatttgaaaatcacttggagttactaagcaattcggaagagaaacacattgaaatcactgtctttccctgagcaagggggctgctcattagatcttttgatactttaccatgtgaaatactaccagaactgttctctaaacccactttttctgtagaggaatgtatcatcttgttgtttctcatattacaaatggacaaataacggactttctattttcatatttgctgaaaccattttttaaatgaaattaggtcattatttatgaaaagttttgagagggcactgtcaacttgggtttaagacaggaggacattgcaagttcacacctttcataagcataaagtagttgcaagaaagtattttcatcctgttaggattcatatctaagatagagttatgcattgcacatacacaaagtaaacttttattagatagatacctataaaagaaacataaaagtatgttgtgtattactgacaggttctaggattaagtttctttttagaattcaagtagattggttaacgtgtagg

SEQ ID NO: 164947 - DNA, 838 bp, Homo Sapiens
  misc_feature (81)..(81): n is a, c, g, or t
  misc_feature (135)..(135): n is a, c, g, or t
ttgtatagtatccccccagaattcctcccaacccctaaaaaatccttttcaggatttgttgtgagtaaccaaactctccantgaaagttactaccaaacttccaacagtttgggttggggatggcccagataacnacattcataggaaataaatctgctttcaaaacagccccacccatatagcacttaaatcccaccattaaaacataattaaagatgactttcttttccccccacgtatcctaaaaagggcacagcttcttttccccatttaatgaaaagcctcctatagttgtcgatgagcatcagttgacttattattgacaacgaagtgcacataatcttctttttctcattgagttctattctttgagcgccaagattgttgggatgaaaatcagattaatgtgtgagatgtgctttctggttttaaccacataacattctataaaggaatgataatctacgttttagaagctctttttgaaacttaacactgtcattgataagaatattcaagcagttttcttaggcaccaaaaatttatccagccgggttacacaccatcttaaaatattacattcccttttagagagcattcaaaaagcaaatgattgtttttttattaaataatttctccaaaatactgaaaataacaaataagcattcaaaaagcattcaaagaaaacaaaaacatgtcctcattttatttggaaataaactcttgttgtaggatagaaaggaattagtgtattattggcaacctatgagagttctgcactatttacatattgctggtacctctatgcaaactattgccattcttctgaagcattct

SEQ ID NO: 164948 - DNA, 440 bp, Homo Sapiens
tgccttcagttttaataatgaggcttgtaaacaatccaaccacataagcagcagcggccccatggcgtctcagccctcagaccctgtatctctgccgcctgtgcagccctgtctgaaccctggagtggcgctgcctgctcaggagggctctgatctcaccagcaaagccaaagcttcatctttggttaatttcactgagatgccactagtgtaaaaactgtgctcttcttggcaatattactaaagtagccacatggcacataacgtgttattttaagttatttgaaaagcaatgtccatctaaataagtgaccacaccgtaataaaaatcatttaaaaaaggaagggagggaggaatggcacaatgaaagaaggagcttaggaaagcctcaggcgtgcagtgtgagtatcctcgtgggtatggatattcggcgtgggct

SEQ ID NO: 164949 - DNA, 956 bp, Homo Sapiens
  misc_feature (41)..(41): n is a, c, g, or t
ctgtatctctgcccgccctgtgcagcccctgtctggaaccnctggagttggcgctgcctgctcaggagggcttctgatctcaccagcaaagccaaagcttcatctttggttaatttcactgagatgcccactagtgtaaaaactgtgctcttcttggcaatattactaaagtagccacatggcacataacgtgttattttaagttatttgaaaagcaatgtccatctaaataagtgaccacaccgtaataaaaatcatttaaaaaaggaagggagggaggaatggcagaatgaaagaaggagcttaggagagcctcaggcgtgcagtgtgagtatcctcgtgggtctggggaggcgctgctgacgaaggaagcactggttctctgtaggggtctgaccccagcatcagcttcagctcagctcaaagccagcggcacattcaatcgcatagagaagtttacttcgcaaaagtgtctcgtcatagaactcggggagcttcagcaggttcatgcaggtgctggctgtggggagccgctcaaggtcggagcctccgttgtgaatacaaaatgcgggatacaactccttaaaccccaagagagggggtcgagagcagcttgttacaaactgcagcagtttgcgcttttcttcatcagtgaaccctgtccacaactctccagaagaccttaataacaggatggttctgcagaatagcctcctgaatagtttgtaaaggatttttagctcctctaggcttatgggaacttgtgcaccagaaattaatacctgaatttcttgctgatcaaacattcggagccactcgaggctgacgacattggcaaggccctggcggaaagccaggcagtgctggcggatctgcctgttcagcctgtagtctgccaccaagtggatgtacgcaatccggttggcgctggtgacaggatgtcatttcccaccagt

SEQ ID NO: 164950 - DNA, 934 bp, Homo Sapiens
attcctagagtaacccgcgcatattcttgaagtctactgagattgtaataccctggcgctatggcaatgcagaaacactaatacattttacagtgaaaacctactttaacacatctcaacaatgataatcgtataaaactttctagttctaatttgcactctacgcgaaccaatatttttcttttcttaacacatactgctcttctataccaaacacttgccctttaaccttcagataaaaacctcaaataccaaaaaatgcaacaagcttttgaggtgttgggaattgttggttgttaaaatcccttttattttataataaattatacaggcaatccttgctttttattaccacactggattgcttctgtacacagctaagttgcctgaagcatggaaacttggacttctccatctgacacgttctggaagcctcaaggcacaagctgacagttctgctactacagaaaaactctcacactgctctcctctcgacagtactgcctgttcccactactccacatgacacctacgagggcactacatcacgtgagggaagcttcttcatgagggcagacaagaggaggcaccacccaggcactggtctctgcctggcatctattccgagggccacctggcacagtttctaaattacaggcatatctaaaatgcttttctacctttagtttttatttttgctatatttttgcactctactatatgcatatttaataaaaacaactacaaagtcctttactttaattcctttacataatgataaaacacctagatacccaaaatactacatctatatattcaaatctactaatcatgttacaaatgcatgcagcttatttgggggcttagtctaatttttattttcttaggtccatcaataccatgataatgaacattagatggattcagaagatga

SEQ ID NO: 164951 - DNA, 245 bp, Homo Sapiens
ccaacatctcatcgcttgtgagatttctggctgctggtcgctgatggtttcgggagtttttttatgtggacgtggacaggggtgttctcatccacgtgaacatgtaaggggggagttgaagagcggtccttcatggttggcttcgtcacagttacactgggtgcgccacaaggtgctctcaagacctttttccgccatgagatgttggaaggggtgatgagatgttggaaatgagatgttgaagg

SEQ ID NO: 164952 - DNA, 411 bp, Homo Sapiens
gagtacccatttttgtgttgtcctcccccacctgccagaagccaaccatgaaggaccgctcttcaactccccccttacatgttcacgtggatgagaacacccctgtccacgtccacataaaaaaactcccgaaaccatcagcgaccagcagccagaaatctcacaagcgaggaatgaaaggggacactgtgaatgtgcggcggagtgtccgggtgaaaaccaaggtaccttggatgccccctggaaaatcatctgcccggcctgtgggatgcaagtgggagaatccacctcattgcctggagatcacgccaccatcttcagaaaagctggtctcagtgatgcggttaagtgacctctctacagaagatgatgactcaggtcactgtaaaatgaaccgttatgataagaaga

SEQ ID NO: 164953 - DNA, 823 bp, Homo Sapiens
tcacctcatcttctgaatctgcagatgactatgtcaggcaaatctggaatgctgagatctgctttcacaaaaggaatctgtccacctcttcaggaaatggccgatgtttcacagaatatttaaatccaacgtcatttttaggaactgggcgaggttcaggtacaaaaagcttctgatttgcttttgctcctctgggtaaaagacaaagctgttgtgcccaagcaagtcttccagacattccccggaccagcacagtgacagaggggaaaaaatcattctgctcatttccaagaggttgttccagcattgccaggatgacactgttatccaagacaaagtaccggaaactatgcttgtttatggttggcagcctggagtatttaatcaaagtggtctcattcacaagactacaaggagaggcaggaccactaggtgaaggaaatgcgccgagcaactgcataatgcatgttagggtggcttcagcagcatcctttaccctcatagatgcagggtttggctccttatctcctttgtacttgacctcttgctcattgttcttggacttacttcctgagatacccagttccacaatctccagtacttccttaaggcagtccttttcatcaagcatatcagggtgctctgtcagccagacacagagacactgaaaagctgccactatcatggagtgcagatccctggagtgtaaaggagctggccgactacactgataaacaatgtaggtgcacacagaactgatggctcgcttcggtctcctgagtcaaccatcactttaccttgcaagggatcctctaagttatct

SEQ ID NO: 164954 - DNA, 642 bp, Homo Sapiens
  misc_feature (608)..(608): n is a, c, g, or t
  misc_feature (627)..(627): n is a, c, g, or t
gtgagttatatttaaaatatatcttcagaaattaatcttaaaagaggcattagttcagaatacttttttaaaagtttaaatttaatatttaggcacgtcagaaattacttttccttattttgaaatgaggctacttatgtcttggttttattttgttccatgtttaaatcattcactttgatttgagtgggaaaagcctgaagcctttatcatgtggttgctggtgtgtgtaattattaatgaaatgttcactcctagtcccttatgaggcttagaatttcaaccacgtgtcaggtcagacagtattataaactgtactttgctgtctgagacagcacatttgtgaatgatgcttgctgcctgccattttcaacctattctctcttaagagtgctaggtaccaaattgtgaaagtttgttttcagttatattacttttgaggctggtgaaaaatttaaatgtaactttgtgggaacactgattcatatttagaaaatgtaaatgtctgtagcactttcttgcagttaatttgaaaactttgggatgctgaaccttgttttgtccagtgatttaggatgattttaaaaatgccatgtgtggatttgaanttttataaattggttttgnacaaggcattaattt

SEQ ID NO: 164955 - DNA, 903 bp, Homo Sapiens
cattggcatttttgtcacctccaacaacatccgcgagatcgagcattgattataccggaacagagccttccagtccctgtaataaatgtttatctccggatgtgacaccttggctttcgtaccatctaacttcacactggtaaaagtcatttgagggcaacgtgtttatgtattatggactgtctaatttctatcaaaaccatcgtcgttacgtgaaatctcgagatgatagtcaagctaaatggagattctagtgctttgcttaatcccagtcaaggaatgtgaaccttatcgaagaaatgaagacaaaccaattgctccttgtggagctattgccaacagcatgtttaatgatacattagaattgtttctcattggcaatgattcttatcctatacctatcgctttgaaaaagaaaggtattgcttggtggacagataaaaatgtgaaattcagaaatccccctggaggagacaacctggaagaacgatttaaaggtacaacaaagcctgtgaactggcttaaaccagattacatgctggattctgacccagataataatggattcataaatgaggattttattgtttggatgcgtactgcagcattacctacttttcgcaagttgtatcgtcttatagaaaggaaaagtgatttacatccaacattaccagctggccgatactctttgaatgtcacatacaattaccctgtacattattttgatggacgaaaacggatgatcttgagcactatttcatggatgggaggaaaaaaatccatttttggggattgcttacatcgctgttggatccatctccttccttctgggagttgtactgctagtaattaatcataaatatagaaacagtagtaatacagctgacattaccatttgatttt

SEQ ID NO: 164956 - DNA, 687 bp, Homo Sapiens
caaagccgatagggtataggaaaagaaatcatttgccaaagagaaaacatttttaaggaatcattaaaccatgcggttggcaatagttccacaaggagcaaattggttggtcttcatttctttcgataaggttcacattccttactgggattaagcaaagcactagaatctccatttagttgactatcatctcgagatttcacgtaacgacgatggttttgatagaaattagacagtccataatacataaacacgttgccctcaaatgacttttccagtgtgaagttaatggtacaaaagcaaggtgtcacatccggagataaacatttattacagggactggaaggctctgttccggtataatcaatctcgatctcgcggatgttgttggaggtgacaaaaatgccaatgccgatgggaatgaagatgagaccgatgatgaagaaaataggtagcaccgtgccagccgtaaggatgggctgccaagctggcagccgttgctgtttgaaggccgtgttatccggtctccgagtcttcgcggtgccccccggagcacacgggggcccaccgtccacttcatccttcgcgttatagttcatcgccatcgatccctggggcgccgctccgcgatttgcaggtggaccacccagggggcccgccggctgaccctgacaggaaccgctcgag

SEQ ID NO: 164957 - DNA, 524 bp, Homo Sapiens
taatttctcgtcgcctagtgacatcttgtaagaacactcgagtgtcttcaagaggaggggctatgtccttttcagaagctttcaaaaatgctggattggcaacactacgttgcaaaatgcttctaatatgcttttcaaaggaatctggggtttcagccagaacacggaggggagactctgccacttcaacatcttctcgagtacaaagcaggggaggagacgctggatggactgtacttaataacggccatatgaggcattcataggtactggtgatgcagatcatcgtgggtcccagaatgtcaggtacaatccaaaatcctcgaattggagctggctgcctgcagggcaatggcttcgtacaaaggatgtgttcaacaaagcatttctgttctgtagagagttcctgtaaactatccttatcttcttcatctgatccaagaaatttgtgaagtttatgaatccaagttagcccaacactatgtacaccagcttcatgagtacagtgatatcttgaagacact

SEQ ID NO: 164958 - DNA, 1177 bp, Homo Sapiens
gaagaattctgaatttgaaggtggaaaatcaacagtgaattgtagtaccactccagttgcggagagatttttcaccagttccacctctctgactctaaagcatgctgcatggtatccaaagtgaaatcctggatccccacgtagtgctgttaacatcagacaacgtaatcagaatttactcactacgtgagccgcagacacccactaacgtgataatactttcagaagccgaagaggaaagtctagtactcaataaaggaagggcgtataccgcatctctaggagagacagcagttgcatttgactttgggccattggcagcagtcccaaagactctatttggacaaaacggcaaagatgaagtagtggcatacccactgtacatcttatatgaaaatggagagactttcctgacatacatcagtctgttacacagccctggaaatattggaaagctgttgggtccattgcccatgcatcctgcggctgaagataactatggttatgatgcgtgtgctgtactctgcttaccctgtgtccccaatatcttagtgatcgctactgaatcaggaatgctgtatcactgtgtcgtgctagaaggggaagaagaagatgaccacacgtcagaaaagtcctgggattccaggattgacctcattccttctctgtatgtgtttgaatgtgttgagttggagcttgctttgaaactggcatctggagaggatgacccttttgattctgacttttcttgtccagtcaaacttcatagagatcccaagtgtccttcaagatatcactgtactcatgaagctggtgtacatagtgttgggctaacttggattcataaacttcacaaatttcttggatcagatgaagaagataaggatagtttacaggaactctctacagaacagaaatgctttgttgaacacatcctttgtacgaagccattgccctgcaggcagccagctccaattcgaggattttggattgtacctgacattctgggacccacgatgatctgcatcaccagtacctatgaatgcctcatatggccgttattagctttctgaaaaggacatagcccctcctcctgaagaatgccttcagctcctcagcagaagccacccaggtgttcagagagcagtacattctcaaacagggactgggcaaagaa

SEQ ID NO: 164959 - DNA, 839 bp, Homo Sapiens
  misc_feature (690)..(690): n is a, c, g, or t
  misc_feature (762)..(762): n is a, c, g, or t
gggtctcctcccctgctttgtactcgagaagatgttgaagtggcagagtctcccctccgtgttctggctgaaaccccagattcctttgaaaagcatattagaagcattttgcaacgtagtgttgccaatccagcatttttgaaagcttctgaaaaggacatagcccctcctcctgaagaatgccttcagctcctcagcagagccacccaggtgttcagagagcagtacattctcaaacaggacttggcaaaggaggagattcagcggagggtcaaattattatgtgaccaaaaaaaagaaacaactagaagatctcagttattgtcgagaagagaggaaaagtctgcgggaaatggctgagcgtttagctgacaaatatgaggaagctaaagaaaaacaagaggatatcatgaacaggatgaaaaaactacttcacagttttcactctgagctcccagttctctctgatagtgagcgagacatgaagaaagaattacagctgatacctgatcaacttcgacatttgggcaatgccatcaaacaggttactatgaaaaaggattatcaacagcaaaagatggagaaagtgttgagtcttccaaaacccaccattattctcagtgcctaccagcgaaagtgcattcagtccatcctgaaagaggagggtgaacatataaggggaaatggtgnaagcaaatcaatgatatcccgcaatcatggtaaacttctgacaccacccagaagcttgactcacacctgaanctggaacaccattgaaggcttaaacccatattgtaaaacaggtagaattatctaatttataaaaaggtgttttgatg

SEQ ID NO: 164960 - DNA, 1375 bp, Homo Sapiens
ctttccaaatgggaattagaactgtggggcagcaacagtctcagagccagtgagaggccagcttagagaatgcttctgagttagtgggactctgtgtcacaagtaagcaaatgaatatatgaaagaaattatggagataagttagattcttggtaatacttaaatgtcttgctttctactaaccttttgttactaaaggtaaagggtataactcaaactttttgtggacattcttttcaaaattttttaagaaccctgtactataaaaggttgagtaaaaacaggaaagcgtgctataagttcaaatctgttgtattaccctaaattagataaaccaacctgaattatagtagatttctcaatagatgaggaactgaaaaatactatgtaaaatatcttccaaaatgctttttatactttttttatttgtaatttggtctatctaaaatgttcgttagcttaacttaatgggcgttattggattcatatgactaacgtttcctcagtattgtaatgcttgaaatatttgaaagaaaaaatgttgttttttagttgaaactggtatatataattcagtgcttggcaggttagtatatttttatgcatttttcagagtcagcagtttcaaatcttatggttatcatgttataaaattttagcccacatttcagggctccgtaaatcatttgagccattattttttcccaacaaatggtgaattttttctttaaatgtggatatatatgtcgtaatttatgattcctggttatgtatcacgacgggatcctgccagtaaaattgaacttattgggtcttgggaagatttaaattgcgctaacagtgttgcgcaaaaaatgagttcatgccatttaacatatggtattttaattattaactgtattaatttactatgaaatggacatccttttaactaaaatggaattgaacattgcagttttcaaatatttttccttgttgggtctggaaaaggaattctactttgatctgcatagaaaattttgatacaattttttgaaagttcttaggtgaaacatttacccattaaaaaggaagcagaaatactgagacatgaaaggcattatcaactaactctagactctagaacccattctagcatatctcacgtgcaatttttaaaaataagttaataattcatctcatatcaacaaaagcctttgaaacatgggttttcactagatatcacctagtgctaagataaaaaccaaaacaatatcagaattacatttatgctctaaatttgtagttgtccattgttgtgcttagtaaatgtgtgtcattaatgctgtattctcctagctattatggaaacttgtttaaataaagatatggatat

SEQ ID NO: 164961 - DNA, 607 bp, Homo Sapiens
atagaggatcccccgaagttactcgagactccaactcaagtcctatcatctctccttcagccatgcttcctatctaccctgccattgatattgatgcacagactgagagtaatcatgacacggcgctaacacttgcctgtgctggtggccacgaggaactggtacaaacactgctagagagaggagctagtatagagcaccgagacaagaaaggttttactccactcatcttggctgccacagctggtcatgttggtgttgtggaaatattgctggacaatggtgcagacattgaagcccagtctgaaagaaccaaggacacaccactctccttggcttgttctgggggaagacaggaggtggtggagctattgttagctcgaggggcaaataaagagcacaggaatgtttctgattacacacctctaagtctggctgcttctggtggctatgtgaacatcatcaaaatattactaaatgcaggagctgagattaactctagaactggtagcaaattgggcatctctcctctgatgttagcagctatgaatgggcatacagctgctgttaagctcctgttagacatggggtctgacataaatgctca

SEQ ID NO: 164962 - DNA, 784 bp, Homo Sapiens
agagcttcttctgtcatctgtttgaagaaaacatgggacaataaactgctcgctgatggcctttttctcaggatcttgttgcaaacagagctgtaccaagctaaagaaggcaggagagaaagtttttgaggatggtgtgtgtaatcggtcactatttactgtgtgagttccactggagacaagcacactttctccaatcccagagtctacacctgactgggaatttttcattctggattctgattgagggaaaatactgatatccaatgggctataaggaggacctttcagtttctgtaacagcatctgagttctatgcatgtcctggaaaggcacctgcccactggctaattcacatgctgtaatcccaacactgtaaatatctgacttcacattatacccatgtaaatcctgtctcagtagttctggactcagccacggctgcactgatgtgctgaactgtgggaaatcatacacagccctatgcctctgtccatgcttaaccaaactatgcagatgggaaaggccagagagggtcactaggccatcaccagaaatgaggatatggctggctttaatactcctgtgaatacagccattttggtgcagatagttcaaccctctcacggctccaaagagaatgtttcttattaaagtttcactcattccttcaggaaaataggtcctcaagagttgacttgctgaaccataggccataaatggagaaataacccaaagccagcctgccaacagtgaaaactgtccaataagttgtaatattggg

SEQ ID NO: 164963 - DNA, 430 bp, Homo Sapiens
atagaatgagcctggcccgttggaaatggcacagccgatgaaaacctcacgatgacagtagttgggacactggaaatggctagcacgtccagaggcgcaggatccagcgcagccatgcccattcggctcaccaaaaaaagcttggaagcactgctgcaaagaacagcgcggattactcacatcacctctaggttcactaaagtcaggcactttggggggagttgagagtcagacttccgtgtgctgctgggaatccaggggcgggatcgtcacctcttcgaagtggccgtcgtcccccgctctcatagtcactcatcatgacctcggactccacttcgcagcaggctgacacgtcagagcaggaggcggtggaggcgtacacagacatgggcatgctctcgacagcgggcgcctcgaagtgtctttgata

SEQ ID NO: 164964 - DNA, 308 bp, Homo Sapiens
tacgatcgagctcgcaccgttcatcttctgaatcccacacacacacacgcctcatgtaatggacttttataacaaaagaaaaaatttggatttctaatttacaaatggcaaattatttatccctctctggatgcaccaaagaccagtaaagtttatagcttttccatctatatttataaagcaatactgtattataaaaatcaatatttttattacatgcttgaaatttttattttgttgttttaaaatgtgcactctaaacatatcagaaccttatttcttcctatgaacttaagctgcctgcgcac

SEQ ID NO: 164965 - DNA, 1012 bp, Homo Sapiens
  misc_feature (806)..(806): n is a, c, g, or t
cggaacagtacccgtattagtggatccaggcacagaagcaataggggtgccaacagttcgaagattctggattacagatgacaaaaactgctggctagcactttcatacaaatcaaaacaaatctgatatgccatcaggaggttgtcttcctttaccagtttctctaagatatcactcacagcctgaggatcatctaagaaaattaagcactgacaaacattgatgaaatcaggtttctccaagttcatgtagattttaactagaactcttagtactttattccgaaactgtttattctgcattaaagacatgcagagcttaaggctataagctaacattcctgggacatcattcgactccagtatggtcttttcaaagacgtccagtcttcgtgtctccagagcaatgcaaatagcatgtttatacttgtgatcatctagacatcgctggaacattttatttacgatgccttccaatctctggtcaattggttttattttctccttcaggcaaatctgcattttccacacattgtttggtgtagtgatcaatgcattttgctataatagtttccacatattcagagttatcattgacattgaagaggtcccctgctccaagagcataattcagagactcctcaaaagcccccaggtgataaaatactttagatgccactaaggctgcaactgccgactccggaaaccttcatcttcgtataaaacctctattttgtctacggactcggaaatttctgcccagaagtcattaacaactgcattcaatttgtgtagtgcaaattccnttaagctgtggttcatcttcatccagaagagaaataattccagcggccgaggtgatcatggctgcgcccctcactcgcccgtcggctcgctcgccgttccagctgcgcagtgtatctgtcagctcaggggccgctcagttcaccgcgcctccttgctccccgggtgcgctgctcagtcagtcgcctcctcaggccgccggctcgct

SEQ ID NO: 164966 - DNA, 781 bp, Homo Sapiens
tgattaggcgcttggccactcttccctcagtttctcctgctcacgttgatatttttcctgcagtaggcggtcctgctccttctgccacctctcctgccgcttccgctcctcctcttgatcccacacccagcgactcggggcactgatggttggaactggaagatcaggaaccaccgaatcagagcttccttgttcaaaaaattgtgatcgcctttttaagtttttcaaagaaatggattcagatgcttttgattcaaaagcattgctttcatcatgaattccattgatttctttggattcaatattagaactctgaaggctttcggagaaatcagttgttacagatagatttgaagatttttctgagttgtaaattccagaagttgcatcaatccactttgtttcaggtgaaccagcctttccatagcgcctcacatccatcactaggtgtccagtttcttgagccttagccatggcttcctcccactcttttgaatcgttatatgaaaacttggtgttgttaatagcaataatttcatcatctgcttgtagctgagaaaattctgctgggctacctgcttcaactgatgctacgaagatcccaggaatatcccattttattgtaaacccaaagtcaagactcttcccaggcgtctggtttatgctgattctcatatcactgaactgatcctgggatcttgagacttctctttgtggggagatttccccttctccagattcagacattataacagaccagatgtggaagacatgcataaga

SEQ ID NO: 164967 - DNA, 966 bp, Homo Sapiens
taaggagctgtaaaattagcttgtagaaatggacttatccttaagttttaaaaagttaggaaatcctaaaaatgttaggcttcctgcacaagtggctatgttcatttaatggctagtgaacatgggaatgtatttttatcctcctagctggtggttccgtttggtaaaccagactagaatgatttgagaggggcaaagagaataggcaggaccttccttctatagctttacatatttagaatgttaatacttaatgacattgaagttaccttgcaatgattgataagaggattattaatatcagttaggggaatagggaggataggattctggtgccttcttcagcagacttgctcccaagacaaagattctattttgatagtgcaagacaaaaggactcggaagaaaacttggccatatgcctacagagcatacaactctgtggaactaaatggtttttacttggtgaaagctgctattttacggacaagatttcgattatacagttgtgtctttaagttgtcttcttatatctcattgtgtatcgggtacgaatcggttgtaacacaaggctgttctttcccagttacaaaatcctgtgttcggttgtaacctgaactcattaacaagacttgttttcaggtttatcaactggtctatttctcactgacatttgagcatgtcatttcatcactgacgagattccagggtaggaagtgctgttaattcccctttggttctctcttttaccaagattacgtcagttcaacaagatacaaaaatgcagtcttatggtttagaaaacctgttagctccatagaggcaaccacatgttaacactatggtattttacaaccttgattctcctgagttacacttgcgtccccatggtcataccacctggattttgcgtcggtacggccagaaatcgagctggttttcatagttccgatatttccgaaaaat

SEQ ID NO: 164968 - DNA, 858 bp, Homo Sapiens
gcagcgtagaggtatcttgcgcctgtcacttaagatactatctgattatttcagtagtgaagttccatacttcaatgaatccatcaacagacgcagtgaccaaatactgaccatctggagaaaatcgagcacactccacatgtgatttctgaccaaacttaatatgcctgctcagttgtgtaggaaacttttcttcttccacatctttgacagctgccttgcctcgaaacaaatctatggtcataccaggaggaagcaatccctgatgctgctgccacttcagtgcctgtcccagcaatgccatgagacgagatggaggcaccacactgacttcgccagctaaggcctgggcaattgctgctcttctcttttctttgctacttccatctgggtatgcctcacgaggatcaaagtaagacctggccaaaaggttctccagatgaatatatcgctctggctgtgtttgttttaacatgatcatgggatcagtctgtctcaaaagtgacctggcagcacccaattcacggagctctatcaattccagaacaacctgttcatagaggtcaatgagggttttgtctggcaatttcagagactgtatagcctgcaacacagtatcccaatggccactgttaatgtcagccaccaaactctcaatgctgtccacagtattcagagacacagtagtctcctcctgcaaggtggctaacgcccgatgtaaactgttctccttcaagtactgcataataaggcggatcacatccgaagattcgatttcgatcgacatagccgtatctctccgggagcagcccccagctctcctccggatggttggactagtcggggaacctctagagt

SEQ ID NO: 164969 - DNA, 489 bp, Homo Sapiens
ggggccggaggtgtcgttggtgtgttgcgcgactggccttgagggagagctggggcctgctcccggagagatacggctatgtcgatcgaaatcgaatcttcggatgtgatccgccttattatgcagtacttgaaggagaacagtttacatcgggcgttagccaccttgcaggaggagactactgtgtctctgaatactgtggacagcattgagagttttgtggctgacattaacagtggccattgggatactgtgttgcaggctatacagtctctgaaattgccagacaaaaccctcattgacctctatgaacaggttgttctggaattgatagagctccgtgaattggctgctgccaggtcacttttgagacagactgatcccatgatcatgttaaaacaaacacagccagagcgatatattcatctggagaaccttttggccaggtcttactttgatcctcgtgaggcatacccagatggaagtagc

SEQ ID NO: 164970 - DNA, 824 bp, Homo Sapiens
atctaaggtttcccctaaaatgcttcttcttttctaaccaacattggggcccagaaaatccacctttccaaaatagggggcagttccttgggcaccgggtgagccttgtcttccagttgcttgttggaaaatatcttggtagtcagggatgatccgctctgcaaacgccttgtccagcatctttttgtaccactcctgcagtcgttttggcttgggtattttttgatcaggtgggtggcaatggaagatgtaatcatctccttcacttggaggacaggcccagatgtgccctgtcacataccctaatttcttcacatactctaaatatccaataaggatctcatggtaaacggctgtgcggaggcaacgtggccggaagaaatgaatactatccagataagaaatgtacacacgcctcgtgtttggaggggggcaatcagagccgtattcttggacgtgcattccaaaaaagcagacatccacgccgtcaatttcctcaaaagcaaacagagctttggttcgatatgggaaagattcagacatttccccagaatccacaaaccgtgacttcatcccgggcttgacctccaccgtcttgtctgagctggccaccactcggacaaaaacctccccggcttcagggtgattctggcgccgcaaaaatttgttcactcggtcttccaagtggtttcccagtcttgtggtctgcagcctcttagcactgaatttgttttcttttcgaggtctgccagttttcttcaagcagttgtcgcacacaaaacctgaaggccaaatgatgtcatagtgcagaacgcaaatctgat

SEQ ID NO: 164971 - DNA, 295 bp, Homo Sapiens
ggattagatgggaaagagcttgctacgtgcccaggagccagacctgtgaggctcggggagcacctggaaagaggagctttggagattctgaattgatcttaggatggaaaaataaaaacgcataaaacttaaaatacccattatttcacggaataaacatacagtaaaaaataaagggttcttactagttccaaataatttaatccaaactcaccctaatttcttcacatactctaaatatccaataaggatctcatagtaaacggctgtgcggaggatctactcgaaagtggcc

SEQ ID NO: 164972 - DNA, 1029 bp, Homo Sapiens
  misc_feature (994)..(994): n is a, c, g, or t
  misc_feature (996)..(996): n is a, c, g, or t
  misc_feature (1001)..(1001): n is a, c, g, or t
gggctttgcccaagataggagttctctgatgcagaaattattgggctcttttagggtaagaagttcgtgtctttgtctggccacatcttgactaggtattgtctactctgaagacctttaatggcttccctctttcatctcctgagtatgtaacttgcaatgggcagctatccagtgacttgttctgagtaagtgtgttcattaatgtttatttagctctgaagcaagagtgatatactccaggacttagaatagtgcctaaagtgctgcagccaaagacagagcggaactatgaaaagtgggcttggagatggcaggagagcttgtcattgagcctggcaatttagcaaactgatgctgaggatgattgaggtgggtctacctcatctctgaaaattctggaaggaatggaggagtctcaacatgtgtttctgacacaagatccgtggtttgtactcaaagcccagaatccccaagtgcctgcttttgatgatgtctacagaaaatgctggctgagctgaacacatttgcccaattccaggtgtgcacagaaaaccgagaatattcaaaattccaaatttttttcttaggagcaagaagaaaatgtggccctaaagggggttagttgaggggtagggggtagtgaggatcttgatttggatctctttttatttaaatgtgaatttcaacttttgacaatcaaagaaaagacttttgttgaaatagctttactgtttctcaagtgttttggagaaaaaaatcaaccctgcaatcactttttggaattgtcttgatttttcggcagttcaagctatatcgaatatagttctgtgtagagaatgtcactgtagttttgagtgtatacatgtgtgggtgctgataattgtgtattttctttgcgggtggaaaaggaaaacaattcaagctgagaaaagtattctcaaagatgcatttttataaattttattaaacaattttgtgataccaactctgncnaggancctaaagtttgtaacatcaaatatctgg

SEQ ID NO: 164973 - DNA, 953 bp, Homo Sapiens
  misc_feature (403)..(422): n is a, c, g, or t
  misc_feature (846)..(846): n is a, c, g, or t
  misc_feature (856)..(856): n is a, c, g, or t
gccgggaccgggttgcacaaagataagttgtaaagattcagtccctggcagatgcaccaagctcgaaagcgctatcgagatcgcctgcagtacttccgggaccatataaatgacattatcaaaatccaggcttttattcgggcaaacaaagctcgggatgactacaagactctcatcaatgctgaggatcctcctatggttgtggtccgaaaatttgtccacctgctggaccaaagtgaccaggattttcaggaggagcttgaccttatgaagatgcgggaagaggttatcaccctcattcgttctaaccagcagctggagaatgacctcaatctcatggatatcaaaattggactgctagtgaaaaataagattacgttgcaggatgtggtttcccacagtnnnnnnnnnnnnnnnnnnnntaaggaacagttgtctgatatgatgatgataaataaacagaagggaggtctcaaggctttgagcaaggagaagagagagaagttggaagcttaccagcacctgttttatttattgcaaaccaatcccacctatctggccaagctcatttttcagatgccccagaacaagtccaccaagttcatggactctgtaatcttcacactctacaactacgcgtccaaccagcgagaggagtacctgctcctgcggctctttaagacagcactccaagaggaaatcaagtcgaaggtagatcagattcaagagattgtgacaggaaatcctacggttattaaaatggttgtaagtttcaaccgtggtgcccgtggccagaatgccctgagacagatcttggccccagtcgtgaagggaattatggatgancaatctctcnacatcaaaactgaccctgtggatatttacaaatcttggggttaatcagatgggagtctccagacagggaaagggcagccaaactgcccctatgatgt

SEQ ID NO: 164974 - DNA, 594 bp, Homo Sapiens
  misc_feature (469)..(477): n is a, c, g, or t
gatggcaaaagaggtctgtggagaataccctgaacttgtgtggctcccagccactgcctcaactcttcatgcggagccagttactcactgagagtcttgtaatcatcccgagctttgtttgcccgaataaaagcctggattttgataatgtcattatatatggtcccggaagtactgcaggcgatctcgatagcgctttcgagcttggtgcatccttgccagggactgaatctgtggaaaagggatcctggaaattagaagagtccttcatctcaacacgtgttatacctgtgcccctcatggagaaaccctgttcaggctaccatacctttacaacttcatctttgtgggagcgcaggtaagctaaccgatcttgatatgccttcttctgcttgtatcctctccactgtgactgaaacagtcaaatgttacagaagacatattacttcccaagcatcaatggaagttnnnnnnnnnctttcatcttgatacatgatccaagtgcaatttcatgatgaagttttaggaaggaccacttccagcagtgacagggggaacaagggcacgggccatccctccatcctgagacagcat

SEQ ID NO: 164975 - DNA, 700 bp, Homo Sapiens
  misc_feature (76)..(95): n is a, c, g, or t
ttcactttctacactatcaaaattggactgctagtgaaaaataagattacgttgcaggatgtggtttcccacagtnnnnnnnnnnnnnnnnnnnntaaggaacagttgtctgatatgatgatgataaataaacagaagggaggtctcaaggctttgagcaaggagaagagagagaagttggaagcttaccagcacctgttttatttattgcaaaccaatcccacctatctggccaagctcatttttcagatgccccagaacaagtccaccaagttcatggactctgtaatcttcacactctacaactacgcgtccaaccagcgagaggagtacctgctcctgcggctctttaagacagcactccaagaggaaatcaagtcgaaggtagatcagattcaagagattgtgacaggaaatcctacggttattaaaatggttgtaagtttcaaccgtggtgcccgtggccagaatgccctgagacagatcttggccccagtcgtgaaggaaattatggatgacaaatctctcaacatcaaaactgaccctgtggatatttacaaatcttgggttaatcagatggagtctcagacaggagaggcaagcaaactgccctatgatgtgaccctgagcagcgctagtcatgaaaagtgtgaaatggacggtacgagccgaatcgaacatgtcatactgttcgtaggaa

SEQ ID NO: 164976 - DNA, 1906 bp, Homo Sapiens
  misc_feature (113)..(143): n is a, c, g, or t
acgatcgagagtgtacctcgagactttaaattatcagatgctttggcagtagaagatgatcgaagttgcacctgttccattgaagtgtcgtggaagctacaagtagggtgagnnnnnnnnnnnnnnnnnnnnnnnnnnnnnnncctgtgcttgaagagcaggtcatcaaagaaagtgacgcatcaaagattcctggcaaaaaagtagaacctgtcccagttactaaacagcccacccctccctctgaagcagctgcctcgaagaagaaaccagggcagaagaagtctaaaaatggaagcgatgaccaggataaaaaggtggaaactctcatggtaccatcaaaaaggcaagaagcattgcccctccaccaagagactaaacaagaaagtggatcagggaagaagaaagcttcatcaaagaaacaaaagacagaaaatgtcttcgtagatgaaccccttattcatgcaactacttatattcctttgatggataatgctgactcaagtcctgtggtagataagagagaggttattgatttgcttaaacctgaccaagtagaagggatccagaaatctgggactaaaaaactgaagaccgaaactgacaaagaaaatgctgaagtgaagtttaaagattttcttctgtccttgaagactatgatgttttctgaagatgaggctctttgtgttgtagacttgctaaaggagaagtctggtgtaatacaagatgctttaaagaagtcaagtaagggagaattgactacgcttatacatcagcttcaagaaaaggacaagttactcgctgctgtgaaggaagatgctgctgctacaaaggatcggtgtaagcagttaacccaggaaatgatgacagagaaagaaagaagcaatgtggttataacaaggatgaaagatcgaattggaacattagaaaaggaacataatgtatttcaaaacaaaatacatgtcagttatcaagagactcaacagatgcagatgaagtttcagcaagttcgtgagcagatggaggcagagatagctcacttgaagcaggaaaatggtatactgagagatgcagtcagcaacactacaaatcaactggaaagcaagcagtctgcagaactaaataaactacgccaggattatgctaggttggtgaatgagctgactgagaaaacaggaaagctacagcaagaggaagtccaaaagaagaatgctgagcaagcagctactcagttgaaggttcaactacaagaagctgagagaaggtgggaagaagttcagagctacatcaggaagagaacagcggaacatgaggcagcacagcaagatttacagagtaaatttgtggccaaagaaaatgaagtacagagtctgcatagtaagcttacagataccttggtatcaaaacaacagttggagcaaagactaatgcagttaatggaatcagagcagaaaagggtgaacaaagaagagtctctacaaatgcaggttcaggatattttggagcagaatgaggctttgaaagctcaaattcagcagttccattcccagatagcagcccagacctccgcttcagttctagcagaagaattacataaagtgattgcagaaaaggataagcagataaaacagactgaagattctttagcaagtgaacgtgatcgtttaacaagtaaagaagaggaacttaaggatatacagaatatgaatttcttattaaaagctgaagtgcagaaattacaggccctggcaaatgagcaggctgctgctgcacatgaattggagaagatgcaacaagtgtttatgttaaagatgataaaataagattgctggaagagcaactacaacatgaaatttcaaacaaaatggaagaatttaagattctaaatgaccaaacacgccatgtg

SEQ ID NO: 164977 - DNA, 492 bp, Homo Sapiens
  misc_feature (52)..(101): n is a, c, g, or t
ggatgatgaagttcttgcaaaacagaaaagagaacaaaagcttattcctacnnnnnnnnnnnnnnnnnnnnnnnnnnnnnnnnnnnnnnnnnnnnnnnnnntccagaatggaaacctccatgaatccgactctgagagtgtacctcgagactttaaattatcagatgctttggcagtagaagatgatcaagttgcacctgttccattgaatgtcgttgaaacttcaagtattgctgagggaaagaaaatagaaggagaagaaacaaaagcctgtgcttgaatagtatgccataaaagaaagtgacgcatcaaagattcctggcaaaaaagtagaacctgtcccagttactaaacagcccacccctccctctgaagcagctgcctcgaagaagaaaccagggcagaagaagtctaaaaatggaagcgatgaccaggataaaaaggtggaaactctcatggtaccatcaaaaaggcaagaagcattgcccctcc

SEQ ID NO: 164978 - DNA, 661 bp, Homo Sapiens
aaaccgtatctctaacattatagagcactgaagtatttagccctagggtggcccaaccatgtgatgtctggagcataggatgcattcttattgaatactatcttgggtttaccgtatttccaacacacgatagtaaggagcatttagcaatgatggaaagaattcttggacctctaccaaaacatatgatacagaaaaccaggaaacgtaaatattttcaccacgatcgattagactgggatgaacacagttctgccggcagatatgtttcaagacgctgtaaacctctgaaggaatttatgctttctcaagatgttgaacatgagcgtctctttgacctcattcagaaaatgttggagtatgatccagccaaaagaattactctcagagaagccttaaagcatcctttctttgaccttctgaagaaaagtatatagatctgtaattggacagctctctcgaagagatcttacagactgtatcagtctaatttttaaattttaagttattttgtacagctttgtaaattcttaacatttttatattgccatgtttattttgtttgggtaatttggttcattaagtacatagctaaggtaatgaacatctttttcagtaattgtaaagtgatttattcagaataaattttttgtgcttatgt

SEQ ID NO: 164979 - DNA, 1068 bp, Homo Sapiens
ccatttcttttggtgggggggattgtatttttgctttctttagaaatgtaatgtttgttatatagaacttccagaacagtaatcaaattaatgaaattagacctaataattatgttttttgatggtgttgaccaataaaatatctagtgataaggaaatttgtagcatcaactagaataatctacattgatagcatttattgtgataagtacattgtttccacttcttgatatgactgagatttatttctctcttttagatgaaatggttgatactttagggtgaaggagctttgggaaaagttgtggagtgcatcgactcataaagcgggaggtagacatgtagcagtaaaaatagttaaaaatgtggatagatactgtgaagctgctcgctcagaaatacaagttctggaacatctgaatacaacagaccccaacagtactttccgctgtgtccagatgttggaatggtttgagcatcatggtcacatttgcattgtttttgaactattgggacttagtacttacgacttcattaaagaaaatggttttctaccatttcgactggatcatatcagaaagatggcatatcagatatgcaagtctgtgaatttttggcacagtaataagttgactcacacagacttaaagcctgaaaacatcttattggtgcagtctgactacacagaggcgtataatcccaaaataaaacgtgatgaacgcaccttaataaatccagatattaaagttgtagactttggtagtgcaacatatgatgacgaacatcacagtacattggtatctacaagacattatagagcacctgaagttattttagccctagggtggtcccaaccatgtgatgtctggagcataggatgcattcttattgaatactatcttgggtttaccgtatttccaacacacgatagtaaggagcatttagcaatgatggaaaggattcttggacctctaccaaaacatatgatacagaaaaccaggaaacgtaaatattttcaccacgatcgattagactgggatgaacacagttctgccggcagatatgtat

SEQ ID NO: 164980 - DNA, 415 bp, Homo Sapiens
gggctgagcaggaagaagaattcattagtaacactttattcaagaaaattcagtgctttgcagaaggagaaagaaacccttgctgtaaattatgagaaagaagaagaattcctcactaatgagctctccagaaaattgatgcagttgcagcatgagaaagccgaactagaacagcatcttgaacaagagcaggaatttcaggtcaacaaactgatgaagaaaattaaaaaactggagaatgacaccatttctaagcaacttacattagaacagttgagacgggagaagattgaccttgaaaatacattggaacaagaacaagaagcactagttaatcgcctctggaaaaggatggataagcttgaagctgaaaagcgaatcctgcaggaaaaattagaccagcccgtctctgctc

SEQ ID NO: 164981 - DNA, 829 bp, Homo Sapiens
  misc_feature (98)..(98): n is a, c, g, or t
aataacttcagtaaggtccatatcacgagcctttcgaagcaatcgcacaagggcaggcacaccatcacagttttttatggcaatcttgttatcctggncacgtccaaaagagatattcttgagagctccacaggctccaaggtgcacttcctttttgggatggtctaacaatcccaccagtactgggatgcccttgagcttccgcacgtcagtcttcaccttgtcattgcggtagcataagtgttgcaggtatgcagctgcattggacttgacagcatccaagcggaatccaagcatggctgatcacctctggcagctctggctgtctccaattaggaggtggaggccctcctttgcgcaggctatccaagcttgctaaacttcctcgctcatgctgggccaaaggagcccagtagtattgatacgatggcacctcctcaccaatcatgtcttcatagctcctgaggcgccgacgagggtcagagggtgtcccagtccgacgggcagtgccataatcagacatcataccataatccaggtcatcatagcccatactacgctggtcatcctctagcccataaggctctggatgaaagcgatgcagatccacgctgctcccacctacccgaacctggggttggggcccatacacatcctgtctactaggtgcccggtagccttccatgcggggcctataccgctcctcaatgcgggtcacccgggacagactgccatagttatcactgccacctggataaccatcttcatagtggcgactataaccatcaggagggtaggggaagttcctaggaagggtagcagtcgcaca

SEQ ID NO: 164982 - DNA, 709 bp, Homo Sapiens
gggtggcaattcggacgaggctgggtttttcttgtggtgtaaagctggccctgcctcctgggaagatgaggttctgagaccagtgtatcaggtcagggacttggacaggagtcagtgtctggctttttcctctgagcccagctgcctggagagggtctcgctgtcactggctggctcctaggggaacagaccagtgaccccagaaaagcataacaccaatcccagggctggctctgcactaagagaaaattgcactaaatgaatctcgttcccaaagaactacccccttttcagctgagccctggggactgttccaaagccagtgaaatgtgaaggaaagtggggtccttcggggcgatgctccctcagcctcagaggagctctaccctgctccctgctttggctgaggggcttgggaaaaaaacttggcactttttcgtgtggatcttgccacatttctgatcagaggtgtacactaacatttcccccgagctcttggcctttgcatttatttatacagtgccttgctcggcgcccaccaccccctcaagccccagcagccctcaacaggcccagggagggaagtgtgagcgccttggtatgacttaaaattggaaatgtcatctaaccattaagtcatgtgtgaacacataggacgtgtgtaaatatgtacatttgtctttttataaaaagtaaattgtttataagg

SEQ ID NO: 164983 - DNA, 512 bp, Homo Sapiens
ggttgttaaatagcagcagagaccaccttagaaaacaggaattgcccaggtgcaattctcagtttaagagaacacatggggctgattacttgtagcaaaaaagagacccgtggaagacacattggctctcaaagcttctccaaagcacatgaggcctaaataagtggaggtcccatcaaggcttggagagggagtgaaagtgttgggagggcctcattcttggccagatcagtggtaaggacgcaggcagtctatccaggcccgaatcatggcgtgccatctaaggccaggtggagacaacactgttctgtgatgaaagcttcacctggaaacaatgggcctagtacctgtgtccagccagccccaagctgcttgcatgtcagtagctgggttctctagccaggggtataatgaacccctctgatcttggtctctctttgccctctgcctcattgaaactgcagttaagatgccaagacagtcccagggtccagatcatgggacaggatatg

SEQ ID NO: 164984 - DNA, 1071 bp, Homo Sapiens
ggctgtaccggtccggaatttcgggatatcgtcgacccacgcgtcggacccacgcgtccgatcgcgagcgagcgaggcctgggccttgcctgagtattctaccttgtaaatactgttattgtgtatatacatgtaaaatgatgacatcaggtgggcacataactcgagccacggggaaacatgggaacaacctgcaaaaccaaaaccagacacaagcacaagcagcgcccacaggccactgcagaacaaattagacttgcacagatgatttcggaccataatgatgctgactttgaggagaaggtgaaacaattgattgatattacaggcaagaaccaggatgaatgtgtgattgctttgcatgactgcaatggagatgtcaacagagctatcaatgttcttctggaaggaaacccagacacgcattcctgggagatggtcgggaagaagaagggagtctcaggaccagaaggatggtggccagacggaatccaatgaggaaggcaaagaaaatcgagaccgggacagagactatagtcggcgacgtggtgggccaccaagacgggggagaggtgccagccgtggacgagagtttcgaggtcaggaaaactggattggactggcaccaaagagtggagggccttctggaagaggaacagaaagaggcagaaggggccgtggcgaggccagaggtggctctggtaggcgaggaggaaggttctgctcaggactgggacctttagcccagtgattatgcagaagccgcatactgttgattacttatggggaataggcgggaatacgtggaacaacctggcactttggacccgatgaatggacgatgctgggaatggacacacggtcgcgctcggcatggaatgcgacttcggaacacaaaccaagaccaaaggtacagcctcccgcggaactaaaagctggcgacataaccgttcgtggaaccaccaagcgaaaggccagtcgccgcctcatgcacggtgaacaaggcgacgcgccaacaaggggcaaggaccgacgagacgcgtcatcgtgactgcagtgctcagagtaggc

SEQ ID NO: 164985 - DNA, 700 bp, Homo Sapiens
cctgcggcattcaaatacacttgccacatgtcaaaagacctcaaggtagaaaaaaataaaataaaaatataaatatctgagaatccatcttaataaataaattaaaaacacaataaaacgttttcatggaaaactgttaatgtcagaacattcagaccacctcaacaatgcatgatcagtaacattacaatgaacattgatgttgaagaaaaactacagtacatggatatagctatttatttctatctaccagaaaataaagtcgtatcttttcttagtataatattggtcatttctaatcagaacacactattgccaggaacacagtagttattgttaaaatcagctgcactagatacaatttgaaaatatccagcaccaggttaattccaataatgaacccaatagattagttaatgctatgagaagactaaggagaaagagaaaagagacacagacccaggcctggctcaacatgctactaactaccagctctctgaagtgtcactgggaacaatacacactccatgcgttttgctacatctccggaagaggtaaggacttgagtccacacatggatgctttcaagtccttgaggcccacagcctggtgtgtttcacgcacagataaggtcctccctaggtctacaggaaccctctagggaagaccttatttttgcgtctggggtagcgagctcgaa

SEQ ID NO: 164986 - DNA, 553 bp, Homo Sapiens
  misc_feature (386)..(444): n is a, c, g, or t
agagctgttattgataccatttgagccagacctggtctgggccccttttccctttctcccaagtcttcccatggcattaaccaatctaatgggttcattattggaattaacctggtgctggatattttcaaattgtatctagtgcagctgattttaacaataactactgtgttcctggcaatagtgtgttctgattagaaatgaccaatatgatactaagaaaagatacgactttatttgctggtagatagaaataaatagctatatccatgtactgtagtttttcttcaacatcaatgttcattgtaatgttactgatcatgcattgttgaggtggtctgaatgttctgacattaacagttttccatgaaaacgttttattgtgnnnnnnnnnnnnnnnnnnnnnnnnnnnnnnnnnnnnnnnnnnnnnnnnnnnnnnnnnnnctaccttgaggtcttttgacatgtggaaagtgaatttgaatgaaaaatttaagcattgtttgcttattgttccaagacattgtcaataaaagcatttaagttgaatgcg

SEQ ID NO: 164987 - DNA, 443 bp, Homo Sapiens
  misc_feature (11)..(11): n is a, c, g, or t
  misc_feature (102)..(128): n is a, c, g, or t
ccttttattgnacaatgtcctggcaacaataagccaaacaatgccttaaatttttccattcaaattcactttcccacatgtccaaaagacctccaaggtagnnnnnnnnnnnnnnnnnnnnnnnnnnnctgagaatcccatccttaataaataaattcaaaaacacaataaaacgttttcatggaaaactgttaatgtcagaacattcagaccacctcaacaatgcatgatcagtaacattacaatgaacattgatgttgaagaaaaactacagtacatggatatagctatttatttctatctaccagaaaataaagtcgtatcttttcttagtataatattggtcatttctaatcagaacacactattgccaggaacacagtagttattgttaaaatcagctgcactagatacaatttgaaaatatccagcaccaggttaat

SEQ ID NO: 164988 - DNA, 805 bp, Homo Sapiens
gggacacgaggtctgagagacagaggcagcgtgtttgagctgctggtgcggtggtcagcgcgatgcccaaggccaagggcaaaacccggaggcagaagtttggttacagtgtcaaccgaaagcgtctgaaccggaatgctcgacggaaggcagcgccgcggatcgaatgctcccacatccgacatgcctgggaccacgctaaatcggtacggcagaacctggccgagatggggttggctgtggaccccaacagggcggtgcccctccgtaagagaaaggtgaaggccatggaggtggacatagaggagaggcctaaagagcttgtacggaagccctatgtgctgaatgacctggaggcagaagccagccttccagaaaagaaaggaaatactctgtctcgggacctcattgactatgtacgctacatggtagagaaccacggggaggactataagagtggcaagacttcctcgattctttgcagaagaggaagatggaggtggagtgactggtttacatcacagctgccccaggctgaggcgtcccccggaccagtgaagctggagccagggtgtaaggcaaggaggtgctgtgtggctccagaggagctggccaggtcccatggaatcagaaggttacacacacacgtgcacactccccgctctggggaaggaactgttctcagaggctccaatttatattcatctgggggttcacggaaaagccagaacctgcgtgttttcagggtgggtgatgtaaatattagtgtgtaccataataaagcaaatatattttacttctctga

SEQ ID NO: 164989 - DNA, 908 bp, Homo Sapiens
ggggttacacgaggtctgagagacagaggcagcgtgtttgagctgctggtgcggtggtcagcgcgatgcccaaggccaagggcaaaacccggaggcagaagtttggttacagtgtcaaccgaaagcgtctgaaccggaatgctcgacggaaggcagcgccgcggatcgaatgctcccacatccgacatgcctgggaccacgctaaatcggtacggcagaacctggccgagatggggttggctgtggaccccaacagggcggtgcccctccgtaagagaaaggtgaaggccatggaggtggacatagaggagaggcctaaagagcttgtacggaagccctatgtgctgaatgacctggaggcagaagccagccttccagaaaagaaaggaaatactctgtctcgggacctcattgactatgtacgctacatggtagagaaccacggggaggactataaggccatggcccgtgatgagaagaattactatcaagataccccaaaacagattcggagtaagatcaacgtctataaacgcttttacccagcagagtggcaagacttcctcgattctttgcagaagaggaaaatggaggtggagtgactggtttacatcacagctgccccagggctgaggcgtcccccggaacagtgaaactggaaccagggtgtaaaggcaaggaggtgctgtgtggctccaagaggagctggccaggtcccatggaactcagaaaggttacacacacacgtgcacaactcccggctctggggaaagaactgttctcagaggctccaaatttatattcatctggggggttcacgggaaaaagccgaaccttggctggttttcaagggtggggtggaggtaaatatagtggtggtaacttaattaagccaaattatttttttt

SEQ ID NO: 164990 - DNA, 769 bp, Homo Sapiens
tccaggcatgcagcgtgtgcacaggagccacggaaccgcagtaggatttctactgttatacagcccttgaggcagaatgcagcagaagttgtggacctgccgttgatgaagatgaacctactgtagtaccaaccacttctgcaagaatggaatcacaagctactagcgcttccattaacaattcaaatccatctacctctgagcaggcctctgatactgcttcagctgtcaccagtagccaaccttccacagtgtcagagacttcagctactcttacaagcaatagtaccactggcacttctataggagatgactcaaggagaactacatctagtgctgtaacggaaactggccctcctgcaatgccaaggttaacttcctgctgtccccagcactcaccatgtggagggtcgtcacagaaccaccatgcattaggacatcctcatacaagttgctttcagcagcatggtcaccattttcaacatcatcaccaccacaacttctaaggttaagcttaaccttagaagttgtggctttcacataggatgcttttgaggattaaataaagcatacgtacattttttgttaattttttattgaggtccaatgtacaaatgcaatactaattctgataggttttaacagtctatatacttttataggtaagattgctgtgagtaaccaaccccacgccaggggaaattgagtcacggaaaaattgcttttcaaattcttatttccagccccacttctaggtgtaagggggtcc

SEQ ID NO: 164991 - DNA, 691 bp, Homo Sapiens
gtggcatcgcaaaaggctaggcagtacagtgatcacatggaaaatgtgtatggctatttaatgaagtataccaaccttgttcactgggtggcagtacaggttttttgttttaaacaatgaagctgggctgttggagtactttgtgaatgaacagtctagaaatcagaaacctagaggaactttgcagcttgcaggagctgtaatatcacccagtgatgaggattctcacaccttcactgtaaacgctgccagtggggaacaatataaactcagagctacagatgcaaaagagcgacagcactgggttagcagacttcagatatgtacacagcatcatactgaagctattggaaagaataatcctcctctgaagtcacggagcttctcacttgcatctagtagtaactctcctatatcgcagaggagaccaagtcaaaatgccatttctttttttaatgttggacattccaaactgcaatcactgagcaaaagaactaatttacctccagaccatcttgtggaagtcagagaaatgatgtctcatgctgaaggacaacaaagagacttaattagacgaattgaatgccttcctacttctggccatcttagttccttggaccaggatctcttaatgctcaaagctacttccatggcaactatgaactgctaaatgactgctttcatattctcc

SEQ ID NO: 164992 - DNA, 735 bp, Homo Sapiens
ttcatcttctgaatcccattcactttaattgctgttgtcatttgaattccttaattaggagtagattatggaatttactagtctttttgccttgtcaacgcttagtctactgaatatgtgcaggaaaaacattttggggatttgtggaggggatgacagaaatcttcaaagtgatgaccctgtgcttgcttgaaatgatagttaggagggatggatgtgggggaagagaagctgaaatcctgattcttcaacaattttaaggaaaaaagtgatgaaaactgacattaatatgtcacagtaaagactcatataaggtgtgggaattgagcatgggatggcataattaatttgtgccaaataaacaaaatcagatcctttcttgagaataaatgttcacacagatgtgcctttatagaatatgtacttttaaaaaactccatatatgacatgttgtatgagaaggcctctcttagatcactggtgacctctagtactttggactaaaactaatgaaatattatttaggcagtttatgtatcatttctggagttcttgacttagagctaagggcgtgtgtagatactgatatccagcaagctgagccattttcaactataataacctaatgggtaaagcttctatagtactctccttcaaacctgtcagtagccatcactcggggtctactttgtttaccatgtaggttcttagacctctccccttgagattctggac

SEQ ID NO: 164993 - DNA, 1029 bp, Homo Sapiens
gggggggtcgaggtctccttgaagaaaatgatattttcaggcatgctcaagcaggtgttctcatcagcactaatagtcatccaatcttaaggaaaaacagaatatttgatggatttgccgcaggtattgaaattacaaatcacgcaactgcaacactagaaggcaatcagatttttaacaaccggtttggaggcttatttttagcatctggtgttaatgtgacaatgaaagataacaaaataatgaacaatcaagatgccatagaaaaggctgttagtagaggccaatgtttatataaaatatcaagttataccagctatcccatgcatgatttctacagatgtcatacttgtaacaccacagatcgaaatgccatatgtgtgaactgcattaagaagtgccatcagggacatgatgtagagtttattagacatgataggtttttctgtgactgtggtgctggaacactgtctaatccttgtacattagctggtgagcctacacatgatacagatacactatatgactctgctccacctatagaatctaatacattgcagcacaactgaattcccttccctaaagaaaaagtcctgccattgtaacatcataacttaaaacactttttttggaaaaagatttaaaatatttgcccatgctacagggaagagactgtattaaaaatggataacacaagggcagttgacaccatgaagctcaagctacccaaaagaaagtggcaatatattgactcaggatctcaaagctgggtgttttagcattactgtgtaaagacttgaagggacagaagtaaagaaaataagctgcaattttgtacagataccaacttctgaaaagctggtgtttttacaactagcattgaatgcagtcccatttgcagtagtaatcttcaatagacaagcagctttgttgctgcctttatggacatgggtacccattgcttttgtaatatggtaaaaatgtgagctagcacttctgcgttcctttgatttctccaggtaaccatgc

SEQ ID NO: 164994 - DNA, 810 bp, Homo Sapiens
aggtgactctagagtatcccgtctcacttctgaatcctctatggagggcatttcaacactgttctccatgatctctttgggaggatttcttctctgctcacctgcttggtgtcattcaatgccatgccgtgtctcagcacatgtctttcccactcagagccctgtgaaaacgcccgtccacaaaattcacatggaaaacgcttctcagtgttaagagcagccccgtggtcagaaaatctcatcagctctctgtcttgagccttgctgttcatttcttcttccttgtcctcatcatcgctgctggagctctccattttctccttcatctgttccagctgatccaagttaacccgtccaaccagctcaaagttacggcttaccttatgctcatcccgaaggtggctgtccagttcctccgtgtgcttggtctcatagtagcagagctggcatttgtaaggtttcagttcattgtgcttttctatatgttgctggaggctctcatcactggagcaggtgaaggtacacttatcacagcggaaaactactccctgcaagtatttggacagtttggaccggcgaacttcaatggggacaacacgctcttctcggtgcagcacgatgtgctcaatcatgttgcgctcgtatttggtgtgatagaggctgagaggattgcgaagatctttggggccctctctcgggacctgttgagtgccccgcttccacgtgcatagtataagcagatttatagcctgtgtaaaaggagcagtcttcgcactttaaaagcttcttcccacccagcttgcatgcctt

SEQ ID NO: 164995 - DNA, 1337 bp, Homo Sapiens
  misc_feature (1205)..(1205): n is a, c, g, or t
  misc_feature (1207)..(1282): n is a, c, g, or t
gggacggaaagcgggagggacaaattgccaatgtttggagtctggtttccaggttgccgtttttgggggctctgggtgtggcggttgccgtagctgaaattggctgcaccatgtcggccttcgagaagcctcagatcatcgcccatatccagaagggcttcaactacacggtgtttgactgtaagtgggtgccctgcagcgccaaatttgtgaccatgggcaacttcgcacggggcaccggcgtcattcagctgtacgagatccagcacggggacctgaagctgcttcgggagattgaaaaggccaaacctattaaatgtggaacatttggtgcaacatctttacagcagagatatttagctactggagattttggtggaaaccttcatatatggaatttagaagctccagagatgccagtatattctgtaaagggccataaagaaattataaatgccatagatggcataggtggactaggaattggagaaggagcacctgaaattgtgactggcagccgagatggaactgtgaaggtgtgggacccaaggcaaaaagatgatcctgttgctaatatggaacctgtacaaggagaaaacaagagagactgttggactgtggcatttggcaatgcttataatcaagaagaacgtgttgtttgtgctggctatgacaatggggatatcaaactatttgatctcagaaatatggcattacggtgggagacaaacatcaaaaatggggtgtgtagcttggagtttgacagaaaagacataagtatgaataagttagtagccacatctctggaaggaaagttccatgtttttgacatgagaacacagcatccaaccaaaggtttcgcctctgtttcagaaaaggctcataaatctactgtgtggcaggtccgacacctgccgcagaacagggagctctttctgacagctggaggcgccggcggccttcacctctggaagtatgaataccctattcagcggtcaaagaaagattctgagggaatagaaactgggagtcgcaggttctgtaagccttctgcagaatgttacgttgtccacccagcccatttcaagtgtggataggcagtccagataaaaggggtctctgcgtctgtagttcatttgaccaaacggtgagagtactgatcgttacaaagctcaataaaatttgacttcaagactttggacttngnnnnnnnnnnnnnnnnnnnnnnnnnnnnnnnnnnnnnnnnnnnnnnnnnnnnnnnnnnnnnnnnnnnnnnnnnnnngaaatccgagaccatccctggctaaacatggttgaaaacccccgtcttctactgg

SEQ ID NO: 164996 - DNA, 560 bp, Homo Sapiens
tcatcttctgaatctgcatatttcccatctaaagtcccagctgggatctcactaatagggcctctttaacccactttcagcaatatgctaaatgaaacttaaggagaaaatttcaaaactgataagaaacatattgatatagtgtctggtgggggccatgggagttgagataggccatctggatgcttatattcgtaaaatgttttgtttggtggaaataattcacctaactcacaagctgtacaaatattaagatcaaaagtcctaacttgcacaggctgtcaggaaaacctgtggtacaggaaacagagactgtctaaccaagccaaaatgtttctatgtacccagtgcaggtcttgactgccctggtatccctccatacttaacggtctgtaccagtacttctggccaagaaaatacattcatgatataggtttacttacagagcatttgcaaatgcttttgcttgttttccctttaccatttcgaagtaaataatacctccatctcacaaatgagaaacttggtatagggattcagaagggtgcggctgattgtat

SEQ ID NO: 164997 - DNA, 657 bp, Homo Sapiens
tgagctcggaccgttcatcttctgaatccccaggagaccttgctcacatcttctgtcaccttatcctggctcttgcctcatttttcttttctagagtcatcctagggaatttcttgccctcactgaccttcctccatttctttccccaccttgatgagtttcagtaggtcttttttgctttctctcgtcctaagccatttgtctctaacaagtccccatctgaaagttttattgtgaatgagtgaatgaaaccttagagagtgttgcgagttacattcatgttgcccttggatattaaaagagaggcagatgcatttgcttttggggtcttagtcgtgaatcctttgcctaggccaatgtccagaaaagtttttcctggttatactgtagaaatgtcatggtttcgggtcttagatttaagtcattgttctattttgagttgatttttgtataaggtaagagagatggattcagtttcattcttctacatgtgggctatctacttttcccagcaccatttattaagtaggatgttgtttccccagtttatatttttgtgtgcttagttaacgatcagttggttgtcaatagttggctgtatttctgggttctctattctgttccactggtctatgtgtctacttttataccagtacc

SEQ ID NO: 164998 - DNA, 814 bp, Homo Sapiens
  misc_feature (388)..(389): n is a, c, g, or t
  misc_feature (418)..(418): n is a, c, g, or t
ggctggtacggtccggaattcctcgggatatcgtcgaccacgcagtcggaatcatcaggctccaggctcatacagcaacgacttctacagccaagcaacagtccccttcacccagaatgggctgccctggctaaaaagcagctgaaaggcaaaaacccagaagacctaatatggcacaccccggaagggatctctataaaacccttgtattccaagagagatactatggacttacctgaagaacttccaggagtgaagccattcacacgtggaccatatcctaccatgtatacctttaggccctggaccatccgccagtatgctggttttagtactgtggaagaaagcaataagttctataaggacaacattaaggctggtcagcagnnggattatcgagttgcctttgatctggcgnacacatcgtggcgtatgattcatgacaaccctgcgagttcgtcggtgatgttggaatgcgctggagttgctaattgacagctgtggaagatagccaaaattcttttctgatggaattcctgttagaacaaaatgtgcagttctaccatgacctatgaataggagcagcttattaccagttctctgcaaattcttatagtaaactggagaagaacaacggtgtacctaaagagaaacttactggtaccatccaaaatgatatactaaaggaatttatggttcgaaatacatacattttgtcctccagaaccatccatgaaaattattgctgacatcattcgaatatacaggaaaaggacatgccaaaatttaattcaagtttcaattagtggatacc

SEQ ID NO: 164999 - DNA, 564 bp, Homo Sapiens
ataccgtctcatgcttctgaatcccaaaaataggatgacacaccaggaacactgacaattgagtaccaaagtattaaaatttaaaataaatatcccaaaaggtagcacctgctcatagttaagggatagggcacctctgtccaaccatgtattttaagaccaagcactttattagaaatctgtcccgtaaagagaacaaatttagcagttagaactaaaaatgccaactcatggaatgtcatcatagttgtatctactgctggtgtcttatactgtcatgctactgtgaagtaattccgtattacacatcaggaaagtaaggccaggaaggtgaacttacctgctctgggcctcctcataaccaatgagtggcagaaccaagaccgaaagtctgagttttcaagctttttactcagcccattaagtgacaaccaggaaaaaataatacgtcacttgatctttcttcccacagtgaaaaaatgcacttgcgttctgccagccttctttcagtgatatgtcggtttcttaagaattaacatactaaggatcacagtatagcaaagg

SEQ ID NO: 165000 - DNA, 863 bp, Homo Sapiens
aaagtcttggacataacagcaacatgggcagtgattcaggcaccatgggaagtgattcagatgaagagaatgtggcagcaagagcatccccggagccagaactccagctcaggccttaccaaatggaagttgcccagccagccttggaagggaagaatatcatcatctgcctccctacagggagtggaaaaaccagagtggctgtttacattgccaaggatcacttagacaagaagaaaaaagcatctgagcctggaaaagttatagttcttgtcaataaggtactgccagttgaacagctcttccgcaaggagttccaaccatttttgaagaaatggtatcgtgttattggattaagtggtgatacccaactgaaaatatcatttccagaaagttgtcaagtcctgtgatattattatcagtacagctcaaatccttgaaaactccctcttaaacttggaaaatggagaagatgctggtgttcaattgtcagacttttccctcattatcattgatgaatgtcatcacaccaacaaagaagcagtgtataataacatcatgaggcattatttgatgcagaagttgaaaaacaatagactcaagaaagaaaacaaaccagtgattccccttcctcagatactgggactaacagcttcacctggtgttggaggggccacgaagcaagccaaagctgaagaacacattttaaaactatgtgccaatcttgatgcatttactattaaaactgttaaagaaaaccttgatcaactgaaaaaccaaatacaggagccatgcaagaagttaggcatagcagatgcacccagagaagatccatttacagagaaacttctagaaatattgac

SEQ ID NO: 165001 - DNA, 2556 bp, Homo Sapiens
  misc_feature (2241)..(2292): n is a, c, g, or t
  misc_feature (2421)..(2422): n is a, c, g, or t
  misc_feature (2430)..(2444): n is a, c, g, or t
ggggtggctgcgcgcggcgctctgggagtacgacatggcgcgcgagctgcgggcgctgctgctgtggggccgccgcctgcggcctttgctgcgggcgccggcgctggcggccgtgccgggaggaaaaccaattctgtgtcctcggaggaccacagcccagttgggccccaggcgaaacccagcctggagcttgcaggcaggacgactgttcagcacgcagaccgccgaggacaaggaggaacccctgcactcgattatcagcagcacagagagcgtgcagggttccacttccaaacatgagttccaggccgagacaaagaagcttttggacattgttgcccggtccctgtactcagaaaaagaggtgtttatacgggagctgatctccaatgccagcgatgccttggaaaaactgcgtcacaaactggtgtctgacggccaagcactgccagaaatggagattcacttgcagaccaatgccgagaaaggcaccatcaccatccaggatactggtatcgggatgacacaggaagagctggtgtccaacctggggacgattgccagatcggggtcaaaggccttcctggatgctctgcagaaccaggctgaggccagcagcaagatcatcggccagtttggagtgggtttctactcagctttcatggtggctgacagagtggaggtctattcccgctcggcagccccggggagcctgggttaccagtggctttcagatggttctggagtgtttgaaatcgccgaagcttcgggagttagaaccgggacaaaaatcatcatccacctgaaatccgactgcaaggagttttccagcgaggcccgggtgcgagatgtggtaacgaagtacagcaacttcgtcagcttccccttgtacttgaatggaaggcggatgaacaccttgcaggccatctggatgatggaccccaaggatgtccgtgagtggcaacatgaggagttctaccgctacgtcgcgcaggctcacgacaagccccgctacaccctgcactataagacggacgcaccgctcaacatccgcagcatcttctacgtgcccgacatgaaaccgtccatgtttgatgtgagccgggagctgggctccagcgttgcactgtacagccgcaaagtcctcatccagaccaaggccacggacatcctgcccaagtggctgcgcttcatccgaggtgtggtggacagtgaggacattcccctgaacctcagccgggagctgctgcaggagagcgcactcatcaggaaactccgggacgttttacagcagaggctgatcaaattcttcattgaccagagtaaaaaagatgctgagaagtatgcaaagttttttgaagattacggcctgttcatgcgggagggcattgtgaccgccaccgagcaggaggtcaaggaggacatagcaaagctgctgcgctacgagtcctcggcgctgccctccgggcagctaaccagcctctcagaatacgccagccgcatgcgggccggcacccgcaacatctactacctgtgcgcccccaaccgtcacctggcagagcactcaccctactatgaggccatgaagaagaaagacacagaggttctcttctgctttgagcagtttgatgagctcaccctgctgcaccttcgtgagtttgacaagaagaagctgatctctgtggagacggacatagtcgtggatcactacaaggaggagaagtttgaggacaggtccccagccgccgagtgcctatcagagaaggagacggaggagctcatggcctggatgagaaatgtgctggggtcgcgtgtcaccaacgtgaaggtgaccctccgactggacacccaccctgccatggtcaccgtgctggagatgggggctgcccgccacttcctgcgcatgcagcagctggccaagacccaggaggagcgcgcacagctcctgcagcccacgctggagatcaaccccaggcacgcgctcatcaagaagctgaatcagctgcgcgcaagcgagcctggcctggctcagctgctggtggatcagatatacgagaacgccatgattgctgctggacttgttgacgaccctagggccatggtgggccgcttgaatgagctgcttgtcaaggccctggagcgacactgacagccagggggccagaaggactgacaccacagatgacagccccacctccttgagctttatttacctaaatttaaaggtatttcttaacccgnnnnnnnnnnnnnnnnnnnnnnnnnnnnnnnnnnnnnnnnnnnnnnnnnnnnctatcctgagggacttggaatttaatctacaatgaaaccctcaaagagctaaaaataattaaggaaaaatggagacaccctctgggggtcctctctgaatcaaatccaagggagggtaattgtacaatnntttttggnnnnnnnnnnnnnnnaaaaaatttttacaaccttttgtgggggccggcccccccgcaaagaacaacaaggagctttcttgtctctccaaaaaaacccggggaaccaaaaaggggggtggtccccccc

SEQ ID NO: 165002 - DNA, 680 bp, Homo Sapiens
cccctatctctagaatcttaagtgctttgtaatgggaactgcctctttccgtcgtaagtatatgaaaatttcgaaaacagtcatgtgaatgatctctctgaatcctaagggctggtctctgctgaatgtcgtcagtggtagcccactcggagtgatcctccaacttcatttgatgctaaataggagataccaggttgaaagaccttctccaaatgagatctaagcctttccataaggaatgtagctggtttcctcattcctgaaagaaacagttaactttcagaagagatgggcttgtcttcttgccaatgaggtctgaaatggaggtccttctgctggataaaatgaggttcaactgttgattgcaggaataaggccttaatatgttaacctcagtgtcatttatgaaaagaggggaccagaagccaaagacttagtatattttcttttcctctgtcccttcccccataagcctccatttagttctttgttatttttgtttcttccaaagcacattgaaagagaaccagtttcaggtgtttagttgcagactcagtttgtcagactttaaagaataatatgctgccaaattttggccaaagtgttaatcttaggggagagctttctgtccttttggcactgagatatttattggttatttatcagtgacagagttcact

SEQ ID NO: 165003 - DNA, 1164 bp, Homo Sapiens
  misc_feature (917)..(917): n is a, c, g, or t
ctctagtccagataatgattcgagatttgtgtgatgggcaactggagggggcagaaattggctcaacagaaataacctttacaccagagaagatcacaggtggaatccacacagcagataccaagacagcaggtagtgtgtgcctcttgatgcaggtctcaatgccgtgtgttctctttgctgcttctccatcagaacttcatttgaaaggtggaactaatgctgaaatggcaccacagatcgattatacagtgatggtcttcaagccaattgttgaaaaatttggtttcatatttaattgtgacattaaaacaaggggatattacccaaaagggggtggtgaagtgattgttcgaatgtcaccagttaaacaattgaaccctataaatttaactgagcgtggctgtgtgactaagatatatggaagagctttcgttgctggtgttttgccatttaaagtagcaaaagatatggcagcggcagcagttagatgcatcagaaaggagatccgggatttgtatgttaacatccagcctgttcaagaacctaaagaccaagcatttggcaatggaaatggaataataattattgctgagacctccactggctgtttgtttgctggatcatcgcttggtaaacgaggtgtaaatgcagacaaagttggaattgaagctgccgaaatgctattagcaaatcttagacatggtggtactgtggatgagtatctgcaagaccagctgattgttttcatggcattagccaatggagtttccagaataaaaacaggaccagttacactccatacgcaaaccgcgatacattttgctgaacaaatagcaaaggctaaatttattgtgaagaaatcagaagatgaagaagacgccgctaaagatacttatattattgaatgccaaggnaattgggatgacaaatccaaatctatagagtatttgcctcttaaatgatacctcattgatatattgcactatttcataaatactataaaataatgactaggaagtaacttattaaaggctatgacttaaatttgaagatgaagtacagtgttctaggtttgctgagaaggcttcattaaattaatctcactttgaatatctcctgagagatggacaatgaaatatcagttggtggataatgtgatag

SEQ ID NO: 165004 - DNA, 368 bp, Homo Sapiens
tttgaagcggctgtgtatccacacactcagaatattaaataagcaagatcttattctaaaaggtgcattgagtgggttttctgaggcctaaaaattgtataccagtgctaattgggatataccaaactttttgtctcttagtaattagttttgttttgttttgtttagttttaatgttgtgcttatcttaaggtgtaaatgcagacaaagttggaattgaagctgccgaaatgctattagcaaatcttagacatggtggtactgtggatgagtatctgcaagaccagctgatagtattcatggcattagccaatggagtttccagaataaaaacaggaccagttacactccatacacaagccgcttca

SEQ ID NO: 165005 - DNA, 1442 bp, Homo Sapiens
  misc_feature (27)..(28): n is a, c, g, or t
  misc_feature (86)..(86): n is a, c, g, or t
  misc_feature (92)..(92): n is a, c, g, or t
  misc_feature (178)..(178): n is a, c, g, or t
  misc_feature (189)..(189): n is a, c, g, or t
  misc_feature (276)..(276): n is a, c, g, or t
aaactggccttggccattcaatttgannttcgctccacgaaacatgatttctccacctaaagggagtccaagcccaaacctattgnttactnctggctgactcaaacgctgagatacctccattttcatacatcgggggccccaaggatgtctttcagagcatggaaatcaatcaaanatcggcattcnaggtggtagagccaagtcagtagtgtcactgatagattcaggtttttcatcttctaagatgtgttctctgcaaccttcttctcagtncacatcagaacggtccaactgggcttccttatgctgtccttctgccaccttcacggccacagctcggcaaatggccccaagttttctatccagagaacgaacccctgcctctctggtatacctggtgatgatgtcaagagtggtgacctggggtatctgaatctgctgtggagtcagcccatgttgttccagctgcttggggatcaagtgcctatgggcaatctctatcttctcctcctgtgtataacctggaacctgaatgatctccattctgtccaacaaggcagctggaatggtagcagtggtgttggcagtagctataaaaagaacttgagaaaggtcaaaggccacatttagataatgatctgtgaagttatggttttgttcaggatccaacacctcaagcagagctgctgctggatcaccctgtagactttttcccagtttgtcaacctcatctaataggaacactgggttgttcactcccacagtcttcaagccgttgatgatgcgaccaggcatgctgccaacataggtgcgcctgtgtcctcgaatgtcagactgatcacatactcctccaagtgcaatcctgtggaactctcgacctagagtcttggccactgatcttcccacacttgttttaccaactccaggagggccaacaaagcataggattgggcccttcaggttatttttgagctgtctgacagccaagtattccagtactcttttcttcaatttttccatggcgtaatggtcattatccagaagaatccgggctgccctaatgtccaggcggtcagttgtacttttgttccaaggaagttctaccataagttccaaataatttctagtcagagcatattctggcattgactgaggcatttttttgagtctctttatctctttgacacagactttatgggcctgctctggcatactagatgttcgtatttttttctctagcatgacaatgtcatcataatcttcatcttcatcttcatcttctaaagtacctgagatatgtgtaattctcctaatagggcgtattgctataaccctcttatcatcatcttgcttgggttttctggtttttttgaagcaatttcaggccttcaatttgtctgacaagcagtggtatagtcatcttgggattcagaatgaga

SEQ ID NO: 165006 - DNA, 1002 bp, Homo Sapiens
  misc_feature (464)..(514): n is a, c, g, or t
  misc_feature (562)..(578): n is a, c, g, or t
catgcatgctatgcttgacaaaccgtagattccgattccgaagaaccaagatctgtaaattctgggagctagagtggtgtatattattcccaagataaaagggccacgtgacctttgtgtacttgagggatcatcttcaacccccaggaggacacgtataatacaggccttcttggaggcagagggatgagtattatgtcaggctcatgcgcccatctctgggtgagagaatcagagcctgtgtctgttgcgggtcggtctaggaacccaaggcaaggttcctcttcctagcttcccccagctctccaggactcatgctgatggaagagtgtagcctgaaaggtttgaatgtagagcaacatctacaaccacattcttgtgcacttacacacatggtcagatacactgagtggggacgctgagctgtcatcactcctacagtggtcatggtctgatggtcccannnnnnnnnnnnnnnnnnnnnnnnnnnnnnnnnnnnnnnnnnnnnnnnnnngaggggtaaggcagctagctctcacagacacaccccacagtgaaaatnnnnnnnnnnnnnnnnncccggcatctgtgctcactcacaggcagactgctcactttcttgcacctttcttgccatcacctcggccacacccacattcctccaataggcttgggaaccagcatggaagggtcaagtgtcatagaagaaaccccctagcctaccctactcccagacttcatgccagaggtttaactccacttcccttctgtttgcctgcctagatgctctccccttctccatccacaagcggtcagggcgacaggtaggcagactcctgagaaccagaagtccagaggctttgggtgtgtggagtgattccagtgccttcagattccttcaggctcctgggggtcccctctgccagccaccctatgttcagatcgtccatctgatggccaaaaaagtccagacctgggctcagtggcagatccgctatccgt

SEQ ID NO: 165007 - DNA, 229 bp, Homo Sapiens
cggcccaacattgtatttgaaggcttaaaatgcatatgtttagatagactcatcaggggtaagttattagtgaaacaggtggttgttctaatgaggatttaataccaaatacacatttaagtcagaccactcacaaccaacaaattatacagctttaacatgcaaaggcctaataggttttcccacaagatagctgtaataataccctgtcacacaaggtactcaaaat

SEQ ID NO: 165008 - DNA, 813 bp, Homo Sapiens
  misc_feature (641)..(671): n is a, c, g, or t
ggtcgtatatttagaatggtctgagtggaagaccttggagtaacagaatctgtattatcagaatcactttaaaccaaagcttttatattccctgtacacatagccaaaataattagcactgttacttctgtccacttgtaagctaatagtataaaaattataaagcagatactagtagaattagtattctggtatatccttcaaggaaaaggacaggtgatcagtgcatttagacatccagaagttacttccactattgaggaactatgtagacatgaatttaagcttgtacatgtgccaatcttgttaatgtcacttgaccactgattcacatagacagacattaacgtctgatgcctcaggttgatggcgaactttcttcctagtgtcttaacatttatgaacttatgtttgacttgaggggcatttcagcaaagctgtgaggaaaagtaggttctggactgatgtctgctttgtgccatagacattttggaacataaggaagtatctgcttctactatatgtacaggacttgtccccaaataatttctgaatcccttaatgcagttgagaatcccttaatgcagttgagaacagtaaagttcatgaccataccgaaaagcacttttaagttcacttcnnnnnnnnnnnnnnnnnnnnnnnnnnnnnnnaaaagcatatgtaactagtgatgattttagcattagctttacttggaggggagaaagaacaaaattaccccttaaactctattagatagactaccaaatgggatttgatgtattcttacttttcccaagaattttttttcac

SEQ ID NO: 165009 - DNA, 587 bp, Homo Sapiens
atattcagcgccatggtgaatatagtcaggcataagattccctcatctagttttatagagccacatattcccaaccagataagatttcaagtgtggaagcgaaagaaaattccaactgaaagtgtacaagaaattagaggtgaatccagacaaacacaaagtagtaaaaacaagtgataataaaagtcagtctaaatccaacaaacaattaggaaaaaatggagacgaagagacaccccacaaaacaacaaaagacatcaaagaaattgagaagaaaagagttgctgctttaaaaagactagaagagattgaacgtattttaaatggtgaataacattaatatttatcgtgacaatggtatcaaagaacatcaatccgtatcatgtgattgcttttactgggagctttgaaaaaaagttcaagggttcctaatggtcaatcatgagctgccttgaagtaggatcaaaataagattttcattaaagacctgtattatcccaggatgtatattatgtatcgctgttttcagagtgtgggtgaatatagcagaaatattacagcggaagtgacaaatttacaacttttat

SEQ ID NO: 165010 - DNA, 544 bp, Homo Sapiens
acttcaatctcacctgcaatgaattctcttccataaaataaaccattccactaagtatatacctactcccaccaaatcatccacatgcctcatcactaaagttgtcccttgtataatctaccagcaaaaagacaaaataaaacctgtgttaagcaaataatcacttaaacagtaataatattgcctctaaattaaaggtaagtcaggagctgaacactcaactgttaactcttctggggaagaagaaaatttttcccacaaaagcaggagtgcagtagtaagtaatgactttctctcagatatacaagtaacatcaggtcaagataacctattgctgttagagttttagatttgcgatggtgtggaactgtctttataagagctgagtaagagacgtatgccaataattattatgtaaccataagttaaaaactgtcacagaaaacttgaagtgactgatactttatcacaacgaactgccatttaaacactagcataggtacacaaaaagatttatacaatggaagaggattcagaagtgcga

SEQ ID NO: 165011 - DNA, 1804 bp, Homo Sapiens
  misc_feature (873)..(971): n is a, c, g, or t
  misc_feature (1041)..(1095): n is a, c, g, or t
  misc_feature (1233)..(1280): n is a, c, g, or t
  misc_feature (1575)..(1575): n is a, c, g, or t
  misc_feature (1582)..(1590): n is a, c, g, or t
  misc_feature (1601)..(1601): n is a, c, g, or t
  misc_feature (1617)..(1617): n is a, c, g, or t
  misc_feature (1641)..(1642): n is a, c, g, or t
  misc_feature (1646)..(1646): n is a, c, g, or t
  misc_feature (1652)..(1652): n is a, c, g, or t
  misc_feature (1758)..(1758): n is a, c, g, or t
tctcccagtggaatagctttaaggcttttacccaggtggcccttccaccgttacttgccggaggtaaagctttgcagtaatggtcacccggaagaatgtactgtacaattattggattccagcccggtgactcacttattcaagataactgaaaacattggttgtgtgatgaccggaatgacagctgacagcagatcccaggtacagagggcacgctatgaggcagctaactggaaatacaagtatggctatgagattcctgtggacatgctgtgtaaaagaattgccgatatttctcaggtctacacacagaatgctgaaatgaggcctcttggttgttgtatgattttaattggtatagatgaagagcaaggccctcaggtatataagtgtgatcctgcaggttactactgtgggtttaaagccactgcagcgggagttaaacaaactgagtcaaccagcttccttgaaaaaaaagtgaagaagaaatttgattggacatttgaacagacagtggaaactgcaattacatgcctgtctactgttctatcaattgatttcaaaccttcagaaatagaagttggagtagtgacagttgaaaatcctaaattcaggattcttacagaagcagagattgatgctcaccttgttgctctagcagagagagactaaacattgtcgttagtttaccagatccgtgatgccacttacctgtgtgtttggtaacaacaaaccaacatcatggaggtccctggattgaaaaaggagcctctcccactcctcctaccaccgaagtggttaggactctatataaataaaaacaaggcttttggaaaaaaacaaccatccactccccactaccaccttactcannnnnnnnnnnnnnnnnnnnnnnnnnnnnnnnnnnnnnnnnnnnnnnnnnnnnnnnnnnnnnnnnnnnnnnnnnnnnnnnnnnnnnnnnnnnnnnnnnnaattccacccttctacaaaacaactcaactctatcaccttctcttaccaatccccctcccactatttatnnnnnnnnnnnnnnnnnnnnnnnnnnnnnnnnnnnnnnnnnnnnnnnnnnnnnnnatcccacctacctccaacctatcatctcactcccacaacaaacttacctaccctaccacccataatcccaccacaccctcctatccccaatccatacaccccatctaccctaccaactaacaaccatctcttcatctnnnnnnnnnnnnnnnnnnnnnnnnnnnnnnnnnnnnnnnnnnnnnnnnatcctcatatctcctctataaaccctcccctgtatgcccaccctcacaaaccgacatacaatatacatccccctaatacacctaattcacgctccctactttgcccacccatccccaaaattcaacacccctccgcccgactccccttcctattcccctcgaacatcgaacctcatcccttattccacgcaccacgatcttgaaactatagactctatctcctcctccacttttatagcgcccccatataatcttataccgctctgtcttctcccccgccgcagaaccatccttnctttcannnnnnnnnactccgcgtgntcggtatcgactgcgnggtgctggacgggaggggcttgcnnggtntcggtncgtttgatctcccatgcttgccgatgcattgcgccctcgccagctgcgcgtccctgtcactatcgccgctccgcgcacctctgcgctgcttagtctccgcccaccntaccttgctcgcctgcgtctcttgcaccgccgtgctccagtgtccg

SEQ ID NO: 165012 - DNA, 894 bp, Homo Sapiens
gggatgcaagagcggaagaaacgcggctggtaccccggaagcagtcgctgcaacttccgggaggtgcttgtgtgcctggtgcgggagctacggggcccagggattgtgtttaaagtagtgcttctaccaacatgtcccgtggttccagcgccggttttgaccgccacattaccattttttcacccgagggtcggctctaccaagtagaatatgcttttaaggctattaaccagggtggccttacatcagtagctgtcagagggaaagactgtgcagtaattgtcacacagaagaaagtacctgacaaattattggattccagcacagtgactcacttattcaagataactgaaaacattggttgtgtgatgaccggaatgacagctgacagcagatcccaggtacagagggcacgctatgaggcagctaactggaaatacaagtatggctatgagattcctgtggacatgctgtgtaaaagaattgccgatatttctcaggtctacacacagaatgctgaaatgaggcctcttggttgttgtatgattttaattggtatagatgaagagcaaggccctcaggtatataagtgtgatcctgcaggttactactgtgggtttaaagccactgcagcgggagttaaacaaactgagtcaaccagcttccttgaaaaaaagtgaagaagaaatttgattggacatttgaacagacagtggaaactgcaattacatgcctgtctactgttctatcaattgatttcaaaccttcagaaatagaagttggagtagtgacagttgaaaaatcctaaattcaggattcttacagaagcagagattgatgctcaccttgttgctctagcagagagagactaaaccttggcgtttagtttacaga

SEQ ID NO: 165013 - DNA, 802 bp, Homo Sapiens
ggtctcttcctctgcggcgcagctgtctatgtagtcactgatccagatcatgttccactccgccgtttgttactaccaaactgccgcggttctcttggtactggctttctcttcgtagtctttgttctttagttaatctctgctactcgaagaggcagatctgaaaattcatctgtaggttcattccctgaccatctcttatcaccactgtccacactattgaagcctgaatcaagggctccataagggcgacttgagtacagttcttcatggcaggagccaaaacccaacggtctcctatcataatccggcagatctggagcaatcttacaagcttgtatgttcaggtatttaaatatgtggactttgccttttatacatatctgtgcaggaggtgattgtagtggattgttatctagggtgatcgtctgtaggtgcctgaggttccgataacaaacagggattgtggtaattttattgcatgagaagtctaaccgtatcaaaggcaactccgccagctcttcaagcaaatgtactaggtgatttcttcttacattaaggtctctcaaggcctccaggttaccaatgtgggacaggtgatagtttgaatttcattgcagctcacatcaagttccatctaaatgtctaaagtgtccaatttcttctggaagtgacaccaatgagttattactagcaattaagactttcaatggcaaattacacaagtgtaccgccaatgttgacagttggttccgactaatatttaagaatgttagagcttgtaggtttaaaattgcctctg

SEQ ID NO: 165014 - DNA, 351 bp, Homo Sapiens
gcagttatcagccacagtgatttattgagtgctttaataatacaagtgtacatcaactgatccacagtcaaaagtggcaggtccctaagaaatttacaagcactttaagtaaatcaaaatacatattattttgttcaatccaacagtcttctgcgggagggacagaaggctagtgataaacagagtctcagtaatgcacagtgattctgattgaagcttttgtacaaaaacttgttcccagtagcatgcacccaccaataaagacttcagtacaaaaaattaaccctaagcactacatttaagtagaaacgagatataattctgaatgtgttttcccaaagatcacataaa

SEQ ID NO: 165015 - DNA, 668 bp, Homo Sapiens
  misc_feature (253)..(253): n is a, c, g, or t
  misc_feature (350)..(350): n is a, c, g, or t
gctcttctgatcttcctattggtctgtgtatgaaatacatccctccccaccacccttgtaatacaaggggagacagctgaagaacggctgagatttttctactgcttgctccctctactctctccctgattgtgaccactaacatttccactgctcgaatcacacaaattacctcaactttagtagagggagcgacgacacaactctggcaacccagggtacatgtaaccgtttaggctcacccttatttcanaattttcttataatcacgttgtaacagttttacaaaatcccaggatttcaatataaaaactctggatttcttagctcctcctgtaaacaatgtgaangacctgccaaccctggcgcttgcttctcctaatgacaaaacagagctgaataactgccctattagatcaactttccaggggacagcacaatcctccccagaatgttttactcatttatgttacctgcacggctcccttaggcatttgggtttgtgagccctcatctaggacaattccctcacttaaaagatgaagaaaatgatggtcttagaagagaaagtaacttgcctgaggctgcagattaagttagaggcaaaggaggaagttaggttgggtccaggtatccttctagtatagcatactgtgtccctatttaaa

SEQ ID NO: 165016 - DNA, 912 bp, Homo Sapiens
cactgcagactgaggtggtattgctctccgcttgcgtttggaagagaaggaaaccatgttgaatacaaagacaaaacaaattcaggatatggctgaagagaagcgggacacaagctggagagatacatgacctcaacgacatgttggatgtgaaggagcggaaggttaatgttcttcagaagaagattgataaatcttcaacgagcagcttagagaccaggaaaagcccatgagcacgcttgaaagaacgggtcaaatccttgcaggctgacaccaccaacactgacactgccttgacaactttggaggatggcccttgcagagaaagagcggacaattgcgcgcttaaaggagcagagggacagagatcagcgagagaagcaagaggaaatagattactacaaaaaagatcttaaagacttgaaggaaaaagtcagcctgttgcaaggcgacctttcagacaaagaggcttcacttttggatctcaaagagcatgcttcttctctggcatcctcaggactgaaaaaggactcacggcttaagacactagagattgctttggagcagaagaaggaggagtgtctgaaaacggaatcacaattgaaaaaggcacatgagccagcattggaagccagagccagtccagagatgagtgaccgaatacagcacttggagagagagatcaccaggtacaaagatgaatctagcaaggcccaggcagaagttgatcgactcttagaaatcttgaaggaggtggaaaatgagacgaatgacaaagataagaagatagctgagttggaaaggcaagtgaaagaccagaataagaaggtagcaaatctgaagcacaaggaacaggtggaaaaaaagaagagtgcacaaatgttagagaaggcgttacgtggggtaccgagc

SEQ ID NO: 165017 - DNA, 984 bp, Homo Sapiens
  misc_feature (928)..(928): n is a, c, g, or t
gaaaaggtgcatgaagaagttgtgctcaaaactcaagaggctgctaaagaaaaagagttccaaagtgtacctgctggaccagctggagcagttgagagttgtgaaatctgtcaagaacaatttgaacaatactgggatgaagaagaggaggaatggcatattgaaaaatgctataagagtagatggaaagattaatcatccatcatgttatgaagattatcaaaatacatcttcatttgattgtacaccatctcccagcaagacaccagttgaaaaccccttgaatattatgttgaacattgtcaaaaacgaattgcaggaaccctgtgacagtcccaaagttaaggaagaacgaattgatacaccaccagcttgtacagaggaaagcatagcaacaccctctgaaattaaaacagaaaatgacacagtcgagtcagtttaaataaaatgagaaaggtatgtttttcttttttaaaaaagctgctgttggatctagaaggtgaagaatttttttatgtatatatagacatatctatataaattgtctgggctgaggcagggctttcagctatcatttggttaataaatacattttagtatttgcatttcctactgcctgcagagtttcaggtgcttgttgtgtgaaagttctgtagatgtgtgcaaatttaacgaaatgaaattgtatgtgtaaaaatgtacgatttttcactgtgcaactgtaaattataaataaaaaatatttttgctattcatggagtgtaatatttatgcacaccatcaaatagtttctgtactttttattgggtaaaaatggaattgaacagcaacctcaacataagattttttttctagtagcctcccactgattaaagaagcaagtttgaggtttcatccttcaaaagggggttccgagagagcaccgtanggcttttctcaaatagaaaagccagattttgaaaaaattttaaagataaaatagga

SEQ ID NO: 165018 - DNA, 1800 bp, Homo Sapiens
ggggagcagcaactggacgatgaagatgatgatgaagaagactgcccaaatcctgaggaatataatcttgatgagccaaatgcagaaagtgattacacatatagcagctcctatgaacaattcaatggtgaattgccaaatggacgacataaaattcccgagtcacagttcccagagttttccacctcgttgttctctggatccttagaacctgtggcctgcggctctgtgctttctgagggatcaccacttactgagcaagaggagagcagtccatcccatgacagaagcagaacggtttcagcctccagtactggggatttgccaaaagcaaaaacccgggcagctgacttgttggtgaatcccctggatccgcggaatgcagataaaattagagtaaaaattgctgacctgggaaatgcttgttgggtgcataaacacttcacggaagacatccagacgcgtcagtaccgctccatagaggttttaataggagcggggtacagcacccctgcggacatctggagcacggcgtgtatggcatttgagctggcaacgggagattatttgttttgaaccacatttctggggaagactattccagagacgaagaccacatagcccacatcatagagctgctaggcagtattccaaggcactttgctctatctggaaaatattctcgggaattcttcaatcgcagaggagaactgcgacacatcaccaagctgaagccctggagcctctttgatgtacttgtggaaaagtatggctggccccatgaagatgctgcacagtttacagatttcctgatcccgatgttagaaatggttccagaaaaacgagcctcagctggcgaatgccttcggcatccttggttgaattcttagcaaattctaccaatattgcattctgagctagcaaatgttcccagtacattggacctaaacggtgactctcattctttaacaggattacaagtgagctggcttcatcctcagacctttattttgctttgaggtactgttgtttgacattttgctttttgtgcactgtgatcctggggaagggtagtcttttgtcttcagctaagtagtttactgaccattttcttctggaaacaataacatgtctctaagcattgtttcttgtgttgtgtgacattcaaatgtcatttttttgaatgaaaaatactttcccctttgtgttttggcaggttttgtaactatttatgaagaaatattttagctgagtactatataatttacaatcttaagaaattatcaagttggaaccaagaaatagcaaggaaatgtacaattttatcttctggcaaagggacatcattcctgtattatagtgtatgtaaatgcaccctgtaaatgttactttccattaaatatgggagggggactcaaatttcagaaaagctaccaagtcttgagtgctttgtagcctatgttgcatgtagcggactttaactgctccaaggagttgtgcaaacttttcattccataacagtcttttcacattggattttaaacaaagtggctctggggtataaagatgtcattctctatatggcaactttaaaggaagaaaagatatgtttctcattctaaaatatgcattataatttagcagtcccattgtgtgatttgcatatttttaaaagtacttttaaagaagagcaatttccctttaaaaatgtgatggctcagtaccatgtcatgttgcctcctctgggcgctctaaagttaagctctacatagattaaatggcgaaacgtgttaatgtgtg

SEQ ID NO: 165019 - DNA, 519 bp, Homo Sapiens
ctctcatcctgaatccctacatgtgctttccaccaacctgggcatcctgacctgcatcgagtgttccggaatccacctgagcagctagggggttcattattccaggatgcagtccctgaccttagtatgtacttgggaacatctgagctgctgctcgccaagaatattgggaatgcaggctttaatgagatcatggaatgttgcctaccagctgaggactcagtcaaacccaacccaggcagcgacatgaatgccagaaaggactacatcacagccaagtacatcgagaggagatacgcaaggaagaagcacgcggataacgcggcgaagcttcacagtctttgcgaggccgtcaaaacgagagatatttttggattgctccaagcttatgctgatggtgtggatcttacggaaaaaatcccactggccaacggacatgagccggatgaaacggccctccaccttgcagtcagatccgtggatcgaacctctcttcacattgtagactttttagttcag

SEQ ID NO: 165020 - DNA, 804 bp, Homo Sapiens
ctacgagatgcaattccaatcttccttccttcatactactacacagcacatcatctcttttgttccaaaaaggacataagttgtctggaaagtgtctgccttcgttagtttcttctgcttcaaaatcctgaaaatctgctgcattttcatttattgtttcttctgcctgcaagaatttggggacagtgaaatcggctgaactttcatttccttggtgttctaacaggctagaccttagggaattcagtgatcgcaagttcagtcctttgccttttggcttagacaatatcacactttgatatattttctcaagcctctgggttgaatcaagtagaagtgatctcatgtgtactgatggagataggctatcaagaaatcgaagggttgtgaccatatatccatcagatataacgaggtagggtaaccgtgagtgtgcttttatagaaaatctctgtctcatagggtcactatcagaagctgatgaatcaacagaattatttgaatcttgaaacgtaaactgctgtggtctagtaaacaaacatcaaaatacaagaatcagtaagagaaagatcttacggaaaacaataatgtttttcaaaaaagaagaaaaagttacagaacaatgaaaaagcaagcaagtgaaacacacaaaaatattaaatgtgtttatatctttcaggaaaacataacacaggataaagacaaaataatatataggttcatgtgttttaaaattttcctaaatggtagcatttattctattttgtattatctacatacaacctatttcagaaaataattcag

SEQ ID NO: 165021 - DNA, 759 bp, Homo Sapiens
ggactgacacttcagatctatattccccgcagtaatgcgtgagtacatcaatgcacattccagagcatatattagactactagtgcgccagaagaagaaactcaagattggtactggtcacaagcctcttcccaatagaaattataaaaacagtaagatataatttacaaaaatctaaaaaggggatgcataggcaaagagtaccataaatggcacagctcaaaaaatcccaggaccaatcagacacacatcttttctctctccttcagcgacaagaggtcgattttgccatcaaataaccatgattgaagcaagcgaggggcaccaggtgtacaactgattagatcttgcaaaatactaagatgggagcaggggtggccagaagaaggggtaatttatatataattcaaactatatacagcataaatggaatgcagcccatcccaaactggctctgtgaaacaattggacctttatagttaaaattataacaagtgtaataatacaatagatttacatgggaagcaaaatccaagggacattttatattaagtatttactgtgctgtttcaatttaaaaataattttgctaagtatacatctcaactgaagtctatgtaaaaaatgtcctaatagatacagatatttacctttggtgagttgaaggcctttttgtgacttctgtctgaactgtaggcagaatgctagatgtacatgcacatatggagaaactcaagctgaggtcatccaaaagctgtg

SEQ ID NO: 165022 - DNA, 517 bp, Homo Sapiens
cccgttccgccggagctgaggaccaggtattcaaataaagtaaatcgcagctttctgtgaaaatgtcagtttcgatatcacagagcgtcataaattatgtagaggaagaacacattcctgctctgaaagctcttctctgataaatgcaaagatgtagatgagagaaatgagtgtggccagactccactgatgataggtgccgaacaaggcaatctggaaatagtgaaggaattaattaagaatggagctaactgcaatctggaagatttggataattggacagcacttatatctgcatcgaaagaagggcatgtgcacatcgtagaggaactactgaaatgtggggttaacttggagcaccgtgatatgggaggatggacagctctaagtgtgggcatgattacaaaggccgtagctagacgatagatagagttgcttctttctcatggtgccaataacaagtgtcactggtctgtacagtgttaacccaatcatttgggattcgaagatgagacgg

SEQ ID NO: 165023 - DNA, 354 bp, Homo Sapiens
  misc_feature (234)..(251): n is a, c, g, or t
tctcatcctgaatccattgaatggatagtgagagaccacattgcctctcccactgctttggggagcactttcctgtcatttctaacttaccacatgcttggtgtactatatgtatgttgtgcctcatatgttgcaaagaactaaggtgagtatagcctactagatatgggcaatatccagctctagatgattggaaagataccagtttaagtaaactgggtaaaatccaagtcnnnnnnnnnnnnnnnnnncccaggaacacctacttttcctcttatacaggtagctaggggcaacacagtcccattctagagggaaacaaaggggagagccccaaaaaatttgggggacaag

SEQ ID NO: 165024 - DNA, 1050 bp, Homo Sapiens
  misc_feature (49)..(87): n is a, c, g, or t
agaagatgctaggagaagactcagatgaagaagaggaaatggatacctnnnnnnnnnnnnnnnnnnnnnnnnnnnnnnnnnnnnnnntgggttgcacctggggaatgggagaagatgcagtagaggatgatgctgaagagaaccctattgtcttagagtttcagcaggaaagggaggccttttatataaaggatcccaaaaaggctctccaaggcttttttgaccgagaaggagaagaattagaatatgaatttgatgaacagggacatagcacttggctctgcagggtgagattacctgtggacgattcaactggaaaacaactggtggctgaggccattcactcaggaaagaaaaaagaagcaatgatccagtgctcattggaagcttgtcggattcttgacactttgggattgcttcggcaggaagcagtatctcggaaaaggaaagccaagaactgggaagatgaagacttttatgatagtgatgatgacacatttcttgataggactggcctgattgagaagaagcgtctgaacagaatgaagaaggctggcaagattgatgagaagccagagacctttgaatcattggttgcaaaattaaatgatgctgaaagggaactttctgaaatttctgagagattgaaagcctcaagccaagttctatcagagtctccatctcaggattctttagatgcgttcatgtcagaaatgaaatcaggcagtacattagatggtgtgtcccggaagaaacttcacctgagaacttttgaactgaggaaagaacaacagagacttaaagggttaataaaaattgtaaagccagcagagattacagaactaaaaaagactgaaactcagactacaggtgcagaaaacaaagctaaaaagcttacattgcctctatttggtgccatgaaaggaggaagcaaattcaaattaaaaacctggaactagtagggatagttacccccgccagcgtccagaactccctccaactctaatgagaatgaaagatgagctgaagtagaagcggacgggggataga

SEQ ID NO: 165025 - DNA, 385 bp, Homo Sapiens
atcttctgaatccccagaagaagctggatcctgactctaatccctagcccaatccaggtgattgagaatgatagagccagcagaggaggacaagtttatgccaccaacaccagaggccagatccctcccctggtcactacagattgcatgatacaagaccaaggaaatgccagtcctcgatacatccgttgtacaacatactgtattccatgcacgtcagatatggctaaagcaagctcagattccattagctgctgtcatcaagccctttgccaccattccttcaaatgagagtcccctttacttggtaaatcacggcgagagtggaccagtcagatgcaacaggtgcaaggcctacatgtgcccatttatgcagttcatcgaa

SEQ ID NO: 165026 - DNA, 498 bp, Homo Sapiens
tatgccccttctgatgttgtgacataactggtacagatgtctttatgaccccaggaaacagttttgctcctgggcacaggcagttatggaaacccttcgtgtcatttgaacagaatgatcagccgaagagtggggaaaatgggttaaataagggattttcttttatcttccatgaagacttactaggagcttgtggcaactttcaagtcgaagatcctggacttgaatactcattttcttcctttgacttaagcaatccattttcacaagttcctcatgtagaatgctcatttgaacctgaagggattgcatctttcagccccagttttaaaccgaaatcaatcctctgttctgattcagacagtgaagtgtttcaccccaggatatgtggtgtcgacagaacacaatacagggctattcggatctctcctcggactcactttcgcccaatttctgcatccgaactgtccccaggaggaggaagcgagtcagaatttg

SEQ ID NO: 165027 - DNA, 1411 bp, Homo Sapiens
  misc_feature (218)..(218): n is a, c, g, or t
  misc_feature (841)..(943): n is a, c, g, or t
  misc_feature (1079)..(1087): n is a, c, g, or t
  misc_feature (1151)..(1194): n is a, c, g, or t
  misc_feature (1281)..(1293): n is a, c, g, or t
tcaaggaaacacaggctccagcatatctcatagacctaatgcatgataagaataatgaaatccgaaaggtctgtgataatacattagatattatagcggaatatgatgaagaatgggctaagaaaattcagagtgaaaagtttcgctggcataactctcagtggctggagatggtagagagtcgtcagatggatgagagtgagcagtacttgtatggntgatgatcgaattgagccatacattcatgaaggagatattctcgaaagacctgaccttttctacaactcagatggattaattgcctctgaaggagccataagtcccgatttcttcaatgattaccaccttcaaaatggagatgttgttgggcagcattcatttcctggcagccttggaatggatggctttggccaaccagttggcattcttggacgccctgccacagcatatggattccgccctgatgaaccttactactatggctatggatcttgataaagtatctgtttccatgtgtaatctcagcttagaagaaatctgtgtgggttgggttaattttggatctttgcctaataatgcatgttgatgttattgtgggtctgtgtttgtttttatttttatatggtgttagctgcagattaaccccagcccctctgtcttctgttaagtacagttgatactgacattgttcactcatcaaaccacatcttgatgctaagtaacatttcccatgagcctcaaaactgaatgctgaaaagctactagactggaaaacaaacactgcattatgtatgttaagtgactaatttaatttcaattaaaaagcgtaaagtgaaaatgnnnnnnnnnnnnnnnnnnnnnnnnnnnnnnnnnnnnnnnnnnnnnnnnnnnnnnnnnnnnnnnnnnnnnnnnnnnnnnnnnnnnnnnnnnnnnnnnnnnnnnncctgggggggccgccccgcccccaaaaaaatttttaaaaaccttcggttgggggcggggcccaaaaaggaaggggcccggggccccacccggttacaaaaaaaacccggctcttgcggggggctgggtcccccccnnnnnnnnncaccccgggggcaacccacccgttagaaaacaaccccaaagggagctttgggggtctcttcggnnnnnnnnnnnnnnnnnnnnnnnnnnnnnnnnnnnnnnnnnnnntataccccccggcgctttgcccttatctgcaaggcatgtgtttaacaatcacatataccccccctccgcccccaattgtaaacactnnnnnnnnnnnnngggccggggaacaaaccccgagtaaccggccccggaggatatacccaaccctcttggcccccccgtggggggaaaaaaacattttcgccccccggggggagaaaacgccgccgccccg

SEQ ID NO: 165028 - DNA, 1257 bp, Homo Sapiens
gggggcgctgtcatggcgggtgtgctgaagaagaccactggccttgtgggattggctgtgtgcaatactcctcacgagaggctaagaatattgtacacaaagattcttgatgttcttgaggaaatccctaaaaatgcagcatatagaaagtatacagaacagattacaaatgagaagctggctatggttaaagcggaaccagatgttaaaaaattagaagaccaacttcaaggcggtcaattagaagaggtgattcttcaggctgaacatgaactaaatctggcaagaaaaatgagggaatggaaactatgggagccattagtggaagagcctcctgccgatcagtggaaatggccaatataattattaagtgactttggtgtgttcatgggaaactgatgtaattaaatattctgttatattaagagcgtgttcttattactgacattttgtaatcaagaaaagtgatatagaaaatatgtaggagactgttaaaattggtgattatggtaatatggtcatgtgaatcaatttttgatttataaagtactcacacaagttgtttcaaagatgatatttctgtgaacagagaggccatgggaagatttgaaaattattaaagaaaaattcctacagattttcaatgcagagaccataaatcaaaaagtaaactttctttagtagtatgttcaatacatcatttaattttttaagttatcctgaagaaggaaaggtccttaattattatagtctaaacaaatttatagattactgtttgaagtaaataatacgagtgaatattttcaaatgtgataaaatagcacaagtggctggtgataaaatttgaaattatggttaacctcagctgtgatcttatgtatgtaaagtgaaatttaaatagataattataggttgattacaaaatcgcatagtgtcattttattttagtcattattgaattataccatttactctgttttcttatagtcttaattttattatattttgttgttactgtattatatctgaaaaccttcaaattagaatacattgtacagttaaagaaattgacttggtacttaaaagaaagatttcccattgcatacaggttattggagaaattttccttttgttgcatttgtggaagttagttttctagccccgtggcctttaattttcttaacaacctaattacatcaggatagaggtaaagtttctgtaaaggaagagactttaagagttccctgaatttatatc

SEQ ID NO: 165029 - DNA, 687 bp, Homo Sapiens
tccatctcagaagggaaaagcccaaagaaacgggaaggaccacggactattcctccgggagaatattaaaggatttagtgatgcagaaattagccgttttatcaagagctataagaaatttggtggtcctctggaaagattagatgcaattgctcgagatgctgagttagttgataagtcagaaacagaccttagatgactgggagaattggtacataatggttgcattaaagcattaaaggatagttcttcaggaacagaacgaacaggtggtagactcggaaaagtgaagggtccaacattccgaatatcaggagtacaggtgaatgccaaactagtcatctcccatgaagaagaattaatacctttgcacaaatccattccttctgatccagaagaaagaaagcagtatactatcccatgccacacaaaggcagctcattttgatatagactggggcaaagaagatgattccaatttgttaattggcatctatgaatatggatatggaagctgggaaatgattaaaatggatcctgacctcagtctaacacacaagattcttccagatgatcccgataaaaaaccacaagcaaaacagttgcagacccgtgcagactacctcatcaaattacttagtagagatcttgcaaaaagaagctctttctggtgcgggttcagagatga

SEQ ID NO: 165030 - DNA, 513 bp, Homo Sapiens
tcatagctcggtaccatgttctcctacctgaacatgaggtggaggaccatcctgctacagtattgctttctcttgattacatgtttacttactgctcttgaagctgtgcctattgacatagacaagacaaaagtacaaaatattcaccctgtggaaagtgcgaagatagaaccaccagatactggactttattatgatgaatatctcaagcaagtgattgatgtgctggaaacagataaacacttcagagaaaagctccagaaagcagacatagaggaaataaagagtgggaggctaagcaaagaactggatttagtaagtcaccatgtgaggacaaaacttgatgaactgaaaaggcaagaagtaggaaggttaagaatgttaattaaagctaagttggattcccttcaagatatagccatggaccaccaagctcttctaaaacaatttgatcacctaaaccacctgaatcctgacaagtttgaatccacagatttagatatgctaatcaaa

SEQ ID NO: 165031 - DNA, 737 bp, Homo Sapiens
  misc_feature (506)..(506): n is a, c, g, or t
tgtatttcggcacgcccccggcgccgtggtaatagctgtttccatccaattatcttagtaacaacaatcagacttctgtgacacctgtaccatcagttttaccaaatgcgattggttcttctgccatggcttcaacaagtggcctagtaatcacctctccttccaacctcagtgaccttaaggagtgtacgtggcagcagaaaggccagggttctctatgattatgatgcagcaaacagtactgaattatcacttctggcagatgaggtgatcactgtgttcagtgttgttggaatggattcagacgggctaatgggggaaaggggaaaccagaagggcaaggtgccaattacctacttagaactgctcaattaagtaggtggactatggaaaggtggcccatcatgacttggtatttatatacaattaactctaaataaagcaggttaagtatcttccatgttaatgggtgaagagactgaaaataccagccatcagaaactggncctttctgccaataaaggtgcatggtaaatatttcattacagaatttttatggtaagagcttttcatgccaaagaatggttttctttaccaaaaattcctcctttttatttggagggtttccctaaataaagccagcttccctacttttttggaagccccttcaaccttaaaagcccaaaaactggggtttttccaaacggggaatttttttcctttaaaccaggacaagg

SEQ ID NO: 165032 - DNA, 829 bp, Homo Sapiens
actgtcacattctgtcccactgctatattaggcatggccagagtaggctgcacacctgagctgggggcaaggaagctctctctttccctcaccatgacgtaaggtacatcttgaagatgctgagtgccttccagaggattcgatccacccccatgaggctgtattactctttcagtgaccacaactgtaccttcattagcataaggctgatctaccaaggtagaagctggagcatacaccctctctgtcacaataagactctgtggatggctaggacccaggatcacagtggttggtggcatagtggaccctgtgacataggaagtttctgttgctatcacatttctagaagccattgggtcaggaagaggtgtagctaccttttgcgcctgcctagaagacacagatctttcagtgactatttcctgagttactttctctgcattggcttcttgcaaagattttggaactgggaagctactgccagaggagtaggtattctctgaattaaccatagtttgctcacagagtgaatgtgaagctgtgttcatacttgtttctgtggcaggtttttgtctctgctcaatttccttatttatatctattttttgacccaggcaaacttcagctagtgtcttgaatttaagtcccaaatcatctaagaagcggtcatctagctctccttcaataaaactgcaacaaccaatagaagcattcagcgattcagtctcttcctgagaataaaccagaaggcaatctttggctgtgtgatactcatcttcctcagtgtaagaggccgctttatcggtgaaataattttttaagaatt

SEQ ID NO: 165033 - DNA, 453 bp, Homo Sapiens
tttactagtagatagatacaagttcatggatttatatccttgctctgcaagtgaattaaaagcacttggttataaggatgtctcccgtgctaagctagcagctataattccggacccagttgtagctccttctatagtgcctgttctgaaagatgaagtggatagaaaaccagaataccctaaaccagacactcagcagatgattccatttcagccacgacatttagcacctccaggtttacaccctgtacctggtggagtgttcccagtccctcctgcagctgttgttttaatgaaacttctccctcctcctatctgtttccagggtccttttgtacaagtggatgaactgatggaaattttccgaagatgcaagtaaccagatactgttgaggaaactgtgaggatcattactgctgggcacccagagctagctgtagaagcgctacgact

SEQ ID NO: 165034 - DNA, 317 bp, Homo Sapiens
aggaagttctgcagtaaatgaatgttggttcctctattagattcaaatacaaaaccaggtaaatcttctttcaatactgtagcttgctgaccatctgaattatgaatagcaatttctccttctttcaaacatgtcagtgaccaatttcctacagtaagtttagtgggtcctggtgctgacagtataggttgacttgaagtagatggctttacttggcctcgagctctttgtaacttctctaagaattcacttcggctttctgaactgtcagatccaccttccggactaccacttgaatacatggtggcaagttttcc

SEQ ID NO: 165035 - DNA, 585 bp, Homo Sapiens
ttctggaggatattgactatcccccttagacgtggtatgtcatctcaggaaattcattgtcccttaatatattttcctgtcttggaaaagcattttgttaatagtgattctggtgatgatttaaacaaaaatgtatttgacttagacgtactatgttgcaggtacttcatggttacttacctgatctgatttgcggtcctgaattacttgactggtttcttgtttgatagagattttctataaaattttggttgtgctgtttcctatattagttgaatatgtgaccagtttcatagtagtattttcctcccttaattgaatatgagatcaacattttccaagaacaggtctggtttggaacatctcagccatgttacatgtacattgagaactttgagatcctgcttcttagtggtggcagctacagaggagtgggctgaggacaggtgaaggaggagatgatgtaataagagtgtgcttgcctttgtttagttaagaaaaatatgctggatttgtattttggtttgtaaaaagaccacttctgtgtgtaagaaattagccattgagacaatccatgttgccttt

SEQ ID NO: 165036 - DNA, 1418 bp, Homo Sapiens
  misc_feature (953)..(999): n is a, c, g, or t
  misc_feature (1333)..(1341): n is a, c, g, or t
ggacatcgaaagtcaggaaattgaagctcaagaaggtgaagatgatacctttctaacagcccaagatggtgaggaagaagaaaatgagaaagaagggagcctagctgaggctgcatcacacagctcatgaagcagcatggacagctcatacgactgtgaaagaagctgaggatgcacaacatctcggtcacaatccaggctgaagatgccatcactctggattttgatggtgatgacctcctagaaacaggtaaaaatgtgaaaattacagattctgaagcaagtaagccaaaagatgggcaggacgccattgcacagagcccggagaaggaaagcaaggattatgagatgaatgcgaaccataaagatggtaagaaggaagactgcgtgaagggtgaccctgtcgagaaggaagccagagaaagttctaagaaagcagaatctggagacaaagaaaaggatactttgacagaaagggccctcgtctactggggcctctggtcaagcaaagagctcttcaaaggaatctaaagacagcaagacatcatctaaagatgacaaaggaagtacaagtagtactagtggtagcagtggaagctcaactaaaaatatctgggttagtggactttcatctaataccaaagctgctgatttgaagaacctctttggcaaatatggaaaggttctgagtgcaaaagtagttacaaatgctcgaagtcctggggcaaaatgctatggcattgtaactatgtcttcaagcacagaggtgtccaggtgtattgcacatcttcatcgcactgagctgcatggacagctgatttctgtggaaaaaggaaaaggtgatccctctaagaaagaaatgaagaaagaaaatgatgaaaagagtagttcaagaagttctggagataaaaaaaatacgagtgatagaagtagcaagacacaagcctctgtcnnnnnnnnnnnnnnnnnnnnnnnnnnnnnnnnnnnnnnnnnnnnnnncaaggatactaagaaaatagaaggtaaggatgagaagaatgataatggagcaagtggccaaacatcagaatcgattaaaaaaagtgaagaaaagaagcgaataagttccaagagtccaggacatatggtaatactagaccaaactaaaggagatcattgtagaccatcaagaagaggaagatatgagaaaattcatggaagaagtaaggaaaaggagagagctagtctagataaaaaaagagataaagactacagaaggaaagagatcttgcctctaagaaagaaatgaagaaagaaaatgatgaaaagagtagttcaagaagttctggagatnnnnnnnnntacgagtgatagaagtagcaagacacaagcctctgtcaaaaaagaagaaaaaagatcgtctgagatctgacaacaga

SEQ ID NO: 165037 - DNA, 605 bp, Homo Sapiens
  misc_feature (361)..(396): n is a, c, g, or t
acagaacatgacccagtcccgttagaacacaccaggtaagtgttccctagctaatgggttttcaacgtaccccattaccagtttacaaagtaagtaaacagtaacacatcaatcagttttctgtaatatatataattccacagtttatataaagaccatctcaagtttctagtctgtcaataaaatttttaaggactaaatgtcaaagaaaacaccgcgcaactactactttttaatgaaaatacacaatgtcaacactgaaataaatagggaaaaaaattctttacctttgtcatctttagatgatgtcttgctgtctttagattcctttgaagagctaaagaggcaaatcaccagaagnnnnnnnnnnnnnnnnnnnnnnnnnnnnnnnnnnnngaacagcttgatatttactatatttcaaactagtgctattcatacaaattaacaattccaaaggcctagattaggttatttgaacaaatgactccctgaggattcttgcactgattttccccagatgcctgaagatctagattttctgacaattctattcagtggaaatatggccatctctccagatttcaggactggtcatgttcagt

SEQ ID NO: 165038 - DNA, 677 bp, Homo Sapiens
  misc_feature (48)..(48): n is a, c, g, or t
  misc_feature (118)..(118): n is a, c, g, or t
  misc_feature (128)..(128): n is a, c, g, or t
  misc_feature (139)..(139): n is a, c, g, or t
  misc_feature (145)..(145): n is a, c, g, or t
  misc_feature (149)..(150): n is a, c, g, or t
  misc_feature (152)..(153): n is a, c, g, or t
  misc_feature (168)..(168): n is a, c, g, or t
  misc_feature (171)..(171): n is a, c, g, or t
  misc_feature (595)..(629): n is a, c, g, or t
gccctcgtcttttgtttcaatgggaaagtaaggtgtcaaggatatagnaaggaagggcatgcatatgagggagcacagtatcattttagatcttagcaagcaatgagcatctgaaaanagtagttccnagaagttctgnagatanaaannanncgagtgatagaagtngcnagacgcaagcctctgtcaaaaaagaagagaaaagatcgtctgagagatcttgaaaaaaaagaaagcaaggatactaagaaaatagaaggtaaagatgagaagaatgataatggagcaagtggccaaacatcagaatcgattaaaaaaagtgaagaaaagaagcgaataagttccaagagtccaggacatatggtaatactagaccaaactaaaggagatcattgtagaccatcaagaagaggaagatatgagaaaattcatggaagaagtgaggaaaaggagagagctagtctagataaaaaaagagataaagactacagaaggaaagagatcttgccttttgaaaagatgaaggaacaaaggttgagagaacatttagttcgttttgaaaggctgcgacgagcaatggaacttcgaagacgannnnnnnnnnnnnnnnnnnnnnnnnnnnnnnnnnnacgcattagaataattcgtgaacgggaagaacggtacaccacagtacg

SEQ ID NO: 165039 - DNA, 635 bp, Homo Sapiens
ccattgtgtcagcttttggacacacactttattgcacttgatttttttatacatccatttcctaaacaagatatgtttattcatctttttaatcctcatggctcagcacagggcctgacatacataggcattcaaccaatatttgatctccaaagcatgaccattcatgcatccataatcctttttctatagtataaagatggctgacattcaggcccccatgtatattttaaggaatatataattcccaataagctcttctttttaaaggtgattaacagttctagtgttcaatttcaaaatcaaaatgacatcatatcaggtgtcattaaaagacaaatgccaaaccatatttgcctacacaccactgccttttccctttctttcattttatctgtccatatgaaagccatggttttttttgtagttttcaccatctctaagagccctgaacaatttttgatcctataagggctttttacttcagtttctgtcacctataaaagctgtgtgtcgagactgaagattatccactatcttctcttctatctctacgcctttttctatttcttcctctgatagcaataacttggtttccgagtctttggttacaataaacacaaaggactgtcgtg

SEQ ID NO: 165040 - DNA, 764 bp, Homo Sapiens
agatggcggaaatggatccggtagccgagttcccccagcctcccggtgctgcgcgctgggctgaggttatggctcgcttcgcggccaggctgggcgcgcagggccggcgggtggtgttggttacgtcaggcggcaccaaggtcccactggaagcgcggccggtgcgcttcctggacaacttcagcagcgggcggcgcggtgcaacctcggccgaggccttcctagccgccggctacggggtcctgttcttgtatcgcgctcgctctgccttcccctatgcccaccgcttcccaccccagacttggctgtccgctctgcggccttcgggcccagccctttcgggcttgctgagcctggaggccgaggagaatgcacttccgggttttgctgaggctctgaggagctaccaggaggctgcggctgcaggcaccttcctggcagtagagttcaccactttggcggactatttgcatctgttgcaggctgcggcccaggcactcaatccgctaggcccttctgcgatgttttacctggctgcggctgtgtcagatttctatgttcctgtctctgaaatgcctgaacacaagatccagtcatctgggggcccactgcagataacaatgaagatggtgccaaaactgctttctcctttggttaaagattgggctcccaaagcatttataatttcctttaagttggagactgaccccgccattgtaattaatcgagctcggaaggctttggaaatttatcagcatcaagcg

SEQ ID NO: 165041 - DNA, 610 bp, Homo Sapiens
atgggaatgctctttaaaattcattgttcagcccctttgttctatggttgagaaatctgaggccttacgaaggttaagagaactttccccgtgtctcacaggtaggtagaggcagagctggaactagatatctggtctgttgactctagctcagtgtcttctggtaactgttgaaaattgtcttagtttgagagatggctgaaataatgaacataaaatgctatttataataacaagtatatgtgaaatttcttattgtaagactactaccggcttactgttgaatagtttggttatagtgtttaggctagaaatgcctcccacattggtaataaacattacaaaatacaatgtatttttaggtaggcattttataaaatgcattatgccatggttgcttttgagatagattgtagtctgggtagcatctttaaaatgtatgtgggcttaactgttgttcatatcaggagatgctctgattgtataggtgagactctgtttctgttatttttaattgctgtatgaaatgtgatcagattattttactaccaacagttatagtttgaaagtccaactgtattaattgactgataatatgatatgtagaata

SEQ ID NO: 165042 - DNA, 921 bp, Homo Sapiens
agccgcggtacatccggtgtgtgggttgaaggaggaggacaaagagcccctcatcgagctcttcgtcaaggctggcagtgatggtgaaagcataggaaactgccccttttcccagaggctcttcatgattctttggctcaaaggagttgtatttagtgtgacgactgttgacctgaaaaggaagccagcagacctgcagaacttggctcccgggacccacccaccatttataactttcaacagtgaagtcaaaacggatgtaaataagattgaggaatttcttgaagaagtcttatgccctcccaagtacttaaagctttcaccaaaacacccagaatcaaatactgctggaatggacatctttgccaaattctctgcatatatcaagaattcaaggccagaggctaatgaagcactggagaggggtctcctgaaaaccctgcagaaactggatgaatatctgaattctcctctccctgatgaaattgatgaaaatagtatggaggacataaagttttctacacgtaaatttctggatggcaatgaaatgacattagctgattgcaacctgctgcccaaactgcatattgtcaaggtggtggccaaaaaatatcgcaactttgatattccaaaagaaaagactggcatctggagatacctaactaatgcatacagtagggacgagttcaccaatacctggtccccagtgataaagaggtttgaaataccatatagtggatgtaaccaaaagaactcaccaagtaaaatcgcgtttgtaaaagagatgtcttcatgtcttcccctaagatacgcttttcctaacaggctactccttcctgtagagcagaaattgtattttgcacgacatgcagttatcgaagattaggattcagaagtgcgacggggatactctagagacga

SEQ ID NO: 165043 - DNA, 1188 bp, Homo Sapiens
  misc_feature (243)..(269): n is a, c, g, or t
aagccttcctcagcatctctttgaaaaccctgtgatagatggaatgtgagatctcagaaatggaagggagaaggtataaggagctaatatcctgcttcacttttcccgtcccatcctaaccttaaaagtaccggttgacgaaattccactccctggctactgtaacaagaggtagtttggggacttgtacccccagccatcctaaccaagtttcatgagctaaaatatttagcactatctacnnnnnnnnnnnnnnnnnnnnnnnnnnnaaagagggagaaaaaaatgcacacaaagcagtgaatagtaggctagactcattggggggtaattaccctagactcctaactttccaggctagttgaggaaactaaggaatgcctcccaatattccaaccctcaaagctcacactgcccccagaaaaacaaaacactcacccccaatccaatgaatcatctgcatagaaaaccagagccagcaggcctagggaaggagcggatgtttgtgccctcctctagcacatactagttcagtggtacgttctgccaggcagtgtggaggccctcagaggcctcactagggaataaaatcactgaggttctccttccacacctcgtttaattttcacaaatttgtgtgtggcaaaagtctcaaactttaccatcagcaccattcttagctcagaaaagcagaaataaggtcacttataatgccttaaggtttgtcccctgtggctattcccccccttctgcccatcattattttttggttcctattaacttaggatgctctcctttaaaacaataataacagaaagataaaaagataatgattatatagcattatccatagaagcataagacaaagcaaaaaactgcaagagagcaaaaatggtaaagacatagcatgctaaagttgacaggacctgcagagaaactgtcagcttactcccacaccaggacaggggagatgcaggttattttaaggatgaccagggcacactgtcactacaggtttccccttgagtgttggctgaggacccaacacaaaaagtgtcagagagaggggtggtaagaggagtggggaagcacgggacacgtgcctggaagctgtgaaaagaaaaatcctgaaagaaacccaagaaagttgaggaacacaagtcttgtcatccccactccagctcatgg

SEQ ID NO: 165044 - DNA, 930 bp, Homo Sapiens
  misc_feature (845)..(845): n is a, c, g, or t
ctttgcatccagttcatctgccatatttaattgctatgggcacagacccagaacctgctatgcggaacaaggctgatcagcaacttgtggaaatagacaaaaaatatgctggattcattcatatgaaagcagtggctggtatgaagatgtcttaccaggtacaacaggcaatcaacacatgcctaaaagatcctgtaaggggtttcagacaagacgagtcctctagcgctttgtgttcacacctttactccatgatccgtggaaaccgccaacacagacgagcctttcttatttctttactcaacctctttgatgacacagcaaaaacagacgtgactatgctcttgtatatagcagacaatctagcctgttttccataccagacacaggaagagccgttgtttataatgcatcatatagacattacactctcagtttctggtagtaacctactgcagtcattcaaggagtctactggtaaaggacaaaaggaaagagtacgaaaatcatcacctagtaaggaaaatgacgtcaagcgacagtgaagaagaagtttccagacctcggaagtcacggaaacgtgtagattcagattcagattcagattcagaagacgatataaattcagtgatgaaatgtttgccagaaaattcagctcctttaatcgaatttgcaaatgtgtcccaggggtattttattacttctcatgttaaaacaacatttgaagaatctttgtggattttctgatagtaaaattcagaagtactctccatctgaatctgcaaaaaaatatgataaaagcgataaaccgaaaaacaggagttcataatcatccaaaacaaacnctggacttcatgcggagcggcactccgaagggttatcctaagagtcgaggagcagtactattggcaatcaatcggagaagaaaac

SEQ ID NO: 165045 - DNA, 627 bp, Homo Sapiens
catttcagctgggaaattactgcaatttttatgtaatgcacagagaagtagagtccttagaaaaaaatatggccattcttgatccaccagatgctgaccacttatacagtgcaaaggtaatgctgatggctagccctagtatggaagatttatatcataagtcatgtgctcttgctgaggacccacaagaacttcgagatggattccaacatcctgctagacttgttaagtttttagtgggcatgaaaggcaaggatgaagctatggccattggaggccactggtctccttcgttggatggaccagacccagaaaaagatccctctgtgttgattaagactgctattcgttgttgtaaggctctgacaggcattgatctaagtgtgtgcacacaatggtaccgttttgcagagattcgctaccatcgccctgaggagacccacaaggggcgtacagttccagctcatgtggagacagtggttttatttttcccggatgtttggcattgcccttcccacccgctcagagtgggaaaaaccctctccccgaggatacaagccagcaactgggtccgagaaaccttccagggtggaacgccaggaaggcctggatggacaacccggattg

SEQ ID NO: 165046 - DNA, 1428 bp, Homo Sapiens
  misc_feature (17)..(17): n is a, c, g, or t
ttctgaaccaaggacgnctggtggagggggaaggagggtgcgaggtgtctgtctgatgctttaggaaatgtctactgaggaccctgggacttaagaagaagggcggggagagtgccattgcctgtttgggagacaaaaatgaacgaaaacaggtgactttggaaagcaaagtcaaaacccagtttaggatgtagcacctgccccaggattcctgccctcggctttgccccagacccttattccagatgctgagagtgaccaggacagcagctcctgaggcccagtggtcttctttccaacaggaaaagaaggctgtgatgtcgctgtcaggatcatgccctgtggcacagcacaggtggtgggaggtggttttctgactgagatgttgcctgatggatggaaagaaatgtatttttaagttcaaaaagcattatcctgtggcattgcctggacatccaccccctgacagcccagagcagcactgtctggcttcccttcatgcttgtggctttgttgtgtttgatcagaatcttgggggaaatggaaagttttcctcaaggagcagctgggggcagaataggtagtatttaagcaaatacttaagtccaagcaaatcatccccattaaaaagctcttcctgtaggctagtaggatttctaaatagatgaattcaacagacttggtaattttaatccaagagtatgtatgtgaagaaagtgagcatgattcaacagtttcactctcagggattttaggatggcaaaatacttcacagaaactcaatgattaagttcccttccacacttccagagcttgaatgaacacaggtagccacctaaattgagcagtattgcaactcagagagaaaatcatctgaatagtaggacaagctcagaaggtacattgtgactgagggcttaaaaggagaccaaaacatggccccatcagggaagcttcttaatgcttggggggccagctaggtagggttgcttccaaaagctggagcccacccctgcctaggggttgtcagagagccacacctgcaggggaacaggtacctccgagggtgagagtcgtggtctctgggagttgttttctcacctctggcttagaaggggtcaggcagaaaccacaggatgtggggtcacactctgtcccaagtttgggaacctgaaaaagtctccattcagaacatggttggttctccctgtcccatgctatcttatcttcctaaatgactaatgagggaagcgggggttcctttttctgcactttggatccccatctggggtcctgtaggggggctctgaaggtggggatctgcccttctggctgatgggggaggaaaaaacaagcggccttcccaggggcacaggtgtctcacctctccggaagaaaattttaaggaagccctccggggggccttcc

SEQ ID NO: 165047 - DNA, 1287 bp, Homo Sapiens
ctcggcctgtgccggcgcgacgccgcgttgtgggcccgactccgctctgtctgcttcgccaccttctccccgagcactgcccggccggccgccatggctaacgtggctgacacgaagctgtacgacatcctgggcgtccgcccggcgccagcgagaacgagctgaagaaggcatacagaaagttagccaagggaatatcatcctgataagaatccaaatgcaggagacaaatttaaagaaataagtttggcatatgaagtactatcaaatcctgagaagcgtgagttatatgacagatacggagagcaaggtcttcgggaaggcagcggcggaggtggtggcatggatgatattttctctcacatttttggtgggggattgttcggcttcatgggcaatcagagtagaagtcgaaatggcagaagaagaggagaggacatgatgcatccactcaaagtatctttagaagatctgtataatggcaagacaaccaaactacaacttagcaagaatgtgctctgtagtgcatgcagtggccaaggcggaaagtctggagctgtccaaaagtgtagtgcttgtcgaggtcgaggtgtgcgcatcatgatcagacagctggctccagggatggtacaacagatgcagtctgtgtgctctgattgtaatggagaaggagaggtaattaatgaaaaagaccgctgtaaaaaatgtgaagggaagaaggtgattaaagaagtcaagattcttgaagtccacgtagacaaaggcatgaaacatggacagagaattacattcactggggaagcagaccaggccccaggagtggaacccggagacattgttcttttgctacaggagaaagaacatgaggtatttcagagagatgggaatgatttgcacatgacatataaaataggacttgttgaagctctatgtggatttcagttcacatttaagcaccttgatggacgtcagattgtggtgaaataccccccctggcaaagtaattgaaccagggtgtgttcgtgtagttcgaggtgaagggatgccgcagtatcgtaatccctttgaaaaaggtgatctttacataaaagtttgatgtggcagtttcctgaaaaaaactgggatcaacccagacaaagctttctggaactaaaaagatctttcggcccttctagaccgggaaggttcctaaacataaattgggagaaaacagcaaggggggtaaaagccttcaggggaattttgataagcacctccaaggggctcagggagggtgggccatgaaga

SEQ ID NO: 165048 - DNA, 714 bp, Homo Sapiens
atgtcttataaaacctgaatcctgaggctgatgaattgcgaaaattcctcaaaaggaaattatgctggtcatcacaggaacatctcaacgttcgagtaaactggaggactgtggctattcctgaaccttctttgagacagaatccctcagaatctcacacttataacttcctaccttttacttgaatgctttgccatattcaggacagagactctcacaaagttcagaaaacagctggacttaccagtaaaatcaaatgagaggacctattttctctggtagtggttgattactacattattttcttaagtggctggttttttagttactatgtaaatggtcgtttttctgttaatgatgctaatgtgttgtaaacaagattctaaatttaaaaaggaaaacaaaacaaacttgttctttgcagcttatcaccttgtgaatgtcggtaacttacttttccataatattgcaaataacataaaatcttaaaataattccaagctgagtcttctagattgagcagaaatggtgaaaggagtattgataacttggcgtatgtgatgggcccctcttgtttattttctatgtgagtcacattgacatgcgatcagtttgggaaatgtgatgaaaacaaagactagatgggtatgtgtgtttatgtgttgggtagggaggtgacgattgccactcataaaataaaggattttataaaat

SEQ ID NO: 165049 - DNA, 1378 bp, Homo Sapiens
  misc_feature (804)..(886): n is a, c, g, or t
  misc_feature (1037)..(1047): n is a, c, g, or t
  misc_feature (1185)..(1198): n is a, c, g, or t
taatcgagctcggtccttccacagcaaagactaggtgtatatttttttctgtttttctaaatgacccgtggtacttaataggtgtactaaaattgtgttgggagcagggatttggaaatttctgagagatgtgtagttaatttagtaattctgtttcatgagatatgatctgttatgctagtggtttaataggcttgctatgtaagtagaacgtggctcaactagatatctttatatgtatgggcattactcttagtgatatttgtttcctgtcctttgttgctcatgctgtttaagtgcaggctgagacccagcctctttgtaagtacagtaaaataatccaccgttttttacagaccctagtcaaagggttaaaaaaattaagattgctttccatgtttgaaatttaccattgagagtcaatgaagttgctattttgagtttagcattgatattgtgaaaataagtgcaatttggatttcatgtttcttaatattcattcttgtttcacaaatgaatgattaaggaattatgcatcataaaggaacctaagtgaggtatatgatgagtgtattgtctttgcacacacatataggtatattctgaatacaagcttattcacattttgcttcctaatctttttgttgtacagggattcaggtttcttattcttacaacatgattgtttatatgtgaagcacatcttgctgttgccttatttttgatgcttttattcatgacaagaattgtcaatataagaatgtatatcttttttgcaaccaatttaataaaggagttgaaagnnnnnnnnnnnnnnnnnnnnnnnnnnnnnnnnnnnnnnnnnnnnnnnnnnnnnnnnnnnnnnnnnnnnnnnnnnnnnnnnnnnttggtggcgcccccccgcccctagaaaaattttttaaaccatttcctttggggccccgggccccctagaggaaagggaaacggggccaaaactggtgttccccaaggaaaaccccgggcaaagaaaaaaggggctggggaatccccccccnnnnnnnnnnncgccccgggggggaaaccccggacggtttctggaaaaaattccgaggagggggggctcttgaggggtattttaggggagtccatatccacacgaagggtttccaaggggcgagctctccaaatataaaaatatttcannnnnnnnnnnnnnggggtcaactttattacgcgaagaaactggtgtggaaatattctctttaagaaaaaatctcgcggccccaccatggagaaccccccttccaacaaaaagcggcggattgatagagaaatacgggatatcggccccaagcgggattttaccacacagctcttgttacgcgccttcggcgag

SEQ ID NO: 165050 - DNA, 1138 bp, Homo Sapiens
  misc_feature (128)..(138): n is a, c, g, or t
  misc_feature (1037)..(1037): n is a, c, g, or t
  misc_feature (1078)..(1078): n is a, c, g, or t
  misc_feature (1092)..(1092): n is a, c, g, or t
  misc_feature (1115)..(1115): n is a, c, g, or t
  misc_feature (1127)..(1127): n is a, c, g, or t
gaggatccccgtttcatcttctgaatccagtatctaagtaccaatgattcaggaaatccccaaatcatcatactgttcagcagctaactgcaaagaattctaagagctttgccacagaaagatgtccnnnnnnnnnnntgaccttcatcagtgttcatatttttcttcaagatgacgatgataaagtcatttctgacattccatggtatttactcactgtttagaaagtctatgcaggcggctgactagtgcctttcgtttatatttggaacaaaaacagcatcagaccctagaggtttagcatgccttatggctacgaaggtcctctttagaagctgggccaggctaccatatttcagggactcacgattcacaggcttttatcacacacgtagaagtcctgtagaagtcagtctgaatgagtgcctcttaggtgttcagtactcactatgtccagcactgtgctggcagggatagaaatatatcccttgacaaccgaatcttttttgggggttagggggtgattaaaaacttcatacatgaaacaatgaaggattaaaagacagtatacaatcaagtgctaacttgtggagaaatgcatttaggagtgcgatagtgctttagggatttcaagaagggagagatgtatttggagttgttgttgccatttcagtagaactgatctcagggatgaggacagaaccatctacatttgttgcagtcctttggaactgtagactggtgcacataccctctctttcgggaagagatagaaatctttggtttgatactgattagcacagtcctagatttctacagctttggtaggctaccagtgatcatatatacaactttatcgtatatataactaccttgagcagcatgtcccaatgtcgtttttgttttcactgtccctcctttttgagaaataagcaggatgttggccaaagtagggcttgtttgcaagcaagtagcatcctaacctccgtatcactttcgtggagccaatcttgatctgtaaactattatgttgtggntgcccgtgagtctggaagtgccgtaaccttgaccggggaanctttaaaagtcganctgcaaggcttgccaactttggncctgggcggcgnttttaaaaccc

SEQ ID NO: 165051 - DNA, 942 bp, Homo Sapiens
ggccgcagtgagctcagtgcttagagtccgttcatgttgatccgcctccaaagtatctatcctataactccagtcaccatatatagttctccttttgctactagtttccttctcgacaattcacagctttgaagaatcgctcaaaacacttcatcccattttcagttaacagagaaggatcaagctgaagcacattactttcaaagaagtccttattaatatcaggatctaagtctggttcatcccccatcaacttggaataccacttaataacaggcttcacgatcacaaagctaaactgcattctcagctaagcatttccatatttgttttgcctgaggagcacatagccacagctgaccatccttcaataaaaatctaaggaagttaagccgttcttgaacttcttgaacatgactatatctacttcccagcctcacagtttgtgggtcataatcttcatggtctctagcatatagtctcatgctttccatgtaagttgcaaggttttctgctaccaaagtaactagggcatgattgtgttgaagttgattgattaagtcatggcgataaaacacatggggacttcgctgagtttgactgaaacgagaagaactcaaattttgaggcgcttcaccaaacaaactacaaatttctctaatttgtttcagtgcgggaataacccatttgtcatttgtgcgaagttcttctataaagcgatctatccattggatcttttgtgtatcacggtcctgggagcaactgtaatctagtatttttatgtgggcactgagagccaggtccatgatatctacaggcacatcatcactgtgagccagattccacagaaggttcaaacactttgtgtgccatcacaccatctttatcatcttctgcaagacgacgtgcagtctcaagtagcttatcacgtgcttacctcgg

SEQ ID NO: 165052 - DNA, 704 bp, Homo Sapiens
gaggaagctgtgaggatcattactggtggggccccagagctagctgtagaaggcaacggccccgtggaaagtaatgcagtactcaccaaggccgtcaaaaggcccaacgaggtttcagatgaagatgaagaaaagggagccgttgtcccccctgttcatgacatttacagagcacggcagcagaagcggattcggtagggttttaaacgcctctgcagaaaactcctgtccaggattccttttgcctcaagtggtatgtttaaaagagacaacgctttgttacaaggttcttggaaacaaagttgtattgtcattggtgcctctatcacatggttcttgagaaaaaacaaaccaacctgtgtgaattttagaatacggaacagacctatgctctaagcaaaattaggttttcaaaaatgtgagaacagtacaaagtggcagaaccacattttgttccctcttcaagggtgtcttgtatgtgccgcttgaagatttgtgagtttttcaacagttttattttaaaaactggatggcttatgattgtaaagcattttatcacattttctgaaaacaattgttcttggtttgcttatgtagagtcctgccttattgtttgtttttatttatggcagaatgtatgaaatccgttttgtagtttcaaattttaaaagtcctttaaaaaataaaaggattcagaaacatca

SEQ ID NO: 165053 - DNA, 340 bp, Homo Sapiens
ggttcatcttctgaatcccatgtcatatgacagtactcccctccccagttgttctttattgtagcaacatacactctcaatgaacttttatgacctttaactttctctgtctctcttcctcagcagacctcttggaattagggtttctaatcaaactaagtcttgcatcataaattctatgtgtttgtgataaaagcaagtgacaaagagaaccagagactgaaaagaaacaagtccagaaaccatattacatagattttaattcatgaatttttcttcttaataaatcagctatttagaggtggattaattggaagtatgtgcattgcttgtgggaacg

SEQ ID NO: 165054 - DNA, 653 bp, Homo Sapiens
ctcatcttctgaaccagaccgggcagggggctggcagcacttggctgtgctgctggctttccgccctgactcccggtcctcctcaggccgcctattttctgcgttgttactctgagtcttcttagagtaagaattagaggtgggaatggcaggaccagcctggtcgctgaagcgccgctgcttgggattggccgacacgctgcgctgtaccttgtgggatggggatggggcgctgctattggtcagatcagctgaaggccggggtttcagggtgatggtgtcgccttccagctcggagctcttgtagcccaggagcagataggtggccatcacctcgttgtatctctggcccaccagcgagtcctggatctcttcccgtgtataacccatggacaccatcagctctgtccgccgggggtccttgtagtcagggagtggctccacgtaaggctttagttcatcatcttcgtgacccacattcatccatcgatctttcatgatttgctctaaagtgcctctcttgctgggattaagaatgagaaatttcttaagcaggttttcacagtccgtggacatgtagaatggaatacggtattttcccctcagtacccgtggtcccacctctccccgtgtcccacctctcgggatcctca

SEQ ID NO: 165055 - DNA, 1306 bp, Homo Sapiens
ctgttaccatttcaatattctcactgtaacctgctgcgagggcagcctcctggtctgtgcccaattagattcccatctgacctctctccggaaaactcttccatggaagagccatagaaatccacctgctcatcataattgctttcatcagcctgttcatcaaactcagcttccactttcttctccccgatgtggaagtcctcctccactcccgaaggctgcaccgtgtgctctgtctgcacggtgttgatggactctgtgacctggtgctcgtcgtaggtcgcgtgcacatccatgccctcgcaagcctgttctaagcgctcgggcttcacgtggatccagcgtttgtgagccatgatgctgggcttgctgtacatgggccgggtgtagtggaactcggcgctgtcgctggcgccctcctccccatcctggcttgccatttccgtgctcaggcggtcatgctctgtggacgagttgctgggcaggtattcgtgctcggtgagctggaatgacagctcgtctttggtgctctcctcttcattttcaccatctctcagttcttgggctttgggaaaatcagtatgacccccagagcccagctcaaagctctctaccaggccattataactactgctgcttggtgactggtggtcactgccatgatttagcttctgacaaaggactgtagggtttccctctaaaacttcagtacatttgtctaccacatgccacatctggaggaagcttgccgctgtcaagtaactaacaatttctggagcgggcattactagacgtcctgtataactagataggagaatgttctcaaacactcttgggttcatcacatcaggcaaaacaattctcctgttgtttttcaggagtacctggtcacaaaagtagggtgaactggcagcaagaacggctttgtgtgcccggaaaatgtggccttggacaacaatggagacgtcacataattgtccttgctggcgctgctggttcagtttctgtagaatggtgctggaaaaatcaggaaattctacccgaaaagagtttgttccaggctccatttcatcacaaatcttgttcggtgctaatgcaaagctgtattcctgggatagagttccttatgccatggccatcaaaaagcaacatgaatagaatgaggaagaagaacccatttcagttttgcttcaaattaaaatcacattgacttctgccaagggctcagcgctcacatcccccgcccaagatatcctctctgccgccggcgcaggcctgttgtagcctcagctgccgcaacagattc

SEQ ID NO: 165056 - DNA, 876 bp, Homo Sapiens
acgtagcccacctgaaaagacaaaaaaaggaaggaaagacaaggcaaagaagagtaagaccaaaatgccatctttggtaaaaaagtggcagagtatccagcgtgagttagatgaagaggacaattctagttccagtggagagggtcgggaatcaactgcacagaagcgaattgaagagtggaaacagcagcagctggttagtggcatggcagagagaactgaactgtggaaaaatgacctttccttaacttgaagctacttttaaaatttgagggtctggaccaaaagaagaggaatatcaggttgaagtcaagatgacagataaggtgagagtaatgactaactccaaagatggcttcactgaagaaaaggcattttaagattttttaaaaatcttgtcagaagatcccagaaaagttctaattttcattagcaattaataaagctatacatgcagaaatgaatacaacagaacactgctctttttgattttatttgtactttttggcctgggatatgggttttaaatggacattgtctgtaccagcttcattaaaataaacaatatttgtaaaaatcatactaatgcttattttattttaattgtatagaaagaaaaaaatgcctaaaataaggttttcttgcataaatactggaaattgcacatggtacaaattttttcttcattactgtacagtgatgatgttaatgactttgaagcactgaaagttactgaagtgccttctgaatcaaggatttaattaaggccacaatacctttttaatactcagtgttctgtttttttaaaaacttgatattcctgtatggtgcatatatgatacagttacctaatcatgttgaataaatgggcatgcc

SEQ ID NO: 165057 - DNA, 1146 bp, Homo Sapiens
  misc_feature (459)..(499): n is a, c, g, or t
gggagtgacgcgaggcgtagcggaagttactgcagccgcggtgttgtgctgtggggaagggagaaggatttgtaaaccccggagcgaggttctgcttacccgaggccgctgctgtgcggagacccccgggtgaagccaccgtcatcatgtctgaccaggaggcaaaaccttcaactgaggacttgggggataagaaggaaggtgaatatattaaactcaaagtcattggacaggatagcagtgagattcacttcaaagtgaaaatgacaacacatctcaagaaactcaaagaatcatactgtcaaagacagggtgttccaatgaattcactcaggtttctctttgagggtcagagaattgctgataatcatactccaaaagaactgggaatggaggaagaagatgtgattgaagtttatcaggaacaaacggggggtcattcaacagtttagatattcnnnnnnnnnnnnnnnnnnnnnnnnnnnnnnnnnnnnnnnnnaaaaatagttcttttgtaatgtggtgttcaaaacggaattgaaaactggcaccccatctctttgaaacatctggtaatttgaattctagtgctcattattcattattgtttgttttcattgtgctgatttttggtgatcaagcctcagtccccttcatattaccctctcctttttaaaaattacgtgtgcacagagaggtcacctttttcaggacattgcattttcaggcttgtggtgataaataagatcgaccaatgcaagtgttcataatgactttccaatttggcccctgatgttctagcatgtgattacttcactcctggactgtgactttcagtgggagatggaagttttcagagaactgaactgtggaaaaatgacctttccttaacttgaagctacttttaaacattggagggtctggaccaaaagaagaggaatatcaggttgaagtcaaagatgaccagataaggtgagagtaatgactaactccaaagatggcttcacttgaagaaaaggcatttaaagattttttaaaaatcttgtcagaagaatcccagaaaagttctaatttcattagcaattaataaagctatactgccgaactgcaacccaccactccaaacgggggggcgcccaaaaatcc

SEQ ID NO: 165058 - DNA, 855 bp, Homo Sapiens
cgtaccatcttctgaatccctcccagagaggtgaaggagatggagcagttggaagaaatataagagcgaagctctgggagtaggagatgtcaaacttccctgtgagatggatgcccaaggccccaaacaaatgaacattcctggaggggatagaagcaccccagcagcagtgggggccatggaggacaaatctgctgagcacaaaagaactcaatattcctgctattgctgcaaactgagtatgaaagaaggtgacccagccatctatgccgaaagggctggctatgataaactgtggcacccagcttgttttgtctgcagcacctgccatgaactcctggttgacatgatttatttttggaagaatgagaagctatactgtggcagacattactgtgacagcgagaaaccccgatgtgctggctgtgacgagctgatattcagcaatgagtatacccaggcagaaaaccagaattggcacctgaaacacttctgctgctttgactgtgatagcattctagctggggagatatacgtgatggtcaatgacaagcccgtgtgcaagccctgctatgtgaagaatcacgcggtgggtgtgtcaaggatgccacaatgccatcgaaccagaagtgcagcgggtgacctataacaatttcagctggcatgcatccacagagtgctttctgtgctcttgctgcagcaaatgcctcattgggcagaagttcatgccagtagaagggatggttttctgttcagtggaatgtaagaagaggatgtcttaggaggagggcacccagaagtatcgagccatagctatccaaagtggtctgcatttctactgtaaaatgcaatttg

SEQ ID NO: 165059 - DNA, 573 bp, Homo Sapiens
agctcttaaagctccagtgcatttaattccttagaccaccacagaatcatggcagcttttcatgatgccagaaggtaaagcacgggggaatacagaggtggagtcctgctttttttcaaatcctaccttctattacagggaataaagaagagagaggcaccagcttcttctcaaacaaaggaactgagtgtaactatattaaaattttagcattttccaataaagtttattcaatcttctttaattagggatttaagatggtctaggtgatgcccccctatgaaggattctgcttgattcaaagcttttattttcaccaaaataagaattatttcttcgacttcatccctgaattcacttctagataatttatgtgcagactgcaataaaaactgaatgaagttttctagctgtggaatagatgtcctcatggcagaattttcaaaccattcttctgggagacatgctgctacctggttgaaccttttaaccacatctggcccaggtgtggcattgagaagggctataataaggtacggtttagaggttcccaggccaagttctgcaggggtc

SEQ ID NO: 165060 - DNA, 1121 bp, Homo Sapiens
  misc_feature (653)..(672): n is a, c, g, or t
atctagaggatcccttcgattggcgggcacttacaaccgcatcatttcctgttggtccaagaagaataaaggtgattctcatctaaatgttcaagttagcaactttaaatctggaaaaggagattctacacttcaagtttcttcaggattgaatgaaaacctcactgtcaatggaggaggctggaatgaaaagtctgtaaaactctcctcacagatcagtgcaggtgaggagaagtggaactccgtttcacctgcttctgcaggaaagaggaaaactgagccatctgcctggagtcaagacactggagatgctaatacaaatggaaaagactggggaaggagttggagtgaccgttcaatattttctggcattgggtctactgctgagccagtttctcagtctaccacttctgattatcagtgggatgttagccgtaatcaaccctatatcgatgatgaatggtctgggttaaatggtctgtcttctgctgatcccaactctgattggaatgcaccagcagaagagtggggcaattgggtagacgaagaaagagcttcacttctaaagtcccaggaaccaattcctgatgatcaaaaggtctcagatgatgataaagaaaagggagagggagctcttccaactgggaaatccnnnnnnnnnnnnnnnnnnnngaagaagcaaggtgaagataactctactgcacaggacacagaagaattagaaaaagagattagagaagaccttcccagtgaatacctctaaaacccgtccaaaacaggaaaaagctttttccttgaagaccataagcactagtgatccagccgaagtactcgtcaaaaatagccagcctatcaagactcttccacctagctacttctaccgagccatctgtaatcttatcaaaaagtgattctgacaagagctcttcccaagtgccgccaatactacaagagacagataaatccaagtcaaataccaagcaaaatagtgtgcctccttcacagaccaagtctgaaactagctgggaatctcccagacaaatacaagaagaagtcaaggccagacgagaaacgtgaaatttgttattcctgaattggacatcgtgtttgcaacactgtta

SEQ ID NO: 165061 - DNA, 412 bp, Homo Sapiens
gtgcgcttttcatggattatattatcactgatcaggaaacttcgccagctgaagttgctgagcagtattccgagaaattggcttatatgccccacactttttttattggtgatcacgctaatatgttccctcacctgaagaaaaaagcagtcatcgattttaagtccaatgggcacatttatgacaatcggatagttatgaatggcatcgacctcaaagcatttcttgatagtctaccagatgtgaaaattgtgcaagactcgaagtgtcctgatggaggagacaatgcaaatagcagtaacacagctcttaatatgccgtgtcattcctatgaatactacttgcagaatgcagttattgaaatgattaaccgaggacagattcaaataacaattaatggattcagtattag

SEQ ID NO: 165062 - DNA, 1676 bp, Homo Sapiens
  misc_feature (1572)..(1574): n is a, c, g, or t
  misc_feature (1578)..(1579): n is a, c, g, or t
  misc_feature (1584)..(1584): n is a, c, g, or t
  misc_feature (1586)..(1586): n is a, c, g, or t
  misc_feature (1592)..(1594): n is a, c, g, or t
  misc_feature (1596)..(1600): n is a, c, g, or t
ggtccatatgctacactgaccatgactttggcacagaccaacttctgcaagaaacatggatttgatccacaaagtcccctttgtgttcacataatgctgtcaggaactgtgaccaaggtgaatgaaacagaaatggatattgcaaagcattcgttattcattcgacaccctgagatgaaaacctggccttccagccataattggttctttgctaagttgaatataaccaatatctgggtcctggactactttggtggaccaaaaatcgtgacaccagaagaatattataatgtcacagttcagtgaagcagactgtggtgaatttagcaacacttatgaagtttcttaaagtggctcatacacacttaaaaggcttaatgtttctctggaaagcgtcccagaatattagccagttttctgtcacatgctggtttgtttgcttgcttgtttacttgcttgtttaccaatagagttgacctgttattggatttcctggaagatgtggtagctacttttttcctattttgaagccattttcgtagagaaatatccttcactataatcaaataagttttgtcccatcaattccaaagatgtttccagtggtgctcttgaagaggaatgagtaccagttttaaattgcccattggcatttgaaggtagttgagtatgtgttctttattcctagaagccactgtgcttggtagagtgcatcactcaccacagctgcctcctgagctgcctgagcctggtgcaaaaggattggcccccattatggtgcttctgaataaatcttgccaagatacacaaacaatgatgaaactcagatggagcttcctactcatgttgatttatgtctcacaatcctgggtattgttaattcaacatagggtgaaactatttctgataaagaacttttgaaaaactttttatactctaaagtgatactcagaacaaaagaaagtcataaaactcctgaatttaatttccccacctaagtcgagacagtattatcaaaacacatgtgcacacagattattttttggctccaaaactggattgcaaaagaaagaggagaagaatattttgtgtgttcctggtattcttttataagtaaagtttacccaggcatggaccagcttcagccagggacaaaatcccctcccaaaccactctccacagctttttaaaaatacttctactcttaacaattacctaaggcttcctcaactgccccaaatctcttaatagcttctagtgctgctacaatctaagtcaggtcaccagagggaagagaacatggcattaaaagaatcacatcttcagaagagaagacactaatattattacccatatacatgatttcagaagatgacataagattcctcttaaagaggaaatgtcaggaatcaagccactgaatccttaaagagaaaagttgaatatgagtcattgtgtctgaaaactgcaaagtgaacttaactgagatccagcaaacaggttctgtttaagaaaaataatttatactaaatttagtaaaatggacttcttattcaaagcatcaataatttnnnccannaaaananaaaaannnannnnnaacttgttcgggccgccctccgcccctcggagaaagcttttcttaaacccatttcggttttggggccgcgccgggg

SEQ ID NO: 165063 - DNA, 895 bp, Homo Sapiens
  misc_feature (78)..(150): n is a, c, g, or t
  misc_feature (305)..(305): n is a, c, g, or t
gggggaaaaaaacacaaggaaagttttcccccccttttggggttgagaaaaaaccccaattctcttttggttgggggnnnnnnnnnnnnnnnnnnnnnnnnnnnnnnnnnnnnnnnnnnnnnnnnnnnnnnnnnnnnnnnnnnnnnnnnngaggcccttccggggccatttaagggggccccggaacccttccccaggaaccccagaatttgggttgtcatctggaggtgcctggagccaacttaccatacaccatcaggcttttaggacggaacttaccacatttctctatttgacagaaattnccttccacaattttggtcactacatttgacttgctatttcaaaagaagtccacatgtcatgaaacaccaaccaatttttatcaatcacttaccaatatgaggttaagaagttaagacaaccatttttacagataaaacacatgaatccaatgaccttcctcacagctgaaatgctgcctccgccgcagcaacttggccggcccgtgctggaagggtctgggtgtctccttgggaggatgtgcacctggaacacgggttgtgcacaaatcacaccaggcactgtatgcgcccatcctgtcagaaggaagctggcctcccccaccccatggaagcctcgacgccataccccagtgctggacacctgccaccctgaaccgaaacggcccctgacctcaggggctccctccaccacctcagctgggccttgctgcgggcaggtggcccggaccttggtgcctcgtgtgcccagcactgtgcctggcacatggtggatactcaggtcagcgtgctgcactgaagctgtgtgttcggggaaaggttgctcaacacagatcgctttgtatttagagaaaaatgaagttttggtacga

SEQ ID NO: 165064 - DNA, 476 bp, Homo Sapiens
aaacagaagctgtggctataatgtgcaaaatggctcccatggttgggaaggatattacagagcgtcttatcctccctaggttttgtgagatgtgctgcgattgcagaatgtttcacgttcgaaaggtctgtgctgccaattttggagatatttgcagtgtagttggccagcaagctactgaagaaatgttgctgcccagatttttccagctttgttctgataatgtatggggagtccgaaaggcttgtgctgaatgcttcatggcggtttcatgtgcaacatgtcaagaaatccgacggaccaaattatcagcactttttattaatttgatcagtgatccttcacgttgggttcgccaagcagcttttcagtctctgggacctttcatatctacttttgctaatccatctagctcaggccagtattttaaagaagaaagcaaaagttcagaagaatgtcagtagaaaacaaaaata

SEQ ID NO: 165065 - DNA, 625 bp, Homo Sapiens
cagcagtaacgctcatcagttacctaacatctgcaagccgtttagcccgggcttacagcattgtcattagaccaatctcggacttgatgggccttattcctaagtataatcacctagtatactctcagattcccgcagctgtgaaattgacttacccagatgcagtaaacttacagaactatgtagaagaaaagcttattcccccttggaactggatggtcagtattatggattctactgaagctcaattacgttatggttctgcattagcatctgctggctgatcctggacatccaaatcatcctcttcacgcttctcagaattcagcgagaagagagaggatgactgcgcgagaagaagctagcttacgaacacttgaaggcagacgacgtgccaccttgcttagcgcccgtcaaggaatgatgtctgcacgaggagacttcctaaattatgctctgtctctaatgcggtctcataatgatgagcattctgatgttcttccagttttggatgtttgctcattgaagcatgtggcatatgtttttcaagcacttatatacgtggattaaggcaatgaatcagcagacaacattggatacacctcaactagaacgcaaaaggacg

SEQ ID NO: 165066 - DNA, 1864 bp, Homo Sapiens
  misc_feature (628)..(628): n is a, c, g, or t
  misc_feature (1705)..(1705): n is a, c, g, or t
  misc_feature (1714)..(1714): n is a, c, g, or t
  misc_feature (1772)..(1807): n is a, c, g, or t
gggacgctttgcggctgtcgtcggagaggcatctgggttcggactggggccgccatggggaaagtgaatgtggccaagttgcgttacatgagccgagatgacttcagggtcttgaccgcggttgaaatgggcatgaagaaccatgaaattgttcccggcagtttgattgcttctatagccagccttaaacatggtggctgtaataaagttttaagagaattagtgaaacataaactcatagcttgggagcgtaccaaaactgtccagggctatcggttgacaaatgcaggatatgattacctagctttgaaaacactttcttctaggcaagtagttgagtgtgttggaaaccagatgggtgttggcaaagaatcagatatttacattgttgcaaatgaagaaggacaacaatttgcattaaagcttcacagactaggaagaacctcgtttcgaaatttgaaaaacaaacgcgattatcataaacataggcacaatgtgtcttggctttatttatctcgtctctctgccatgaaggaatttgcctatatgaaggcattgtatgagaggaaatttccagttccaaagccaattgattacaatcgtcatgcagtggtcatggaactcatanatggttatccactatgtcagatacaccatgttgaagatcctgcatcagtatatgatgaagctatggaactaattgtcaaacttgcaaatcatgggctgattcatggagattttaatgaaattaatctcattttggatgaaagtgaccatatcaccatggattgattttccacagagggtttcaacttctcatcccaatgctgagtggtattttgacagagatgttaaatgcattaaagatttctttatgaaacgtttcagctacgaaagtgagctttttccaacttttaaggatatcaggagagaagacactcttgatgtggaggtttctgccagtggctacacaaaggaaatgcaggcagatgatgaactgcttcatccattaggtccagatgataaaaatattgaaacaaaagagggatctgaattctcattttcagatggagaagtggcagaaaaagcagaggtttacaggtcagaaaatgaaagtgaacggaactgtctagaagaatcagagggctgctattgcagatcatctggagaccctgaacaaataaaggaagacagtttatcagaagagagtgctgatgcacggagttttgaaatgactgaattcaatcaagctttagaagaaataaaagggcaggttgttgaaaacaactctgtaactgaattttctgaggagaaaaacagaactgaaaattacaacaggcaagatggtcagagaggttcaaggaggagtccctgctggctctgacgagtatgaagatgaatgccctcatctaattgccttgtcgtcattaaatagagaattcaggcctttcagagacgaagaaaatgtgggagctatgaatcagtatagaacaagaactctgagtatcacttcttcaggcagtgctgtaagctgttcaacaattcctccagaactggtgaaacagaaggtgaaacgtcagttgacaaaacagcaaaaatcagctgtcagacgtcgattgcagaaaggagaagcaaatatatttaccaagcaagcgtagggaaaacatgcaaaatactcaaatcaagtttggaagcagctagcttnttggggagnaataatatatttaggatccttggatatggtttaatatatttttttaaagttactggtnnnnnnnnnnnnnnnnnnnnnnnnnnnnnnnnnnnngagccaaagcctaatcataatatttaataaaataaaacccctcttttccatcttatt

SEQ ID NO: 165067 - DNA, 533 bp, Homo Sapiens
ggcagtacttgcaaaagcacttgaagtcattaaaccagctcatatactgcaagagaaagaagaacagcatcaggtggctgtcactgcataccttaaaaattcacgaaaagagcaccagcggatcctggctcgccgccagacaattgaggagagaaaagagcgccttgagagtctgaatattcagcgtgagaaagaagaattggaacagagggaagctgaactccagaaagtgcggaaggctgaggaagagaggctgcgccaggaagcaaaggagagagagaaggagcgtatcttacaggaacatgaacaaatcaaaaagaaaactgtccgagagcgtttggagcagatcaagaaaacagaactgggtgccaaagcattcaaagatattgatattgaagaccttgaggaattggatccagattttatcatggctaaacaggttgaacaactggagaaagaaaagaaagaacttcaagaacgcactaaagaatcaagaaaagaagattgactattctgaaagagccaaacgtttg

SEQ ID NO: 165068 - DNA, 1640 bp, Homo Sapiens
  misc_feature (1532)..(1532): n is a, c, g, or t
gcagatgcgtcaggccacgtagtggtactgattcggattgtctttgtctctctccatatagtctctgtctatcagagattcaattctctttttcaaatctccaggctttactggaaatttcagctgataatataattcagaaactagaagattatgaccaagagtctttctcatcttcattattctgacgatagcagcatcaatctgatatcgtctatcctgaaacactctctcagtggtgctaacctgttcctcaacagtttccttcatctgaatttgattgatctttattctaaacaacttgtgcttgaactctccattaaaaatgaacttgtctccatcttccagacactggtgctcctcatgttcaacgagggagatggcttcagctttgaggagataaaaatggccacggggatagaggatagtgaattgcgcagaacgctgcagtccctggcctgtggcaaagcacgtgtgctgattaaaagtcccaaaggaaaggaagtggaagatggagacaagttcatttttaatggagagttcaagcacaagttgtttagaataaagatcaatcaaattcagatgaaggaaactgttgaggaacaggttagcaccactgagagagtgtttcaggatagacaatatcagattgatgctgctatcgtcagaataatgaagatgagaaagactcttggtcataatcttctagtttctgaattatataatcagctgaaatttccagtaaagcctggagatttgaaaaagagaattgaatctctgatagacagagactatatggagagagacaaagacaatccgaatcagtaccactacgtggcctgacgcatctgcagacggttccccttcatgaaacactagaatgtaccctcagagcaggaagcacacctgtgccatttctgggactctgattgatccagctgtggacattggaaggcgaaggaagggaggtggctcctgggtcatctttcacaaggctcaagacttcaacctgcagatgtatctttttccctccagtttttcctctagttcttttaggcatttaaattgtttctgttactctgtgcaaaataactttgagattggacaagaagatgttactaaagagaagttccttcaaaaggtcttgttcttgtgtcaaaaagctgcaactttggtttgttctcgtgtgtgatcatgagtgcacaatgaagaagaccctagatgctgcattttttagctctgaagattccttaggtatccctgaagacagctcgctcagatgatcagcatttagagtgaaaacaagggcccttcatgggtgaacattagaaagagccagggttcaaagctggcgaatggatgacgcaccctagccactggcccctctctgtttcatgtatttccaaaagttgtaaactttgatggctgatttttcgtaagtcaggtttctaagtgagctccctgaggtgccaaagccatggtgtccgccctgctgcgtctgttcgtcagctgagttccttgtgaatctctgnttttagggtttggggctagtgtgtttgtgttttcattctaagattgagtatggcagaacctgtggttatgcatttttgtagctgataatcgacggccattgaatccag

SEQ ID NO: 165069 - DNA, 453 bp, Homo Sapiens
acatggcaaagcttcagctgaatttgcgacctgtagatgtagatccagaatgtttgcgctggactccagtcatagtgtccaactctgtggtctcagaggaggaagaagaggaggctgaggaaggagaaaacgaagagccacagtgccaggaaagagaattagagatcagtgtgggaaagtctgtgtctcatgagaacaaagaacaagattcttattcagtagaaagtgaaaagaaaccagaagttatggctccagtcagttctacacgtttgagcaaacaagtccttcctcatgatagtcttcctgcaaatagccagccatctcggaggggccgctgggggaggaagaacagaaaaacccaggaacgttttggtgataaagattctaaactgctcttggaagagacgttcagctccctcaggaacaatatgattcagaagataaacgggccgg

SEQ ID NO: 165070 - DNA, 550 bp, Homo Sapiens
catatgttaagtacgcgtataaggctgagccatatgttgcctctgaatacaagacagtgcatgaagaactgaccaaatccatgaccacgattctcaagccttctgccgatttcctcaccagcaacaaactactgaagtactcatggtttttctttgatgtactgatcaaatctatggctcagcatttgatagagaactccaaagttaagttgctgcgaaaccagagatttcctgcatcctatcatcatgcagtggaaaccgttgtaaatatgctgatgccacacatcactcagaagtttcgagataatccagaggcatctaagaacgcgaatcatagccttgctgtcttcatcaagagatgtttcaccttcatggacaggggctttgtcttcaagcagatcaacaactacattagctgttttgctcctggagacccaaagaccctctttgaatacaagtttgaatttctccgtgtagtgtgcaaccatgaacattatattccgttgaacttaccaatgccatttggaaaaggcaggattcagaagatgga

SEQ ID NO: 165071 - DNA, 677 bp, Homo Sapiens
  misc_feature (33)..(33): n is a, c, g, or t
tctgttgcagaagctaggtagaatgagactggngggtccggagatggtgctgatcaaggaattccgtgtggttttgccatgttctgttcaggagtatcaggttgggcagctttactctgttgcagaagctagtaagaatgagactggtggtggagaaggaattgaagtcttaaagaatgaaccttatgagaaggatggagaaaagggacagtatacgcacaaaatttatcacctaaagagcaaagtgcctgcattcgtgaggatgattgctcccgagggctccttggtgtttcatgagaaagcctggaatgcgtacccctactgtagaacaattgtaacgaatgaatatatgaaagatgatttcttcattaaaatcgaaacatggcacaaaccagacttgggaacattagaaaatgtacatggtttagatccaaacacatggaaaactgttgaaattgtccatagtagatattgcagatagaagtcaagttgaaccagcagactacaaagctgatgaagacccagcattattccagtcagtcaagaccaagagaggcccctttgggacccaactggaagaaggagctggcaaacaggcctgactgtccccagatgtgtgcctataagctggtgaccatcaaattcaagtggtggggactgcaaagcaaagtagaaaa

SEQ ID NO: 165072 - DNA, 1931 bp, Homo Sapiens
  misc_feature (1800)..(1800): n is a, c, g, or t
  misc_feature (1805)..(1805): n is a, c, g, or t
  misc_feature (1808)..(1808): n is a, c, g, or t
  misc_feature (1860)..(1860): n is a, c, g, or t
  misc_feature (1863)..(1863): n is a, c, g, or t
  misc_feature (1892)..(1892): n is a, c, g, or t
  misc_feature (1909)..(1909): n is a, c, g, or t
gtggttcaggcgggtgtcttcggccgggcttgggaacataaaagtttgtttcaccacgtaagccggacctcgcactccggtcccggtctcgtcgccaagatggtgaagcccaagtacaaaggacggagcaccatcaacccgtccaaggccagcacaaacccagatcgagtgcagggagcaggaggccaaaacatgagggaccgggccaccatccggcgcctgaatatgtataggcaaaaggagcgcaggaacagtcgtggtaaaataattaaacccctgcaatatcaatcaacggtggcttctggcacagtggcaagagtagagccaaatattaaatggtttggaaacacacgtgtgattaagcagtcatcattacaaaaatttcaagaggaaatggatacagttatgaaggatccatacaaagttgtcatgaagcaaagcaagttaccaatgtctcttctccatgatcgaatccggcctcataacttgaaggtgcacattcttgatactgaaagttttgaaactacatttggccctaagtcacagaggaaacgaccaaacttatttgcaagtgatatgcagtctcttatcgaaaatgctgaaatgtccactgagagctatgaccagggcaaggatcgtgatttggtaactgaagacactggtgtgagaaatgaagctcaagaagagatctataaaaagggacagtccaaaagaatatggggtgagctctacaaggtgatagattcatcagatgctcgtagttcaagttcttgatgctagagatccaatgggtactcgcttcccctcacattgaaacttacctgaagaaggaaaaaccttggaaacacctcatttttgtacttaacaaatgtgaccttgttccaacctgggcaacaaaacggtgggtcgctgtcctctcccaggattatccaacacttgctttccatgcaagccttactaacccgtttggcaagggagcattcattcagcttctgcggcagtttggaaagttgcacactgacaagaaacagatcagtgttgggttcattggctatcaaaatggtggcaagagctctgtgataaatacattgcggttctaagaaagtttgcaacgtggctcccattgcaggtgaaaacaaaggtctggcagtatattactttgatgcgtcggatattcctgattgactgtccaggtgtggtttacccctctgaggactccgagacagacattgtgctaaaaggagttgttcaagtagaaaaaattaagagtcctgaagaccacattggtgctgtacttgaacgagcaaagccagaatatatcagcaaaacatacaagattgattcttgggagaatgctgaggactttcttgagaagctcgctttccggactgggaagttactaaagggtggagagcccgacttgcagactgtgggtaagatggtcctcaatgactggcagaggggccggattcctttctttgtcaagccacccaatgcagagccacttgtggccccccagcttctaccctcctcatctttggaagttgtcccagaagcagcccagaacaatccaggggaggaagtcacagaaactgcaggtgaagggtcagaatccatcattaaggaagaaacagaagagaacagtcactgtgatgctaacacagagatgcagcagattctcacacgagttcggcagaacttgggtaaaatcaacgtggtgcctcaggtttctggggatgacctgggtcctgtggaaggtgtcagaacttgaggaagaacttgagagcttttctgatgaanaggangangaccaggaccaccaaagagatgatgccggaaaatctttcttcggaccttganganggaaatgtgggaaacgaccccaagccgtntttaagccttggttaanaaaatggccaatttcgaaagtt

SEQ ID NO: 165073 - DNA, 886 bp, Homo Sapiens
  misc_feature (794)..(812): n is a, c, g, or t
  misc_feature (816)..(817): n is a, c, g, or t
  misc_feature (819)..(820): n is a, c, g, or t
  misc_feature (822)..(822): n is a, c, g, or t
  misc_feature (824)..(824): n is a, c, g, or t
ttggaaggtgtcccgaagagcccagacaatcaggggaggaagtcacagaaactgcaggcgaagggtcagaatccatcattaaggaagaaacagaagagaacagtcactgtgatgctaacacagagatgcagcagattctcacacgagttcggcagaactttggtaaaatcaacgtggtgcctcagttttctggggatgacctggttcctgtggaggtgtcagatcttgaggaagagcttgagagcttttctgatgaagaggaggaggaacaggagcaacaaagagatgatgcggaagagtcttcctcggagcctgaggaggaaaatgtgggaaacgacaccaaagccgttattaaagcactggatgagaagattgccaaatatcagaagtttctagacaaagccaaagccaaaaagttttcagcagtcagaatatccaagggactgagtgaaaagatatttgcaaaacctgaagaacaaagaaaaacactggaagaagatgtagatgacagagcaccttccaaaaagggaaagaagcggaaggcacaaagggaagaggaacaggaacattcaaataaagctcccagggcgcttacatcaaaagaacggaggcgagcagtacgacagcaacggccgaaaaaagttggtgtgcgctactatgaaacacacaacgtgaaaaataggaacaggaacaaaaagaagaccaatgactcagagggacagaaacacaaacgcaaaaaattcagacaaaagcagtaatgtttaaaaggtttttattaaattatacaaaagccnnnnnnnnnnnnnnnnnnnaaannannancngttcgggccgcctcgggccctccaaaaaggctttcctagaacccattcgttttgggcgccgg

SEQ ID NO: 165074 - DNA, 1730 bp, Homo Sapiens
gggcctcttttcctggtttctcaagagtgctgctgctaacgcggtccccggcacgcaccatctgttgccatcccggccggccgaggccattgcagattttggaagatggcaaagttcatgacacccgtgatccaggacaacccctcaggctggggtccctgtgcggttcccgagcagtttcgggatatgccctaccagccgttcagcaaaggagatcggctaggaaaggttgcagactggacaggagccacataccaagataagaggtacacaaataagtactcctctcagtttggtggtggaagtcaatatgcttatttccatgaggaggatgaaagtagcttccagctggtggatacagcgcgcacacagaagacggcctaccagcggaatcgaatgagatttgcccagaggaacctccgcagagacaaagatcgtcggaacatgttgcagttcaacctgcagatcctgcctaagagtgccaaacagaaagagagagaacgcattcgactgcagaaaaagttccagaaacaatttggggttaggcagaaatgggatcagaaatcacagaaaccccgagactcttcagttgaagttcgtagtgattgggaagtgaaagaggaaatggattttcctcagttgatgaagatgcgctacttggaagtatcagagccacaggacattgagtgttgtggggccctagaatactacgacaaagcctttgaccgcatcaccacgaggagtgagaagccactgcggagcatcaagcgcatcttccacactgtcaccaccacagacgaccctgtcatccgcaagctggcaaaaactcaggggaatgtgtttgccactgatgccatcctggccacgctgatgagctgtacccgctcagtgtattcctgggatattgtcgtccagagagttgggtccaaactcttctttgacaagagagacaactctgactttgacctcctgacagtgagtgagactgccaatgagccccctcaagatgaaggtaattccttcaattcaccccgcaacctggccatggaggcaacctacatcaaccacaatttctcccagcagtgcttgagaatggggaaggaaagatacaacttccccaacccaaacccgtttgtggaggacgacatggataagaatgaaatcgcctctgttgcgtaccgttaccgcaggtggaagcttggagatgatattgaccttattgtccgttgtgagcacgatggcgtcatgactggagccaacggggaagtgtccttcatcaacatcaagacactcaatgagtgggattccaggcactgtaatggcgttgactggcgtcagaagctggactctcagcgaggggctgtcattgccacggagctgaagaacaacagctacaagttggcccggtggacctgctgtgctttgctggctggatctgagtacctcaagcttggttatgtgtctcggtaccacgtgaaagactcctcacgccacgtcatcctaggcacccagcagttcaagcctaatgagtttgccagccagatcaacctgagcgtggagaatgcctggggcattttacgctgcgtcattgacatctgcatgaagctggaggagggcaaatacctcatcctcaaggaccccaacaagcaggtcatccgtgtctacagcctccctgatggcaccttcagctctgatgaagatgaggaggaagaggaggaggaagaagagga

SEQ ID NO: 165075 - DNA, 837 bp, Homo Sapiens
ctctagctttctcaaacagtactgtgcgttctagttttctcttcctcttctaaaatgttcacttcaagctatcactgtcatcattttagttgctcctaaactggaacctcaggtcacaacttcaggtcacgacgcagagcctgagtcacagcctcatggacctctacaaagcctgagtcatagtacttcagttcaccattacagagcctgagctcatagccttttcttgttttaaactgatcatagtgggggctgtgaccccagtcacaaccttaggtcaccatagacagcctgagtcacagactcaggtcactatagacagcctgagtcacagccccagttcaccacatagagcctgagtcacagccccagttcactatacagagcctgagtcacagcctcagttcaccacagagtctgagtcacagccccagttcaccatacagagcctgagtcacagctcagtttgccatacagatcctgagtcacagccccagttcaccatacagagcctgagtcacatcccctgttcaccatagcagaaactgtgaccccagccacagcctcaggttaccaagcagaccccagatcacacccccagttaacatacagagcctgagtcacagcctcagttcaccatacagggcctgagtcggacacagttcacatacagagcttgagtcacagctccagttcactatagtggggactgtgaccccagtaacagcctaggtttctgtttgccatagagagcctgagtcacaatctcaggctgccaaacagagaccaagtcacagagtgcagggattcagaatgaatcgggatcctatagagtaa

SEQ ID NO: 165076 - DNA, 516 bp, Homo Sapiens
agaactaggacagtcaatgagctttaatgccagtttcctcatctttataaaacttgaggtaattagacctctcctgcccaccttagaaagctattcataaggaacggctaaacaaatggctgacccggccacaaagagaccacacgatgctctgtgcagttatgtataccacatatgagaggaaaatgcagccaaggaagattctgagtgactctgataaggcagtctgagagtcaaaacacaaagattcttaactcataccaaaaacttaggccaatttacacagtcttgaatcaaaagtccatgaaggcagccatttctttgccagctaatcaacactaggacctattaacctttccgatttgccagattaaaaatgctgtcttcttgccttcctcttctttccacccctctgatcaattattttaatttgaattgccaatcattaatgacaatgaacatacttccatttgtattttcttactgaaattgtacatctctattgcccattagcca

SEQ ID NO: 165077 - DNA, 457 bp, Homo Sapiens
cacagacccaccagctgaggattcacagaagtcttcaggagcaaacacaagcaaagacagaccacatgccagtggtactgatggagatgaaagtgaggaagacccacctgagcataagccaagcaaactgaagaggagccatgaactggacattgatgaaaacccagcttcagactttgatgacagtggttcccttctaggattcaagtatggctcaggacaaaaatatggtggaatcccaaatttcagtcatcggcaggtcaggtatttagagaagaatgtgaagcttaagtctaagtacctagacatgcgcagacaaataaagatgaaaaacaaacacatcttcatctaccaaagagtcacgaaaaaccatttctcagagaaaagcaaaattctgagctaaggtaagcaaaatacctcacatgggttaataaaccgatggattcagagagtgaga

SEQ ID NO: 165078 - DNA, 1240 bp, Homo Sapiens
  misc_feature (330)..(370): n is a, c, g, or t
  misc_feature (797)..(859): n is a, c, g, or t
  misc_feature (950)..(987): n is a, c, g, or t
gggcttgctgctggaaacgcagttccggttaggcggctgagtttgtttacgttgctaacagatctagcccctgctttccctagttccagttccaagatggggaaatccttcgccaacttcatgtgcaagaaagactttcatcctgcctccaaatccaatatcaaaaaagtatggatggcagaacagaaaatatcatatgataagaagaaacaagaagaattgatgcagcaatatcttaaagaacaagaatcatatgataatagattgcttatgggagatgaacgtgtaaagaatggccttaatttcatgtatgaagccccaccaggagcnnnnnnnnnnnnnnnnnnnnnnnnnnnnnnnnnnnnnnnnnccgaatacaaatttgaatggcagaaaggagccccacgagaaaaatatgccaaagatgacatgaacatcagagatcagccctttggtattcaggttcgaaatgtgaggtgcattaaatgtcacaaatggggtcatgtcaacacagatcgagaatgtcctttgtttggtctttctggaatcaatgcaagttcggttcccactgatggctcagggccatcgatgcacccctcggagctaatagcggagatgagaaacagtgggtttgcactgaaacgaaatgtactggggagaaacttgaccgcaaatgatccatcacaggagtatgttgcaagtgagggtgaaagaagatccagaagttgaatttataaagtcactaacaaccaaacaaaaacagaaacttctcaggaaattagatcgactggagaagnnnnnnnnnnnnnnnnnnnnnnnnnnnnnnnnnnnnnnnnnnnnnnnnnnnnnnnnnnnnnnncatatgtcctcttcttcctcatcttcctcctcctcctcctcttcctctactgagacttcagaaagcagtagtgagagtgagagtaacaatnnnnnnnnnnnnnnnnnnnnnnnnnnnnnnnnnnnnnncaagtgttcagggcataacaacagtgattctgaagagaaggacaagtctaggaagagaaagcttcatgaagaactttctagcagtcaccataaccgggaaaaagccaaggaaaagcccaggttcttaaaacacgagagttctagggaggacagcaaatggagccattctgattctgacaaaaagtccagaacccataaacatagcccagagaagagaggctctgaaagaaaggaggaggagagacgtccgctc

SEQ ID NO: 165079 - DNA, 1228 bp, Homo Sapiens
taatggtggaactggggcacagcttctagctgtagacagaaatttatacactgcattcagtccaggagagtacattacattacccagagcgtagagtttagtacacttattgcaggggtggtaattctttccctctgatctgaatcagctgagctgctgagcagacatattactgctgtggatagtaagactgctgtgggggctgagggaaggggtatgaaggctgctggggtcccgggtacggagcctgtccaggactctggtgatacactggtggatatggcatattatactggccatacgcataaggattatagcccatgggcatgggcatttggcaatacccaggatatcctggataggtgggatagggtggtccctgcgcctgtggaggaggagctgagccaggcgtttgtgatggagctggcgcagcagtcccagcccccactggagatggagcagtagcagaaggagctcgatttgctggaagcacaggtggtggaggcctggctgggggctggggcttagtaggcggcatggttcttggcgctggagttggaggagttggtgcatgtcctcctgctggtgaggactgatacgcaggtgtaggaattgaaggagcactaggttctctggcaatgctttgttgcaagtcctttaagagttcatctctttctgtcttccgtgcaaaaactatatcactgcatttgttctggaacctgaccaggatttcagtcaactcattgtaaaactttgtgccttccttcaaattagctacaagttcaacaaagttgtcatatgcagtagctaaattcttcaaaacttcttctcttaagttagcttcattattagattgtttcatttttgaaaattcctgatgtgagacctgaatatttttaagaagtccctcctgtttctttagagattcttggactttagatgtaagacctccatagactcgatctagttcagtaacagaaagagcttcttcatttatcacaccatcttgagccagggctgtcaaaaacttgcttgtcatgtcaaaattcacagatttcaagtcattctccagaccctctctttccttctttacttcatcaagatttgacaataaggattttaagacatttacaacctcactgccctgcatggtctttgctggattagcagaagggatggcagcattcagctcaggctctggcttacacaaaagcacgatggtgtcacg

SEQ ID NO: 165080 - DNA, 576 bp, Homo Sapiens
cccaggtcctggcgggctccaatccgggaccccggcagctttatccccttccctaggccccacagcagtcttactatccacagcagtaatatgtctgctcagcagctcagctgattcagatcagagggaaagaaataccaaccctgcaataagtgtactaaactctacgctctggttaatgtaatgtactctcctggactgaatgcagtgtataatttctgtctacagctagaagctgtgccccagttccacatttgattacacatgtgagatttgctgctgttgcagtataaacactaggtataataggatttgaaattgcattacagttcataaaaattgaaaatgagaaattaaacctgcaagtgaaacatttgaaacgattatactttctacataagacatggttgggacatcagatacttacaaagatggtttaagtatggatactagagaaaattaagttttctttctctttggtttattgatttggtttaatttccattatgctattttgcataatcaaggcactgtaaatcttataattttaaaataaattacttaagaacaaaaaaa

SEQ ID NO: 165081 - DNA, 1013 bp, Homo Sapiens
ggcggtaccggtccggaatttccgggatatcgcggacgcgtgggtcgcacatcaggaatttcaaaaatgaaacaatctaataatgaagctaacttaagagaagaagttttgaagaatttagctactgcatatgacaactttgttgaacttgtagctaatttgaaggaaggcacaaagttttacaatgagttgactgaaatcctggtcaggttccagaacaaatgcagtgatatagtttttgcacggaagacagaaagagatgaactcttaaaggacttgcaacaaagcattgccagagaacctagtgctccttcaattcctacacctgcgtatcagtcctcaccagcaggaggacatgcaccaactcctccaactccagcgccaagaaccatgccgcctactaagccccagcccccagccaggcctccaccacctgtgcttccagcaaatcgagctccttctgctactgctccatctccagtgggggctgggactgctgcgccagctccatcacaaacgcctggctcagctcctcctccacaggcgcagggaccaccctatcccacctatccaggatatcctgggtattgccaaatgcccatgcccatgggctataatccttatgcgtatggcagtataatatgccatatccaccagtgtatcaccagagtctggacaggctccataccccgggaacccagagcttaataacccttccctcaggccccacagaagtcttactatcacaggagtatatgtctggttcgaaggtcagtgattagatcgagggaagaaataccacctgtatagtgttctaactctacgcctggtaggtatgagctcccggagaagcaggataatggttacgtagaaggccctccatgttacacattgaaaggcggggcacaagatagatgtgttgacaagaagacgaccggtgagagactacagaggagaacagaagggagagcactgggatgagcatcaaaaacaagtgttagtaatttcaaaga

SEQ ID NO: 165082 - DNA, 586 bp, Homo Sapiens
tgtaagttgaggcaagacaacatacaagtcactggtactcaaactcacaagtcctcacagttcagtcccctaaggcatgacaccaacctcatgtttggcagttatttccactcccccttataaccaagagttccctacataatgaagaaagtcatctgttcatggtattttcatactagaattcagttatcaacttcctttcctagaataagggagactcttcacctttgaaactttatgcttggccttgaataaagttcatgttactaactgacttacaacaggctgtcctggagtaggtggtttgtcttctccatcactccctgaagagatatcatctgcacctccaaataaatccatggttccactattatcttcaatgcagaaggaaaaaggcattagtgttactatctgtaactaaggttcttcacagctgatcacttcaacacattccccaaggtttctggaccagcatcagaaaaccaccaaaaacataaatgctgagcctggctcccaaagacccaaacagagagtgtggggagagggaagggggcaatctagtggaaggaagctgaccggaggactt

SEQ ID NO: 165083 - DNA, 911 bp, Homo Sapiens
ggcaagaatgcgattgcatctgattcagaagcggatagtgacactgaggtgccaaaagataatagtggaaccatggatttatttggaggtgcagatgatatctcttcagggagtgatggagaagacaaaccacctactccaggacagcctgttgatgaaaatggattgcctcaggatcaacaggaagaggagccaattcctgagaccagaatagaagtagaaatacccaaagtaaacactgatttaggaaacgacttatattttgttaaactgcccaactttctcagtgtagagcccagaccttttgatcctcagtattatgaagatgaatttgaagatgaagaaatgctggatgaagaaggtagaaccaggttaaaattaaaggtagaaaatactataagatggaggatacgccgagatgaagaaggaaatgaaattaaagaaagcaatgctcggatagtcaagtggtcagatggaagcatgtccctgcatttaggcaatgaagtgtttgatgtgtacaaagccccactgcagggcgaccacaatcatctttttataagacaaggtactggtctacagggacaagcagtctttaaaacgaaactcaccttcagacctcactctacggacagtgccacacatagaaagatgactctgtcacttgcagataggtgttccaagaccccgaagattagaaatcttgccaatggctggtcctgatcctgaatgccaacgcacagaaatgattaagaaagaagaagaacgtttgagggcttccatacgtagggaatctcagcagcgccgaatgagagagaaacagcaccagcggggggctgagcgccagttacctggaacctgatcgatacgatgaggaggaggaaggcgaggagtccatcagcttggctgccatt

SEQ ID NO: 165084 - DNA, 829 bp, Homo Sapiens
ggggcactttgctacagtgctgcttgggatgcacgagttatcactagtgcttggtgggtgtaccatcatcaggtatctaaaacagcaccaactggagaatatttgacaacaggaagcttcatgataagaggaaaaaagaattttcttcctccctcatatctaatgatggggtttagcttcctttttaaggtagatgagtcttgtgtttggagacatcagggtgaacgaaaagtcagagtacaggatgaagacatggagacactggcaagttgtacaagtgaactcatatcagaagaaatggaacaattagatggaggtgacacgagcagtgatgaggataaagaagaacatgaaactcctgtggaagtagaactcatgactcaggttgaccaagaggatatcactcttcagagtggcagagatgaactaaatgaggagctcattcaggaagaaagctctgaagacgaaggagaatatgaagaggttagaaaagatcaggattctgttggtgaaaatgaaagatgaaggggaagagacattaaattatcctgatactaccattgacttgtctcaccttccaccccaaaaggtccatccagaaattggcttcaaaagaggaatcttctaatttctagtgacaggtaaatcacagagccgggagacattttgtcagcccaagaaaagaggggaaatgaaaaaggaaaaacttcccaagtggactcaggagattttagaaaccgttaaagggaaaggcattaaggaaaaaggaaaggtccttgtacccattggaaacctcatccgaaccccaagccaaaaatgattgcgggcg

SEQ ID NO: 165085 - DNA, 919 bp, Homo Sapiens
cagtatgaagcagaaacaagaagaaatcaaagagaatatataagaatagttctgtcccaagaagaactctgaagatgattcagccttctgcatctggatctcttgttggaagagaaaatgagctgtccgcaggcttgtccaaaaggaaacatcggaatgaccacttaacatctacaacttccagccctggggttattgtcccagaatctagtgaaaataaaaatcttggaggagtcacccaggagtcatttgatcttatgattaaagaaaatccatcctctcagtattggaaggaagtggcagaaaaacggagaaaggcgctgtatgaagcacttaaggaaaatgagaaacttcataaagaaattgaacaaaaggacaatgaaattgcccgcctgaaaaaggagaataaagaactggcagaagtagcagaacatgtacagtatatggcagagctaatagagagactgaatggtgaacctctggataattttgaatcactggataatcaggaatttgattctgaagaagaaactgttgaggattctctagtggaagactcagaaattggcacgtgtgctgaaggaactgtatcttcctctacggatgcaaagccatgtatatgaaatgcattaatatttgactgttgagaattttactgccgaagtttacctccactagttctttgtagcagagtacataactacataatgccaactctggaatcaaatttccttgtttgaatcctgggaccctattgcattaaagtacaaatactatgtatttttaatctatgatggtttatgtgaataggattttctcagttgtcagccatgacttatgtttattactaaataaacttcaaactcctgttgaacattgtgtataacttagaataatgaaatataaggagtatgtgtag

SEQ ID NO: 165086 - DNA, 1054 bp, Homo Sapiens
gcgaagcggagttagcaggctttactgcagagcgcgccgggcactccagcgaccgtggggatcagcgtaggtgagctgtggccttttgcgaggtgctgcagccatagctacgtgcgttcggctacgaaggattgagcgtctccacccatcttctgtgcttcaccatctacataatgaatcccagtatgaagcagaaacaagaagaaatcaaagagaatataaagaatagttctgtcccaagaagaactctgaagatgattcagccttctgcatctggatctcttgttggaagagaaaatgagctgtccgcaggcttgtccaaaaggaaacatcggaatgaccacttaacatctacaacttccagccctggggttattgtcccagaatctagtgaaaataacaaatcttggaggagtcacccaggagtcatttgatcttatgattaaagaaaatccatcctctcagttattggaaggaagtggcagaaaaacggagaaaggcgctgtatgaagcacttaaggaaaatgagaaacttcataaagaaattgaaccaaaaggacaatgaaatggcccgcctgaaacaaggagaataaagaactggcagaagtagcaggaacatgtacagtatatgggcagagctaatagagagactgaatggtgaacctctgggataattttgaaatcactggataatcaggaatttgattcctgaagaagaaactgtgaggattctctagtggaagactcagaaattggcccgtgtgctgaaaggaactgtaatcttcctctacggatgcaaagccctgtatactgagatgcattaatatttgactgttgagaattttactgccgaacgttaccttcccacatagttcttcggtagcagagtaccataactacatttagtgggcaactctgggaaccaatttccttcggttgaatccggggaccctaatgcgtttaagcgtccaatccaggatctgcaccccagaagctacacgcacaagcgtttccgactcccgcgggagagagtcacacccagacaaccgaccac

SEQ ID NO: 165087 - DNA, 872 bp, Homo Sapiens
  misc_feature (460)..(468): n is a, c, g, or t
  misc_feature (674)..(718): n is a, c, g, or t
cccagaccccacctgaattgggctttttaacttagaagcaacacttgattgaacatctttagaaagctattgcttttctaatttccttccatatccctcaggcctcagtgttcagagaaaccaaaaagaatgtatcacttctctgtctgtccaaaggtttttgagagtctcacttctaaatgaaacaatgcaacatttcactttgatttctccactgaaatttccttgattatatggttagaggtatgtagttaggaatgtctgttaactttctgagaaccctagtgccccatcatagtaactgtcagtattttgggggcattaggttaatagacttaattgcctaggtacaagcaggactttgggacaaatctctttgtgctgtttggtaacacttaactctatttgttgcaatctttctccttaggtcctcacacaattccttacagagcacttattnnnnnnnnntcttaagagttgatctgttttctgatcattttgtgtaagcttctaaacaaacttcagctgtgattaatttagcacatttaaataacgtgttattgtttggtataaagaattttccttcaactcagagtattagtactgtagcataaaccaaatacagtctagaggggatttttaacatccctccattataaagactgaaaaagggnnnnnnnnnnnnnnnnnnnnnnnnnnnnnnnnnnnnnnnnnnnnnaggaaaagatggagatattaaaaattagtaaatgaatgtgtataagacattagtatacagagaatgaacttgtatatattttgtgccatttgttttcattacacagaaacaagtcaggtggtttaaatccttaaaagggtagtattgaaaactg

SEQ ID NO: 165088 - DNA, 689 bp, Homo Sapiens
atcatccccatccttgaggaaggcctgaggtctcagaagagcgatgagaggcagggtgtgtgcattggcctaagtgagatcatgaagtccaccagccgggatgccgtgctgtatttctctgaatccctcgtgcccacggcaaggaaggctttgtgtgacccactggaggaggtcagagaggcggcagccaagactttcgagcagctgcattccaccatcggccaccaggctctggaggacattctcccatttttactaaagcagctggatgacgaggaggtgtcagagtttgccttggatggtccgaagcaagtcatggctattaagagtcgtgtggtgctgccctaccttgtgcccaagctgacaacgccacctgtcaacacccgggtgctggctttcctttcgtcagtggctggtgatgccctcacccgtcatcttggcgtgatcctcccagcggtcatgctggccctgaaggaaaagcttgggaccccagatgagcagctggagatggccaattgtcaggctgtgatcctctccgtagaggatgacacagggcaccggatcatcatcgaggatctgctggaggccacccgcagccctgaggtgggcatgaggcaagctgctgccatcatcctcaacatctactgttcccgctcaaaggctgactacaccagccacctgcggagcct

SEQ ID NO: 165089 - DNA, 652 bp, Homo Sapiens
accccgcatgggttccttgcagagatactgcatagtcatcatattcttcgtcctcctcttcttcctcaaagctatcttcaaagccctcactgtcctcctggtcttcatccccctctattgctgtatcccactgtgggtgattttctggcacaggcttagcctcatgaacttccaacttcaatggtttaatctgatccaaacccatataggagtctgatctcagaaacacagtatactgataatttccaggcttgcctggtgcaggaaacttcagctctacctcctctgtatctttcagcgtacacacatgatatggcatggatattaatgtctgctccttcctatctgcaatgtaaagccaccaccattcttgtttttcctcaggaaagtaaaggctatacacaggatgtgtaattttggattgggtttccaatagagctctctcttttcgctgtatgctttgttgtaattcttgccactctgcttcatcatctttgttttgtttatcatcttgctctctatcagagtctctgtcactaccatcatctttctcactttgggaatctctattggtttcttcttcttcagaatcactgcccttatctgaaacttcttcttcatcttcctttactgcagcttcatccccaaggac

SEQ ID NO: 165090 - DNA, 528 bp, Homo Sapiens
  misc_feature (379)..(413): n is a, c, g, or t
ggaacctccagtgctggagttgtcacctggagctaaggcacaactggaagaacttatgatggttggagatctcctggaagtatctctggacgagactcaacacatatggcggattttgcaggccacacacccaccctctgaagacagattcttgcatatcatggaggatgacaacatggaagagaaaccactaaaagtgaaaggaaaggactcttcagagaagaaacggaaacggaagctagaaaaggtagagcaactttttggagaaggaaaacagaagtccaaggagttaaagaaaatggacaaacctagaaagaagaaattaaaattaggtgcagacaaatcaaaggagctgaataaactggccaagaaactagcnnnnnnnnnnnnnnnnnnnnnnnnnnnnnnnnnnnctgctgcagccaaagttgaacttgtgaaagagagcactgaaaagaaaagagagaaaaaggtgctggacatcccctcaaagtatgactggtcaggagcagaggattcagaagagga

SEQ ID NO: 165091 - DNA, 972 bp, Homo Sapiens
  misc_feature (565)..(568): n is a, c, g, or t
gacactctgagtgaaaatcaaagtgacaaaaaataacgatttatttatttatttataggactctcaattctattccattgatctatctgtccatcctcatgacagtatcacaatgttttgattactgtcgctctgtaatcagttttgaaatgaggaatagagctctccaactctgttctttttccagattgtttcaccattctaggttgctcaaatttccataggaattttgggataagcctagaatttagtcggaatttttacaaggaggtgtgttgaatctgtaaatccattgggggagtactgccaccttaacaagtcttccaatccatgaagatgggatatcttttatttagtcttttaaaatttctttctagagtattttgcagttttcagagaattttctactttggtaaatttatccctaaatattttattccttttaatgatattgtaaatggaattattttcttattaatgcaattatattatttcttactagtatatggaaatacaattgattctgtacattgatcttatattctgccaccttgctgaactgttnnnnatatttttaaactcttgaagtgattcccatttgcaaccaagtctaagcaccactagttcagtaccacccatgccctccattctaatcagggaagatacttttatgcccctcatcactcttttctacccaacctctccatagagaatacaagcattcagctagttccaaaagaaacagcaaaggaagcttaagggggaaattatatatgcaaaatttaaaactctgattgagagcctttaaatactttagcccaaaatagtgccgttacattttctggaaaagattactaagatccaccttgtaagtttgaggacagtcattcatatgggagattaatctggactccaatcacatactgcagttcccaccgctcaagcgtgtccgggtcctctgatcgctctgcc

SEQ ID NO: 165092 - DNA, 652 bp, Homo Sapiens
atcgcgctacttatgtagtaatgaatctggcaacaagagaaagttgttctgatgaataggcagaggaactgtgtcttgttagaattataatcgatgggctccataatcatctggtcatccgttcaatgttgtatctatggttagaaatgtacatgataggaactccaggaatcttacggattcttcttttcagggtcccggtcaacggtggccacaatgttacacattatgctgagttactctctgtactaagcagtcatctgtatttgctcctttgtgtgtacatggtaatcgttcaaatcttggatccttggcaatccttagagccactcgatacttctgccccaatttctcaatttcagccattacacaatcggttatacatgggatacacttggcatacagacagtccatcattgactgcactaagtccagtttggcttttatggaaaagttgataaagttggtatcaacgaggatgtggtaaggtgggcccagctgtgtattatactggaaaaataagcaggaagggtattggggaacttctctttcctttaatgcgctgggatccttcatttctatcttattaggttataatctatcctgtttctctaagcctctgatctcttgagacgaagcattcgatttcatg

SEQ ID NO: 165093 - DNA, 1553 bp, Homo Sapiens
tcaggaagagagcttcttgcctgacacagggacacatgacacttgttgagtgctttggtgtatcttgtgtgtgcttgcagtttgaggggagaggaaattggttgatttctgatttgagaccatatggaaccctgaactcttctataatggccagtcttctcctgttagacttagtgcagctgctgaagacaagatttaaaaagtttttcttctctttgtctctcttcagagtctgtgagcctccagcctgggagccctgggactggagcagctcagccgccgtctttcttggcttgaaagcattcacttcatcatccagggatttcttcttatcctccagtttcttcttctcgtcctggtgcagtttcttcagacggtcaaacttctcgtgcagctctttctctgcctctttgagctccgcttctttctctttgactcgctggacgaacatctgtctcatctcctcctcttttttctggagttcccctaggaactcgttccttttggcctcatatgtctcctgtaaactgaagggtttgctgtcagggtcggtgtccttgaagcccatctcctccagcttacagcggcgatacagctcatagtgccgggtgtgggtctgctcccgcagatcctccatgttgacccgaatcagcatctcccgcagcttcacaaagtcgcagtgggcctcgttttcaacctgcacagtgccccaaggatactgccgcgccctcatcatcttgttgcctatcttcagttcttctgtgctgccaatgacagcaaacggcaggtgggcgttcatggttccattgatctctgccaccgactcatcatctgtaggaaactgatagatctggactccgttgctgacaagctcgctggtgattttgattttgaactttgttagctcactcttcgaaatggcatctgctttggcaatgatggggatgatgttcaccttactgtccagcttcttcatagtcactaggtccagagacttcagggaatgacccgtgggggcaatgaaatacaagcagacatggattcgggagtcatggtaggtgtgtagcactcttcggatctttagctcttcctgcaggtaggcctcgaattgtgcatcgatgaattccacgataggcttgtagctgtcctctttgttgatctggtccccaaagccaactgtgctaacgatcgtgagctttagcctcacgttgctctcttggaggtcataggtattagactggagctggacacccggctgtgtgtgggtggctggctccccttcgaatttggtgttgaacagggtgtccatgagggtggacttgcccaaacctgtctctcccacgcacaggatgttgaagcagaagccctggctgacggacttattcaccagctggtcaggcaagctgtcaaaccccacatgtccagccagggggacagttcggcaaccttcacccacctggcgagctatatcggtcgctgccatcgctcctgcgtccgccagggctgccacgggtgccgccgcaacgggagctactgcacaggaaacagagccc

SEQ ID NO: 165094 - DNA, 1171 bp, Homo Sapiens
  misc_feature (1025)..(1034): n is a, c, g, or t
ccaagcgacaggtccagaatcaatcaaccaatcgattgcccaaagcaagatgccatttttccggaaggaaggttggaagctttaaacaaaaaggtatccaaaaatcaaaatcaccagcgagcttgtcagcaacggagtccagatctatcagtttcctacagatgatgagtcggtggcagagatcaatggaaccatgaacgcccacctgccgttgctgtcattggcagcacagaagaactgaagataggcaacaagatgatgagggcgcggcagtatccttggggcactgtgcaggttgaaaacgaggcccactgcgactttgtgaagctgcgggagatgctgattcgggtcaacatggaggatctgcgggagcagacccacacccggcactatgagctgtatcgccgctgtaagctggaggagatgggcttcaaggacaccgaccctgacagcaaacccttcagtttacaggagacatatgaggccaaaaggaacgagttcctaggggaactccagaaaaaagaagaggagatgagacagatgttcgtccagcgagtcaaagagaaacgaagcggagctcaaagaggcagagaaagagctgcacgagaagtttgaccgtctgaagaaactgcaccaggacgagaagaagaaactggaggataagaagaaatccctggatgatgaagtgaatgctttcaagcaaagaaagacggcggctgagctgctccagtcccagggctcccaggctggaggctcacagactctgaagagagacaaagagaagaaaaataatccatggctgtgtactgaaatagtattccccgcaacagctggactggactccatttagccttttaagccgaggttcctattttaactgacagctttcctttggggtgccaggcagcgaggccccccacccctatcctgccagtgtacttcaagctcacttcttctttttgagttccgcaacttgctcctgcctcccagccccactggcactgaccatgaccacctacttctannnnnnnnnnagagtttctctttttggatcacttactttcaaagcacacagtcaaacaaggttatgccaaatttccaggccttttgtgaacgtatcgacgaaggggaaggggatttctcacttcaattatagatcataataggaagc

SEQ ID NO: 165095 - DNA, 820 bp, Homo Sapiens
  misc_feature (65)..(180): n is a, c, g, or t
ggacctcctggttcaagtgatcctcttgtctcagtcccctgagacaatcccccacgcccagctannnnnnnnnnnnnnnnnnnnnnnnnnnnnnnnnnnnnnnnnnnnnnnnnnnnnnnnnnnnnnnnnnnnnnnnnnnnnnnnnnnnnnnnnnnnnnnnnnnnnnnnnnnnnnnnnnnnactgtacccggcctgctctaccgcttttaaggacgcttatgatcacattgcgcctacccagagaacccaggtcgtctttctattttcaggtcagctgattagccaccttagttccatctgcaactttagttcccactggctgtgtaacctaacatagtcacaggctctggggactgtcacgtggacatctttgggaggccgttattctgcccaccgcaccctccgttcatcccctgccctgccgggcacctcgctctaccccaggaaaatgtgagctcgttttcctgctcggcatgtgctccccctaaggctctgctcctccctgggcctgaaagttccttctcagcctgagagggggcccttcggactcaggcatgactcagcccggctgatgcctctgcagtgctgagtcaggatttggggccggctctcttgggtccgtccccttttcccaggtactgccttacaaagctgtggccaggaagtggccggtataaaggatgcccaaggtctttgtacgtgtgtaggagttagcgtgtttgatattgttaatataataataataattttttagagtactgcttttgtatgtatgttgaacaggatccaggtttttatagcttgatataaaacagaattc

SEQ ID NO: 165096 - DNA, 485 bp, Homo Sapiens
  misc_feature (375)..(375): n is a, c, g, or t
  misc_feature (419)..(419): n is a, c, g, or t
  misc_feature (458)..(458): n is a, c, g, or t
attgcgcctacccagagaacccaggtcgtctttctattttcaggtcagctgattagccaccttagttccatctgcaactttagttcccactggctgtgtaacctaacatagtcacaggctctcgggactgtcacgtggacatctttgggaggccgttattctgcccaccgcaccctccgttcatcccctgccctgccgggaacctcgctctaccccagggaaaatgtgagctcgttttcctgctcggcatgtgctccccctaaggctctgcttcctccctgggcctgaaagttccttctcagcctgagagggggcccttcggactcaggcatgacttagcccggctgatgcctctgcagtgctgagtcaggattngggggccggtttttttgggtccgtccctttttccagggattgcntaaaaagttttggcagggagtggcccgtataaaggatgnccaagttttttaactgttaaggattag

SEQ ID NO: 165097 - DNA, 269 bp, Homo Sapiens
ctccttttctcactttcttcattgtcttgttcttccattggaatgaagagtccaccatcttctatctcttcctcaggttggtgaaacagagtcctgagtggcttttcttgaggagaggcacaaacatctggctgggttgatttccctgggctggcttactggttttgcagattggctgcctgatggcagggaaggtatctccccttcagaattcatttgaggtttccctccttcttccttgactttcacactaggctctcctatgaaca

SEQ ID NO: 165098 - DNA, 539 bp, Homo Sapiens
cgtgtcatcttctgaatccaatctatataggatatctgtgaatttagccactgatgaaatgccagtttgcaaaccataaatataaaacagtgttcgatttcgtgtcccattcctctcttggcagttcatgtttccaggaaaatctatagtggagcatgaaattggctgtgcattgctatcgcctgctgaagtttctcttcctgggctcttctacagtggcaaattgttctcttttccatgaagctactgagaaaatcatctatttccatctttccctccaagaagtcttctgcaatattatcagatatcttcctcagcgttcatgtgcgagctactttcaatcttgcctgaagggcacttggcactacagctctcactaagttcatgctgcctttgcatcttcgtgtttcgaaagtggacttcatcgtgtgtaagtaattcactaccttatctaaaacagtttgtcttttggcttcccagctgggctcccaaaggagatttttttacgctagttgctcatacttttactacatcaacgt

SEQ ID NO: 165099 - DNA, 412 bp, Homo Sapiens
  misc_feature (21)..(21): n is a, c, g, or t
  misc_feature (398)..(398): n is a, c, g, or t
gtagtgccaagccccccttcnggcaagatggaaagtagccggcacatgaagcctgaggaagaacctgataatattgccagaagaccttccttggagggaaagatggaaatagatgattttcctcagtagccttcatggaaaagagaacaatttgcccactgtagaagagcccaaggaagagaaacttcagcaggcgatagcaatgcacagccaatttcatgctccactataggtaaattgtatttcaagtttgagtctcaaggtgattgcatcagtgttctttaaatagacatgttgttaacggtgcctgttcatcagccttaagcataattctgtcattatagttactgtgctatgtaacatagaatgctttgtattatataataagcataataatnttcatataactagt

SEQ ID NO: 165100 - DNA, 1119 bp, Homo Sapiens
  misc_feature (1006)..(1006): n is a, c, g, or t
ctccgggctccgcgagggatgagggtctaagacgtcaacaacagcaccatgcaggtgagcttctctgtgccatcgctgctagcctgtccctgaaactggacacgagtttcaagatcctggaccgtgtcaccatccaggaactcacagctccattacttaccacagcccaggcgaaaccaggagagacccaggaggaagagactaactcaggagaggagccatttattgaaactcctcgccaggatggtgtctctcgcagattcatccccccagccaggatgatgtccacagaaagtgccaacagctttactctgattggggaggcatctgatggcggcaccatggagaacctcagccgaagactgaaggtcactggggacctttttgacatcatgtcgggccagacagatgtggatcacccactctgtgaggaatgcacagatactcttttagaccagctggacactcagctcaacgtcactgaaaatgagtgtcagaactacaaacgctgtttggagatcttagagcaaatgaatgaggatgacagtgaacagttacagatggagctaaaggagctggcactagaggaggagaggctgatccaggagctggaagacgtggaaaagaaccgcaagatagtggcagaaaatctcgagaaggtccaggctgaggctgagagactggatcaggaggaagctcagtatcagagagaatacagtgaatttaaacgacagcagctggagctggatgatgagctgaagagtgttgaaaaccagatgcgttatgcccagacgcagctggataagctgaagaaaaccaacgtctttaatgcaacctttccacatctggcacagtggacagtttggcccaatcaataacttcaggctgggtcgccctgcccagtgtttccccgtgggatggaatgaagattaatggctgctttgggggcccaaacctgggtttggctggctcccatgccttctgggccccaaataaagataggggncctcggaaaatttttcacgaaggggaagggaaaaggggttaagcccccttttttcctttggggggggaagtcgtgaattgggtcgccaatttggggcactattataaaattct

SEQ ID NO: 165101 - DNA, 473 bp, Homo Sapiens
  misc_feature (432)..(432): n is a, c, g, or t
cgggaagtcgctgaagacagagcgatggtagttctggaggcctcgctccggggccgacccgaggccacagtgcctccgcggtagaccggacttgggtgacgggctccgggctcccgaggtgaagagcatcgggggctgagggatggaagggtctaagacgtccaacaacagcaccatgcaggtgagcttcgtgtgccagcgctgcagccagcccctgaaactggacacgagtttcaagatcctggaccgtgtcaccatccaggaactcacagctccattacttaccacagcccaggcgaaaaccagggagagacccaggaggaagagactaacttcaggagaggagccatttattgaaactcctcgccagggatggtgttttttcgcagatttcattccccccagccagggatgatgttccacagaaagttnccaacagctttcattctgattgggggagggatttgatgggg

SEQ ID NO: 165102 - DNA, 850 bp, Homo Sapiens
gaaccacaggaaaacaatttaaagccaaaatttcaggctttcaagggagtaggctgtctatatgaaaaggagtcaatgaaaaaatccttgaaagacagtgttgcctctaacaataaagatcagaattccatgaaacatgaggatcccagtatcatatccatggaagatgggtccccatatgttaatggctcattaggtgaagtgactccatgccaacatgcaaagaaggcgaatggcccaaactatattcagcctcaaaaaagacagaccacttttgaaagccaggatcgcaaggcagtgtcccctagcagttctgaaaagagaagtaagaatcctatttctaggccattagaaggtaagaagtccttaagtcttagtgcaaagactcacaacataggctttgacaaagacagctgccatagtaccacaaagacagaagcttcacaggaagagcggtctgattcaagcggcctcacatctctcaagaaatcaccaaaggtctcatccaaggacactcgggaaatcaaaactgatttctcactttctattagtaattcgtcagatctgagtgctaaagataagcatgctgaagacaatgagaagcgttgggcagacttggaagcgaggaaaaaagcaaaagaagtgcaggagaagctggtgcataatgctctggcaaatttggatggtcatccagaggataagccaacgcacatcatcttcggttctgacagtgaatgtgaaacagaggagacatcgactcaggagcagagccatccaggagaggaatgggtgaaagagtctatgggtaaaacatcagggaagctgttgtaagcagtgatgatgacgaatc

SEQ ID NO: 165103 - DNA, 1385 bp, Homo Sapiens
ggcctggtcccgggccgggagcccagcaggccgggagcggctgaggccacaccccgcgggccgggccgcttccctccggtgaatcatcgctcgcagcggcggcgcccgcagtggccgcagcagcgcgccgggccctggccgcgccccagccgagcgcagcgcgaagtcgccccgacctttctctgcgcagtacggccgccgggaccgcagcatggcgggcatcgcggccaagctggcgaaggaccgggaggcggccgaggggctgggctcccacgagagggccatcaagtacctcaaccaggactacgaggcgctgcggaacgagtgcctggaggccgggacgctcttccaggacccgtccttcccggccatcccctcggccctgggcttcaaggagttggggccctactccagcaaaacccggggcatcgagtggaagcgccccacggagatctacgctgacccccagtttatcattggaggagccacccgcacagacatctgccaaggagccctaggtgactgctggctgctggcagccattgcctccctcaccttgaatgaagaaatcctggctcgagtcgtccccctaaaccagagcttccaggaaaactatgcagggatctttcacttccagttctggcaatacggcgagtgggtgggaagctgggtggtgaatgacaggctgcccaccaaggacggggagctgctctttgtgcattcagccgaagggagcgagttctggagcgccctgctggagaaggcatacgccaagatcaacggatgctatgaagcactatcagggggtgccaccactgagggcttcgaagacttcaccggaggcattgctgagtggtatgagttgaagaagccccctcccaacctgttcaagatcatccagaaagctctgcaaaaaggctctctccttggctgctccatcgacatcaccagcgccgcggactcggaggccatcacgtttcagaagctggtgaaggggcacgcgtactcggtcaccggagccgaggaggttgaaagtaacggaagcctacagaaactgatccgcatccgaaatccctggggagaagtggagtggacagggcggtggaatgacaactgcccaagctggaacactatagacccagaggagagggaaaggctgaccagacggcatgaagatggagaattctggatgtctttcagtgacttcctgaggcactattcccgcctggagatctgtaacctgaccccagacactctcaccagcgatacctacaagaagtggaaactcaccaaaatggatgggaactggaggcggggctccaccgcgggaggttgcaggaactacccgaacacattctggatgacctcattaccctgatcaagct

SEQ ID NO: 165104 - DNA, 1480 bp, Homo Sapiens
  misc_feature (805)..(905): n is a, c, g, or t
  misc_feature (938)..(952): n is a, c, g, or t
  misc_feature (1029)..(1120): n is a, c, g, or t
  misc_feature (1123)..(1173): n is a, c, g, or t
  misc_feature (1208)..(1223): n is a, c, g, or t
acctcgatatccgtcaactccagctgccgcctgttcattgttcttgtgttctttgccttattcatcatttttaaggcttatctaattaactgtgtctggaactgctataaatacatcaacaaccgaaacgtgccggagattgctgtgtaccctgcctttgaagcacctcctcagtacgttttgccaacctatgaaatggccgtgaaaatgcctgaaaaagaaccaccacctccttacttacctgcctgaagaaattctgcctttgacaataaatcctataccagctttttgttggtttatgttacagaatgctgcaattcagggctcttcaaacttgtttgatataaaatatgtcgtcttttgtttaagcatttattttcaaacactaaggagctttttgacatctgttaaacgtcttttggtttttttgttaagtcttttacattttaatagtttttgaagacaatctaggttaagcaagagcaaagtgccattgtttgcctttaattggggggtgggaagggaaagagggtacttgccacatagtttcctttttaactgcactttctttatataatcgtttgcattttgttacttgctaccctgagtactttcaggaagactgacttaaatattcggggtgagtaagtagttgggtataagatctgaacttttcatctgcagaggcaagaaaaatatttgacattgtgacttgactgtggaagatgatggttgcatgtttctagtttgtatatgtttccatctttgtgataagatgatttaataaatctctttaaatactagnnnnnnnnnnnnnnnnnnnnnnnnnnnnnnnnnnnnnnnnnnnnnnnnnnnnnnnnnnnnnnnnnnnnnnnnnnnnnnnnnnnnnnnnnnnnnnnnnnnnnctggggcatgttcacaaaagccccttggggtgnnnnnnnnnnnnnnnagaaaacttttttaacccttttctttggggccgcgggcccccctagggaaaggaacaggggcactaactgttttccnnnnnnnnnnnnnnnnnnnnnnnnnnnnnnnnnnnnnnnnnnnnnnnnnnnnnnnnnnnnnnnnnnnnnnnnnnnnnnnnnnnnnnnnnnnnaannnnnnnnnnnnnnnnnnnnnnnnnnnnnnnnnnnnnnnnnnnnnnnnnnncccccagcgccgcggcccccaatttaaaaaaaaannnnnnnnnnnnnnnngttgtgcccatatttattttttaagaaaacgtcggggggtggaaaattctcttcttaaaaccatttttcctctcccccaccaattggggaaaacccctctctccacaaggcgggggcgggtggtgaggaccacccttattaatttccccccggcagggggtgttataaacaacacctcgtttgtcacgcccttgtggcggataataatatttcatctgcgccccatcggggggcagaacaacccggggcgcgcgcac

SEQ ID NO: 165105 - DNA, 1688 bp, Homo Sapiens
ggggaagctggcaggggcacgagccgggggcgggtttgaagacgcgtcgttgggttttggaggccgtgaaacagccgtttgagtttggctgcgggtggagaacgtttgtcaggggcccggccaagaaggaggcccgcctgttacgatggtgtccatgagtttcaagcggaaccgcagtgaccggttctacagcacccggtgctgcggctgttgccatgtccgcaccgggacgatcatcctggggacctggtacatggtagtaaacctattgatggcaattttgctgactgtggaagtgactcatccaaactccatgccagctgtcaacattcagtatgaagtcatcggtaattactattcgtctgagagaatggctgataatgcctgtgttctttttgccgtctctgttcttatgtttataatcagttcaatgctggtttatggagcaatttcttatcaagtgggttggctgattccattcttctgttaccgactttttgacttcgtcctcagttgcctggttgctattagttctctcacctatttgccaagaatcaaagaatatctggatcaactacctgattttccctacaaagatgacctcctggccttggactccagctgcctcctgttcattgttcttgtgttctttgccttattcatcatttttaaggcttatctaattaactgtgtttggaactgctataaatacatcaacaaccgaaacgtgccggagattgctgtgtaccctgcctttgaagcacctcctcagtacgttttgccaacctatgaaatggccgtgaaaatgcctgaaaaagaaccaccacctccttacttacctgcctgaagaaattctgcctttttgacaataaatcctataccagctttttgtttgtttatgttacagaatgctgcaattcagggctcttcaaacttgtttgatataaaatatgttgtcttttgtttaagcatttattttcaaacactaaggagctttttgacatccgacaaacgtctttttgattttttgatagcaattttaactttccccacgccatacactcacacccccgctcaccatcaaaaattttcccaaaaaaacccctcttcactactcatcttctccaccccttataattcctaccaaccactgcccccctttgacaccctaacaatccaaacactattaacccctttcacttcctcctttccacaatttacaccacccactgctctttctcaccatcatacccatttcccacattccaaccgtaaatattatacccctaatcacatgatcaccccccctctatttctacccatcacccccatattccttcataccgatacctacccatcaccgctctcgcacctatcgtatctatttccgccttcttattaccccttttgtcacggtgccccctttacttagatattccccccagctttccctcacccaccaccccatttcctccctttctcccccattgccattacccctatcatctatcttccaacattcttcccctacctatacaccctttatcatataccgcccccatcccccgttttcttcaccctacaccctatattataactgaattacgtcgcgccctcatttcttcttccccgtcttagtacctccaccacatttatatcttcctcctctgcttaccacatttatatcg

SEQ ID NO: 165106 - DNA, 952 bp, Homo Sapiens
  misc_feature (679)..(679): n is a, c, g, or t
  misc_feature (694)..(694): n is a, c, g, or t
  misc_feature (703)..(703): n is a, c, g, or t
gcacgagccgggggcgggtttgaagacgcgtcgttgggttttggaggccgtgaaacagccgtttgagtttggctgcgggtggagaacgtttgtcaggggcccggccaagaaggaggcccgcctgttacgatggtgtccatgagtttcaagcggaaccgcagtgaccggttctacagcacccggtgctgcggctgttgccatgtccgcaccgggacgatcatcctggggacctggtacatggtagtaaacctattgatggcaattttgctgactgtggaagtgactcatccaaactccatgccagctgtcaacattcagtatgaagtcatcggtaattactattcgtctgagagaatggctgataatgcctgtgttctttttgccgtctctgttcttatgtttataatcagttcaatgctggtttatggagcaatttcttatcaagtgggttggctgattccattcttctgttaccgactttttgacttcgtcctcagttgcctggttgctattagttctctcacctatttgccaagaatcaaagaatatctggatcaactacctgattttccctacaaagatgacctcctggccttggaatccagctgcctcctgttcattgtccttgttgttcatttgccttattcatcatttttaaggcttatctaatttaactgtngtttggaactgctantaatacatncacaacccgaacgtgccgggagattgctgtgtaccctgccttttgagcacttccttcagtacgtttttgccaaccctatgaattggccgtgaaaattgcctgaaaaaagaacccaccacctcccttacttaacctggcttggaagaaaattctggccttttgaacaataaatcctattacccaagctttttttgggttggggttaaggggaaccgaaaatggcttgccaaattccggggctttctttta

SEQ ID NO: 165107 - DNA, 448 bp, Homo Sapiens
  misc_feature (385)..(385): n is a, c, g, or t
  misc_feature (410)..(410): n is a, c, g, or t
tgggtgactgaggtcgtaagcaggagtggacatgtttggatttccaacagctaccctgctggactgtcatggaagatatgcccagaatgtagcgttcttcaatgtgatgactgaagcccaccacaaatatgaccactctgaggctacaggatcctcaagctgggatatccaaaattctttcagaagagagaagctggaacaaaaatccccagattcgaagacactacaggaagattcacctgggagtgagacaaagggtctattgagtgccagggagtgtgggaaaatccttcccggcaaaaaggtagtcctaacgtttacatgaggagaatccacacttggtccaaaagcctttttgagttgcacccactgttggaaaaaaggnttcaggggccaaaagaaattttttnttttacacattcaacgggtttacacacggggagagaag

SEQ ID NO: 165108 - DNA, 1040 bp, Homo Sapiens
  misc_feature (249)..(249): n is a, c, g, or t
  misc_feature (795)..(795): n is a, c, g, or t
ccttttacacctagaggatggaatgctttttgtttaagaaaagttgtgcaaacccattgtattaagatttaatataagtcccagttctggtgtaagtttccagaagccatcctttgtctgtagactgaggagttctgtccaaggcacagcatcctgccagtgttgtgtgcacactatttcatcctcttcttttacttccagaaagcacgggatactgtcatcttttgtatcacattttatttgtaaaanagcagctgtcttgaagtacttctgatagctcatcactttatgtgtcagaactttgaaaagcaaagacaggacatcgacttccttcgagactgcctactgattcttctagaagacagagatctactggggtagtccgggactgactgcaaagagcctcaggtaaagcagaggccattggcagcctaaggttggcagtcaaagaggctgcggaaggttgaaaatgaaaaggagagtaagcagagggatgataagacccaaaacctctgatgggatcagggtctgtaggaagagagaaatgaagctggggagaatccagctcagggaaggtgccagcagaaggcctggtagtaaagcctccaggatgttgcagtggagcagactgtgcagagcttaatgagctccctgaaaaaacaatgccacaatagggtgcagaaggtgggttctggggaaggtcctgtgggacaagacgccgactgtgggatccagtccagcacaagtgccaggcacagggccttggctgaattgagatgcatcaaactgtctggnaggagcagctgaaccgaaactagctacctgacgatatgaggcaaaagacaaggaagcaggactgtgagcgcgggcagtcgggggaagataggaaccaacggccggagccaaaataggaaaaaagctagaagtagatgtttcccatggactgactttcttaaatagtggttcagttgctgttggtttacatgactctgtccaacttaaatccaatagcttttccacacctccacgttccaaatttc

SEQ ID NO: 165109 - DNA, 819 bp, Homo Sapiens
ggggtggcttgaaagaccgacgcgatgaagcccagacctgcagggttcgtggataataaactcaagcagcgagtcatccagtatagactatggtcgaagaaaaagaaatgcttttaggattcaggtagaaaaagtatttagcataattagtagtgagaaggaacttaagaatttaacagaattagaagatgaacattaggcaaaaagggcaagacaaggtgaagaggataatgagtatactgaaagctattctgatgatgattcaagtatggaagactacccagatccacagtcagcaaatcacatgaacagttccctgctgtctttatatcggaaaggaaatcctgattctgtttcaaatactcctgagatggagcaaagagaaaccacctcttcaacaccacgaataagttccaaaacaggctccattcccttgaagacccctgccaaagattctgaaggaggatggtttattgacaaaaccccaagtgtaaagaaagacagttttttcttggacctgtcatgtgagaaaagtaatcctaagaagccaataactgagatacaggattcaaaagattcttctcttttggagagtgatatgaaacggaaaggcaagctaaagaataaaggaagcaaaaggaagaaagaagatcttcaggaagtagatggagaaatttgaagctgtcctacaaaagaaagctaaagccagggggttagaattccagatctcccacgtggaatttgaagatgtgggaggcaatgatatggacatttaaagaaggtctgcaagatgctccatacacatgcggtcacccggga

SEQ ID NO: 165110 - DNA, 950 bp, Homo Sapiens
tttacttcaacagactgttgaagaagctgcccaacacccccttcacttgctgcaatattttagatgttcgggttccggctttttcactgacgtgcctggggaggagctaggcacaactggctggcccctccccgaccctgggtccttggagagccagagggtcctcttgcaggagattcagaagctctcgtgggagtgactggttgcttggcaaggagtgactgttgcttcattaggaacacctgctcatcttctgctgccaactctctgtcgtggaccagctttctcacgggaggtttcacaataaagtctgtcatatgcatctgtccggcttccacggttgtaaaattgttcatgtgaaatagctattttcttttcattgtcccagcctgcaggtataaaaacggcatccttttccacaactaaggcaggtgtggtgaagtggaaaccgtatgttttatgaaccaatatacttatacaacaagtcgagctttttctcttctttcactgaagtgtaaatcaaggcagctccatactgaaggcagaacctccgcaggtgtgacatggataaagtccaaatgctcatccctgtaatcagtgctccttctccaggacactcaccgcatcacactttgtgcacatccaccaacacccgggatccaccaggttatgagtcagcacattgtcacccagaggcagggcaacattttcttcatcggagcctgaggtcagagggccccttctctgtggggaaccttgacaaccttcttcaggttccatatagtcttgaaaatctttcacaaacttccgttccagctccctcattttttctggtggaattttcattttatcaatgtgctcacgtaaaacactagcccatttctgcagagattccatcacagtccaaggtctagacatgtctgcaacaaaatgacgagggtctctggcaa

SEQ ID NO: 165111 - DNA, 1039 bp, Homo Sapiens
  misc_feature (177)..(188): n is a, c, g, or t
  misc_feature (228)..(302): n is a, c, g, or t
  misc_feature (546)..(546): n is a, c, g, or t
  misc_feature (600)..(672): n is a, c, g, or t
ggtggattcttgttacagtgtatccaatctgaagtattgcacatctgaactgggactgttaacactgatgccaatacagtgtggggtgccagaaagtgtctgctgatatttgtggaaaaaaaatctattttgtttacctactgtatcaaaggggagtctgggggagaatggtagtannnnnnnnnnnnatcagctgtgaaaaaaatgttacagatctgcacattttcnnnnnnnnnnnnnnnnnnnnnnnnnnnnnnnnnnnnnnnnnnnnnnnnnnnnnnnnnnnnnnnnnnnnnnnnnnnggttggcagtaaccgattttaatgactagcttttaaaaatacagtacaaagactttgtaaatgtgattcagggcccccagcacccctgtgtctgcagagtgccttcaaaactcagctgttccagccggtgccaacctgtgaacttcccaccatatcccagaatctgctattccccaaaccacttcccagtttcctttcagtaatctttctgaaggagccaggacaatagggcctgttgtttagngaatttctttattattttcagcctttaaaatgtaatttccatctcttgcaatgnnnnnnnnnnnnnnnnnnnnnnnnnnnnnnnnnnnnnnnnnnnnnnnnnnnnnnnnnnnnnnnnnnnnnnnnntaattttttaattacctggttgtagggtgttcctccagaagcaaagagcaaaaatttactgttgtgatgtaccaattctaactaattgaaatttttaatttcatgcctttaatcattggctcttcattttaagacttttaatacaaatgtcatttttaaagaaacaaacccaaaactattgtttgtgtttctgtgtttcatattcagtgatttaatacagtatcatggctgaggtggatggggcaggtgcatgatactcttcagagctatttgtgaaattttaaagacagaagtgtctcagtgacaagttggatgacactactcccaactttttaaatttggagaaaaccatcaaggtcgacggaag

SEQ ID NO: 165112 - DNA, 750 bp, Homo Sapiens
ctcgccatatgtcctcgttcctaaacattttccttatcttcacctcagtagtgcgatcatcatctaccccgtgggctcaggccaaaaatcgcgtctgtctcattcccacatcccacttctaatccttgctctaatccagttctacctctgaaatataccctaagccaatgatgtcccactgtactcactcctacaggcctagccttttccctggttgaaagctgtctcctcctgggactacagcaacagcagattgccaggattcgagctccatcaggaaaggatttttgttcactgccgaagcctagaacactgcttgcccctaagaggcaaatatccacttaggttttcctcaccaactgcttcatgaccaactcgaactgctttcctcacctccactctagcccgttacagtccagtcttcacgacatcccaattatcttctaagtgcgaatcaaaccacagctcgcccctgctcagaatcctcccacagcctctcactgcaaccagaattaaatccaaagtccaaaggcagctgacaggttctggccatttctgagcctgctcttctctctgacctcatctaagacaccccagccaccctagactcccttgcctctcctcactgagcagtctcaactccacaggcatcttctcagactccctcggcaaccctcctcaaggctgcttaccacacggccttctgacagtaccagtaccatattcattgtttcatttggtacggattaa

SEQ ID NO: 165113 - DNA, 600 bp, Homo Sapiens
tgtgcgaatgtcatctacaattaaaaaaaattagcacatccctttacttacttgttatcagtggattctcggggtttggacttaatgttgagctaagaagcattaagtctttgaactgaatgtattttgcatccctggttttggacgacagtaaacgtaggagcactgttgaagtcctggaagggagatcgaaggaggaagattgacttggttctttcttatgtcctatatctgtagcatagatgacttggaataaaagctgtatgcatgggcattacccctcaggtcctaagaaataagtcctgaatgcatgtcgttccaaactaacactctgtaatttttcttttatgtcttatttttcaagagtcctccattttttgcaccccctcaccgccaactctgttattcagtagagagaagtgtacggctttctgattggtgagtgaaaaagtaacttgagacacgacctaagttgaagagtttagacttgctgagttttagaagtgatggaaattaagagagcatttcaataaaatgtgacttggctgtctttggaagagaagtgcaaggctttcctttgagatttaaattagtccggta

SEQ ID NO: 165114 - DNA, 515 bp, Homo Sapiens
aatgacaaggccctagccctggggcctccagaatattaggtacagaggaggaaacacaagaacaggcaaggccctcacgtttatcaaggagaaagtcttgacttgggagagcggcatgaggaagaatgtccctaaggtgttggttgtggtcacggacggtcggtcccaggatgaggtcaagaaggcggctttggtcatccagcagtcagggttcagtgtctttgtagttggtgtggctgatgtcgactacaatgagcttgccaacattgccagcaaaccaagtgaacggcacgtgtacattgtggacgactttgaatcttttgagaagatcgaagacaatcttattacatttgtttgtgaaactgccacttcaagttgtcctctcatttatttggatggctacacctcaccaggttttaaaatgcttgaagcatacaacctgacagaaaagaattttgcttctgtacaaggagtatctttggagtcagggtctttccccagctactcagcataca

SEQ ID NO: 165115 - DNA, 656 bp, Homo Sapiens
cccttgtcttgggacattccggaactcgtcaacatgggccagtggaagatccgagcctactatgaaaactcaccacagcaggtcttctccactgagtttgaggtgaaggagtacgtgctgcccagtttcgaggtcatagtggagcctacagagaaattctactacatctataacgagaagggcctggaggtcaccatcaccgccaggttcctctacgggaagaaagtggagggaactgcctttgtcatcttcgggatccaggatggcgaacagaggatttccctgcctgaatccctcaagcgcattccgattgaggatggctcgggggaggttgtgctgagccggaaggtactgctggacggggtgcagaacccccgagcagaagacctggtggggaagtctttgtacgtgtctgccaccgtcatcttgcactcaggcagtgacatggtgcaggcagagcgcagcgggatccccatcgtgacctctccctaccagatccacttcaccaagacacccaagtacttcaaaccaggaatgccctttgacctcatggtgttcgtgacgaaccctgatggctctccagcctaccgagtccccgtggcagtccagggcagaggacgtcgatccggccgcgaatttagtagtagtagtcgacc

SEQ ID NO: 165116 - DNA, 1200 bp, Homo Sapiens
ccggtaccgatttgacgcgtctcctttctgtctctgtggatgtgtctgtctggacattgtatatgagtggaatcatgcactctgtggctttcgtgtctggcttccttcactcagcgtgacgttttccaggctcatctgtggggtggcaagcggcagagctgcaattcctttccgtggctgagtgatcctggtcaaatgtggcactgccaaagtcagccactcggatgctggtgttcttcactgacttctcctcacagctcttgtgctcattgtagagggtttcaaactcagaattcacgaacaggatgttcttcgggtttcaagtctgtaggggtcagcggatttctcatgcagaaatctaaggggcgtgccagagctggtaggccatgtgccgggacatgtggtagggggtaaggctgaaagttattctccttcagaaactcaaaggtgttcttgcccaggagctcaaaggcgatgcacatgtgaccgtggaagttgaaccagtcagacatcaagacacacaggaacttgttttctttgtccttctccctgatttttttgagcacgttgatttctagccgggcagcctcccggtacttgcccacgttgcggatgatcttcagggcaacctgagacttccctctggcatggtccaagcactccaccaccttgccaaaggtgccttcacccaggttccccacaatctcatatcgctcttggagccaatcgccgatccggcacaccaggtgaccctccttgtcatcttccacactccggctgctgcgcttactgctctgttggcttctcgaggaggcgctgctacaagacctggtgcggcgtttgtggcagtggtgggcatgcttgcgggtccggtatggccccctctcccgcgatcgccgacgatgacgagaacgtgaaggtccatagtagtcctctccaaaggatgggctccgctcttcacaccggtatgtatcgctgtcacggcgctcccggtacctcctctggtagggcaggcggtcatggcttctggaccgagatcttcgtgggggaggctcccttcgggacgggtatcgcagtctcccttcatgttcccgactgtaggacctcctcctcttccatcggtagctcaggtacgggtctggttcaggggagcggtatcgcttacagtgatgcatcgtctcccaggctccggcagcacca

SEQ ID NO: 165117 - DNA, 585 bp, Homo Sapiens
  misc_feature (555)..(555): n is a, c, g, or t
gtaccgtggttatgctgactggttcaacttcgacggatcacttgcatcgcatttgagctcctgggcaagacacacctttgagttcctgacaggagaataacttccagccttaccccctaccacatgtccggcacatggcctaccagctctgccacgcccttagatttctgcatgagaatcagctgacccatacagacttgaaaccagagaacatcctgtttgtgaattctgagtttgaaaccctctacaatgagcacaagagctgtgaggagaagtcagtgaagaacaccagcatccgagtggctgactttggcagtgccacatttgaccatgagcaccacaccaccattgtggccacccgtcactatcgcccgcctgaggtgatccttgagctgggctgggcacagccctgtgacgtctggagcattggctgcattctctttgagtactaccggggcttcacactcttccagacccacgaaaaccgagagcacctggtgatgatggagaagatctagggcccatcccatcacacatgatccaccgaaccagggngcagaatatttttcaaagggcggccgaaag

SEQ ID NO: 165118 - DNA, 978 bp, Homo Sapiens
  misc_feature (868)..(868): n is a, c, g, or t
taaatggtgggagtgaaactttagggtaatggtggggctagctgcagccggagcctgggagacgatgcatcactgtaaggcgataccgctcccctgaaccagacccgtacctgagctaccgatggaagaggaggaggtcctacatgtcgggaacatgaagggagactgcgatacccgtcccgaaggaagcctcccccacgaagatctcggtccagaagccatgaccgcctgccctaccagaggaggtaccgggagcgccgtgacagcgatacataccggtgtgaagagcggagcccatcctttgaagaggactactatggaccttcacgttctcgtcatcgtcggcgatcgcgggagagggggccataccggacccgcaagcatgcccaccactgccacaaacgccgcaccaggtcttgtacgcagcgcctcctcgagaagccaacagagcagtaagcgcagcagtccggagtgtggaagatgacaaggagggtcacctggtgtgccggatcggcgattggctccaagagcgatatgagattgtggggaacctgggtgaaggcacctttggcaaggtggtggagtgcttggaccatgccagagggaagtctcaggttgccctgaagatcatccgcaacgtgggcaagtaccgggaggctgcccggctagaaatcaacgtgctcaaaaaaatcaaggagaaggacaaagaaaacaagttcctgtgtgtcttgatgtctgactggttcaacttccacggtcacatgtgcatcgcctttgagctcctgggcaagacacctttgagttcctgaaggagaataacttccaagccttaccccctaccacatggtccggcacatgggcctaccangctctgccacgccccttaaatttcctgcatggagaatccagctgacccctacggaacttgaaacccagagaaccatccctggtttggtgaatttctggaggtttggaaac

SEQ ID NO: 165119 - DNA, 1118 bp, Homo Sapiens
tagctaccaagagagctgtgattcagtggactccttgggcccaagggctttagcagctggatatggggttccttgattttcctctgggcccaaatatagccctcacactcttggaatttccaggtatgggggtagccccaaaaggaggaatctcctatggccaataaggtatcttgactttatcaaagtagaagagagggtcacttcggagtcaaatcatacactaggcctttgatgctttaattcttcttcagtttcattaaaagtaactactaaggaaaggttaaaaacttcccctcaaaaaggaatcaaccccaggaagtaattatttacaacgattttcccaaattttgtacaatctgtcctggaaagcaaaccccttttaaaatctaatgtctgggctttgagtattagctcatttagggtggacaaatgcattactgttttcaaactgctcacatttattcagtatttctccaagttgctatctactcagccttatgaatgcccctcgcttttctaaggccatgtgaaaaatcacggcactgcccttagccttgtgtcatctgctttttcgttctgcgatatgcccagttcccaaatcaattataggtacctgtttaggagagaggaagattttacctctcaaagggtgagatttgaaatttacactaaaaagacaactttacatttaatgcttcacttaatgagacattcttttttttataagtctatttttctactcagtttcagaacactaatctgattttcactctgatttttaacgtttctttaaatatttataatgtagcttctttcaaaatattttcatgaaaaattacttttattataccattatgtgcatgttattggtagcaggcatagtttattatttagtactgaaacatgctcttttacctaacagtaaacaagtatgttttgatatatatctgttaatatgcttatagtggtaagaaatggaccttgaggtcccaggagatttcatttttattcaccctggccagatacaataaaggctatgagtataaaatacataacttccctaaccaggtgtagggcatgttcatgaatatcaaatctttttgatgctggacccc

SEQ ID NO: 165120 - DNA, 876 bp, Homo Sapiens
  misc_feature (332)..(392): n is a, c, g, or t
ggagtggaggatgtgccaaatattctcttcaaatgccaccttctcaatttataactaaaatagtgttatctgactaattcctctgaattttgatgtaagatctatataggcccccaaaatgatcgtagtacatgccagtcatttctcagtgaaataaatacaataccagagtacattatgggttttattgctttcttttatggtagacctgttgatggggaaaaaatacatcaaatcaaatagaatcttatatctgtatgttaaaatagagcacttacctgaagtcagtggcctggatcatagccctggatcatttcccagtctgtcctgtnnnnnnnnnnnnnnnnnnnnnnnnnnnnnnnnnnnnnnnnnnnnnnnnnnnnnnnnnnnnncaagtggctgcagtagatgatggctgagagcccttcctgttcccagatgccttggtccaaagaccccacccctctgctggtcctgccaacgtgttggtgctataagctgcttcagatataaaattggtttatctataatgtttgttcatttaatagcttctaaaaggcctttttgttatacagtgctttttttctagttttatggacttgattactgtaataatgtcttgtttttagccatgtaactacaaacagatattctcttgatgtcttagtaaatttgcatttgatatatcattgatgagattttgttgttatgtaatattctttggctacgcatctgtccagcatcttattaaccataatactgtgatcattatttggaaatatgtcctatggaaagaataaaagcatgtacttcacagctagcatgttcacagatttgaaaagaagtttcatttaaaagcaccattgcttttctggc

SEQ ID NO: 165121 - DNA, 1453 bp, Homo Sapiens
  misc_feature (465)..(525): n is a, c, g, or t
  misc_feature (1055)..(1066): n is a, c, g, or t
gggggacatgattattatatcgtttaccgtgagggcaatgtttcgtcgaataagtttatccgcattgtttaatgtttaatagggagcgctggcacgggaggcgcgacccaaaaaatatatttcaggggccaacaaagatggtattgaaagtgtattttgaaatgcaagattttagtgggtacatcaaggaggaatttctgtttggtagttaccagtggctaaaaaccaaggcctttatgtccagtaatcaaagtccataaaggctagaagaaaaaagctctgtataacaaaagaggctttttaagaagctattaaatgaacaaacattgtggataatccaattttatgtttgaagcagcttatagcaccaacacgttggcaggaccagcagaggggtggggtctttggaccaaggcatctgggaacaggaagggctctcagccatcatgtactgcagccacttgnnnnnnnnnnnnnnnnnnnnnnnnnnnnnnnnnnnnnnnnnnnnnnnnnnnnnnnnnnnnnacaggacagactgggaaatgatccagggctatgatccaggccactgacttcaggtaagtgctctattttaacatacagatataagattctatttgatttgatgtattttttccccattaacaggtctaccataaaagaaagcaataaaacccataatgtactctggtattgtatttatttcactgagaaatgactggcatgtactacgatcattttggggacctatatagatcttacatcaaattcagaggaattagtcagataacactattttagttataaattgagaaggtggcatttgaagagaatatttggcacatcctccactacgtaagctaccctatgcctcaaaattactaaatcattggtataaagttttggtttttttcctgatagtttaaagattagtaaagtaccaaaacagtctaaatagagaaaaagccagtcaggtctttcctttaaaagttaagtatggcacttttcattttaataaggtaaatgattttaaaaacctgacattttttagaagnnnnnnnnnnnnctagctatgagccatcacttgtgaaccatctggtatataaaatatttcccttatttaaaaaatgtttctgtaaaatacttcggagtcatgaaatcatgccgtggtcctgaggcctcaactggacagatttatgatgaactaatgaagatataagaatgaaaaaaagaaagagatcactgttaacagaagcagcattaaggacaaagtatactgaatatattgaaacagcttcatggaaatgaagccaagaagttgcatgtatatacgtgagaaagattatcattacagtggtagttggaaaaagtaacaacactgggtatttgtctatcattaacataaacctactgttgcagacagttaactgtggctttgtaaggagaataagcc

SEQ ID NO: 165122 - DNA, 1296 bp, Homo Sapiens
ggctggtaaccggcccggaattacgggatatcggaaaatcacggcactgcccttagccttgtgtcatctgctttttcgttctgcgatatgcccagttcccaaatcaattataggtacctgtttaggagagaggaagattttacctctcaaagggtgagatttgaaatttacactaaaaagacaactttacatttaatgcttcacttaatgagacattcttttttttataagtctatttttctactcagtttcagaacactaatctgattttcactctgatttttaacgtttctttaaatatttataatgtagcttctttcaaaatattttcatgaaaaattacttttattataccattatgtgcatgttattggtagcaggcatagtttattatttagtactgaaacatgctcttttacctaacagtaaacaagtatgttttgatatatatctgttaatatgcttatagtggtaagaaatggacttgaggtcccaggagatttcattttattcaccctggtcagatacaataaaggctatgagtataaatacataacttcctaaccaggtgtagggcatgttcatgaatatcaaatcttttgatgctggacccaagagaggaaaagttgtagctaaatgtggatttacttataactagacgtctatgtgagaaaatatatgtatacatatatatgatatgcagaagtcacttatttaatcaggctttattctccttacaaagccacagtttaactggtctgcaacagtgggtttatgttaatggatagacaaatacccagtgtaggtaactttttccaactaccacggtaatgataatctttctcacgtatatacatgcaacttctgggcttcatttccatgaagctggtatcaatatatccagtatacttggtccttaatgctgcttctgttaacagtgatctctttctttttttcattcttatatcttcattagttcatcataaatctgtccagttgaggcctcaggaccacggcatgatttcatgactccgaagtattttacagaaacattttttaaataacgggaaatatttgatataccagatggttcacaagtgatggctcatagctagttctccatttcttctaacaacaatgtcaggttctttaaaatcatttaccttatttacactgaaacagtgccatacttaaccttttacaaggacagacctgacttgctatggctctatttagacgtgttttgtacttacatatcttgaaactatcaggaaaaaaaccaacaactttaatagc

SEQ ID NO: 165123 - DNA, 817 bp, Homo Sapiens
ggcaaggggccaacccaaaatggactggaaatggccattcgacttctttcccttcaaagtggcattcagcagaggagtattctctcaaaaatgctcagtctctcccatccttatcctgtgcctcttactacttggagttctcaacctagagactatgtgaagaaaagaaaataatcagatttcagttttccctatgagaaactctgaggcagccacttatcttggctaaatagaacctcacctgctcatgaccagagagcatttaggataatagaggacctaactgaaggaatccttgtatatgaaaggagttattttagaaaagcaataaaaatattttattcatcatagctctctgctttgggctctgcaggccaccagatacacatgaggcccctacttctcaagctgggaaggccaagagccttccttcagcctttctggttatgttacacctagctgaatgtttacaaggtctggatccatcagccctcaggcacagttgggccaagcagaaagagagaaacacttctgctgtcaccttgaatgaactcaggaatagcttccctctggactgtagaggagctaactgtttggaacagaaaactgctggctgttgattttgtctggttcctttgccaacatctgggcacaccctttgcccagacacgagtggggaaagcagttctttctcctcagtttccaaagtaaatggggaatcccagctttcttttctactagcaaatgaccctaccatttatttctgcctttttcttccgttcattgtgaggaaaaataaaactggttgagagcttaa

SEQ ID NO: 165124 - DNA, 1072 bp, Homo Sapiens
tgggcctcatcttctttggcctgcacagtaagtactttctgtgccgctactgtctatccgcagccatccgcctttctttcgggctaagccgccccggggactgagagttaaggagagctggaggctttactgggccacagggttcctactcgcccctgggcctccggacaaaatggggtctgcggttggtgtcctggcaaaagcagggtagaagggctgcggggcgggcccagaatccgagcctgcggagatgggagcagttgcagtgttgagggcggaagaggagtgcgtcttgttttgggaactgcttcacaggatccagaaaaggaaatgcccggcgaagccacagaaaccgtccctgctacggagcaggagttgccgcagccccaggctgagacagttgtttctcatcttagggtctggaacagaatctgacagtgatgaatcagtaccagagcttgaagaacaggattccacccaggcaaccacacaacaagcccagctgcggcagcagttgaaatcgatgaagaaccagtcagtaaagcaaaacagagtcggagtgaaaagaaggcacggaagggctatgtccaaactgggtcttcggcaggttacaggagttactagagtcactatccggaaatctaagaatatcctctttgtcatcacaaaaccagatgtctacaagagccctgcttcagatacttacatagttttgggggaagccaagatcgaagatttatcccagcaagcacaactagcagctgctgagaaattcaaagttcaaggtgaagctgtctcaaacattcaagaaaacacacagactccaacgtgtacaagaggagagtgaagaggaagaggtcgatgaaacaggtgtagaagttaaggacatagaatgggtcatgtcacaagcaaatgtgtcgagagcaaaggcagtccgagccctgaagaacaacagtaatgatattgtaaatgcgattatggaattaacaatgtaaccatatggaagcaactttttgtggtgctcaagggagtaactgagttgtttgaatttgactgttctatcataataagt

SEQ ID NO: 165125 - DNA, 1095 bp, Homo Sapiens
tctcatcttctgatcccctgcacagtaagtactttctgtgccgctactgtctatccgcagccatccgcctttctttcgggctaagccgccccggggactgagagttaaggagagttggaggctttactgggccacagggttcctactcgcccctgggcctccggacaaaatggggtctgcggttggtgtcctggcaaaagcagggtagaagggctgcggggcgggcccagaatccgagcctgcagagatgggagcagttgcagtgttgagggcggaagaggagtgcgtcttgttttgggaactgcttcacaggatccagaaaaggaaatgcccggcgaagccacagaaaccgtccctgctacagagcaggagttgccgcagccccaggctgagacagggtctggaacagaatctgacagtgatgaatcagtaccagagcttgaagaacaggattccacccaggcaaccacacaacaagcccagctggcggcagcagctgaaatcgatgaagaaccagtcagtaaagcaaaacagagtcggagtgaaaagaaggcacggaaggctatgtccaaactgggtcttcggcaggttacaggagttactagagtcactatccggaaatctaagaatatcctctttgtcatcacaaaaccagatgtctacaagagccctgcttcagatacttacatagtttttggggaagccaagatcgaagatttatcccagcaagcacaactagcagctgctgagaaattcaaagttcaaggtgaagctgtctcaaacattcaagaaaacacacagactccaactgtacaagaggagagtgaagaggaagaggtcgatgaaacaggtgtagaagttaaggacatagaattggtcatgtcacaagcaaatgtgtcgagagcaaaggcagtccgagcccctgaagaacaacagtaatgatattgtaaatgcgattatggaattaacaatgtaaccatatggaagcaacttttttttggtgtctcaaaggaataactggcagctggggtttgaaatttggaacgggttcctatcaaaaataaagttatgggcttccctggtgggaaggaattt

SEQ ID NO: 165126 - DNA, 648 bp, Homo Sapiens
  misc_feature (42)..(42): n is a, c, g, or t
  misc_feature (78)..(78): n is a, c, g, or t
  misc_feature (106)..(106): n is a, c, g, or t
  misc_feature (109)..(109): n is a, c, g, or t
  misc_feature (180)..(180): n is a, c, g, or t
  misc_feature (205)..(205): n is a, c, g, or t
  misc_feature (216)..(216): n is a, c, g, or t
tccccggatccagcaaacctttccaagccccagttgcggcancaacttgaatccgatgaagacccagccagttaagcnaaccagagtcggaattgaaaagaaggcncgnaaggcttatgtccaaactgggtcttcggccaggttacaggagttactagagtcacctatccggaattctangaatatcctctttgtcatcacaaanccagatgtctncaagagccctgctttcagatacttacatagtttttggggaagccaagatcgaagatttatcccagcaagcacaactagcagctgctgagaaattcaaagttcaaggtgaagctgtctcaaacattcaagaaaacacacagactccaactgtacaagaggagagtgaagaggaagaggtcgatgaaacaggtgtagaagttaaggacatagaattggtcatgtcacaagcaaatgtgtcgagagcaaaggcagtccgagccctgaagaacaacagtaatgatattgtaaatgcgattatggaattaacaatgtaaccatatggaagcaactttttttggtgtctcaaaggagtaactgcagcttggtttgaaatttgtactgtttctatcataaataaagtaatgttttgctggattcgggtaccgagctcga

SEQ ID NO: 165127 - DNA, 663 bp, Homo Sapiens
ggtgtgctgcggcgttctagaggacccgaggagtgatatcacccaggcaaccaacaacaagcccagctggcggcagcagctgaaatcgatgaagaaccagtcagtaaagcaaaacagagtcggagtgaaaagaaggcacggaaggctatgtccaaactgggtcttcggcaggttacaggagttactagagtcactatccggaaatctaagaatatcctctttgtcatcacaaaaccagatgtctacaagagccctgcttcagatacttacatagtttttggggaagccaagatcgaagatttatcccagcaagcacaactagcagctgctgagaaattcaaagttcaaggtgaagctgtctcaaacattcaagaaaacacaaagactccaactgtacaagaggagagtgaagaggaagaggtcgatgaaacaggtgtagaagttaaggacatagaatgggtcatgtcacaagcaaatgtgtcgagagcaaaggcagtccgagccctgaagaacaacagtaatagatattgtaaatgcgattatggaattaacaatgtaaccatatggaagcaacttttttggtatctcaaaggagtaactgcagcttggtttgaaatttgtactgtttctatcataaataaagtatggtttctgttggaaaaa

SEQ ID NO: 165128 - DNA, 1053 bp, Homo Sapiens
  misc_feature (851)..(998): n is a, c, g, or t
ggggcttccttctgcaacaggcgtgggtcacgctctcgctcggtctttctgccgccatcttggttccgcgttccctgcacaaaatgcccggcgaagccacagaaaccgtccctgctacagagcaggagttgccgcagccccaggctgagacagggtctggaacagaatctgacagtgatgaatcagtaccagagcttgaagaacaggattccacccaggcaaccacacaacaagcccagctggcggcagcagctgaaatcgatgaagaaccagtcagtaaagcaaaacagagtcggagtgaaaagaaggcacggaaggctatgtccaaactgggtcttcggcaggttacaggagttactagagtcactatccggaaatctaagaatatcctctttgtcatcacaaaaccagatgtctacaagagccctgcttcagatacttacatagtttttggggaagccaagatcgaagatttatcccagcaagcacaactagcagctgctgagaaattcaaagttcaaggtgaagctgtctcaaacattcaagaaaacacacagactccaactgtacaagaggagagtgaagaggaagaggtcgatgaaacaggtgtagaagttaaggacatagaattggtcatgtcacaagcaaatgtgtcgagagcaaaggcagtccgagccctgaagaacaacagtaatgatattgtaaatgcgattatggaattaacaatgtaaccatatggaagcaactttttttggtgtctcaaaggagtaactgcagcttggtttgaaatttgtactgtttctatcataaataaagttatggcttcttgttggatgaattacaaaaaaaannnnnnnnnnnnnnnnnnnnnnnnnnnnnnnnnnnnnnnnnnnnnnnnnnnnnnnnnnnnnnnnnnnnnnnnnnnnnnnnnnnnnnnnnnnnnnnnnnnnnnnnnnnnnnnnnnnnnnnnnnnnnnnnnnnnnnnnnnnnnnnnnnnncatttttttgggggcggggccccaaaagaaaaggaaacggggcctaagtttttcc

SEQ ID NO: 165129 - DNA, 879 bp, Homo Sapiens
  misc_feature (731)..(731): n is a, c, g, or t
  misc_feature (741)..(749): n is a, c, g, or t
  misc_feature (798)..(798): n is a, c, g, or t
  misc_feature (834)..(834): n is a, c, g, or t
ggggctctcgctcggtctttctgccgccatcttggttccgcgttccctgcacaaaatgcccggcgaagccacagaaaccgtccctgctacagagcaagagttgccgcagccccaggctgagacagggtctggaacagaatctgacagtgatgaatcagtaccagagcttgaagaacaggattccacccaggcaaccacacaacaagcccagctggcggcagcagctgaaatcgatgaagaaccagtcagtaaagcaaaacagagtcggagtgaaaagaaagcacggaaggctatgtccaaactgggtcttcggcaggttacagggagttacctaaagtcacttatcccggaaatctaaagaatatccctctttgtcatcacaaaaaccagatggcctaccaagaacccctgccttcaaaataactaaacataaattttttgggggaaagccaaggaatcggaaaaattttattccccacgccaagccaccaaacctaagccgcgccttggctggaaacaaaatttccaaaagttctcctaaaggttggaaaaacgccttggccttaccaaagacccatttttcccaagaaaagaaatagctcacatcaccagacactctttcacgtgacacccttgtgttatacaccataagtcaaagagggtcaaccaaaaattttgtggtttaaatccgaaagggggggaatacgtggtaaaaggaggggctctcggcnaatatcgggnnnnnnnnnccaacaggcggggtgggattttctaaaacacaaaaagttgattttatangaggcggaacactcctcttaagagctacaaatttgngggagggcatcacaaaatagtggaacccgaccacgggaaacccat

SEQ ID NO: 165130 - DNA, 803 bp, Homo Sapiens; identical to SEQ ID NO: 150624
  misc_feature (358)..(435): n is a, c, g, or t

SEQ ID NO: 165131 - DNA, 618 bp, Homo Sapiens
tcattgcacttgcttattctccttgcaacaataagctggatcattcctcgtttattgccttcagtagacatagaccttcttagggtttccatggcatcttggtttgtcttgcccaacagggattctccatttactgctatcagttgatcattcacccgaagccttccatctttagatgctgctcctccattaataatggacttgacaaagattcccaaatctgcgtggttctcttttgaccggttacctttgacactgacaccaaggcctgcagatcctgaatcattaagtgggacttcaaatgtcagaaattccctggtgccatcaggtagtaagaacaatatcctcatcttctgcattcagttcccttggatggaaggcgtcttcctggcgaaagaccagaaggctcacagttccttccatcttggtgcttctcaacagcgaaacaacttcctcttgggatttgcccactaaatctactccatttacctctataagtctgtctcctgccttaagtcggccatcctgaatggccgccccccgggggagaatgtttttcacatagatcggagctgagccacctattgttacatctctggaagtgatgctgaatcccaa

SEQ ID NO: 165132 - DNA, 524 bp, Homo Sapiens
aactgttcccaattaatgggagctctgttgttgagcgagaagacgtaccagcccatattggtgaaagacattcgtaactattttcaagtgagcccggagtacttctccatgcttctagtcggaaaagacggaaatgtcaaatcctggtatccttccccaatgtggtccatggtgactacgtgtacagatttaactgattcgatgcaacttcggagacaggaaatggcgattcagcagtcactggggatgcgctgcccagaagatgagtatgcaggctatggttaccatagttaccaccaaggataccaggatggttaccaggatgactaccgtcatcatgagagttatcaccatggatacccttactgagcagaaatatgtaaccttagactcagccagtttcctctgcagctgctaaaactacatgtggccagctccattcttccacactgcgtactacatttcctgcctttttctttcagtgtttttctaagactaaataaatagcaaactttcacctaaaa

SEQ ID NO: 165133 - DNA, 612 bp, Homo Sapiens
aaaagtaatgcctctaaagaaatacattttaaaggggaaaataaaactttatttgataaagttttatacatttaaagttttatcacattttgtgatccagtgccaattatcagaatattggtcattcttgcttcatgtgttatttgtaagagtatataatgacaagtattccaatgctatgcatatcaacaattgttccctagtcagttagacgtaagagagaaaagggattttctgacaatccccctcaaacaaaaataaaaccaccaaatgccctttatgccaaatattccattagctttttttgagggggacattcacaaaatgattcaacaataaaaaaatatttcacccccatttccttattatctagtattagtttgctacgggagcccaaactctttaaccgaatcacttaaaacgcgattcatttttacactgggctttcttcaccctgtcagcatttgtcaaacatgaattgtcttccatgttttcttaaaggccacttatggaaaagcctatttgttttgtatgagctttaagacagtatttaaccaggtcaagcaccaagccagagctactattattttcagccactttattaactgtggc

SEQ ID NO: 165134 - DNA, 1037 bp, Homo Sapiens
ggcctgggtggcgaattcggcacgagggccacgtacggctccggaagaagcgacggaatctgctagggcacaagagagacgggcgctcgcgctctcgcagtcctcttccgtcagtgtcttttgcttcgactcccggcggagcgcgcaacgtggagtgacgtgcaggggccaagtgcaacccaggcagccacggctgtttcggagctcaggactctaaaatggcagagcagctttctccaggaaaggcggtggatcaggtgtgcaccttccttttcaaaaagcctgggcggaaaggggctgctggacgcagaaagcgcccggcctgcgacccagagcccggagaaagcggcagcagtagcgacgaaggctgcactgtggttcgaccggaaaagaagcgggtgacccacaatccaatgatacagaagacccgtgacagtggtaaacagaaggcggcttacggcgacttgagcagcgaagaggaagaggaaaatgagcccgagagtctcggcgtggtttataaatccacccgttcggcgaaacccgtgggaccagaggatatgggagcgacagctgtctatgagctggacacagagaaagagcgcgatgcacaagccatctttgagcgcagccagaagatccaggaggagctgaggggcaaggaggatgacaagatctatcggggaatcaacaattatcagaaatacatgaagcccaaggatacgtctatgggcaatgcctcttccgggatggtgaggaagggccccatccgagcgcccgagcatctacgtgccaccgtgcgctgggattaccagcccgacatctgtaaggactacaaagagaatggcttctgccgcttcggagaacagcttgcaatttcctccatgaacggttcagaattaacaagcatggggtgggcagaatccaacagtgaagctttgaaggagggggccgcctatggggggtctaaggagggatggaaaacctattgaaagtgggggaaaccccaatgaatggaagggaaaattcccattttccaa

SEQ ID NO: 165135 - DNA, 551 bp, Homo Sapiens
gaaaatgtgacttgcttgcctaaaactacagtgcccccttagcctccattactttagtatctcttacagtttgctctggctctcaaataatataaagattgatgaacattattcacagaaaatgggcaccttctctctctcttccagcatgttgcttttgaaagtatcatgggatagtgggacgagcactggtttaggagtcaagatatctgggttctcactctactcagtcccagcagagctgttgtataaccttgattaagtcatttagcctctctggatttctatttcctcatctgtaaaatagagttaaatgtatgtaagattgattctgattctgaagtcttaactgtcagcagaaaaactccatactgttcattgtaaaactaaaagtgaggaaggctcgtgggtggtgaacctctgctctgtaatactggggaagtactacagaggggaaccatttgagggatacatgaggagagagtaaattgaggtttggggattataaattcaggcaagagaaccttatagatatcacagtcttgagggtc

SEQ ID NO: 165136 - DNA, 812 bp, Homo Sapiens
ctagtcagatcttctcagcttgctagccagaaatgactgtgattctgctgggggctgctgagaaggtaatgtaggttgaaaaggggctctaagtttatttatttcgttgagattgacacttccacacactccctgtagtccaggtagggcccagaaataggaaaggctaggattggataatgctgcaaatgctttttttgtgtgagaaactggagagatgtgatttctcctttttgggagagaatgtcccaaaattgattaggctgagccttgggaatagtttggcaggtttaacatcccaaggctaacctaacgtagttgggaaaggtagattgaatgagacatgttttctgtgcttctaagtgttctgtcccttaggctgctattgcttcatgtttccattatggcaggtttagagaatccttaaaaagaaaaattgacttgcttgcctaaaactacagtgcccccttagcctccattacttagtatctcttacagtttgctctggctctcaaataatataaagattgatgaacattattcacagaaaatgggcaccttctctctctcttccagcatgtcgcttatgaaagtatcatgggatagtgggacgagcactggtttacggagtcaagatatctgggttctccactctactcagtcccagcagagctgtagtctaaccgttgattaacgtcactctagcctctctggatttctatttcctcatctggtaaactagagtttacactgtcctgtcagattgctcctgcatcctcgaaggtcttaagctggcagcagcacagctccag

SEQ ID NO: 165137 - DNA, 409 bp, Homo Sapiens
atccattcccgttgatgaggctcagctactctgctgtgaggaataatctctgcggcgtagactttgttatattgtcaaatctgtcatatcgtaacaatttgcaaagccaccctttcccagcacttcgccccggcagtagcgcttcccagtcgtggggctcgacgataataccgcgagatcataccggccccgagtgcgaatggtggtgatggtgagtgagggaccgccgggggcacttgcgactgggactgaggtggctgcgattcctcggggggtctgcggcggccgcttcttcttcgagtccgctccgcaaccctatgcccagcgcctgcatcgcacattttggtgctgtcggctggctggtaggtgatagctccgcaaaagcatctcagcatgcatgaccggaccg

SEQ ID NO: 165138 - DNA, 824 bp, Homo Sapiens
  misc_feature (24)..(24): n is a, c, g, or t
  misc_feature (29)..(29): n is a, c, g, or t
  misc_feature (106)..(106): n is a, c, g, or t
gggagccaccagaaaattaagtgnccacntaccaatgaccccgaagccttaaacaccagacattaatttaaagaatgacctaatatttgaaaggcctgaaaagaangctgttgaaaacattgtaaataagtccctaagggccatgaagacattaaggaaaggccccacaattaatgagtaatgaaatgtggaggctgatgaagaagctactgctcccatttgtttagcaggaggcaggaaaagtgatctggggtctctggcagcaaaagcgtgtggtaaatatttgggtgacgtcatgcatcccccatgcattggttttgatgtctccagtgagctgttgggcaagtctgatattactgatccacacgcagcaggcagcttcctgtatggagctacctccaccccttggacagttcaggactgaaagattgtcaaaaatgtgaactccttgatgtccagtaaaggcaactgagggaactgtctaacattggtgtaaaaagtgcactttcctaaggagcatgaacttagagttatcaaagcctgtggcaatagtggaatccagcagggcatccagtcgctgctttgtaccttaaataggaattctttgaggagctcagtgtatctctcaactgaagcagctgcctgcagcctacaggggcagtggaagctctgctggacaccttcttcacaagcccagcactgtgttttctgatgaaatgttgctttggtgaccatcagtagtgtctggaactctgcagggataaggagtgtccctgtgagatctgtactgtgtccttagttaaaataaaggcatctcttaccgt

SEQ ID NO: 165139 - DNA, 2597 bp, Homo Sapiens
  misc_feature (420)..(429): n is a, c, g, or t
  misc_feature (572)..(609): n is a, c, g, or t
gtgttgtctctgcaggtgtgcccccaccgtacaagctgttcttctgcattagcagaacggcgttttataatagcgcagctggtccccgtgtgttagataaacacggcccctacatcagtggggcgcaccccttgtttacaaagaaaccggggggggctcgcatcataaaatggggggcctcctcctgcggaggataattttctatgtggggccccgccccctgtttttggtcgttgttgttgtcatgtgcttgtgagtgtgtcgtattcgtgtcgttatctgtttttttatgtagaaagccagtttagtcccttgttaagcacttacacagttagtcatggagagtaacaggcctgctggtgaaacaggtcacccaaaatggagatggcatcaaactagtggtcaaggactaactccttnnnnnnnnnngcaactcttatcaaggattaatttaatttgtttgaaaccaatacaaagttattgattcactcttctcaaacttgacagtctacctgtggtataactgtcaggtaaaaacatacatctttacaaacttggtggtcccacagttnnnnnnnnnnnnnnnnnnnnnnnnnnnnnnnnnnnnnncaccatttcacagacaggaaataaacaacatgaaaacagctcaagaaatacactaacgagcaaaaatatatgaatatatggggaaagaggaacgtgttgttttgacttaactgaagaaaccaagaggaaactggtctacgtatgaaaatgtgcatcctggaaagtcaggtgtcaagattttcgagtaggaatctatacgacttgaatctccccctatttcctgaataaaagtgacatctttcagtatttatacttcatggctcagacacctacctcatttggctctattccttactcactctagcctttacttaaatgagtctgaaaaacttggggatatagcataagaagaaaaataatcacacataatattccccctttctgtagctactttagacctgggttactagaaaattcctgaagaaaatttcaacgttaagtctgtggctttgttgaatcaagcccccctattaatatttagaaaacacccacggtttgggctaatagcattatcggtggtacctattatatagagggatagctgaataaagtctgtctcaaaaccagtgttaaatcactctcagggttgagaagaaaaaaggggagtctaaaatcacaacaagtaaagacatatctaggacccttgtccttctggatccacgcttccttcagggtcttcatcattataaatgttctctgccatttgccacacttgcatgatattgtcttctgatacagaacaaatcacccaaggttcattgggattccaggagaaatcagatatcttggcagtatgaccaccatgaataaacaacaactctggtggcccgtcttctgcatcttctggggattgttcctctccaattttacttaaatcccagacattcagtctgcgatcagtaccactggaagctaaaatagtctcattgtgaggtgaccactgaacctggaatatttcatccttatgtgactcaaaggaatgcaacttaagtttcagatttctcagatcccacaaggcaacagtcttgtcagctgatcctgtggcaagaatgaactcactataaggattgaaagaaaggcagttcacttcagcagtgtgagcatcaactgagtggcttggtttggaagtattgtttgaacgagtatcccaaatcataagtttctgatcatcagcaactgacccaaacagagactcatggagtagatgccaggaaacatcttctactactgccgtatgccctgtaaagatggtcttcgcatctaccacttttccctcctttggaacggcactgatgtcccacaggcagatggtatggtcatctgaagcactaagtaagtgcccactgagatttgggttccaagaaagcccatagccttccttctgatgtccacggagacgcaagtctgggttggcactctccagaaggatctggtttagaagggatgttttgtatagtcaaagacaagaacatcactggaaggagtctttgttgcgatgatacaagggttctggggcatataacgggccctgtttacttctccttcatgggttgatcttgatttctatttcaatttttccactaactgaaccaaaacctccaaattctcctttctcactgtcgtagtgtgacgcatcaaactgagcatcatcattagggagctgcacactggctataacaagatggttttgttcatccgatgtgtgtgtccccaggacaagtcgatgaatgctgaaatctttcccttctggtctggttacatctggaagccactgggcagttaggctgggccactccagagcatgggtcatcaccaaatcataaagaaaaggggtgttctttttccatattttgtattcctcgttgatcactcgttcttccactgcgtcgtcgaaggctgcttccttgtcggccatggcgggcaggcgagccgggggaatcctggggtcgagcgttgcgggaggggcggggaggctgcaagagctcccc

SEQ ID NO: 165140 - DNA, 1087 bp, Homo Sapiens
ttcttaaatacagaaaggctatgctgatacagtgttttttgccctttaattgttattatttcttaatttaaaaagaaacctagggcttagatagtcctatcttctatttggatgtcagcaaggttaaaaagtgcaatgccaggagtatgtagctataggtggcctgtggcatttgcttacagaaacaggcagaaggatgccgcaggcaccaggaggcacttgtctaagaacaacaacaacaataacaaaaagctgctgagaaaggagggcaggggaacaaacaacacaagacatttcctttttctccctctagccaccccccgccacatcccctgatcatgggtctcagagaacacatccttatttgcatttagataaaagcagatcacccacattcactcatttctctatttttaaaagtgcccagattgctcaaagatagcagaagtaggagattaaaaaaaatctggaaccacaaagttagtagtttcagatgatctggggtttggctgtgtgaggggtggcagaatgcaggtaggcgcctcagtcgtatctttctgcagcttccgttctcagctcctcacatgggggaggtagcgcactccgaggtcaactccatgtcaaaggtgagggactcaaactgccctcctgctgagggttcagcaccttcaccattatttccaaactgcatcaatgaatggtgtcacacagataaacttggtcttccaggtatggggcagcgcctgggaagaagaaaaccagttttcttactgactgtgacttcgcattcagtaagcagagctggaggaagccatctgcctcggcaggactgatttgaaactcactcatcctcatgccaagattgtctggaaagctccatctgcccctcagggttgtctgccctcatttatactatttgatctcccaggcactagcagctgtgaacttcagttctttgcacaaagctgtcctgagctgcagagacttttcagcataaccttttcccacctgaccctagactaatgccaccttgtgtcaaaacttcccctagattatgtaaaagtttaacagcctccccgggatacag

SEQ ID NO: 165141 - DNA, 1006 bp, Homo Sapiens
gttacccagcacttgggtgcgaaggttagcggtaagaccagatccagtccgtggaaccatacacaaagcagcagctgaacaacatgtcatttgctgaaatcatcatgggctataagatcatggatgctaccaatatcctggtgtctccactggtctatctctatcctgacattcccaaggaggaggcattcggaaagtattgtcggccagagagccaggagcatactgaagctgacccaggcgctgccccatacctgaagaccaagtttatctgtgtgacaccaacgacctgcagcaataccattgacctgccgatgtccccccgcactttagattcattgatgcagttggaaataatggtgaaggtgctgaaccctcagcaggagggcagtttgagtccctcacctttgacatggagttgacctcggagtgcgctacctcccccatgtgaggagctgagaacggaagctgcagaaagatacgactgaggcgcctacctgcattctgccacccctcacacagccaaaccccagatcatctgaaactactaactttgtggttccagattttttttaatctcctacttctgctatctttgagcaatctgggcacttttaaaaatagagaaatgagtgaatgtgggtgatctgcttttatctaaatgcaaataaggatgtgttctctgagacccatgatcaggggatgtggcggggggtggctagagggagaaaacggaaatgtcttgtgttgtttgttcccctgccctcctttctcagcagcttttggtatgtggctgtgtcttagacaagtgcctcctggtgcctgcggcatccttctgctgtttctgtaagcaaatgccacaggccactatagctacatactcctggcatggcactttttaccttgtgacatcaataggagataggactatctaagccctagtttttttaacttagacataataacattaacggaaaacatgttccagctaccttctggtttcaaa

SEQ ID NO: 165142 - DNA, 536 bp, Homo Sapiens
atcagcactccttgcaagtgtggtgatctccaacatctgtcagatgccaaatgcctgggcgtccatcctgtggtacaacatgctgaccaacaatcccaagaatgtaaacttttttaccaagcccccaattggaacctgggatcaagtggccgaggtcctgagctggcagttctcctccaccaccaagcgaggactgagcatcgagcagctgactacactggcagagaaactcttgggacctggtgtgaattattcagggtgtcagatcacatgggctaaattttgcaaagaaaacatggctggcaagggcttctccttctgggtctggctggacaatatcattgaccttgtgaaaaagtacatcctggccctttggaacgaagggtacatcatgggctttatcagtaaggagcgggagcgggccatcttgagcactaagcctccaggcaccttcctgctaagattcagtgaaagcagcaaagaaggaggcgtcactttcacttgggtggcgaaggacatcagcggtaagacccaga

SEQ ID NO: 165143 - DNA, 1152 bp, Homo Sapiens
  misc_feature (902)..(912): n is a, c, g, or t
  misc_feature (914)..(914): n is a, c, g, or t
  misc_feature (967)..(1012): n is a, c, g, or t
  misc_feature (1062)..(1062): n is a, c, g, or t
gccccccaccggccctaagtagcgagcctgggtggcgtattcccgcacgaggctcctgtggtacaacatgtctgaccaacaatcccaagaatgtaaacttttttaccaagcccccaattggaacctgggatcaagtggccgaggtcctgagctggcagttctccttcaccaccaagcgaggactgagcatcgagcagctgactacactggcagagaaactcttgggacctggtgtgaattattcagggtgtcagatcacatgggctaaattttgcaaagaaaacatggctggcaagggcttctccttctgggtctggctggacaatatcattgaccttgtgaaaaagtacatcctggccctttggaacgaagggtacatcatgggctttatcagtaaggagcgggagcgggccatcttgagcactaagcctccaggcaccttcctgctaagattcagcgaaagcagcaaagaaggaggcgtcactttcacttgggtggagaaggacatcagcggtaagacccagatccagtccgtggaaccatacacaaagcagcagctgaacaacatgtcatttgctgaaatcatcatgggctataagatcatggcatgctaccaatatcctggtgtctcccactggtctatctctaatcctgaccattccccaaggcaggcagggcattttccgaaaagtaattggtcgggcccacaaagaagcccaggaaagccatcccttgaaaaaccttgaacccccaagggcggcctggcccccccaattaacccctgaaaaagaaccccaacagttttttaattccttgaggggttggaagccaccccaaacccggaccccctggccaagcccaaattaacccaattttggaaacccctgccccccaataggtannnnnnnnnnngnccaacctttttaaagaaaattccaattttggaatatgcccaaacctttggggnnnnnnnnnnnnnnnnnnnnnnnnnnnnnnnnnnnnnnnnnnnnnncccccctcccaacccaagaggaaaaggggccaaggatttttgaaaagtantcacccctttaaaaccctttttttaaaacaaatggggaaaaacatttggaaaccccctcccccaaaaaatgagcggcgttttacaccttt

SEQ ID NO: 165144 - DNA, 430 bp, Homo Sapiens
ctcggcacgccgtagatcccttcagactggccgctaccacccgactggccactgccacctgattggccacttcccactgactggccactaccacctgactggatccccgctgattggccaattccacctgactggcagaacctgcgcccctcgcctaacctgcgcccttctcccaactcgcgtgcctcacagaacccaggtgctgcacagccccgagatgtggcccttcttcaggaaagagcaaataagttggtcaagtacttgatgcttaaggactacacaaaggtgcccatcaagcgctcagaaatgctgagagatatcatccgtgaatacactgatgtatatccagaaatcattgaacgtgcatgctttgtcctagagaagaaatttgcgattcaactgaaagaaattgacaaagaagaacgaccca

SEQ ID NO: 165145 - DNA, 1228 bp, Homo Sapiens
  misc_feature (12)..(12): n is a, c, g, or t
  misc_feature (103)..(103): n is a, c, g, or t
  misc_feature (127)..(127): n is a, c, g, or t
  misc_feature (256)..(256): n is a, c, g, or t
  misc_feature (1152)..(1152): n is a, c, g, or t
gagactcctggngacaaccccaggctcaaaaatatgggatcctacacctagccacacaccagcgggagctgctaacttcctggtacgaggtgatacaccaggnccatgcgtacaccaggtccatggnaggcgtcaacttccagtgctcgtaaaaacagatgggatgaaacccccaaaacagagagagatactcctgggcatggaagttgatgggcttagactcctcgaacagatcgaggttgagattctatttgtnaaacaccgactcctggagccagtaaaagaaaatcacggcgggatgaaacaccagctagtcagatgggtggaagcactccagttctgacccctggaaaggacaccaattggcacaccatgccatgaagcatgtgctacccctactccatggtcacactaatgatgtactgactcctgaacagcttcagtgctaggctggtgggaacagagaaattgatgcagagaaatcgcccactttcttgatgaggaattagatgctatgttcccagaaggatataaggtacttcctcctccagctggttatgttcctattcgaactccagctcgaaagctgacagctactccaacacctttggggtggtatgactggtttccacatgcaaactgaagatcgaactatgaaaagtgttaatgaccagccatctggaaatcttccatttttaaaacctgatgatattcaatactttgataaactattggttgatgttgatgaatcaacacttagtccagaagagcaaaaagagagaaaaataatgaagttgcttttaaaaattaagaatggaacaccaccaatgagaaaggctgcattgcgtcagattactgataaagctcgtgaatatggagctggtcctttgtttaatcagattcttcctctgctggtgtctcctacacttgaggatcaagagcgtcatttacttgtgaaagttattgataggatactgtacaaacttgatgacttacttcgtccatatgtgcataagatcctcgtggtcattgaaccgctattgattgatgaagattactatgctagagtggaaggccgagagatcatttctaatttggcaaaggctgctggtctggctactatgatctctaccatgagacctgatatagatnacatggatgagtatgtccgtaacacaacaggtagagcttttgctgttgtagcctctgtcctgggcattccttcttt

SEQ ID NO: 165146 - DNA, 871 bp, Homo Sapiens
agatagatagtaagattgtaccaggaaatgagatacagatcgtgggtacacctgtgaattcagaggattcagataccagacaaacttccaattgtacaagcaagatctctttctgagataaataagccaaaattctataataatgactttgatgatgatttctcccacagaagttcagaaaatatattaacagtgcacgaacaggccaatgttgaatctcttaaagaaacaaaacagaattgtaaggatgtggatgaagatgccaatggaataacagatgaggggaaagaaattaatgagaaaacttctcagctgaagaatctttctgaacttcaggacactagccttcaacagttagtttctcagagacattcaaccccccaaaataaaaatgctgtatcagtgcactctaatctgaactctgaggctgtaatgaaatcattaactcaaacatttgcaactgtggaagtaggcagatggaataacaacaaaaagagccccataaaagcaagtgacttgacaaagtttggtgattgtggtggtagtgatgatgaagaagagtccacagttataagtgtcagtgaagacatgaacagtgaagggaatgtagattttgaatgtgataccaaactatacacgtctgcgcccaacacatctcagggtaaagataattctgtcttactagttctcagcagtgatgaaagccaacagtctgaaaacagtgagaatgaagaggatactttatgttttgttgaaaatagtggccaaagggagtcattaagtggagacacaggaagtctgtcatgtgacaatgcattgtttgtaattgacacaactcctggaatgagtgctgtgttgggataattcaggg

SEQ ID NO: 165147 - DNA, 1039 bp, Homo Sapiens
actgaacagatggggcacacacctccaaatcaaggaaggccagattctcctgtctatgctaaccttcaagaactgaaaatatcccagtctgctcttcccccacttcctgggagcccggcaattcagattaatggagaatgggaaactcataaagacagctcagggcgttgctattactataacagagggacacaggaaagaacttggaaacctcctcgttggactcgggatgcaagcatcagcaaaggagatttccaaaatccaggggatcaagagcttccttcatcggaagaaaactactacagcacttcttacagccagtcagatagtcagtgtggttctcctccaaggggttggtcagaagagttggatgaacgtgggcataccttaaataccagggactatactaatgaaaagtggctcaagcatgttgatgatcaaggtagacaatattactacagtgcagacggatctcggtcagaatgggaattgccaaagtataatgcttcatcccagcagcaaagagaaataattaaaagtaggagcctggacaggcggctgcaagaaccaatagtattaacaaagtggagacatagcaccattgtattggacactaatgataaggaatctccaactgcctcaaaaccctgctttcctgaaaatgagtcttctccctcctcaccaaagcaccaagatacagccagcagtccaaaggatcaagagaaatatggattattaaatgtaacaaaaattgctgaaaaagggaaaaaggttcgaaagaactggttgtcttcttggggcggtgttgcagggttcatctttactttttaccaaaactcaaggaagtagcacaagttggtttggcagtaatcagtccaaaccagagttcacagtggacctcaagggggcaacaattgagatggcttcaaaggataaatccagcaaaaagaatgtatttgagctgaaaactcgtcaaggaacagaactgctaattcagtctgacaatgacactgttattaatgagttggttaaagttctt

SEQ ID NO: 165148 - DNA, 1190 bp, Homo Sapiens
ctttgtctccctatagagcattttatagtataggaagggattcaaattctcttgtttaacaaattcttgtttctatatagaggagattttatattcttaatgtttacaacaaaagcctatttccaccaaaaagcaagaagaaattaataaatgaaatcctcgactctaaaaacctaagaaataaaactgtgaacattctgaaacggagtgttttttctaaaggctaatacaaacataccaaatagaatttctgagcacgaactatgggatttcatttcaatcgtatcactttcatctggattgaaataatttagaaacaataaggaccgatcttaatctcactattttctgcatgagactatcgttccgattcatcccctcaatacacaccactgtccaacagtcttacagtgagcatcctctcaggtccctttctgctcgctgaaccttaagctggttttacccctcctgtctctcttctccaaaatcctctatatatcttaagaagaaaatattcctttaaaaaatgacaatttaaatacagtgtgataatgctacatttgatttaaagtagtaataaattataaattgccaaataacttaatgtaattcacgatgcaaatccttggtataaaaataatccatattgccctgaatataataaagcaatccagtgatttttaaattacttatgaaataaaggcaaaaataagatgtaaaatactatttataaaagtcaagtaagaaaccagttaccataaatctttttacaaagataaatgtaatgtggcttactacttttaaaaattgtcagggaggtttgcaatcagtggtttcaaaaatgactctagggaaactagagactgaattatatattattgtgatgtacaacatattaactatatatataacaataatactgcaatggggggtaattaagctacttcctaacaagtacatttctttttcaaagtctttactgtaactgattaatttttaaatgttagttttcaaaaacttttctacttgagatatttatgttagtaagaagataccagaagtctagaatagtaatcaaatgcctataaaataaaataatgattgttcttgcatgttctgttattgtgacaaatacacattaaaatagtaacattgctatgcctggaaattaaaaatatccaatctgttag

SEQ ID NO: 165149 - DNA, 1107 bp, Homo Sapiens
ggggcagagagcattctggagccgccagccatggctgccccagagtcttcagctatggctgtcctggagtcttcggctgtgaccgtcctggagtcttcgactgtgactgtcctggagtcttcgactgtaactgtcctagagccttcggttgtgactgtcccggagcctcctgttgtggctgagccagactatgttaccattcctgtgccagttgtttctgcgctggagccttctgtgcctgttctggaaccagcggtgtcagtccttcaaccttctatgattgtttcagaaccatctgtttctgtccaggaatcgactgtgacagtttcagagcctgctgtcacagtctcagagcagactcaagtaataccaactgaggtggctatagagtccacaccaatgatactggaatctagtatcatgtcatcacatgttatgaaaggaattaatctatcctctggtgatcaaaatcttgctccagagattggcatgcaggagattgcattgcattcaggtgaagaaccacatgctgaggaacacctgaaaggtgacttttacgaaagtgaacatggtataaatatagaccttaatataaataatcatttaattgctaaagagatggaacataatacagtgtgtgctgctggtactagtcctgttggggaaattggtgaagagaaaattttgcccaccagtgagactaaacagtgcacagtattggatacctaccctggtgttagtgaagctgatgcaggagaaactctatcttctactggtccttttgctctggaacctgatgcaacaggaactagtaagggtattgaatttaccacagcatctactctcagtttagtttataaatatgaagttgatttatcttttactaccccagatactgaaccttgaatgggtaatttcccccagtccctaagggtgggaatggaacttgaacttgaaagggccctttgcctggctaaagaaatttcctcctggatttacccatccaaaaataaaaccctgggtaggtaagggatatcggaagaaaccctttacccgggaaaaagaaaattggccccgaaatttttaagggttttggcttaaccccct

SEQ ID NO: 165150 - DNA, 557 bp, Homo Sapiens
gagagaggctttacgccacggtaaggcttgcccactctgtcactgctgctcacatgccgctctgtacatgatctgtctggccaaggaagattgaaagacattcgatccacaggagttgatgtattctctataaaactgataactttttccctgacattaacggattttgtcttcaaagccacagtcattgttatttactagtgatttcattcctctaccacttgagccattaggagattcaccatcaacagaattgatactgctccttgagcctgaggtactagcaatccaatggccatatccattttctggtcaatccacattaatgtctgccaggtgctgctgcagtgccataaatcctccactggcaatactcacatattctttgtttttctgtaaaaagtgtgccaggaccatgttcatatacatgtcttcttcctccctgccactgcccataaaacagaggtgctccccaccagctatggagccagactcaatggactgcttctgtgcttccagcaggattttactgactgtgcaaactcagatgatcagaa

SEQ ID NO: 165151 - DNA, 497 bp, Homo Sapiens
cttctgaatccctgagtctgagcttccttctcgatttcttgtttaaagtgagagaatctggctccttgaaccctgaccatgggcctgcggtgatccactgtagtgcaggcattgggcgctctggcaccttctctctggtagacacttgtcttgttttgatggaaaaaggagatgatattaacataaaacaagtgttactgaacatgagaaaataccgaatgggtcttattcagaccccagatcaactgagattctcatacatggctataatagaaggagcaaaatgtataaagggagattctagtatacagaaacgatggaaagaactttctaaggaagacttatctcctgcctttgatcattcaccaaacaaaataatgactgaaaaatacaatgggaacagaataggtctagaagaagaaaaactgacaggtgaccgatgtacaggactttcctctaaaatgcaagatacgatggaggagaacagtgagagtgct

SEQ ID NO: 165152 - DNA, 1146 bp, Homo Sapiens
gtctcacttctgaatccctgtgagggtatttttgagtgaattttaactgctctgaactaagtgtagctcatgggcctgcaaaggttcagacggtttctcctttgtcgcccaggaggaactttggctgcgagaatggggggatgtatccctcatgcagttggcatccaggcagccctctgcagcagcacaccctgcaggcggagttatcagaggatgcaattttggatcccgaattttgatgtaccttaaacttccacatcactgcaccctgaaacagagcatgctttccagaaagtcacactctccagatctgtgtcaagttcaatgtgagccctggcaaggctggcatattaacacctgccttctggcttctgaaagtgagatttgtatatgggctgcactcacgcatatacgagttggtttatctttgtgtacatgactataacccagtgatgctgaggtcatgtgctggaatgctgtatttggaccacacatttcaaagttgccctatggaaatgaatcctacttagtgacaagtcatcaaatgtttgtcacatgtgatgaagacaaatatgtatacctggcatagagaaaaatatatacctggtacattggagaaaaataattacactttcaaagagaattccctttgcaattttatgtttggatcaccactgtaagcacactttatttgcatttgatctgtatttgtatatgctgatgcaatgataaaaatcactgtaatacttcattgtgttgtactggatgcaaagctagaaaatattgcaataaatgagaccgatgaaagacttctctgaaaaccaccccacaaacaaacacaaaggcgcaggccagcgtccaaaaagatacccctacgaggggccccaagaggtagagcgtatccccagcctaatctctggcacacagagtgggccccctaatagggcgacgcgcaataaaaagagccatggccactcggggccccggccgttatcacacacacgtggggcaactcgggacaaaaccggtcacacccggggacacccgaggtcacagagacccagtaacataccagcagggggagacaaaatgggcaacagaactcacatagaggaaattcacacgccctagggcaaacatagtacg

SEQ ID NO: 165153 - DNA, 448 bp, Homo Sapiens
agctcggtaccccacctctaggggctgccagtgacagtccatcagagcgtcatacagctcctcactctgttccatgaactccttgttggcctcagtcacatccagctgtggcatggggtcttccaatgcatcatctccaacttcttcatatgtctgcatggtgctctggatatagccatactgggggtaactgtagctgtagctgcctgtgttctggtcatagccccactgagcatagtagttctggtactgctgataatactggttgtagctataactgtacatctgactatattccactggctttacacggctcgctttagggattgccacgctcagccgcacaggcttagaccccagtcccactgcgcctggccctatattttcttaagatggtcccttctcccacgtgcgctaattttccaaataacagccacatcaacagaat

SEQ ID NO: 165154 - DNA, 1150 bp, Homo Sapiens
tagaggatcccctatctctaacattagactcttatgtgagtgaagacgaagacttcccctgagtaagttcagacagcttctgataacatttctacatcgattcctcaggatttaactatatattcttgaaaacatctcaattttaaatgtttctttcaagatggtgaattaaacagagatagcccttcaacaggttgaactcagcatacgctgagtctgaaatggaaatgatggagttagagaaccgtacaacaatggtaatgatttcagaaacatggtgttgagcagaataaagcagacacaaaagagtacctatggcatggcatgcatctgtatacgcgaaattccagaataagcaagctaacctatgataagaaagagactggctgggaagactgagagttcactttctggggtgacataaacataagaaagaatccaaaatgaaacaagattgcctttcaactcaatgatgagatcataacatggcaataaaatgtctccctctggcctgggaattcctctttgtggcacaaggttgtgtgatctcaaatcaccgctaacccacctagacattttaacatccgaaaccgagtgatgacgtccttatctatatcatcttactgcctgtgtgtgtggactttaaattctgaacccaaatgagggggagaaaaccaagttgactttcatgactgagctctcagggacgtccaaggaatctgtgcatttcaagaaacaaagttcatcagcttctctcctaaggtatttgcccacaataaccagagggcttggcagcatcatgtgtgatgggtggggagctccaagcaggtgggcaggacccaggggcctggtgaccaggacagacccccactgtccatcacctttcctggccctgtcctctgctaaacttcccacaggccttctgcccgatcacacagagtatgcccaaactctctcaggcctctggcagctgaaaaccactgctttaaatccctttaccatttactatgacataaggttattgtaaacaggaaatattctattgatgctacaaatggaacgccaatgcctttaccataaatagaaaaacaccctcagagcaagcaaacaaaagcaaacagggcgggtgtggcatccgctgggatcctct

SEQ ID NO: 165155 - DNA, 1398 bp, Homo Sapiens
  misc_feature (1113)..(1113): n is a, c, g, or t
taggctggtagcggtccggagttcccgggatatcgtcgacccacgcgtgcggaacatcccagcgaagatcctttcttataaccgtgccaatcgagctgttgcaattctttgtaaccatcagagggcaccaccaaaaacttttgagaagtctatgatgaacttgcaaactaagattgatgccaagaaggaacagctagcagatgcccggagagacctgaaaagtgctaaggctgatgccaaggtcatgaaggatgcaaagacgaagaaggtagtagagtcaaagaagaaggctgttcagagactggaggaacagttgatgaagctggaagttcaagccacagaccgagaggaaaataaacagattgccctgggaacctccaaactcaattatctggaccctaggatcacagtggcttggtgcaagaagtggggtgtcccaagttgagaagatttacaacaaaacccagcgggagaagtttgcctgggccattgacatggctgatgaagactatgagttttagccagtctcaagaggcagagttctgtgaagaggaacagtgtggtttgggaaagatggataaactgagcctcacttgccctcgtgcctgggggagagaggcagcaagtcttaacaaaccaacatctttgcgaaaagataaacctggagatattataagggagagctgagccagttgtcctatggacaacttatttaaaaatatttcagatatcaaaattctagctgtatgatgtgttttgaatttggtttttattttcaagagggcaagtggatgggaatctgtcagcgttctaccaggcaaattcacttgtttcactgaaatgtttggattctcttagctactgtatgcaaagtccgattatattggtgcgtttttacagttagggttttgcaataacttctatattttaatagaaataaattcctaaactcccttccctctctcccatttcaggaatttaaaattaagtagaacaaaaaacccagcgcacctgttagagtcgtcactctctattgtcatggggatcaattttcattaaacttgaagcagtcgtggctttggcagtgttttggttcagacacctgttcacagnaaaagcatgatgggaaaatatttcctgacttgagtgttcctttttaaatgtgaatttttatttctttttaagtattctaaaatatttaaacctttttcgtgatcttaaagatcgtgtaaattgcgggttggggaagggattaaaggccaatcgccaccacaggacactcgaatcaaccatagactccagcccacctcatccccgggaccatttaggaccgaaaaatttagtaccacccctataacaaataccactcccattctgcccgtgaaccacaaaatacaa

SEQ ID NO: 165156 - DNA, 716 bp, Homo Sapiens
gctatcttccgtgccaagaggtctcatctattacctgcagttggggaaatactagtagctttaccttgttttgacttcattaatgtcagtttaggggatgccaaaaatgcagttactcatcatggtgtctgtcactggttaggggtaagatgcaggggataaggaaagagacttttcaataagttgtgaatgccaacagtgggtttaatgcaaattttttttcctgtgaggtatgacagtttgctcaaacttcagccaacaggggtgtctgcttctgctgcactacacaggccaggagtggcattccatgccactagttggcatccttttgaacttttgtctcctttgcaaacagtggtcctaaaatacgaggtcttcacttgctgtgaatgacgtatccccagtcagggacttaagagaggcactgtgatatacttgggaccctttaaattaaaaagtgaagatagtcaccagggccagaaagctcatggagtggccgtaatgagaatatgtttgaagatcaaagagttagaccaatgcttgaataagtagaccccaagcatccttttctaaaaagtgacttaaaataagccaacagactctcccagaccacacaactagtggaatgattcctcctttttcattactacttaatacagttagttttttttaaacttgtaggccaggtacttctggtcctggtctttgctgctaag

SEQ ID NO: 165157 - DNA, 749 bp, Homo Sapiens
ttcgtgatagttgattctagagtatccccgtctcattctgaatcctggattaagctgagaggctggcaagagagtgaaatgtcccaagccctctaacaacaaacaacatactttgtgttgtcctggatgctggtctggttgccaaatgtgtggaactggccccatatgcgtgtactgttgtccatttcatgagagtaggcttgaggacaccatgggcaaggatctgatggttgccagcctaagcgttttagacttttgacccagagattttttgttttgggtgtggaaaaaattttagaggatagggtctcaagatataatcctttttataggcggcaggtcttaagagatgagggtccagaggaacggatgaagcctgcttggaagcatgctgggatggccatttggaaggagtgttgcatggaagcatggccttggctgggcgctgccaggagcttaagggttgtaggttgtttgtctgatcggctctcggcctaatcttgtggcttccaggaggaagaggagagatcaagctggctgtctgatgggcatggctttattctggaatggtgaacccaatggagagggtcctgcagatagacggcagttagtgcgctataaatgaccgggtagggtctggtccattgaggctgtagagtttgaggggtcagacttttgacaaggactgatcgtccagctagggtgtcttcatatggctgggaatcctccaccgtaagacataaccgcgg

SEQ ID NO: 165158 - DNA, 683 bp, Homo Sapiens
agatgtgccaatgggccatgggctgcccgggtggtagagatgactgcgagctgaagaagcgaggctgctggagtggaaatgatggtgagggttatcgagggaatggatgggatggccactaatcacaggctggggtggctgggagtcaaagggcatcatcatttttggtctcattcctcgccttccagccagtgtagacatgctgtcctctgactcatgccctctgtatgaatttcgcctttgatggatattgctgtccatggagttgtcaactggtgtgatatcttgagagttgcgaggaattggagtatcagtcatgatggggtttgggtctggagacttatcaatgggtttcagctccagtctctcatgatggatccagagatctggaggtttcacatctttggaattccctttgtacttatgagagccattcactgatttgcaggcagctcgtttctttttctggtgagaggtggtacgacgggtacaaaagacagcgataatcacaaccaccacgatggtgatgacgccaacagaaacaattatgaccagcagcatattactgtccagaggagaggtggggctcccatgagggctgttactgccgctcattggaggtttgtagtcggatcctaggtctggcagccggcttcctttcccaccttaccatacccggggat

SEQ ID NO: 165159 - DNA, 1550 bp, Homo Sapiens
gggaccttccttctagcagaaatggcggctgcggcggctcgagtggtgttgtcatccgcggcgcggcggcggctctggggtttcagcgagagtcttctaatccgaggcgctgcgggacggtcattatattttggagagaacagattaagaagtacacaggctgctacccaagttgttctgaatgttcctgaaacaagagtaacatgtttagaaagtggactcagagtagcttcggaagactctgggctctcaacatgcacagttggactctggattgatgctggaagtagatacgaaaatgagaagaacaatggaacagcacactttctggagcatatggctttcaagggcaccaagaagagatcccagttagatctggaacttgagattgaaaatatgggtgctcatctcaatgcctatacctccagagagcagactgtatactatgccaaagcattctctaaagacttgccaagagctgtagaaattcttgctgatataatacaaaacagcacattgggagaagcagagattgaacgtgagcgtggagtaatccttagagagatgcaggaagttgaaaccaatttacaagaagttgtttttgattatcttcatgccacagcttatcaaaatactgcacttggacggacaattttgggaccaactgaaaatatcaaatctataagtcgtaaggacttagtggattatataaccacacattataaggggccaagaatagtgcttgctgcctgctggaggtgtttcccatgatgaattgcttgacttaagcaaagtttcatttcggtgactctttatgcacacacaaaggagaaataccagctctgcctccctgcaaattcacaggaagtgagattcgtgtgagggatgacaagatgcctttggcgcaccttgcaatagctgttgaagctgttggttgggcacatccagatacaatctgtctcatggttgcaaacacgctgattggcaactgggatcgctctttagggggaggaatgaatttatctagcaagctggcccagctcacttgtcatggcaatctttgccatagctttcagtctttcaacacttcctacacagatacaggattatggggactgtatatggtttgtgaatcatccactgttgcagacatgctacatgttgttcaaaaagaatggatgcgactctgtacaagtgtcacagaaagtgaggttgcacgagccagaaatcttctgaaaacaaacatgttgttgcagcttgatggttcaactccaatttgtgaagatattggtaggcaaatgttatgctataatagaaggattcccatccctgagcttgaagcaagaattgatgctgtgaatgctgagacaattcgagaagtatgtaccaaatacatttataataggagtccagctattgctgctgttggtcccattaagcaaactaccagatttttaaacagatacgcagtaacatgtgttggcttcgtgattaaaaatgctcctaatcaagattgtttgaacacatgtatttataaaacagagctagag

SEQ ID NO: 165160 - DNA, 1561 bp, Homo Sapiens
  misc_feature (223)..(231): n is a, c, g, or t
ggagagcacaaggtgctgtgtgctctcaccatgtggtttggggagtctgagcacaatgtcagagaaatctttgacaaggacccgccaagctgccccctgtgtgctattctttgatgagctggattcgattgccaaggctcgtggaggtaacattggagatggtggtggggctgctgaccgagtcatcaaccagatcctgacagaaatggatggcatgtccacnnnnnnnnntgtgttcatcattggcgctaccaaccggcctgacatcattgatcctgccatcctcagacctggccgtcttgatcagctcatctacatcccacttcctgatgagaagtcccgtgttgccatcctcaaggctaacctgcgcaagtccccagttgccaaggatgtggacttggagttcctggctaaaatgactaatggcttctctggagctgacctgacagagatttgccagcgtgcttgcaagctggccatccgtgaatccatcgagagtgagattaggcgagaacgagagaggcagacaaacccatcagccatggaggtagaagaggatgatccagtgcctgagatccgtcgagatcactttgaagaagccatgcgctttgcgcgccgttctgtcagtgacaatgacattcggaagtatgagatgtttgcccagacccttcagcagagtcggggctttggcagcttcagattcccttcagggaaccagggtggagctggccccagtcagggcagtggaggcggcacaggtggcagtgtatacacagaagacaatgatgatgacctgtatggctaagtggtggtggccagcgtgcagtgagctggcctgcctggaccttgttccctgggggtgggggcgcttgcccaggagagggaccaggggtgcgcccacagcctgctccattctccagtctgaacagttcagctacagtctgactctggacagggggtttctgttgcaaaaatacaaaacaaaagcgataaaataaaagcgattttcatttggtaggcggagagtgaattaccaacagggaattgggccttgggcctatgccatttctgttgtagtttggggcagtgcaggggacctgtgtggggtgtgaaccaaggcactactgccacctgccacagtaaagcatctgcacttgactcaatgctgcccgagccctcccttccccctatccaacctgggtaggtgggtaggggccacagttgctggatgtttatatagagagtaggttgatttattttacatgcttttgagttaatgttggaaaactaatcacaagcagtttctaaaccaaaaaatgacatgttgtaaaaggacaataaacgttgggtcaaaatggagcctgagtcctgggccctgtgcctgcttcttttcccgggaacaggccttgggctacccaccactcccaaggcattcttccaaattgtgaaatcctggaagtaagattgcaccttcttcctctcctgatcaacatcgggtatgatgtctcctgttgcctcacccttttgtctgcagtatcactggatagtgactggtggaagg

SEQ ID NO: 165161 - DNA, 807 bp, Homo Sapiens
tatacccagatgtgttccagcgtatgggacccagttagaagcggtctgcagcaacttataaggcgttgaaagatgtttcctttagcctgaattatttttatgatagccataataggaatccaaataatgcagaaaacaatcatacaccagcctaaagcaactccccagtcagggtatggaattgcgccataattaggtctatgaaattgcaccaatgaccagataaatattgcaatcaaaaggataggcgtaattacaaaccagcaagctctccaccatagccagaatatccacctctttgctccaatcatcatttctgtatcctcaatgaatctgttccctccataaatccagatgattccaactagctccagtatagctgcaattaaaatgccccatccagcacagaagtggtcacatcagatgaacccagtaaattccagcctgagtcacacagacgagaccaaggagaaacaaaaccaagcagcagcccaaagttatgggaaccctcattttcttcatcactttgggaaataaatcttgaattgttgttgtgatcgtttcaatcgaagcaaactgagaatcgagacccaaagttaaaagcatgacaaaaaataatatggaccaaaatggaccacctgggagttgggctagagcctctggataggcaatgaatgccagatcaaaacctgattttacaacttgagaaacttcctttccagatatatgggccatgtgtcccaatatagaagaaatagcaaatccagcaaacacgctagtgagacagtttgtcaaacaaaccacaat

SEQ ID NO: 165162 - DNA, 994 bp, Homo Sapiens
ggtagcatggaaactgagatagcctcgtgggtgttggaaggcttttcagcaaggggaggtgaatgttattaggtccaacctgaaaggtgcatatttcaggcagatagataggtgtttggcatcttataactgctcactttccttttccttagtaatctgaaagtaattcactgtactgaatagttaatggttcccttaatagactcttgtccttggaaaaataaaatgaaatgactggggttctattagtaactgaaaaattgtcaacaattaaaactctaaaacctactcatgagaaaataaagctcttttgtttaggaataataaaagccgacttaatgacttctgaaagaagtaagtgtccctgtaaaggccaggtgaaactgccattctttaacctgttactcggtgtacttgactgcggaaagaacccagaaacagaacaggccaggcccaaaggatagaagtgtaggtttcctctggaagcttactgttctgctaaatgacctaaaaattgctagaacactccagataagtcaatttctgctataaaaatcattgcagaaagagattatttttagttgtctttatttaaaaaatgaaacacattagttacaaaaaccgttgctccaaatagataccgtgtatcttacaaatgttttttgcttggttttgagtgtttactgtagaaattttcaatatcataaataaatgattatttctttctcagaaagctgatttttgtagtgtagtatttacaaataccgtaagtgaaaaatgatagtttataaatttgtaccatttaggaaaaaatgttttatgtagtgttgtttgtgtaacagcaaataaaaccatttaagattatagtttttacaagggtggtaaaacctttaaaacagagcataatgtgcatcgtatgcctttctgacattagcatgcaaaaacaaagctatttgttaaaatagacttatttttgctccaactaagtaaacat

SEQ ID NO: 165163 - DNA, 1007 bp, Homo Sapiens
  misc_feature (829)..(829): n is a, c, g, or t
atcgtggatttcctcatcaccgcgggtgccaatgtcaactcccccgacagccacggctggacacccttgcactgcgcggcgtcgtgcaacgacacagtcatctgcatggcgctggtgcagcacggcgctgcaatcttcgccaccacgctcagcggacggcgccaccgccttcgagaagtgcgacccttaccgcgagggttatgctgactgcgccacctacctggcagacgtcgagcagagtatggggctgatgaacagcggggcagtgtacgctctctgggactacagcgccgagttcggggacgagctgtccttccgcgagggcgagtcggtcaccgtgctgcggagggacgggccggaggagaccgactggtggtgggccgcgctgcacggccaggagggctacgtgccgcggaactacttcgggctgttccccagggtgaagcctcaaaggagtaaagtctagcaggatagaaggaggtttctgaggctgacagaaacaagcattcctgccttccctccagacctctccctctgtttttttgctgcctttatcttgcacccctcaccctgctggtggtggtccttgccaccggttctctgttctcctggaagtccagggaagaaggagggccccagccttaaatttagtaatctgccttagccttgggaggtctgggaagggctggaaatcactggggacaggaaaccacttccttttgccaaatcagatcccgtccaaagtgcctcccatgcctaccaccatcatcacatcccccagcaagccagccacctgcccagccggggcctggggatgggcccaccccanccactgggatatttcctggggagtccactggctggacacccattctctccccagcaagtcttggggggtctggggtgggggaaaacaattgggtcctcctaacccagagaatccctgttgcccccaacccttcttccccccaaatttaaagttgccccttttccccaccagggctttt

SEQ ID NO: 165164 - DNA, 782 bp, Homo Sapiens
  misc_feature (763)..(763): n is a, c, g, or t
gctgatgaacagcggggcagtgtacgctctctgggactacagcgccgagttcggggacgagctgtccttccgcgagggcgagtcggtcaccgtgctgcggagggacgggccggaggagaccgactggtggtgggccgcgctgcacggccaggagggctacgtgccgcggaactacttcgggctgttccccagggtgaagcctcaaaggagtaaagtctagcaggatagaaggaggtttctgaggctgacagaaacaagcattcctgccttccctccagacctctccctctgttttttgctgcctttatctgcacccctcaccctgctggtggtggtccttgccaccggttctctgttctcctggaagtccagggaagaaggagggccccagccttaaatttagtaatctgccttagccttgggaggtctgggaagggctggaaatcactggggacaggaaaccacttccttttgccaaatcagatcccgtccaaagtgcctcccatgcctaccaccatcatcacatcccccagcaagccagccacctgcccagccgggcctgggatgggccaccacaccactggatattcctgggagtcactgctgacaccatctctcccagcagtcttggggtctgggtgggaaacattggtctctaccaggatccctgccccacctctccccaattaagtgccttcacacagcactggtttaatgtttataaacaaaatagagaaactttccttataaataaaagtagttnaacacagaaattgaaaaaa

SEQ ID NO: 165165 - DNA, 461 bp, Homo Sapiens
  misc_feature (29)..(29): n is a, c, g, or t
  misc_feature (66)..(66): n is a, c, g, or t
  misc_feature (117)..(117): n is a, c, g, or t
aaccccttaaccctgctgggtggtggccnttgccaacgggttctctgttccccccggaaaaccccnggaaaaaggaggccccaagccttaaatttagtaatctgccttagccttggnaggtctgggaagggctggaaatcactgggaacaggaaaccacttccttttgcccaaatcagatcccgtccaaagtgcctcccatgcctaccaccatcatcacatcccccagcaagccagccagcctgccagccgggcctgggatgggccaccacaccactggatatttcctgggagtcactgctgacaccatctctcccagcagtcttggggtctgggtgggaaacattggtctctaccaggatccctgccccacctctccccaattaagtgccttcacacagcactggtttaatgtttataaacaaaatagagaaactttccttataaataaaagtagtttgc

SEQ ID NO: 165166 - DNA, 992 bp, Homo Sapiens
gagctcggcacccgtacccaggttgtgctggtcccaggttgtgctggtcccaggttgtgctggtcccaggttgtgctggtcccaggttgtgctggtcccaggttgtgctggtcccaggttgtgctggtcccaggttgtgctggtcccaggttgtgctggtcccaggttgtgctggtcccaggttgtgctggtcccaggttgtgctggtcccaggttgtgctggtcccaggttgtgctggtcccaggttgtgctggtcccaggttgtgctggtcccaggttgtgctggcaggtctgcagaatgcgggctgccttcagcaacaacaggggctccactttagtttggtccaagttccagagggaattgaaaatcttatgcagatcactggtgtttttcagaatttgctcgatgaaggtgtcccactccgtgctcagttcgtccagagaacagttctcataagactagggaaacaggtccattgtaaaaattaaagaatccaactagctgatccagaaaccgcttgcagctgacatcagggagctccacagcacagcccagcacccaaaggtaatctccatcaacttttatggcaaacttcagttttctcagacgaacaagagtaggaggagagtcagaaatgtcagaaacacagcggacaactccagcaatctgtccacaaagcaactcctgttggtctaacagggtctgggaaggataaaagtaacaaatgccagctcttgttggatcgccttcttcctttaccttggaaccatcataaagaaaaaaataattccacctggcaagagaacagagtggagccatgtttcctttaatccagtgatcacggcatttaaaacacagcttcctgtttcccagcccgaggagggcttattactgtgtttgaaagccttcaggtggccccagagaataaagaaccccagtagctacaaattagataaaaccattctgtaagcgcaggaaattcaaactccc

SEQ ID NO: 165167 - DNA, 960 bp, Homo Sapiens
ggggggagccggcggcggagtccgggacgtggagacccggggtcccggcagccgggcggcccgcgggcccagggtggggatgcaccgccgcggggtgggagctggcgccatcgccaagaagaaacttgcagaggccaagtataaggagcgagggacggtcttggctgaggaccagctagcccagatgtcaaagcagttggacatgttcaagaccaacctggaggaatttgccagcaaacacaagcaggagatccggaagaatcctgagttccgtgtgcagttccaggacatgtgtgcaaccattggcgtggatccgctggcctctggaaaaggattttggtctgagatgctgggcgtgggggacttctattacgaactaggtgtccaaattatcgaagtgtgcctggcgctgaagcatcggaatggaggtctgataactttggaggaactacatcaacaggtgttgaagggaaggggcaagttcgcccaggatgtcagtcaagatgacctgatcagagccatcaagaaactaaaggcacttggcactggcttcggcatcatccctgtgggcggcacttacctcattcagtctgttccagctgagctcaatatggatcacaccgtggtgctgcagctggcagagaagaatggctacgtgactgtcagtgagatcaaagccagtcttaaatgggagaccgagcgagcgcggcaagtgctggaacacctgctaaaggaagggttggcgtggctggacttacaggccccaggggaggcccactactggctgccagctctcttcactgacctctactcccaggagattacagctgaggaggccagagaagccctcccctgactgcatgtggaagggcacacagcagcaggcagggaggaggcggaggtggcaaataaacctgggcaattttgtttatacaaaaattaaatactacacaaaagggg

SEQ ID NO: 165168 - DNA, 668 bp, Homo Sapiens
gagatacatgctttcagtgggatccccagaaacgaccaacagctagtcagtgcacttcgatatccttacttccaagttggacacccactagccagctacaacctgggacccggcacaacctgggatgtgctggtcccagggttcttggtgaggcgtagaaccacatagacgatgaatgaaaaggcatggaagcgttggtgcacacaaatcctctctgccctatagctacctgcactcctgtgacccccccatcatccatgggaacctgacctgtgacaccatcttcatccagcacaacggactcatcaagattggctctgtggctcctgacactatcaacaatcatgtgaagacttgtcgagaagagcagaagaatctacacttctttgcaccagagtatggagaagtcactaatgtgacaacagcagtggacatctactcctttggcatgtgtgcactggagatggccagtgctggagattcagggcaatggagagtcctcatatgtgccacaggaagccatcagcagtgccatccagcttctagaagacccattacagagcgagttcattcaaaagtccctgcagtctgagcactgctcgcagaccttcaccccgggaacctctgttccaccacagcattgtttgaactgccctcgctctacatcc

SEQ ID NO: 165169 - DNA, 501 bp, Homo Sapiens
ggtgacatcacctgtcgtgcccccctctgtctagactccgacacctgaaccagctgaggtggagactcgcaaggtggtgctgatgcagtgcaacattgagtcggtggaggagggagtcaaacaccacctgacacttctgctgaagttggaggacaaactgaaccggcacctgagctgtgacctgatgccaaatgagaatatccccgagttggcggctgagctggtgcagctgggcttcattagtgaggctgaccagagccggttgacttctctgctagaagagaccttgaacaagttcaattttgccaggaacagtaccctcaactcagccgctgtcaccgtctcctcttagagctcactcgggccaggccctgatctgcgctgtggctgtccctggacgtgctgcagccctcctgtcccttccccccagtcagtattaccctgtgaagccccttccctcctttattattcaggagggctgggggggctccctggttctga

SEQ ID NO: 165170 - DNA, 1309 bp, Homo Sapiens
  misc_feature (1226)..(1226): n is a, c, g, or t
  misc_feature (1253)..(1253): n is a, c, g, or t
  misc_feature (1274)..(1274): n is a, c, g, or t
  misc_feature (1284)..(1284): n is a, c, g, or t
gagctcggtaccctccagactgccttcagactcatctccacaacctcagctgcttccccagaggaagaagaagaaagtgaagatgagtctgagattttggaagagtcgccctgtgggcgctggcagaagaggcgagaagaggtgaatcaacggaatgtaccaggtattgacagtgcatacctggccatggatacagaggaaggtgtagaggttgtgtggaatgaggtacagttctctgaacgcaagaactacaagctgcaggaggaaaaggttcgtgctgtgtttgataatctgattcaattggagcatcttaacattgttaagtttcacaaatattgggctgacattaaagagaacaaggccagggtcatttttatcacagaatacatgtcatctgggagtctgaagcaatttctgaagaagaccaaaaagaaccacaagacgatgaatgaaaaggcatggaagcgttggtgcacacaaatcctctctgccctaagctacctgcactcctgtgacccccccatcatccatgggaacctgacctgtgacaccatcttcatccagcacaacggactcatcaagattggctctgtggctcctgacactatcacaatcatgtgaagacttgtcgagaagagcagaagaatcgacacttctttacaccaacacatgatcccagagaacgctctagaggagatcaccaaaaacatggatactagtgccgtactggctgaaatccctgcaggaccaggaagagaaccagttcagactttgtactctcagtcaccagctctggaattagataaattccttgaagatgtcaggaatgggatctatcctctgacagcctttgggctgcctcggccccagcagccacagcaggaggaggtgacatcacctgtcgtgcccccctctgtcaagactccgacacctgaaccagctgaggtggagactcgcaaggtggtgctgatgcagtgcaacattgagtcggtggaggagggagtcaaacaccacctgacacttctgctgaagttggaggacaaactgaaccggcacctgagctgtgacctgatgccaaatgagaatatccccgagttggcggctgagctggtgcagctgggcttcattagtgaggctgaccagagccggttgacttctctgctagaagagaccttgaaacaagttcaattttgccagggaacagttacccttcaacttcaggccgntgttcaccgttttcctctttaggaggntcacttggggccagggcctgnattttgcggntgttggctgttccctgggacgttgg

SEQ ID NO: 165171 - DNA, 248 bp, Homo Sapiens
ccagtgtgtgctgtttaattcgacctaacatctgtgatacatgtatttttggctaccaattaactattctgaataagaataagagcagtatacttaacagctaatctcacacaaaggatgtaactaatcagtgatatttgacgaattatggtagggtctattatattcagtcaacaacaaatttagagaaacatacaaaggtttttaaaaatatgggtggtgtcacacagatcaacaacactgtgcct

SEQ ID NO: 165172 - DNA, 1961 bp, Homo Sapiens
  misc_feature (1880)..(1882): n is a, c, g, or t
  misc_feature (1887)..(1889): n is a, c, g, or t
  misc_feature (1891)..(1892): n is a, c, g, or t
  misc_feature (1895)..(1895): n is a, c, g, or t
  misc_feature (1899)..(1903): n is a, c, g, or t
ctgggtgcgggtgccgcgtggcggccgcagcgctgaggggtggagccggtgccatctgtgggggctttgggccaggggtctccggacagcatgagcgtgggcttcatcggcgctggccagctggcttttgccctggccaagggcttcacagcagcaggcgtcttggctgcccacaagataatggctagctccccagacatggacctggccacagtttctgctctcaggaagatgggggtgaagttgacaccccacaacaaggagacggtgcagcacagtgatgtgctcttcctggctgtgaagccacacatcatccccttcatcctggatgaaataggcgccgacattgaggacagacacattgtggtgtcctgcgcggccggcgtcaccatcagctccattgagaagaagctgtcagcgtttcggccagcccccagggtcatccgctgcatgaccaacactccagtcgtggtgcgggagggggccaccgtgtatgccacaggcacgcacgcccaggtggaggacgggaggctcatggagcagctgctgagcagcgtgggcttctgcacggaggtggaagaggacctgattgatgccgtcacggggctcagtggcagcggccccgcctacgcattcacagccctggatgccctggctgatggggggtgtgaagatgggacttccaaggcgcctggcagtccgcctcggggcccaggccctcctgggggctgccaagatgctgctgcactcagaacagcacccaggccagctcaaggacaacgtcagctctcctggtggggccaccatccatgccttgcatgtgctggagagtgggggcttccgctccctgctcatcaacgctgtggaggcctcctgcatccgcacacgggagctgcagtccatggctgaccaggagcaggtgtcaccagccgccatcaagaagaccatcctggacaaggtgaagctggactcccctgcagggaccgctctgtcgccttctggccacaccaagctgctcccccgcagcctggccccagcgggcaaggattgacacgtcctgcctgaccaccatcctgccaccaccttctcttctcttgtcactagggggactagggggtccccaaagtggcccactttctgtggctctgatcagcgcaggggccagccagggacatagccagggaggggccacatcacttcccactggaaatctctgtggtctgcaagtgcttcccagcccagaacaggggtggattccccaacctcaacctcctttcttctctgctcccaaaccatgtcaggaccaccttcctctagagctcgggagcccggagggtcttcacccactcctactccagtatcagctggcacgggctccttcctgagagcaaaggtcaaggaccccctctgtgaaggctcagcaagaggtgggatcccacgccccctcccggcccctccctgccctccattcagggagaaacctctccttcccgtgtgagaagggccagagggtccaggcatcccaagtccagcgtgaagggccacagcccctcttggctgccaagcacgcagatcccatggacatttggggaaagggctccttgggctgctggtgaacttctgtggccaccacctcctgctcctgacctccctgggagggtgctatcagttctgtcctggccctttcagttttataagttggtttccagcccccagtgtcctgacttctgtctgccacatgaggagggaggccctgcctgtgtgggagggtggttactgtgggtggaatagtggaggccttcaactgattagacaaggcccccccacatcttgggagggcatctgccttactgattaaaatgtcaatgtaatccaaaaannnaaaannnannaanaaannnnnccttggtcggccgccttcggccctcaaaaaaactttctaaaacatttcgttttgccgg

SEQ ID NO: 165173 - DNA, 1170 bp, Homo Sapiens
  misc_feature (1010)..(1010): n is a, c, g, or t
  misc_feature (1016)..(1016): n is a, c, g, or t
  misc_feature (1081)..(1081): n is a, c, g, or t
  misc_feature (1094)..(1094): n is a, c, g, or t
  misc_feature (1116)..(1116): n is a, c, g, or t
  misc_feature (1123)..(1123): n is a, c, g, or t
  misc_feature (1130)..(1130): n is a, c, g, or t
aggctgtaccgcccggatttcccgggatatcgatccgccgggggagaatagggttgcaccatcccagaagctgctgttagctcgccggtcctcggcacgccgcccgttcgcccctgcgctgtccgcccttcccctagcgttacttccggcccctcgctgagggggttcgtgcggctcccaggaggcgtgaaccgcggaccatgagcgtgggcttcatcggggccggccagctggcctatgctctggcgcggggcttcacggccgcaggcatcctgtcggctcacaagataatagccagctccccagaaatgaacctgcccacggtgtccgcgctcaggaagatgggtgtgaacctgacacgcagcaacaaggagacggtgaagcacagcgacgtcctgtttctggctgtgaagccacatatcatccccttcatcctggatgagattggggccgacgtgcaagccagacacatcgtggtctcctgtgcggctggtgtcaccatcagctctgtggagaagaagctgatggcattccagccagcccccaaagtgattcgctgcatgaccaacacacctgtggtagtgcaggaaggcgctacagtgtacgccacgggcacccatgccctggtggaggatgggcagctcctggagcagctcatgagcagcgtgggcttctgcactgaggtggaagaggacctcaatcgatgccgtcacggggctcagtggcagcgggcctgcctatgcattcatggctctggacgcattggctgatggtggggtgaagatgggtttgccacggcgcctggcaatccaactcggggcccaggctttgctgggagctgccaagatgctgctggactcggagcagcatccatgccagcttaaggacaatgtctgctccactgggggacccaccatccacgccctgcactttctagagagtgggggcttccgctctcttgctcatcaatgcagttgaaggcctcctgtatccgaacaagagagctacanttcatnggcccaccaagaaaagatcttcccaagttgcccttaaggaaggaaccttttttaggacagagttnaaggttggaattnccccaaaaatttttcaaaattnaaccccntttccancccaagggaaggttctttaaaaaggaaggcttgggccttg

SEQ ID NO: 165174 - DNA, 395 bp, Homo Sapiens
  misc_feature (45)..(45): n is a, c, g, or t
  misc_feature (151)..(201): n is a, c, g, or t
cttaccaacccccttcaaaaacaaacttcccaaacatgggaacangaaaggaaacctcccattccttggtcctgaaacagatttaaggaggttttatcaacaaggacctgaaaacttccctaagcatgctttctccttgcacagctgaggnnnnnnnnnnnnnnnnnnnnnnnnnnnnnnnnnnnnnnnnnnnnnnnnnnntcaactaagggctctgaatcacagaggggacagatgctgccttagtccttcttgcctcccagggccaggcttcttgtgaggagcttccctgggctggagggggtcagtgtggagactgtgggggattccagcttcactctgtctaagagggtcttcttaagggcagctggggagatcttttcttggtcggccat

SEQ ID NO: 165175 - DNA, 1405 bp, Homo Sapiens
gctgcagccgcagtgactctagaggtccccaagctttaccgcatagtaagtgctacaagaacacccattggatcttttttaggcagcctttccttgctgccagccactaagcttggttccattgcaattcagggagccattgaaaaggcagggattccaaaagaagaagtgaaagaagcatacatgggtaatgttctacaaggaggtgaaggacaagctcctacaaggcaggcagtattgggtgcaggcttacctatttctactccatgtaccaccataaacaaagtttgtgcttcaggaatgaaagccatcatgatggcctctcaaagtcttatgtgtggacatcaggatgtgatggtggcaggtgggatggagagcatgtcaaatgttccatatgtaatgaacagaggatcaacaccatatggtggggtaaagcttgaagatttgattgtaaaagacgggctaactgatgtctacaataaaattcatatgggcacctgtgctgagaatacagcaaagaagctgaatattgcacgaaatgaacaggacgcttatgctattaattcttataccagaagtaaagcagcatgggaagctgggaaatttggaaatgaagttattcctgtcacagttacagtaaaaggtcaaccagatgtagtggtgaaagaagatgaagaatataaacgtgttgattttagcaaagttccaaagctgaagacagttttccagaaagaaaatggcacagtaacagctgccaatgccagtacactgaatgatggagcagctgctctggttctcatgacggcagatgcagcaaagaggctcaatgttacaccactggcaagaatagtagcatttgctgacgctgctgtagaacctattgattttccaattgctcctgtatacgctgcatctatggttcttaaagatgtgggattgaaaaaagaagatattgcaatgtgggaagtaaatgaagcctttagtctggttgtactagcaaacattaaaatgttggagattgatccccaaaaagtgaatatcaatggagaagctgtttctctgggacatccaattgggatgtctggagccaggattgttggtcatttgactcatgccttgaagcaaggagaatacggtcttgccagtatttgcaatggaggaggaggtgcttctgccatgctaattcagaagctgtagacaacctctgctatttaaggagacaaccctatgtgaccagaaggcctgctgtaatcagtgtgactactgtgggtcagcttatattcagataagctgtttcattttttattattttctatgttaacttttaaaaatcaaaatgatgaaatcccaaaacattttgaaattaaaaataaatttcttcttctgcttttttcttggcaaaaaa

SEQ ID NO: 165176 - DNA, 365 bp, Homo Sapiens
tgtgctgaaaggcaatacatggataacgcgcacgccccactcccacttttatttagcaagagtaaatgcagcctaatgacagggcgtgggaagacctcctgctcaccagtgtgggcagagtgtagcgtggcctgggctcctaatacaggtaaattgtctccaaaggactagtaaaggtgactgggtcatcctcctgccccagggacactgattagagaaaatccgtctgtgctggcaatacggcagtgctggacactcggaattcccttgaaggcaaaagcaaggaacagagcgtgattaggtactgacacctgccaagtgctgggctctttcagtttacagatgaggaactgagctcctcctca

SEQ ID NO: 165177 - DNA, 293 bp, Homo Sapiens
tgctgggtcccagttgtgctgtgagctcaactaccggctgcccagtgggaaccacatgaaggagtccagggaagtcaccgtccctgttttctacccgacagaaaaagtgtggctggaagtggagcccgtgggaatgctgaaggaaggggaccgcgtggaaatcaggtgtttggctgatggcaaccctccaccacacttcagcaccagcaagcagaaccccggcaccagggaggcagaggaagagacaaccaacgacaacggggtcctggtgctggagcctgcccggaaggaac

SEQ ID NO: 165178 - DNA, 392 bp, Homo Sapiens
tttctcaggcagatggaaatgtaggtttgatctttggaaagaggttaagagatttacatttataacttaagcatagataaggaaaaaatgaaatgtgagggaaaaaattgttcgacctgaataggcagatggaaagtagtggttctgagcaaaatttcagacagtttcatcaagtcattgatgttctaaaaaatacatactgttataatttggggctttctgttctttacctgaaacataactaaattctgctttttctttatcaacattttcccactgcacaatctattcacagcttgatgacttagtccagtcacccctgtaccctgttgcacacccctacctgataacaactctacactgatcatagcttttcctgttatagcttttcc

SEQ ID NO: 165179 - DNA, 193 bp, Homo Sapiens
gcagggagaggggtagtaaaggcccctctaaaacactggctggctagggaaaggctcagcccgggagaaggtggtgggatggaggcatgtgtgcagtggaaagagcactggacttggagaccaaacagaagccgctgtaagagagtcacttgtctatcatttccacccttatgtctcagcacaacatagtatc

SEQ ID NO: 165180 - DNA, 392 bp, Homo Sapiens
gggggagatgctgtacaggttggcaatcttctcaatcagctccaaggtggtcagctcttccaggaagatggcgtggtacacagacaggttgctgtctccactgccgtcccgcttctgctgcaggagcactcgattctgctccagctcctgacagacataaatggtcatctttggcctcacattccggcctttgatggcgttgaagagccggatcccatctgcgggaccacagatctggaccaaatcatctcgggacatcttcagcaagtcagcacctgagaagctggcaaagagccggcagaacttccaagatgaatcctgttttgtcctcagcacaattaaagctgagagcaatgacggctaccacatcatcctgaaatgtggactctgag

SEQ ID NO: 165181 - DNA, 682 bp, Homo Sapiens
cctctaccatagaccctgggactccaggttgtgctggggatgcatccaaagtggttgtctgtagacagagttggaaaccctcaccaactggcctcttcaccttccacattatcccgctgccaccggctgccctgtctcactgcagattcaggaccagcttgggctgcgtgcgttcatgccttgccagtcagaccgaggatgtagttgttgctgccgtcgtcccaccacctcagggaccagagggctaggttggcactgcggccctcaccaggtcctgggctcggacccaactcctggacctttccagcctgtatcaggctgtggccacacgagaggacagcgcgagctcaggagagatttcgtgacaatgtacgcctttccctcagaattcagggaagagactgtcgcctgccttcctccgttgttgcgtgagaacccgtgtgccccttcccaccatatccaccctcgctccatctttgaactcaaacacgaggaactaactgcaccctggtcctctccccagtccccagttcaccctccatccctcaccttcctccactctaagggatatcaacactgcccagcacaggggccctgaatttatgtggtttttatacattttttaataagatgcactttatgtcattttttaataaagtctgaagaattactgtttaaaaaa

SEQ ID NO: 165182 - DNA, 514 bp, Homo Sapiens
ttgtgctgggcaagtaagccagcattgaacgtagatttttctaagacctgttaaagcaagggatctttgtttcttaaattcttctgatataaaaatgcttcattgatcttctttgaaacactgtcctctcatttttaggtaacctaaagtttttctcaataaaatatgagagcatttgttttatgaatgagtactgagaaacaagatgaagtgaattgttaatcattcagcacatttgtgtcacagttagattttggagtcacccctcaaagttataatgatctgtaattagcttgaagaaattgtagattatcaagaactgattagaatctacttgtttttgcttcttttggaaatgttgggtatattctggtccccttttacacaaagtttttgtgactttttaaaatactcttccacattagcatagtgctatccttctgatcatgtttgttatcaagctgatagaggatagtagttcgttcagcatcacagctcctgggatatactattc

SEQ ID NO: 165183 - DNA, 420 bp, Homo Sapiens
agcaacagtataacctgtgataccgttactactggcatgtattagtaacaatgatcatgcatgtaggtggagtcttatgacttcgctaggccctatgccatttgtagagatggatgccctgtcaccaagatgtggcttaaatcacactgatgaataaagtttacacttcgaaggctctcatttgcagatgtgactaagcggattcacatgatcctgtgcaacctaggctaccaccaagtagcagagaacaggaagagacaaagaaaaattagacaacaatgtcaaaatgttaagcccctgctgtcttgagtggctggaggcaccattagagacttggagcctactccaggggccaggtatatagtcaacaaacttcttatcctgtacagttatctctcatagatgctggcttcatatatg

SEQ ID NO: 165184 - DNA, 991 bp, Homo Sapiens
  misc_feature (792)..(792): n is a, c, g, or t
  misc_feature (920)..(920): n is a, c, g, or t
tgcatagaaggggaacgaaagatggcggcggaaacgctgctgtccagtttgttaggactgctgcttctgggactcctgttacccgcaagtctgaccggcggtgtcgggagcctgaacctggaggagctgagtgagatgcgttatgggatcgagatcctgccgttgcctgtcatgggagggcagagccaatcttcggacgtggtgattgtctcctctaagtacaaacagcgctatgagtgtcgcctgccagctggagctattcacttccagcgtgaaagggaggaggaaacacctgcttaccaagggcctgggatccctgagttgttgagcccaatgagagatgctccctgcttgctgaagacaaaggactggtggacatatgaattctgttatggacgccacatccagcaataccacatggaagattcagagatcaaaggtgaagtcctctatctcggctactaccaatcagccttcgactgggatgatgaaacagccaaggcctccaagcagcatcgtcttaaacgctaccacagccagacctatggcaatgggtccaagtgcgaccttaatgggaggccccgggaggccgaggttcggttcctctgtgacgagggtgcaggtatctctggggactacatcgatcgcgtggacgagcccttgtcctgctcttatgtgctgaccattcgcactcctcggctctgcccccaccctctcctccggaccccacccagtgcttgcaccgcaagccatcctctgtcacccttccctacagcctgaggagtacatggncctacgttcagaggcaagccgactcaaagcagtatggagataaaatcatagaggaggctgcagatctaggcccccaaagtgtgggagtgagaccaagtctgggggtggcacccccaaaaagatggcanggtgcgagcccccgaccaagggatggacggttaagggacttcagaatttccttgggaagaatgcctttaaa

SEQ ID NO: 165185 - DNA, 1298 bp, Homo Sapiens
  misc_feature (1223)..(1238): n is a, c, g, or t
  misc_feature (1240)..(1240): n is a, c, g, or t
  misc_feature (1242)..(1245): n is a, c, g, or t
  misc_feature (1247)..(1253): n is a, c, g, or t
ggggctaaccaggccagtgacagaaatggattcgaaataccagtgtgtgaagctgaatgatggtcacttcatgcctgtcctgggatttggcacctatgcgcctgcagaggttcctaaaagtaaagctctagaggccgtcaaattggcaatagaagccgggttccaccatattgattctgcacatgtttacaataatgaggagcaggttggactggccatccgaagcaagattgcagatggcagtgtgaagagagaagacatattctacacttcaaagctttggagcaattcccatcgaccagagttggtccgaccagccttggaaaggtcactgaaaaatcttcaattggactatgttgacctctatcttattcattttccagtgtctgtaaagccaggtgaggaagtgatcccaaaagatgaaaatggaaaaatactatttgacacagtggatctctgtgccacatgggaggccatggagaagtgtaaagatgcaggattggccaagtccatcggggtgtccaacttcaaccgcaggcagctggagatgatcctcaacaagccagggctcaagtacaagcctgtctgcaaccaggtggaatgtcatccttacttcaaccagagaaaactgctggatttctgcaagtcaaaagacattgttctggttgcctatagtgctctgggatcccaccgagaagaaccatgggtggacccgaactccccggtgctcttggaggacccagtcctttgtgccttggcaaaaaagcacaagcgaaccccagccctgattgccctgcgctaccagctacagcgtggggttgtggtcctggccaagagctacaatgagcagcgcatcagacagaacgtgcaggtgtttgaattccagttgacttcagaggagatgaaagccatagatggcctaaacagaaatgtgcgatatttgacccttgatatttttgctggcccccctaattatccattttctgatgaatattaacatggagggcattgcatgaggtctgccagaaggccctgcgtgtggatggtgacacagaggatggctctatgctggtgactggacacatcgcctctggttaaatctctcctgcttggtgatttcagcaagctacagcaaagcccattggccagaaaagaaagacaataattttgttttttcattttgaaaaaattaaatgctcttctcctaaagattcttcaccccnnnnnnnnnnnnnnnnanannnnannnnnnncttggtcgggccggcctccggcccctccaagaagcttttcctaaa

SEQ ID NO: 165186 - DNA, 1232 bp, Homo Sapiens
ggggcccattgtttttgtaatctctgaggagaagcagcagcaaacatttgctagtcagacaagtgacagggaatggattccaaacaccagtgtgtaaagctaaatgatggccacttcatgcctgtattgggatttggcacctatgcacctccagaggttccaagaagtaaagctttggaggtcacaaaattagcaatagaagctgggttccgccatatagattctgctcatttatacaataatgaggagcaggttggactggccatccgaagcaagattgcagatggcagtgtgaagagagaagacatattctacacttcaaagctttggtccacttttcatcgaccagagttggtccgaccagccttggaaaactcactgaaaaaagctcaattggactatgttgacctctatcttattcattctccaatgtctctaaagccaggtgaggaactttcaccaacagatgaaaatggaaaagtaatatttgacatagtggatctctgtaccacctgggaggccatggagaagtgtaaggatgcaggattggccaagtccattggggtgtcaaacttcaaccgcaggcagctggagatgatcctcaacaagccaggactcaagtacaagcctgtctgcaaccaggtagaatgtcatccgtatttcaaccggagtaaattgctagatttctgcaagtcgaaagatattgttctggttgcctatagtgctctgggatctcaacgagacaaacgatgggtggacccgaactccccggtgctcttggaggacccagtcctttgtgccttggcaaaaaagcacaagcgaaccccagccctgattgccctgcgctaccagctgcagcgtggggttgtggtcctggccaagagctacaatgagcagcgcatcagacagaacgtgcaggtttttgagttccagttgactgcagaggacatgaaagccatagatggcctagacagaaatctccactattttaacagtgatagttttgctagccaccctaattatccatattcagatgaatattaacatggagagctttgcctgatgtctaccagaagccctgtgtgtggatggtgacgcagaggacgtctctatgccggtgactggacatatcacctctacttaaatccgtcctgtttagcgacttcagtcaactacagctgagtccataggccagaaagacaataaatttttatcatttttgaaattaaccc

SEQ ID NO: 165187 - DNA, 477 bp, Homo Sapiens
  misc_feature (434)..(434): n is a, c, g, or t
  misc_feature (455)..(455): n is a, c, g, or t
  misc_feature (463)..(463): n is a, c, g, or t
ggcttccgccatattgattctgctcatttatacaataatgaggagcaggttggactggccatccgaagcaagattgcagatggcagtgtgaagagagaagacatattctacacttcaaagctttggtgcaattcccatcgaccagagttggtccgaccagccttggaaaggtcactgaaaaatcttcaattggactatgttgacctctaccttattcattttccagtgtctgtaaagccaggtgaggaagtgatcccaaaagatgaaaatggaaaaatactatttgacacagtggatctctgtgccacgtggggaggccgtgggagaagtgtaaagatgcaggattgggccaagtccatcggggtgttccaactttcaaccgcaggcagctgggagatgattcctcaacaagccggggttcaagttacaaggcntttttgcaaccgggtggaatnttcatccnttatttcaacccgg

SEQ ID NO: 165188 - DNA, 1227 bp, Homo Sapiens
  misc_feature (776)..(776): n is a, c, g, or t
ggggggacggcggcagtgcgagaaagccgaagatggcggtccccgcggcgctgatcctacgggagagccccagcatgaagaaagcagtgtcactgataaatgcaatagatacaggaagatttccacggttgctcactcggattcttcaaaaacttcacctgaaggctgagagcagtttcagtgaagaagaggaagaaaaacttcaagcggcattttctctagagaaacaagatcttcacctagttcttgaaacaatatcatttattttagaacaggcagtgtatcacaatgtgaagccagcagctttgcagcagcaattagagaacattcatcttagacaagacaaagctgaagcatttgtcaatacttggtcttctatgggtcaagaaacagttgaaaagttccggcagagaattctggctccctgtaagctagagactgttggatggcagcttaaccttcagatggctcactctgctcaagcaaaactaaaatctcctcaagctgtgttacaactcggagtgaacaatgaagattcaaagagcctggagaaagttcttgtggaattcagtcacaaggagttgtttgatttctataacaagctagagactatacaagcacagctggattcccttacatgatgttttcgaagactgtttttttcatcacgctcctgccacctcattattttgcattgaagatacattgcccaggttgtggtttctggaaggattcagtgacttgcctttctgtaaattatatgggcttatcacttncttagacaaataacaaccaatagagatcattgttaagaatactgaggttctaatatactttctttagttctgtgagccaacagtaattattaagaacactttccctttaaaggaaacaaaagtgaataccatattgtttttactgtcatagtgttgctttcttgcctgtcctgcttagtttttacttgctggatgataccataatgtatcaaggagcgtccatggatacaagataagatgtgtacccttagtagaatacagaagctttgggtaattacattgaataaaaatttaagaaaaatagcccttaatacaaatcaaaataccactaatgggcatttttttattttggaatatgaatgaagttatattttttggctttcgggaaaataattattgggggaaagggaaaatggttaaaaattaagtgtgaagttaagttattggcgtt

SEQ ID NO: 165189 - DNA, 891 bp, Homo Sapiens
gttgatctagaggatcccgggacactctgagccggtccagtgagtgagtgattgcagtggtggtcactgtaaaaagaagttagggccacaaaacatcagagaatacctaggtatcaaggtgctaggcctcataaaaacatccatactacctaaaagtataccttcttcctttgaatttcagaatcaattctgaaaatttagtgcacgaagaacactggctatatagcattcagagaaatggttctgaaaccagttttatgcaaacccctttctttttaaaatggtatggatggttgatacaaagagaaagatgtcccaagccgacctgtctggtgctggggatagccagggagctgaatgaccagggtctggtaatgcttctgggcatcggtgaactgagacagtattttccgcttgtcatcatctccaaacatctctgagccttggctatttctgatgaactcttggtaatgtaactcaaggtcggctatcgtcttcatgtaatcttcctgccgcattgttttcagcttggcgatagtcatggccctgatcttctctatgtcaatcatgcagtagtgccaggacaccaggctcttcatgttgatgtagagctggttccacagagccaagatggcttcgtagtactgcatcaatcttgcaagtatagctccgcggacagtgggttcgtagaaggcatcatcagccctacagagggaacaagcatgtcaacgcctcccgggctcgtcacgtaacacttgctgcgctcgttgatgtccttcatggatacactcatcctccttatgcacgattttctgatcttgtttgtagtcacagagagctctgagaataatgggtttattgcttctgtagtttcggattccgcgtgtgcac

SEQ ID NO: 165190 - DNA, 887 bp, Homo Sapiens
gggggtccagtacaacatgaagatagtgatccggggagacaggaacacgggcaagacagcgctgtggcaccgcctgcaggcccgaccgttcgtggaggagtacatccccacacaggagatccaggtcaccagcatccactggagctacaagaccacggatgacatcgtgaaggttgaagtctgggatgtagtagacaaaggaaaatgcaaaaagcgaggcgacggcttaaagatggagaacgacccccaggaggcggagtctgaaatggccctggatgctgagttcctggacgtgtacaagaactgcaacggggtggtcatgatgttcgacattaccaagcagtggaccttcaattacattctccgggagcttccaaaagtgcccacccacgtgccagtgtgcgtgctggggaactaccgggacatgggcgagcaccgagtcatcctgccggacgacgtgcgtgacttcatcgacaacctggacagacctccaggttcctcctacttaccgctatgctgagtcttccatgaagaacagcttcggcctaaagtaccttcataagttcttcaatatcccatttttgcagcttcagagggagacgctgttgcggcagctggagacgaaccagctggacatggacgccacgctggaggagctgtcggtgcagcaggagacggaggaccagaactacggcatcttcctggagatgatggaggctcgcagccgtggccatgcgtccccactggcggccaacgggcagagcccatccccgggctcccagtcaccagtggtgcctgcaggcgctgtgtccacggggagctccagccccggcacacccaagcccgccaacaagctggccctcataggaagcccaccatcgtagatg

SEQ ID NO: 165191 - DNA, 560 bp, Homo Sapiens
cccaggttgtgctggacgtggtgcatgaggtgttacatcaccagcgacggctggagagcatctggcagcaccgcaaggtgcggctccaccagcggctgcagctctgcgtcttccagcaggatgtacagcaggtgttggactggattgaaaaccatggtgaggcctttctcagcaaacacactggagttgggaagtccctacatcgagcccgggccctgcagaagaggcatgatgactttgaagaggtggctcagaatacgtacaccaatgcggacaagctcctagaagcagcagagcagttggctcagacgggggaatgtgaccccgaggagatctacaaggcagctcgacacctggaggtgcgcatccaagacttcgtgcgcagggtggagcagcggaagcttctcctggacatgtctgtttccttccacacacacaccaaagagttgtggacatggatggaagaccttcagaaggagatgttggaggatgtctgtgcagattctgtggatgcagtccaggaactgatcaagcagttccagcagcagcacaacctggac

SEQ ID NO: 165192 - DNA, 329 bp, Homo Sapiens
accgtcgtaatacagaggaactaccctgtgctgcatcccctcctgtcccttcaccgtcccagcctcctctattaaaggaacttgagagtccgctactgtcaaggagaggaaagaactgccaccccaaaacgagtttggtaatcctgtggttcttattctcctgcactaggtttccccagcctcagccaggcaacatctcctgtacgctagctagggttacacaaatgcaactactcaaaagcaatttctcaacactcctcggctacctccctggtataagccaccttcatctgtcacctgaataactactatagcctcccaatgtctac

SEQ ID NO: 165193 - DNA, 525 bp, Homo Sapiens
caggttgtgctgtccataagaaactcacttttaccaaaccataatatgtaattcaacagagcgctggaaaaaacaccaaccaaaaaaataggtaactaatgaaagataacgacttcagagagagaaaaaagaacataagaataaatcagtggtttctagaccagtaagcatacaaatgactctaggttatagacttcatggagtacgtaacaggtgttttactttgattaacaataaagagtgcaaaccattgtgttttactttattaacaataaagagtgcaaaccactgaatatcaatactgaattgccccagataacatagcattaccactcaaaaggcaaaaatgataggaaacaaaaactaggcagaaatagataacaaatctaatttagctctaatctagatttaatttatattgttagatcaaaagcatcttgtaagcaggacacacttttttatatacccaagtacacgtacaactcgtgttatattaggacacaaagaaaccatgagaaatgttca

SEQ ID NO: 165194 - DNA, 443 bp, Homo Sapiens
gactacaccatcgagatcccggatcagccctgctggagccagaagaacagccccagcccaggtgggaaggaggcagaaactcggcagcctctggtgattctcttgggctggggtggctgcaaggacaagaaccttgccaagtacagtgccatctaccacaaaaggggctgcatcgtaatccgatacacagccccgtggcacatggtcttcttctccgagtcactgggtatcccttcacttcgtgttttggcccagaagctgctcgagctgctctttgattatgagattgagaaggagcccctgctcttccacgtcttcagcaacggtggcgtcatgctgtaccgctacgtgctggagctcctgcagacccgtcgcttctgccgcctgcgtgtggtgggcaccatcttgacagcgctcctgggacagcaacctgtaagggctct

SEQ ID NO: 165195 - DNA, 419 bp, Homo Sapiens
aaagcaaatcgggaccgccgtcggaagaggcgctgctctctgaggcccgtgacggggtgatgactggatggggaccgtcggaagaggcgctgctctctgaggcccgtgacggggtgatgactggactgggggccgtcggaagaggcgctgctctctgaggcccgtgacggggtgatgactggatgggggccgtcggaagaggcactgctctctgaggacaggcccttagcttctgtggaggtgtgagccaatgtcaatatgtccattgtgagtgtctttgcctcttcacagctgtcatcggtgcaaagggtgtcaaagatggcttcctcgggatcactgcctgtgatggtctgaactgtggtcattccagctccctcggggctgccactggcggctgatgtctccacggaggtggcgac

SEQ ID NO: 165196 - DNA, 332 bp, Homo Sapiens
tatttgaatgtatttgaaagcagttattcacagttatcacaaattgtaagcacaaaaaaacctgactgaagaagtagggatgcaacaatataatatgaaaaaattagtttaaattaccaaaacagctataaaagtagtagtacataacatacgccccgctctgtacagaagtaaggtgtataaaaccattgagtactaatagactgcggtttccaaaaaacccccaacactctaggttgaaattatggttattacataattataatggcatattttataacacaaaattatattgtaacatccctatgaacattttataagcccccgagcta

SEQ ID NO: 165197 - DNA, 1090 bp, Homo Sapiens
  misc_feature (805)..(805): n is a, c, g, or t
  misc_feature (827)..(827): n is a, c, g, or t
  misc_feature (897)..(907): n is a, c, g, or t
aatataccgatgacgagacgagaagtagcgtgtatagacgtgggtgtgcgatggagcagcagactgtgcggacggcagtgatgagtgggactgctcctatgtactgccccgcaaggtcattacagctgcagtcattggcagcctagtgtgcggactgctcctggtcatcgccctgggctgcacctgcaagctctatgccattcgcacccaggagtacagcatctttgcccccctctcccggatggaggctgagattgtgcagcagcaggcacccccttcctacgggcagctcattgcccagggtgccatcccacctgtagaagactttcctacagagaatcctaatgataactcagtgctgggcaacctgcgttctctgctacagatcttacgccaggatatgactccaggaggtggcccaggtgcccgccgtcgtcagcggggccgcttgatgcgacgcctggtacgccgtctccgccgctggggcttgctccctcgaaccaacaccccggctcgggcctctgaggccagatcccaggtcacaccttctgctgctccccttgaggccctagatggtggcacaggtccagcccgtgagggcggggcagtgggtgggcaagatggggagcaggcacccccactgcccatcaaggctcccctcccatctgctagcacgtctccagcccccactactgtccctgaagccccagggccactgccctcactgcccctagagccatcactattgtctggagtggtgcaggccctgcgaggccgcctgttgcccagcctggggcccccaggnaccaacccggagcccccctggnaccccacacagcagtcctggccctgggaaaaagaggaccatgtggctactggtggcaatggctggacccnnnnnnnnnnnccacctgaagcccaagatgaaccccctgcttaccggaaggggacatggggggctccacttgaaggccccctccccgcgggggctcacctcatagtggcacaaaccttttgaaaagggcgggtccaaactccacctccacaccattttcacttccccggtgtccctggaatttcacagcgcaat

SEQ ID NO: 165198 - DNA, 1236 bp, Homo Sapiens
  misc_feature (1179)..(1188): n is a, c, g, or t
gctggccgtgcgcttcacagccctgtgacttgggctttggagatgcagtgcatgtgtatgacggccctgggccccctgagagctcccgactactgcgtagtctcacccacttcagcaatggcaaggctgtcactgtggagacactgtctggccaggctgttgtgtcctaccacacagttgcttggagcaatggtcgtggcttcaatgccacctaccatgtgcggggctattgcttgccttgggacagaccctgtggcttaggctctggcctgggagctggcgaaggcctaggtgagcgctgctacagtgaggcacagcgctgtgacggctcatgggactgtgctgacggcacagatgaggaggactgcccaggctgcccacctggacacttcccctgtggggctgctggcacctctggtgccacagcctgctacctgcctgctgaccgctgcaactaccagactttctgtgctgatggagcagatgagagacgctgtcggcattgccagcctggcaatttccgatgccgggacgagaagtgcgtgtatgagacgtgggtgtgcgatgggcagccagactgtgcggacggcagtgatgagtgggactgctcctatgttctgccccgcaaggtcattacagctgcagtcattggcagcctagtgtgcggcctgctcctggtcatcgccctgggctgcacctgcaagctctatgccattcgcacccaggagtacagcatctttgcccccctctcccggatggaggctgagattgtgcagcagcaggcacccccttcctacgggcagctcattgccccaggtgccatcccacctgtagaagactttcctacagagaatcctaatgataactcagtgctgggcaacctgcgttctctgctacagatcttacgcccaggatatgactcccggaaggggggcccaggtgcccccccgtcctcagcggggccgcttgatgccaagccctggtaccccgtcttccgccgctggggcttggctccctcgaaaccaacacccccggctcggggcctctggaggccagaaacccaggtcacacccttctggcggctccccctttgaggcccctagatgggggggcccaggttcaagccccctgaggggcgggggccacctgggtgggggccaagatggtggaacaaggggnnnnnnnnnnttgccacctcagggcttccccctcccatttttgcttagcctgagcttt

SEQ ID NO: 165199 - DNA, 760 bp, Homo Sapiens
ttgtctggagtggtgcaggccctgcgaggccgcctgttgcccagcctggggcccccaggaccaacccggagcccccctggaccccacacagcagtcctggccctggaagatgaggacgatgtgctactggtgccactggctgagccgggggtgtgggtagctgaggcagaggatgagccactgcttacctgaggggacctgggggctctactgaggcctctcccctgggggctctactcatagtggcacaaccttttagaggtgggtcagcctcccctccaccacttccttccctgtccctggatttcagggacttggtgggcctcccgttgaccctatgtagctgctataaagttaagtgtccctcaggcagggagagggctcacagagtctcctctgtacgtggccatggccagacaccccagtcccttcaccaccacctgctccccacgccaccaccatttgggtggctgtttttaaaaagtaaagttcttagaggatcataggtctggacactccatccttgccaaacctctacccaaaagtggccttaagcaccggaatgccaattaactagagaccctccagcccccaaggggaggatttgggcagaacctgaggttttgccatcccacaatccctcctaccgggcctgggctcacaaaaaaagggcaacaaatggcttccaattccataaccaaccggcattggcttcagaaagttgaaggcccaaaaaataaaggaaatccttacatcctcc

SEQ ID NO: 165200 - DNA, 714 bp, Homo Sapiens
  misc_feature (463)..(587): n is a, c, g, or t
  misc_feature (589)..(589): n is a, c, g, or t
  misc_feature (596)..(612): n is a, c, g, or t
  misc_feature (616)..(646): n is a, c, g, or t
  misc_feature (649)..(649): n is a, c, g, or t
  misc_feature (652)..(668): n is a, c, g, or t
acacttccttccctgccctgatttcagggacttggtgggcctcccgttgaccctatgtagctgctataaagttaagtgtccctcaggcagggagagggctcacagagtctcctctgtacgtggccatggccagacaccccagtcccttcaccaccacctgctccccacgccaccaccatttgggtggctgtttttaaaaagtaaagttcttagaggatcataggtctggacactccatccttgccaaacctctacccaaaagtggccttaagcaccggaatgccaattaactagagaccctccagcccccaaggggaggatttgggcagaacctgaggttttgccatccacaatccctcctacagggcctggctcacaaaaagagtgcaacaaatgcttctattccatagctacggcattgctcagtaagttgaggtcaaaaataaaggaatcatacatctcnnnnnnnnnnnnnnnnnnnnnnnnnnnnnnnnnnnnnnnnnnnnnnnnnnnnnnnnnnnnnnnnnnnnnnnnnnnnnnnnnnnnnnnnnnnnnnnnnnnnnnnnnnnnnnnnnnnnnnnnnnnnnanaaaaaannnnnnnnnnnnnnnnntttnnnnnnnnnnnnnnnnnnnnnnnnnnnnnnntgnggnnnnnnnnnnnnnnnnnaaaaaatttttaaaaacctttttttggggcgcgggggcccccaaag

SEQ ID NO: 165201 - DNA, 600 bp, Homo Sapiens
  misc_feature (12)..(12): n is a, c, g, or t
  misc_feature (27)..(27): n is a, c, g, or t
  misc_feature (44)..(44): n is a, c, g, or t
  misc_feature (78)..(78): n is a, c, g, or t
  misc_feature (367)..(367): n is a, c, g, or t
  misc_feature (468)..(468): n is a, c, g, or t
  misc_feature (487)..(487): n is a, c, g, or t
  misc_feature (505)..(505): n is a, c, g, or t
  misc_feature (581)..(581): n is a, c, g, or t
acccccccctgnaaccccaaaaaaaanaatccctggccccctgnaaaaatgaaggaacgatgtgcctaactggtgccnactggctgaagccgggggtgtgggtaagctgaaggcaagaggatgagccactgcttacctgaggggaccctgggggctctactgaggcctctcccctgggggctctactcatagtggcacaaccttttagaggtgggtcagcctcccctccaccacttccttccctgtccctggatttcagggacttggtgggcctcccgttgaccctatgtagctgctataaagttaagtgtccctcaggcagggagagggctcacagagtctcctctgtaacgtggccatggccagnacaccccagtcccttcaccaccacctgctccccacgccaccaccatttgggtggctgtttttaaaaagtaaagttcttagaggatcataggtctgggacantccattccttggccaaacntttacccaaaagtgggcnttaaggcaccgggaatggccaatttaattaggaggaccttccaggcccccaagggggagggatttggggcagaacntgaggttttgccatccaca

SEQ ID NO: 165202 - DNA, 451 bp, Homo Sapiens
  misc_feature (122)..(122): n is a, c, g, or t
  misc_feature (128)..(128): n is a, c, g, or t
  misc_feature (148)..(148): n is a, c, g, or t
  misc_feature (334)..(334): n is a, c, g, or t
  misc_feature (336)..(336): n is a, c, g, or t
  misc_feature (416)..(416): n is a, c, g, or t
gccttcctacgggcagctcattgcccaggggtgccatcccacctgtagaagactttcctacagagaatcctaatgataactcagtgctgggcaacctgcgttctctgctacagatcttacgnccaggnatatgactccaggaggtggncccaggtgtcccgccgtcgtcagcggggccgcttgatgtcgacgcctgggtacgccgtctccgccgctggggcttgctccctcgaaccaacaccccggctcgggcctctgaggcagatcccaggtcacaccttctgctgctccccttgaggccctagatggtggcacaggtccagcccgtgagggngncaagttgggtgggcaagatggggagcaggcacccccactgcccattcaaggctcccttcccatcttgttagcaagttttncagcccccattattgttccttgaaaggccccaggg

SEQ ID NO: 165203 - DNA, 715 bp, Homo Sapiens
atgaggccttaaggctgccggaaacaaatgggtggaaatagcaacgttgtttccgtcaattccacaatgtgcactggctgcgtgagacaagccacatctccacattcctatgcttttttcattaaaaggaactatctcgacgaggaaaaagtcctggtcaaataggagttaagtgtttgttatctggtaacagtttttttagtctttcctacaattacttggggaaggagtgtcttcggggaggaaaaactgacacactgacaaggctcccgaaattggacagaatggttaaggatatagctcttccttttgggtttttctaccagtaggcttctagcacctgaattttcacacactgcaccacagaccttctccaaacgcctctccgaccccacagcttctgcacccagatgcgtccgccagcacgaggcgcactaggaaacgccccagtgcagagtgggtgacggcagtatgatccctgaggagggagctgcagcagcttcagaagcgggatgttctctgaaaataccaacacgatccatgacatacagacctgaattttctctatttttgtggcgtttcacgtttctctcaagaggattaataattttggtggtggatttacgttaagaggaaagaaggaccctaaataaaaaaaatcccacagccacctgccgagcacctatgaaccaaaaacctgaagtcgctttcattc

SEQ ID NO: 165204 - DNA, 974 bp, Homo Sapiens
agataagtaagcaggttctgagaaaattgagaatagagttgctgacctgagagtcatggtgtttgggatacagtttgggctggatcagggaggtatcaataagggcaggccaaaaagaaggcagacatttggctcactagtggcaaagggagaccagagatctagcgactgaagcagcatggccaagccgtgtggggtgcgcctgagcggggaagcccgcaaacaggtggaggtcttcagacagaatcttttccaggaggctgaggaattcctctacagattcttgccacagaaaatcatatacctgaatcagctcttgcaagaggactccctcaatgtggctgacttgacttccctccgggccccactggacatccccatcccagaccctccacccaaggatgatgagatggaaacagataagcaggagaagaaagaagtccctaagtgtggatttctccctgggaatgagaaagtcctgtccctgcttgccctggttaagccagaagtctggactctcaaagagaaatgcattctggtgattacatggatccaacacctgatccccaagattgaagatggaaatgattttggggtagcaatccaggagaaggtgctggagagggtgaatgccgtcaagaccaaagtggaagctttccagacaaccatttccaagtacttctcagaacgtgggggatgctgtgggccaaggcctccaagggagactcatgtaatgggattaccggggcccttggtgcactgaacgagatgaagcagccctatgggggaagctccggggccaatggtggctgggaccctaaagggcctttctatgcttgaaccttttatccttattcctcaagcaggcaaaccctgggaagaaaaatttgtccccaccccaaaaagggggggaaagaaaaagacccattcttatagttacctggaaacccccggggaccctagaaagggggaac

SEQ ID NO: 165205 - DNA, 840 bp, Homo Sapiens
gggggcgactagccgggagaccagagatctagcgactgaagcagcatggccaagccgtgtggggtgcgcctgagcggggaagcccgcaaacaggtggaggtcttcaggcagaatcttttccaggaggctgaggaattcctctacagattcttgccacagaaaatcatatacctgaatcagctcttgcaagaggactccctcaatgtggctgacttgacttccctccgggccccactggacatccccatcccagaccctccacccaaggatgatgagatggaaacagataagcaggagaagaaagaagtccctaagtgtggatttctccctgggaatgagaaagtcctgtccctgcttgccctggttaagccagaagtctggactctcaaagagaaatgcattctggtgattacatggatccaacacctgatccccaagattgaagatggaaatgattttggggtagcaatccaggagaaggtgctggagagggtgaatgccgtcaagaccaaagtggaagctttccagacaaccatttccaagtacttctcagaacgtggggatgctgtggccaaggcctccaaggagactcatgtaatggattaccgggccttggtgcatgagcgagatgaggcagcctatggggagctcagggccatggtgctggacctgagggccttctatgctgagctttatcatatcatcagcagcaacctggagaaaattgtcaacccaaagggtgaagaaaagccatctatgtactgaacccgggactagaaggaaaataaatgatctatatgttgtgtggcccaacccaaatcaaaaaggcgcgggaggagg

SEQ ID NO: 165206 - DNA, 1318 bp, Homo Sapiens
  misc_feature (428)..(479): n is a, c, g, or t
cgagtcccgccccatctccggtctgtcctgaaggcagagggaagaccctcacccaacccctgcccgctctcttctaagagctgctagtccttctccaccccaggcgctccctctggctgcccctcccactcgctctgatctctctccgtccgctacttgcggtcgagccttcttgggggagccccgccactgaataccccctttgccatactcccacctctcttaccccaaccctggacttccagttggccctagctataagccccgcccctctccgagggacagcccccgctccagtctccgcggtcccacttaccctagcccctccctcgggcagcccctggactgtgacccagccagcaccgcctctcctagtggcaactggctgggaatggctgaggggctacctactgcttgcggcctgccannnnnnnnnnnnnnnnnnnnnnnnnnnnnnnnnnnnnnnnnnnnnnnnnnnncctggacctggggagtgaaagcgaaagcccgggcgactagccgggagaccagagatctagcgactgaagcagcatggccaagccgtgtggggtgcgcctgagcggggaagcccgcaaacaggtggaggtcttcagacagaatcttttccaggaggctgaggaattcctctacagattcttgccacagaaaatcatatacctgaatcagctcttgcaagaggactccctcaatgtggctgacttgacttccctccgggccccactggacatccccatcccagaccctccacccaaggatgatgagatggaaacagataagcaggagaagaaagaagtccctaagtgtggatttctccctgggaatgagaaagtcctgtccctgcttgccctggttaagccagaagtctggactctcaaagagaaatgcattctggtgattacatggatccaacacctgatccccaagattgaagatggaaatgattttggggtagcaatccaggagaaggtgctggagagggtgaatgccgtcaagaccaaagtggaagctttccagacaaccatttccaagtacttctcagaacgtgggggatgctgtggccaaggcctccaaggagactcatgtaatgggattaccggggccttgggtgcatggaacgaagatgaaggcagccctatgggggaactccagggccatgggtgctgggacctggaggggccttctatgcctgagccttttatcataatcatcgagcaaccaaccctggaaaaaaaaattggcccaaccccaaagggggggaaagaaaaaagcccttcctatgttaccggaaacccccggg

SEQ ID NO: 165207 - DNA, 606 bp, Homo Sapiens
gtcatcacactgataaccaacactgagcggcggcatcccggctttgaggccaccttcttccagctgcctaggatgagcagctgtggaggccgcttacgtaaagcccaggggacattcaacagcccctactacccaggccactacccacccaacattgactgcacatggaacattgaggtgcccaacaaccagcatgtgaaggtgcgcttcaaattcttctacctgcccgagcccggcgtgcctgcgggcacctgccccaaggactacgtggagatcaacggggagaaatactgcggagagaggtccccgttcgtcgtcacctgcaacagcaacaagatcacagttcgcttccactcagatcagtcctacaccgacaccggcttcttagctgaatacctctcctacgactccagtgacccatgcccggggcagttcacgtgccgcacggggcggtgtatccggaaggatctgcgctgtgatggctgggccgactgcaccgaccacagcgatgagctcaactgcagttgcgacgccggccaccagttcacgtgcaagaacaagttctgcaagcccctcttctgggtctgcgacagtgtgaaacgactg

SEQ ID NO: 165208 - DNA, 191 bp, Homo Sapiens
tgctggcccttacgcgcgtacagtgaagcagatgccagccactgtatacatcagattctggagagtgttaaccacatccaccagcatgacatcgtccacagggacctgaagcctgagaacctgctgctggcgagtaaatgcaagggtgccgccgtcaagctggctgattttggcctagccatcgaagtaca

SEQ ID NO: 165209 - DNA, 987 bp, Homo Sapiens
  misc_feature (793)..(793): n is a, c, g, or t
  misc_feature (822)..(822): n is a, c, g, or t
  misc_feature (944)..(944): n is a, c, g, or t
  misc_feature (964)..(964): n is a, c, g, or t
  misc_feature (971)..(971): n is a, c, g, or t
gcaggttgtgctggtcccaggttgtgctgcgcaggacagagactgtggtggagaagctgctcaccaactggatgtccatctgtctgtataccttcgtgagggactccgtaggggagcctctgtacatgctctttcgagggattaagcaccaagtggataaggggccagtggacagtgtgacaggcaaggccaaatacaccttgaacgacaaccgcctgctcagagaggatgtggagtaccgtcccctgaccttgaatgcactattggctgtggggcctggggcaggagaggcccagggcgtgcccgtgaaggtctctagactgtgacaccatctctccaggcaaaggagaagatgctggaccagctttataaaggagtgcctctcacccagcggccagaccctcgcacccttgatgttggtgagggcgtggagagcccctggggacctgagccactgttgggcctgggctggccccggaccaactctgcagggacaactcatcactcagggtggggaggatgctgggaggcaggcagaagctggctttggaacatctttcttggacagcctctcatctggggagggggtccctgctcttggtctttggagaggttgagtaaggctgccccatgatggaggggctggtgtccctgtggaggaggagatgggctccactatgggaagggtatcttccagccctgcacccagttctgccttgcccttgcagagtggcggtctggggtggccgggcacctcattctttctgacgaggatgtcacttctgaggtccanggtctgtggaggcgcctgaacacactgancattacaaggtcccagatggacaactgtgacccttgtccccttgccttaccaagcatgtgcttccggaaaaccaggattatgtcccttggaaaaccggaccccaatggcttggaggatgtanattaaggggggcattccggnccttggnacctggtggaaaccaa

SEQ ID NO: 165210 - DNA, 379 bp, Homo Sapiens
gccccttatccacttggtgcttaatccctcgaaagagcatgtacagaggctcccctacggagtccctcacgaaggtatacagacagatggacatccagttggtgagcagcttctccaccacagtctctgtcctgcgcagcatcagcttggggttcttggccacatactgggcaaccaggtcactgagcagagtgcggaggatgtcagtgaaatactcaagcttcccatgcagtgccacggtgagcagagatgccacgtaggcacggtcccgagctgaaaaggtgcgctggctctccagcgtgtggatgaacttggtgaggaagagcttgctgttgagcagttagagagctgccccagccctgctccacagtgaccatag

SEQ ID NO: 165211 - DNA, 565 bp, Homo Sapiens
cagatacggtcccggttttctgtggtgtcgtaaagctggatcgagcctgcggcaccagcccatctccagggatcaagccttcatccaccacctcacggcttccagtggtgtactccagcatggcgcacttgcgctccaggttgtgcttgtccatggcgctctcctgctccttctgcaggctgccctcctcgtcgctgccctggtctgtgctgctgttcgtcctgacgcgcgggcagcgcaccacgcctagtggggtgttgaggcagacgcactgcaggtcaaaccagtagttttccacatcctgcattgagttcaggacacagaggcgcctctcgaagggccggctgctgcgggccaggttgtaatgtgggccgcagatggtagtgtcaacaaatgactgcatttcttctttcaaagcaagacttaagaccttgaattcttttattccctgaaacttttcccgtgggaccaaaattgtagcagtccccattgccagcaacaacctggggaaccggaacccttggttccccgaggtttggtggcttccttcaaccaaagaaccccc

SEQ ID NO: 165212 - DNA, 397 bp, Homo Sapiens
ctcagcaaggtgggagtgcccccattgaccctcctccagtccatgaatctccacaccctcccctgcctgccactgagccagcttctcggttatccagtgaggagggcgaaggcgatgacaaagaaaagtctgttgaaaaactggactgtcattattcaggtcatcatcctcagccagcatctttttgcacatttgggagccggcagataggaagaggctattacgtgtttgactccaggtggaatcgacttcgctgcgccctcaacctcatggtggagaagcatctgaatgcacagctatggaagaaaatcccaccagtgcccagtaccacctcacccatctccacacgtattcctcaccagaccctgggatccagacacaacctgcggtaccgact

SEQ ID NO: 165213 - DNA, 1011 bp, Homo Sapiens
gggagaagccgtttgtctcactaagagcatccaagccctggcccgtctgtgcactcttggctcctggggagatatatctgccttctaagaaggcaggccaggtcttgggcacagacctgcatttgttgaccttgcactccaactatagtgccttgcaagtgctcaacagtacatattggaatgaagtccctatgagagccatttctggccatgttctatacctcaaagtgaggctggcaggtacagagatgaactgtacacatgtgatacatttaagccactggaaaaacccctgtgcttgaaaatatttcctctatatcatgcctggagttccatcatagcccttcatttccttggctttagcatttaccttctcttaagaataccagctttcccctttccctgagaggaagagcacatgttggtctcctcttagtgtgaacgagattgccaggcccttttctcctatgcacaccaggatagacaaggcaggggatactggcagcctgcatcatcctcccattgggctgacagctggccctactttcctccctctgctgcttggtccctcaccttgataaagtggcttcgccccctccactctactgccagtgttctcccagggcttgctaaatccagcagacccctttcctgtcttactagatctgggcagcatttgacatggctgatcaccccttgcttcttggatggcacttccctggcacctctgtggctagttgtcctacctccctggctgttcctttcaggcttcgtgcagctctcactgccatgcaagtaggtcttcagggtctgctgtgcctcctaggaagccatcctctggatggttcaaggatgggaggatttaaagtgactccagccccaaaatcttcggaatacttaaacaaatttttgctcccccttaggggcaaaaaaatttagggccttggcccaaaagggaatttggtgtttttttgaaaaaaccgcccccttttgggggaaattcccctttgg

SEQ ID NO: 165214 - DNA, 915 bp, Homo Sapiens
tggcatcctgcatcatcctcccattgggctgacagctggccctactttcctccctctgctgcttggtccctcaccttgatgatgtggcttccccccctccactctactgccagtgttctcccagggcttgctaaatccagcagacccctttcctgtcttactagatctgggcagcatttgacatggctgatcaccccttgcttcttggatggcacttccctggcacctctgtggctagttgtcctacctccctggctgttcctttcaggcttccgtgcaggcttctccacttgcccatgcacagtagggtctttcagggttctgctgtgggctccctagggaagcccatccatctggatggtttcaaggatggtgaggaatttagagttgacctccagccccaacatccttcctgatcacctgaaccacagttttgctgccctctaggtgcacagacaattcaggtccatggcccagatggtacttgctgtcttctgcaaacctgccccttctgggtacttcccttgaccccgagatcactcaggagccagacaggaaacttattctattcctgttttctctttctgcccaccacatccaatctctcaaaacggtcaggtctaccttaacatctcttgatttgagccactcccactgtcatcagctttcacctggattatcgtgacagcctcctactgcttctctatcatgtggccagagctatcttcctaaaatgcattgcatagttgatcaagtcactctctggcctaaaaccttccttggctccctgctgccctcaggataaagtctggacccctcagcatggcttgtgagactcatggtgtccttgtccctgctcacctctctggtctcatcactttgccttctttgcatttctgggtcccagcctccctg

SEQ ID NO: 165215 - DNA, 1223 bp, Homo Sapiens
agatggggcactgctgtgtgcagaatccagggtcctctttctgcttgcaactcctttcactggatgccccagaaacaatccaggcctcctgtcctatcttacccctttgctttgctttttaccccagcacctcgataaccgccttctcttcttttcagaactccttgtttctcatcctgttttttatgattaccttactcttgcttccaccctggaagataactgctatagatgcctgtatgtaaatggtgctgtctccagcaactggcatgctgaagaagaattgattcacggggtataaatgttggggattggaagtggggatgaaatggcacttgttgatacaggagcagagaggtgaggccgactgctgaagacagctcgccaccctccttgcctccactccaatccaggggctggggccacattctttgccgtcatttatcctcagatcaggtgagatcgacaggaggtgttgatggcagtgccagcaattattgctaatccgtttgcatccttatgcatagatctgaattcagactttgtgaatttccagaggtgtgggtaatataatagaattcagtgagtgggcatggctgatcttgtgcaaattaaaagttatggggcataagaatagccaaagttgaacttcttttaaaaaggaaagtaccctgagagccagtattggttgaggctcttcagtatgcccaggttggcagcactgagaaccgcaggaacggcctgttgttacaaaaaggagattgactcagctgcccttggtgcatctgactgactatgactgctgagagattccaaggacccttaatgccagggctaacctctccatgtgcagtgagacctctggaggaagtgtcatcctctggctttgtgtggtactcattatggtgcagtgcgggcatgaaatgaagacacccaaataggcttacagatacgatatgttttaaatgttcgtatttaacaaaaacatactgacactgtttggaaatggcaacaggaagatagcaaaatgaatactaacattacgaaaagatgaacaggtacatgttccaaggcaggtggctgtgaacttcctctgagtgaaggcatcccctccagcacctttcagcctgctagttaggacgacccgccgccaccctccaggacctccagccctgcactgcctttcctctcttttaaataattcttcattgagttctaatatg

SEQ ID NO: 165216 - DNA, 934 bp, Homo Sapiens
  misc_feature (831)..(832): n is a, c, g, or t
  misc_feature (888)..(888): n is a, c, g, or t
  misc_feature (901)..(901): n is a, c, g, or t
gctgaacctccacctcctcctaagccagacctgagccgttacacagggttgcgaacacacctcggcctggctactaatgaggatagtagcttattggccaaggacagccccccgacacctaccatgtacaagtaccggccgggttacagtagcagcagtacgtcagctgccatgccgcattcctccagcgccaagttgagtcgtggggacagcttgaaggagccaacctcaattgcagagagcagccgtcaccccagctactcgctcagagcccagcttggaaccagagagcttccgttctcctacctttggcaaaagttttcacttcgatccactatccagtggctcacgctcctccagcctcaagtcagcccagggcacaggctttgagctgggccagttgcaatccattcgttcagagggcaccacctccacctcctataagagcctggccaaccagacacgcaatggaagcctatcttatgacagcttgctcacaccttcagacagccctgattttgagtcagtgcaggcagggcctgagccagacccacctttaggctatacctctcccttcctgtcagccaggctggcccagcaacgggaagctgagaggcacccacgtttggtgccaactggcccaacacaccgagagccctcaccagtccgttacgacaatctgtcgcgccacattgtggcctctctccaggaacgagagaagttgctgcgccagtcacccccacttccgggccgtgaggaagaaacaggcttggggggactcaggcattcagtcaacacccaggctcggggccatgccccctcggtactagnnttcctccctccagatgattccaaaggaggattcacccttttggggcaaggactccnacctgggggaccnccccagcctggtcccccccggtttttggcacaa

SEQ ID NO: 165217 - DNA, 1129 bp, Homo Sapiens
gcgtccgctccaacatcagaccctcgcctggctcccagctggtgctgaagctcgtcagttcaccatccgccctcggcttccgcggggcgctgggccgccagcctcggcaccgtcctttcctttctccctcgcgttaggcaggtgacagcagggacatgtctcgggagatgcaggatgtagacctcgctgaggtgaagcctttggtggagaaaggggagaccatcaccggcctcctgcaagagtttgatgtccaggagcaggacatcgagactttacatggctctgttcacgtcacgctgtgtgggactcccaagggaaaccggcctgtcatcctcacctaccatgacatcggcatgaaccacaaaacctgctacaaccccctcttcaactacgaggacatgcaggagatcacccagcactttgccgtctgccacgtggacgcccctggccagcaggacggcgcagcctccttccccgcagggtacatgtacccctccatggatcagctggctgaaatgcttcctggagtccttcaacagtttgggctgaaaagcattattggcatgggaacaggagcaggcgcctacatcctaactcgatttgctctaaacaaccctgagatggtggagggccttgtccttatcaacgtgaacccttgtgcggaaggctggatggactgggccgcctccaagatctcaggatggacccaagctctgccggacatggtggtgtcccacctttttgggaaggaagaaatgcagagtaacgtggaagtggtccacacctaccgccagcacattgtgaatgacatgaaccccggcaacctgcacctggtcatcaatgcctacaacagccggcgcgacctggagattgagcgaccaatgccgggcacccacacagtcaccctgcagtgccctgctctgttggtggttggggacagctcgcctgcagtggatgccgtggtggagtgcaactcaaaattggatccaacaaagaccactctcctcaagatggcggactgtggcggcctcccgcgcgctctcccagccggccaagctcgctgaggccttcaagtacttctgtgcagggcatggatacatgcactcggctagcatgacccgcctgatga

SEQ ID NO: 165218 - DNA, 424 bp, Homo Sapiens
tggacagagcgttattctggcattttctcacagacacctttaccgcctattaccgcctgctcatcacccacctgggcctgccccagtggcaatatgtcttcaccagctatggcagtagcccacaggccaagataacttataatatcaaaatgaatagaagaaaatgtgttcactggaatactggctgttgagcccctccaatgggagctgaggagctgtgtctctgcatggcatggggactggccacaagcaaagagtcagcagcatgaagtccccggagctgtagcgtgtgcagcaggcgccaatctcaacagtcatgggaacaacagtgtcgcaatcattctctcagttatcgcaagaatgtgctatttttcactgttaggtgttgcttctgagaactacaaataaaactctccaaccaagt

SEQ ID NO: 165219 - DNA, 1021 bp, Homo Sapiens
  misc_feature (952)..(952): n is a, c, g, or t
  misc_feature (973)..(973): n is a, c, g, or t
  misc_feature (988)..(988): n is a, c, g, or t
ggggaatcgcggtcgcgagccatggaggaggaggcatcgtccccggggctgggctgcagcaagccgcacctggagaagctgaccctgggcatcacgcgcatcatagaatcttccccaggtgtgactgaagtgaccatcatagaaaagcctcctgctgaacgtcatatgatttcttcctgggaacaaaagaataactgtgtgatgcctgaagatgtgaagaacttttacctgatgaccaatggcttccacatgacatggagtgtgaagctggatgagcacatcattccactgggaagcatggcaattaacagcatctcaaaactgactcagctcacccagtcttccatgtattcacttcctaatgcacccactctggcagacctggaggacgatacacatgaagccagtgatgatcagccagagaagcctcactttgactctcgcagtgtgatatttgagctggattcatgcaatggcagtgggaaagtttgccttgtctacaaaagtgggaaaccagcattagcagaagacactgagatctggttcctggacagagcgttatactggcattttctcacagacacctttactgcctattaccgcctgctcatcacccacctgggcctgccccagtggcaatatgcctttcaccagctatggcattagcccacaggccaagcaatggttcagcatggtataaacctatcacctacaacacaaacctgctcacagaagagaccgactcctttgtgaataagctagatcccagcaaagtgtttaagagcaagaacaagatcgtaatcccaaaaaagaaagggcctgtgcagcctgcaggtggccagaaagggccctcaggaccctccggtccctccacttcctccacttctaaatcctcctctgggctctggggaaaccccacccgggaagttgaggcacccttccttccaatttncctaaccagtttccaggagtngggtgggtttttccntggcacaggttggggccttagggggggttggac

SEQ ID NO: 165220 - DNA, 750 bp, Homo Sapiens
cacaggggccaacatatatgatgaggcagccagctacatccagagtaagtttgaggacctgaataagcgcaaagacaccaaggagatctacacgcacttcacgtgcgccaccgacaccaagaacgtgcagttcgtgtttgacgccgtcaccgatgtcatcatcaagaacaacctgaaggactgcggcctcttctgaggggcagcggggcctggcgggatgggccaccgccgactttgtaccccccaacccctgaggaagatgggggcaagaagatcacgctccccgcctgttcccccgccgcttttctcctctttcctctctttgttctcagctccccctgtcccctcagctccagacgtaggggaggggttgccacaggcctccctgtttgaagcctgcccttgtctgagatgctggtaatggccatggtacccccttctgggcatctgttctggtttttaaccattgtcttgttctgtgatgaggggaggggggcacatgctgagtctcccaaggctgcgtctggaggggcccctgcttctccagcctggacccccagctttgcccaacaccagcccctgccccagcccaagtccaaatgtttacagggagcctcctgcccagtcccccaaccccagccgctcggaggccccaaaggaaaaagcacaagaagcgtgagacgccaccattcctggaaaccacagtccacctgctcattctcgtagctttttaaaaaatgaaagtaaagg

SEQ ID NO: 165221 - DNA, 395 bp, Homo Sapiens
cttaggatcccagtgctacctccacaaacagagtgctacctccacaaacaggtccttcttgttgaggaagaggatgatggacgtgtctgtgaaccacttgttgttgcagatgctatcgaatagcttcatgctctcatgcatgcggttcatctcctcgtcctcagctagcaccaagtcataggcgctcaaggctacgcagaagatgatggctgtgacgccctcaaagcagtggatccacttcttccgctcagaccgctgaccacccacatcaaacatcttgaagtgtaggtccttgaaggtgaagtgtgtctccacgatccccgtggtctttacgcgggtccgtagcacatcttgctgtttgtggagtagcactaagatcctctagatcgactcca

SEQ ID NO: 165222 - DNA, 397 bp, Homo Sapiens
attcgagcgtcggtacccagtgctacctccacttacagcaagatgtgtctacgggacccgcgtaaagaccacgggggtatcgtggagacacacttcaccttcaaggaccgtacacttcaagatgtgttgatgtgggtggtcagcggtctgagcggaagaagtggatccacggcttttgaggggcgtcacagccatcatcttctgcgtagccttgagcgcctatgtacttggtgctagctggaggacgaggagatgaaccgcatgcatgagagcactgaagctacttcgatagcatctgcacacaacaagtggttcacagacacgtccatcatgcctcttcctcaacaagacacggacctgtcggcggacggtagcaccctgggtcccgagctcgact

SEQ ID NO: 165223 - DNA, 1323 bp, Homo Sapiens
  misc_feature (65)..(124): n is a, c, g, or t
  misc_feature (1260)..(1260): n is a, c, g, or t
  misc_feature (1311)..(1311): n is a, c, g, or t
agtcgctcggaactgccgacccgagtgcttcccgcagagggctggtggtgggagcggagtgggtnnnnnnnnnnnnnnnnnnnnnnnnnnnnnnnnnnnnnnnnnnnnnnnnnnnnnnnnnnnnacggcgggatgggctgcaccgtgagcgccgaggacaaggcggcggccgagcgctctaagatgatcgacaagaacctgcgggaggacggagagaaggcggcgcgggaggtgaagttgctgctgttgggtgctggggagtcagggaagagcaccatcgtcaagcagatgaagatcatccacgaggatggctactccgaggaggaatgccggcagtaccgggcggttgtctacagcaacaccatccagtccatcatggccattgtcaaagccatgggcaacctgcagatcgactttgccgacccctccagagcggacgacgccaggcagctatttgcactgtcctgcaccgccgaggagcaaggcgtgctccctgatgacctgtccggcgtcatccggaggctctgggctgaccatggtgtgcaggcctgctttggccgctcaagggaataccagctcaacgactcagctgcctactacctgaacgacctggagcgtattgcacagagtgactacatccccacacagcaagatgtgctacggacccgcgtaaagaccacggggatcgtggagacacacttcaccttcaaggacctacacttcaagatgtttgatgtgggtggtcagcggtctgagcggaagaagtggatccactgctttgagggcgtcacagccatcatcttctgcgtagccttgagcgcctatgacttggtgctagctgaggacgaggagatgaaccgcatgcatgagagcatgaagctattcgatagcatctgcaacaacaagtggttcacagacacgtccatcatcctcttcctcaacaagaaggacctgtttgaggagaagatcacacacagtcccctgaccatctgcttccctgagtacacaggggccaacaaatatgatgaggcagccagctacatccagagtaagtttgaggacctgaataagcgcaaagacaccaaggagatctacacgcacttcacgtgcgccaccgacaccaagaacgtgcagttcgtgtttgacgccgtcaccgatgtcatcatcaagaacaacctgaaggactgcggcctcttctgaggggcagcggggcctgggcgggatggggccaccgccgacttttgtaccccccaacccctnagggaagatggggggcaagaagattcacggttccccgcctgtttcccccgncgtttttttcct

SEQ ID NO: 165224 - DNA, 653 bp, Homo Sapiens
  misc_feature (20)..(20): n is a, c, g, or t
  misc_feature (27)..(27): n is a, c, g, or t
  misc_feature (40)..(40): n is a, c, g, or t
  misc_feature (61)..(61): n is a, c, g, or t
  misc_feature (71)..(71): n is a, c, g, or t
agaattggttgcccttctanacgcttnctttttccttttncctttgggccctcccaaccgncttgggtttngggaactgggcagaagcctccccttgtaaacatttgcacttgggctggggcaaggggctgttgttgggcaaagctgggggtcccaggctggagaagcaggggcccctccagacgcagccttgggagactcagcatgtgcccccctcccctcatcacagaacaagacaatggttaaaaaccagaacagatgcccagaagggggtaccatggccattaccagcatctcagacaagggcaggcttcaaacagggagcctgtggcaacccctcccctacgtctggagctgaggggacagggggagctgagaacaaatagaggaaacaacacaaaagcggcgcggcaacaggccgggagcgtgatcttcttgcccccatctttctcagcggttgtggggtacaaagtcggcgttgtgccatccgtgaggccccgctgtccctcaagaaggccgcagtctttcagtttgttatgatggataatcggtgagggcgtagaacggagcgcaggtccttgtgccggttgcgcaagtaaggtggtgagaattcccttgggttcttcgcgctagtcgaggtccgcaaaattact

SEQ ID NO: 165225 - DNA, 2028 bp, Homo Sapiens
  misc_feature (28)..(28): n is a, c, g, or t
cagctgtttggaagcccctcccaaggtncaggcccctcttggatcaatggtagctgccagccccgtagacccacaccccacccagactttcatcagacttgcacactggatttatccagggacaccatggggctgcatccattccacagccccccatggcccctcctgcaaaggcctggacgttcagctcaaagatagtttggagagcacggaccacatgttgggtaggaaacacctcagtgtctccttctcctaggccacaggccttcaggaaccactgtccagcacactggtcagacataacactacgagactgaggccgagagctgctgtcatagttgtaatagcggccattccacagcagtctctcataggcttcttggccccggctgaggatagaagaaaacttatcctggatgtcctgtgccccacacagagcagccatctggaccatcacagccacagctgccagccacagccctccacagtaagcactggggcctgtggtcacccatccatcataggtctggtctgcatagcctccattttcaatgagtccatcatggtccttgtcaaacttcatttcagattccatcacagctagacacacaggccacatgtccttcaggaagttttgatcacccgtgaggtaatagtcccgataaacctgcagcacaaacttcaggttcaggtccttccaatcagcagtatcatggattaaatatgcattgacgcggagccatggttcatcatctgggtccccaatatcatgggggatgacgttcctccttttcacaggtgccatcaccccactcatcaggtaccgtcgccgtgtcaggtcctccctgagagtggccagagccatgtcatactgtaggctgagctcaagtttgggccagagcatgatgagggcaaaggaagcataaaagtggacatcatatgtgttgtacatgcggtactcctggccctcaaggtagccaaatcgaccgtagtcccgtagggtggggcggaggtgacacatgtttctgcccagctcctctggtagggagtcctcaagaacttccagccacactgtgcctccatcagccaggaagtatagttcattgaacagcgcagatttgtaccaggcaggcagtgatctgtcatccaatacccggctctgccaagctgagatcctcttcttcccactctgcgtatcggcacagtgcatagtggctgagggcaggtgctgcatctccatcttggcccaaaggaacctgtaatacccgcctgtagtggacttggcctttagctccaaacatgatcctgggcatgtcccaagccagtgaaaactccaggcggcactggcctcgaggtcgcaacttgctggaaacacacacagctccagcaatgcctactcctttctgcgtaggggtgctttggccagtgggagagtccagctgtccatcctgaagtagatcctgccacacctgctgccccgtgctgtcagggtcaaaggctgtgatgtgggttaccgtggtagctgccgtgactcgtgcagccacagccatcgtgtaggggtttggaaagggttggatgatgcaggagcagcccccggacagtttccccgctacgctccagacagaagggctcattccacaaaccccctggggcatcgtctccaccacccagtccattccgcatggagaacatgatggacacatctagagcttcgtccccttcattttccacatcccacacaaagactcctacaggcaggctgctgtcctgggggcagaagattagactcagacggtcccagtagagcgcctcctgaccccactctgctaggatcagccctgggcacacagaggacctgactcaaatactccccagtgtactcttcttttgtccacttgcatccccccatattcccaggcaagctgcctagcagggaatatagaagaccagaaccagttgggcggtggttctgggaagccagtgtgatgttcatggctccaacctccctttcacaggccatgcagtttc

SEQ ID NO: 165226 - DNA, 890 bp, Homo Sapiens
ggaccgtgtgtacgagtagcattcagcttagcagcagtacttctactcctactttagctgaaaccgtggtagttagcgcacactcactagataagacatctcatagcagtacaactggattggctttctccctctctgcaccatcttcctcttcctctcctggagcaggagtgtctagttatatttctcagcctggtgggctgcatcctttggtcattccatcagtgatagcttctactcctattcttccccaagcagcaggacctacttctacacctttattaccccaagtacctagtatcccacccttggtacagcctgttgccaatgtgcctgctgtacagcagacactaattcatagtcagcctcaaccagctttgcttcccaaccagccccatactcattgtcctgaagtagattctgatacacaacccaaagctcctggaattgatgacataaagactctagaagaaaagctgcggtctctgttcagtgaacacagctcatctggagctcagcatgcctctgtctcactggagacctcactagtcatagagagcactgtcacaccaggcatcccaactactgctgttgcaccaagcaaactcctgacttcataccacaagtacttgcttaccaccaaccaatttaccactaggaacagttgctttgccagttacaccagtggtcacacctgggcaagtttctaccccagtcagcactactacatcaggagtgaaacctggaactgctccctccaagccacctctaactaaggctccggtgctgccagtgggtactgaacttccagcaggtactctacccagcgagcagctgccaccttttccagaccttctctaacccagtcccagcaacggggagaacaggta

SEQ ID NO: 165227 - DNA, 567 bp, Homo Sapiens
aaatgtaaaatagtttgggatctgttaaaaggaatacagttcgccccaaagcacctattttccacctgttgtaaacctcatccttccacctaagtaaactggaggagtcagctgtgttaatatggtcaaattaatttcatagttttgggagcagggaggttgtgggaaggacagaaggagaacttgggctttctttggtccacctggtggggcttggagcacttgtggttggggcccaaaggtcaggtctggaaatgcagctattatgccaaaaccaccagagtgctctttagcttcaggcttcatgaattgcttttaactactcaggtagagcatttttactaggctataaaagtagagttcatttttttctataggtcagcattttacctatggatggcattttctattttcggtgacggactatgagccaggataaacacattactctcttctttaacaaaaagagcatggttaactccaaagacttctctagaccagcctggatggtacctaaactttaatcaaccaatgctcaagtaaaagagcagtatccagccccagcac

SEQ ID NO: 165228 - DNA, 552 bp, Homo Sapiens
  misc_feature (32)..(32): n is a, c, g, or t
cggctggtacggtccggagttcccgggatatntcgacccacgcgtcgcgaccacgcgtcggccaagcggctggcccgcctggccctgacggctccccctgaggccctgctcatggtcctgcctttcatctgtaacctgctgcgccggcaccctgcctgccgggtcctcgtgcaccgtccacacggccctgagttggacgccgacccctacgaccctggagaggaggacccagcccagagccgggccttggagagctccctgtgggagcttcaggccctccagcgccaataccaccctgaggtgtccaaagccgccagcgtcatcaaccatggccctgtccacgcctgagtgtcagcatcgcgccactgctggagctcacggcctacgagatctttgagcgggacctgaagaagaaggggcccgagccggtgccactggagtttatcccagcccagggcctgctgggacggccgggtgaactctgtgcccagcacttcacgctcagctgaccctggcccacctgtgaataaatctcagctgaccccagcacaa

SEQ ID NO: 165229 - DNA, 666 bp, Homo Sapiens
ggaagggaggagaggggactggagagtgtggggaatgggaagaagtagtttactttggactaaagaatatattgggcgaagaatagagggggagcttgcaggaaccagcaatgagaaggccaggaaaagaaagagctgaaaatggagaaaaccagagttagaactgttggatacaggagaagaaacagcagctccactaccgacccgcccccaggtttgatgtccttccaagaataaagtctttccctggtgatggtctctcgctctgtctttccagcatccactctcccttgtccttctgggggtgtatcacagtcagccagtggcttcttcatgatggtcgttggggtggttgtcatgtgacgggtcccctcccaggttactaaagggtgcatgtcccctgcttgaacactgaaaggcaggtggtaggccatggccacaatccccagctgaggagcaggtgtccctgagaacccaaacttcccagagagtatctgagaaccaaccaatgaaaacagtcccatcgctcttacccggtaagtaaacagtcagaaaattagcatgaaagcagtttagcattgggaggaagcacagatctctagagctgtcctgtcgccgcccaggattgacctgtgtgtaagtcccaataaactcacctactcacca

SEQ ID NO: 165230 - DNA, 453 bp, Homo Sapiens
  misc_feature (367)..(367): n is a, c, g, or t
  misc_feature (382)..(382): n is a, c, g, or t
  misc_feature (418)..(418): n is a, c, g, or t
  misc_feature (437)..(437): n is a, c, g, or t
attcggcactagggaggagaggggactggagagtgtggggaataggaagaagaaatttcctttagactaacgaatatattggggggaggaatagaggggaggtgtgcaggaaccagcaatgagaaggccaggaaaagaaagagctgaaaatgcagaaagccgaagagttagaacttttggatacagcagaagaaacagcggctccactaccgacctgcccccggttcgatgtccttccaagaatgaagtctttccctggtgatggtcccctgccctgtctttccagcatccactctgtcttgtcctcctgggaagtgtatctcagtcagccagtgggttctttgatgatgggcggttggaggttgtngttatagtgttgatnggatccccttttaggttattttaggggtatattgtncccctgctttgaacccttnaaaggccaggttaatt

SEQ ID NO: 165231 - DNA, 1139 bp, Homo Sapiens
  misc_feature (1079)..(1083): n is a, c, g, or t
  misc_feature (1086)..(1086): n is a, c, g, or t
  misc_feature (1088)..(1088): n is a, c, g, or t
  misc_feature (1092)..(1092): n is a, c, g, or t
  misc_feature (1094)..(1094): n is a, c, g, or t
  misc_feature (1097)..(1098): n is a, c, g, or t
  misc_feature (1100)..(1100): n is a, c, g, or t
ggtgctgctgtgtaccgactgaagccaggcagggtctgggatcctcagggctccacctctccatctggaagccggagccataactgctgcagtttgggcccaggctatgtgctcttctggtgccctagggactgctgtggccagagcctggggccagccagtacagtcctgagccgaggaggagggactgcaagtggaagagagccagtctggaaggaagagctttccaggcggacagggcttcttggaagacccccaaagccccaggtatcctgggtgaagcctgtttgcctctcttgaaaatggcaggtgctcttgttttacccatgttgggtcagcctgaaactgccaaccagtaggaagcatggactctcctgagtgagaagagactgaaataggagcaagcagaaccctgagaggtgtcccatcttattgctgttgaggaccctgaaacaccgttgtttaaagacttcacacagaaggctctgaactgagccactggggaagggaagtttcagtaacatgacactaaaatggcagagacgttaaaaaaagtttttcccttctagagctgttttgcgcgcatgcatgtctgtgtgcattggggctttttagacaggcctgccctgtgactttgtggtagaggcagagagaaggaaattgtcccctgagcacggtagggccttgctgggtggggtcagaggccagtagttccaggcctttctctgtgtccagcacagacccttgtccttgctgtggaaatgatgagggatggagggacaggaggaagaatgagaggacacacgccctggagccctcaccactgccctgggggttgccatctggaggagcctggggataagggtaacccagggaggctgggcacgagggagctgactccacgttttttcccccgttcctcaccttcgagggccctgctaggtcacccctatgctgccatgaagagcatgggggcataaaccagcacagtctctgaccacttgggagcgtctcatccaagtgaaagaagacagccgtttaaagcataaaacatccaaattaaagatgcctttttcccnnnnnaananaaananaannanaaaaaacctccgaaggcattctatgttccggggtggccg

SEQ ID NO: 165232 - DNA, 387 bp, Homo Sapiens
ttagaggatcccccgcttggcgctttcgagttgccgcttggggctttcgagttgcaggggagaggcctggagcctttggcacagggatacctccctttctctgaaaaggtacaagatacaaaggcagctggtttgtttgtgaaagggattgtccttggacagaggtgcctgagcaccagcatcagtggaggccgacactggtacaaagtgtacccagtgtagacagtgacctatggtcatggaaaagtgttgtcagctcaaggatgccagtttgtcatctctgtgagcagggaatattgtctcctttgctcactgctgtactcccagcaccgagaacagggcttggcaactcgaaagccccaagcggcaactcgaaagacccaagcg

SEQ ID NO: 165233 - DNA, 951 bp, Homo Sapiens
ccaggaagaggagggagacagagaagtggttctgtatggctaggaccaccctactacacgctcagctgccaacagtggattgagtttgggggtagctccaagccttctcctgcctctgaactgagccaaaccttcagtgccttccagaagggagaaaggcagaagcctgtgtggagtgtgctgtgtacacatctgctttgttccacacacatgcagttcctgcttgggtgcttatcaggtgccaagccctgttctcggtgctgggagtacagcagtgagcaaaggagacaatattccctgctcacagagatgacaaactggcatccttgagctgacaacacttttccatgaccataggtcactgtctacactgggtacactttgtaccagtgtcggcctccactgatgctggtgctcaggcacctctgtccaaggacaatccctttcacaaacaaaccagctgcctttgtatcttgtaccttttcagagaaagggaggtatccctgtgccaaaggctccaggcctctcccctgcaactcaggacccaagcccagctcactctgggaactgtgttcccagcatctctgtcctcttgattaagagattctccttccaggcctaagcctgggatttgggccagagataagaatccaaactatgaggctagttcttgtctaactcaagactgttctggaatgagggtccaggcctgtcaaccatggggcttctgacctgagcaccaaggttgagggacaggattaggcagggtctgtcctgtggccacctggaaagtcccaggtgggactcttctggggacacttggggtccacaatcccaggtccatactctaggttttggataccatgagtatgtatgtttacctgtgcctaataaaggagaattatgaaataatttcaaaaaccaacacctatactcccaccctcaacatgt

SEQ ID NO: 165234 - DNA, 2432 bp, Homo Sapiens
  misc_feature (2094)..(2103): n is a, c, g, or t
  misc_feature (2375)..(2375): n is a, c, g, or t
ggtatgattagttacagagaatattttcatcccctctccctgaatagaaaagcaggggtcaccatttgtatccttacccttgaggtgtttttgaagatgctgtaactcttgaagttgagctgaggcagaaaggttggaaaaatgcagccctctgggtattgtggggagggatgtgatgtagtaagagggtgttttgtggtgctaggattcccacgccaccaacttgcagctttataagagcgctaccaagaaccaccactggggaaaaggttcttattcattgtttctgttggaatgtgatcttgctttctggattttaggaattcaggttactcagtataaaactctgagaaatcagtgtgacttagtccttcacctcctaagataaagtgaatatttctttacaaaataattcatgtccttaatgttaaagatgtaattttattttcaaaacatctataacatgactttcagaagcagttcatttttccaagattcctcacattatactagataaataataggccctcagttaatacccttcagttattgaattaatctagtttgtggaatgaggtgtatcctgccaactcccctctgctcccaagtacactctgagaggtaaaatgctctgggaaatggaacaagaatcgagtggatgctgactctgtgtgcccacctcctcaactgattgataatggttgaccttgggcaagtcacttctttcaatgcctcagttccccatctgtcaaatggggttaataatactgacctacctcacaggggtgttgttgtgaggcagtgtaaatcaaagttaatagaatacttcagggtcctctgtggaggatgtcttgagccagagtttaagcctgacacacaggctttggtcctcactgagctgtctccaagactggaactacttagtgactcggcaaattttctgccccccacccctcatcaaagctgctagttcagatgttgacagtgttttcatgaacgttggaatcttactagtccagacttacttaggatgttgttgaaaaaggcacttgggattttctgtgtcttgcattcacagagggaggccatttcagattcaagagcattggattagggaatcgtgaggcagggatgctactgcgtatttctctctgcaggttggggattaaagttcctttccccatgggtttgaagcagactcagactgtctcaggatcaaagcaaccctcaatggttttgatttatgtcattgcttaccactccccaaccaatcccaggacagctgggtcactgtacccctttgtggtatctgtacctgggcctctccttcctcatagggaccagctgattgaataaatgtgaccaccttatttccaccccccacccccaaaagctacattggaattatttatcctagaaatgtgtataacactcagaattgggcattgatctcttaaagcttaatcccattcaccgtatatcaacatctgtcatctcttagtgtctgcagtctgaacctaaccttgaccttctttccctctggtttgagaaaactttggacactatttctacttggccaggtgtgggctcaagagccttactctttccatctcagtttaggggcgcagccagctcctcttcccaatagggctctttctgctttccctctccttggccctagatttgtaatccatgaaaaagcacaaggtcctggctccttgcggtcacattctggttctctgtgttttgtggactctgctctcactgttcacgccagcactagcagtaccagatggttctgtggagtcctggggaatggagagagcacagtctgactcccggccaagtagccaggagttgacttgcccatggtccgctggcgttcccaccacttcctacaggatgggatctaagagactcaagagctgggcttctttcagcactctgtactgtcccaaatagcaaacaaatcactttgtagccagatttctgaatggaaatgagaaattgaattctccatggacttttaggtttatgggggagttttagctgcgtttcttggttttatttcagccaaacatgtctgcttttgannnnnnnnnnaaagtataagtggtctatatatatgttcaccttttaaatgtaaatgtttaaaaagtaagcatttatgtgtttccataactgacatctgatgcagacctcattctctcccccctcttctaccctcctcttttcccccctttcatactcttgtattgggttctaataaatggttggcttttgcaacgcaccgccttataaaaacgaaccataaaaccttggccggcccggccctcgggccctccgaagaaggctttttttaaaaacccatttcntttttgggctccccccgcgggcccccaattcaggggtaaaacctggaaaaccacggc

SEQ ID NO: 165235 - DNA, 1002 bp, Homo Sapiens
gaattgatgttcgtctgtgtgatgttggtgaggccatccaagaagttatggagtcctatgaagttgaaatagatgggaagacatatcaagtgaaaccaatccgtaatctaaatggacagtcaattaggcaatagagaatacatgctggaaaaacagtgccgattgtgaaaggaggggaggcaacaagaatggaggaaggagaagtatatgcaattgaaacatttggtagtacaggaaaaggtgttgttcatgatgatatggaatgttcacattacatgaaaaattttgatgttggacatgtgccaataaggcttccaagaacaaaacacttgttaaatgtcatcaatgaaaactttggaacccttgccttctgccgcagatggctggatcgcttgggagaaagtaaatacttgatggctctgaagaatctgtgtgacttgggcattgtagatccatatccaccattatgtgacattaaaggatcatatacagcgcaatttgaacataccatcctgttgcgtccaacatgtaaagaagttgtcagcagaggagatgactattaaacttagtccaaagccacctcaacacctttattttctgagctttgttggaaaacatgataccagagttaatttgccacatgttgtctgttttaacagtggacccatgtaatacttttatccatgtttaaaaaagaaggaatttggacaaaggcaaaccgtctaatgtaattaaccaacgaaaaagctttccggacttttaaatgctaactgtttttccccttcctgtctaggaaaatgctatcaagctcaaattagttaggaatgacttatacgtttcgttttgaatacctaagagatactttttggatatttatattgccatattcttacttgaatgctctgaatgactacatccagttctgcacctataccctctggtgttgctttttaaccttcctggaatccactttctaaaaaataaagacattttcagatccga

SEQ ID NO: 165236 - DNA, 881 bp, Homo Sapiens
  misc_feature (36)..(36): n is a, c, g, or t
gcgacggaatggaggaggtgcctcacgactgtccangggccgacagcgcccaggcgggcagaggggcttcatgtcagggatgccccaaccagcggctgtgcgcttctggagcgggggccactgcggacacggctatagaggaaatcaaagagaaaatgaagactgtaaaacacaaaatcttggtattgtctgggaaaggcggtgttgggaaaagcacattcagcgcccaccttgcccatggcctagcagaggatgaaaacacacagattgctcttctagacatcgatatatgtgggccatcgattcccaagataatgggattggaaggagagcaggttcaccagagtggctcaggctggtctccagtgtacgtggaagacaacctgggggtgatgtcagtgggcttcctgctcagcagtcctgatgatgctgttatctggaggggacccaagaaaaacggcatgatcaagcagttcctccgagatgtggactggggagaggtcgactacctcattgtggacaccccacctgggacgtcggatgaacacctctcggtcgtccggtacctggccacagcacacatcgatggagcagtgatcatcaccactccccaggaggtgtcactccaggatgtccggaaagaaatcaacttctgccgcaaggtgaagctgcccatcatcggggtggtggagaacatgagtggcttcatctgtcctaagtgcaagaaagaatctcagatattccctcccacaaccgggggcgcggagctcatgtgccaggacttggaggtccctctcctcggcagagatgccccttggatccgctcataggcaacaattgcgacaaaggccagtcttttttcattgacgccccagattcca

SEQ ID NO: 165237 - DNA, 327 bp, Homo Sapiens
cacaaatgtacataggttctccaagatctagcagtggtacgaaggtccaacaccagccccatgggcttcctccggccgggatcatgctccccagtaccagcagacacagcacagacagtaaggacagaaggctctccactgggtctatctaggccttactcaccttcccctttggttggtaccatatcctgagcaattcagtcagtgctgctgtgggcatcctcagggccatgactccaggagtagaaactcctcaggttctccagtgccacaagctcagtccccacagtctctcttatcgggtgctagactgcagagcgcccccac

SEQ ID NO: 165238 - DNA, 130 bp, Homo Sapiens
caagacctgatggatatccttgccccctcccctgctattatacatctttcttccttttttgtgtcccttcttgtactcatggcagaagcagtgacacaaaaaaggaagaaagatgtataatagcaggaag

SEQ ID NO: 165239 - DNA, 731 bp, Homo Sapiens
ccgaactgttctgcccacataaaatatgtcttactgctcacaagatcaaaagaaaacagaacaaaacattgaaacatcagaatgtttaaaacactagatttcattcaatggtccaatgggacacgtgctcatgggaacttatttctgcttcagctctagttctttgagaaacacaagaattcctttcaccaaaatattagcctgacacaagaatgttgaaaggttagctgccttagctttattgctgcctataatctccaaagatatctgaacacctagaagattaaatgtagcaagaagtggaagagaaacacagtttataagtcatttaataactataattgcatagaatttactcacttttcaaatacttattctgaatgaataccaaatttgtgaaacaaaatatatcctatggtgcttaaaatggttgttaaatggtgagttagttttccaagtaaaaactttacgtgcattaacagaggggaatgcataataatcctatgaggtaggccctattatcctcattgaatagaagagaaaaggaggctcaaaaaaattaagtaacccacaaaaagtcacacagctgtgactgtcagtgtcctgctgggcactgcaaactaggccacttttagagtaagatcattttaaattgagtactcttacttacaaaatgacacattaatgtgataattgacacaatattcagaggcagagcaggggatctctaa

SEQ ID NO: 165240 - DNA, 549 bp, Homo Sapiens
  misc_feature (335)..(335): n is a, c, g, or t
  misc_feature (395)..(395): n is a, c, g, or t
  misc_feature (404)..(404): n is a, c, g, or t
  misc_feature (451)..(451): n is a, c, g, or t
  misc_feature (461)..(461): n is a, c, g, or t
  misc_feature (468)..(468): n is a, c, g, or t
  misc_feature (493)..(493): n is a, c, g, or t
  misc_feature (509)..(509): n is a, c, g, or t
gatgacacacactgagtgtgcagacgaggaatgaggggcgtgctcctggccatgtattcgctcctgcagcggcctcctgccacgatggagaaggaggagacaacccgggagctgctgctgcccaactggcagggtagtggctcccacgggctgaccatcgcccagaggacgacggcgtctttgtgcaggaggtgacgcagaactcccctgcggcccgcactggggtggtcaaggagggggaccagattgtgggtgccaccatctactttgacaacctgcagtcgggtgaggtgacccagctgctgaacaccatggggcaccacacggtgggcctngaagctgcaccgcaagggggaccgcttcttcccgagcctggcccagacctgggacccgtnaagtttttnagctccttgcagcttcttgaagtggtttttgaaacacaccacagccnttcagcattnggaattncaaagaccagaacaaacaggaaggnaagccagcagccaagncgggggcattttttaatttttccaccccaattgcaggatt

SEQ ID NO: 165241 - DNA, 654 bp, Homo Sapiens
tccccgcttcctgcttctgccccccaggcatacatagtattatgagtctgtgaagggttgacttttgaaaggaggaaacgggcctggctgcctccatgttcagtgtcaatgtatcttggcattggaaatctggagtgaagaatttcctgtgcatcatccactggggcttgcagaagctggcggaaattttcatactcaggcatatcctggcatcctgacttccgccactgtgctatggtctcaccatgataaatcaaaatctggaagaatgtgtccatgagaagaatacgatctgcaagaatgctactgctatcaagaagaaccggctctggtggtccactaaaagaatacgcatacaggataggctgaatcataattagagactgggtcagatcttgacgcataaaatggtgacgataatatgaactctcatcaggactattgttaaaaacttgcaggaaagagagatcttcttaaatgaaacataaacctgtggataaagggagaaagtttctgagaatctgaaggaacttggctcatctgtatgatattcgccccaatttctgacacagtcgaatgagctgtctgtccagccacctaagcacatctggaccttcttctgtttctgctctatatattgctatcctgccatat

SEQ ID NO: 165242 - DNA, 346 bp, Homo Sapiens
tcaccaagaccctgggcagaatgtaggtctcatggaagattttcatgtggacaaatttagtaaatcttttgcaggtagtttcctgacatatttaacatttgtgatatagtaaacaataagaaggtactaaagtgctgggattacaggtatgatccactgcgcccggcctccaagccccctatttttattttgcactgaccctacaagttacgtagctaggcttagttatgcttttagcaaggaaagtgtataatctcatgtaccttttgaaagattactcaggtctctgcatgtgaaatggaatttagggaatgcaagagagggagtaaaaataacagcgaggaag

SEQ ID NO: 165243 - DNA, 479 bp, Homo Sapiens
cccagcaagccccgccataacatactagtttggagctgacgtcactccacccacacacaagaggcccccgtctggacatcggtcccagcaggcttcctgaggggctgtggggacccttcctgagtttaccttgaacttcatggagcccttcccagccccaggcagtcagggctggaactgaggaggggcagagcctccctggggagctaggagggcttcctagaggaggaggcggcacagcagagagggcccaaggatgaagaggcttttccatgtgtacccagcgggagggtggtccaggcagagcacacagcaacagcagaggcctgctgtgagggagagcagtgggcgatcaggggcctcctagtccaggagaggtgcctgggggctgcagggcacacacttgcttcccgagaatccatccctggagacacatccccagcagagacaaggctccaagaacaccggcctggccctgc

SEQ ID NO: 165244 - DNA, 537 bp, Homo Sapiens
cccaatgtggggcgcttattcggtattggccatggctctaccatgatcccagaacccacacacttacaggcggattccagagactgtccaactgaaaactataacaagatcatctttgcccgcaagcctatgatgaggatgctccctacagttcgctactgaccaacaaggagaaacatgcaaatgttttagccaggggtccctgcagccattccccaagaacgtacagcagttaagctccatttaccactcacttgacagtgtcctttaaatctgaacttgctcttgctcatgcggagcttggctaagagaaaccagatcagaatgcaagctgtaggtgggtgggtgagtgtgtcccctcccacactgctctctggtgggtttgggcagtccctggctctagtctctgctgcagattctcaggaccaaaatgtgggtgattggtctgggtccaggcaggagacagaaatcacacaagctcttttattagagataatataaagaatgattaaccaggggacagtaaagggcaggaag

SEQ ID NO: 165245 - DNA, 475 bp, Homo Sapiens
actgctgctgcttagagttcatattcaacgggctggggcgggaagctgagagatgatgaatgtgtttctgtcagccatggcccaagttcttcatatgtttcccagaagtggttgaccaggtactgtgcccgttccagctgcagatacctttctgaattaatctggcagatggtatcatagttcttcagtaccttgtccagttcttttcttcattgattgcttttcctcttcactgcatgcggtcatgattgtatgcccagattgaacaaggtcatcaataatatccgtgtgtctcaaaatctccatggagaatgtcttttgaacttgaagctgagcataaaatcatgaccgcatgcagtgaagaggaaaagcaatcaatgaagaaaagaactggacaagaccctgaaagaaaacacaacggcagaagcaggaagcggcagaaagcaggaagcagcagaagcaggacgcggggatc

SEQ ID NO: 165246 - DNA, 617 bp, Homo Sapiens
cgggggcgtcctgtagctatgccagcggggctgggcaggccagccgggcatcctgaccgatgggcaccctctcccagggcaggcggcttcccgctcccaccagggcccggtgggtcctgggttttctgcaaacatggaggaccactttctgatgggacattttcctttcttctttctgttttctttcccttgtttttgcacaaagccattatgcagggaatattttttaatctgtagtattcaagatgaatcaaaatgatggctggtaatacggcaataaggtagcaaaggcaggcgctttgcagaaagaatgcttgaaaacttgagtctccctagaggtgaaaagtgagcagaggcccctagaaaccctcctctgaatcctcctaattccttaagatagatgcaaaatggtaagcccgaggcatcgcgcaaaagctggcgcgatgcttcagggaaaatggaaaacccacgcaagaataatgattgattccggttccaaaaggtgtcacctacctgtttcagaaaagttagactttccattgccttttccttccatcagatgagtggctgagagagaagtgcctcatccctgagccacacaggaggcgtgggagcat

SEQ ID NO: 165247 - DNA, 531 bp, Homo Sapiens
ttcattaaacgtcttgggcaggctgtgcagacaggaacctggagatgtaagaaaagagtaacaggatgtcatatacgttcctccctactcgccaatatggtaccatctgcctggaaccctatcaagagaggaacgtaatagacatcctgcctgtggatgactggggacagaaagtctccttctaccagctgagtggaaaacagataggaaaggatcgggcactgaactttgacccctgctgcatcagctactttactaaaggcgagtacatattgctgggggggtacagacaagcaagtatctcttttcaccaaggatggagtgcggcttgggactgtaggggagcagaactcctgggtgtggacgtgtcaagcgaaaccggattccaactatgtggtggtcggctgccaggacggcaccatttccctctaccagcttatttacagcacagtccatgggctttaacaaggaccgatatgcctacagggatagcatgactgacgtcattgtgcagcacctgatcactgagca

SEQ ID NO: 165248 - DNA, 1554 bp, Homo Sapiens
gcggccgccctggcttccttctacctgtgcggccctcaacgtctccttggtgcgggacccgcttcactttcggctcccggagtctccctctactgctcagacctctggacctgacaggagacgcctacttggctctgacgcggcgccccagcccggctgtgtccccggcgccccggaccaccctccctgccggctttgggtgcgttgtggggtcccgaggattcgcgagatttgttgaaagacattcaagattacgaagtttagatgaccaaaatggatatccgaggtgctgtggatgctgctgtccccaccaatattattgctgccaaggctgcagaagttcgtgcaaacaaagtcaactggcaatcctatcttcagggacagatgatttctgctgaagattgtgagtttattcagaggtttgaaatgaaacgaagccctgaagagaagcaagagatgcttcaaactgaaggcagccagtgtgctaaaacatttataaatctgatgactcatatctgcaaagaacagaccgttcagtatatactaactatggtggatgatatgctgcaggaaaatcatcagcgtgttagcattttctttgactatgcaagatgtagcaagaacactgcgtggccctactttctgccaatgttgaatcgccaggatcccttcactgttcatatggcagcaagaattattgccaagttagcagcttggggaaaagaactgatggaaaggcagtgacttaaattactatttcaattggataaaaactcagctgagttcacagaaactgcgtggtagcggtgttgctgttgaaacaggaacagtctcttcaagtgatagttcgcagtatgtgcagtgcgtggccgggtgtttgcagctgatgctccgggtcaatgagtaccgctttgcttgggtggaagcagatggggtaaattgcataatgggagtgttgagtaacaagtgtggctttcagctccagtatcaaatgattttttcaatatggctcctggcattcagtcctcaaatgtgtgaacacctgcggcgctataatatcattccagttctgtctgatatccttcaggagtctgtcaaagagaaagtaacaagaatcattcttgcagcatttcgtaactttttagaaaaatcaactgaaagagaaactcgccaagaatatgccctggctatgattcagtgcaaagttctgaaacagttggagaacttggaacagcagaagtacgatgatgaagaatatcagcgaagatatcaaatttcttttggaaaaaacttggagagagggtccaggaccttagttcatttgatgaatacagttcagaacttaaatctggaagggttggaatggaagtcctgtgcacaaatctgaggaaattttggaaaaaagaatgcctgtgaggttaaatgaaaaaaattatgaaactcctgaaaatctttgacaaactttttggaagggtcagatgaatccccaagccttaacctgttgcctgctcacccaggtttgaaaaatatggtgcgggcatttatcaccgaggg

SEQ ID NO: 165249 - DNA, 924 bp, Homo Sapiens
ggccaacgcaagtaggcccatgagcatctccctggtaccagcagacatgcactctacttcttctcctggtcacacgccgctgtcctgctgagcaagcgaccgaatgttccgtgaggaatggaagctctattgttgacttgtctccccttattcatcgcactggtggttatgaggcttatgatgagagtgaggatgatgcctccgataccaaccctgatttctacatcaatatttgtcagccactaaatcccatgcacggagtgccctgtcctgccggagccgctgtgtgcaaagttcctattgatggtccccccatagatatcggccgggtagcaggaccaccaatactcaatccaatagcaaatgagatttacttgaattttgaaagcagtactccttgcttagcggacaaagcatttcaactacacctcgctcatcgcgtttcactgtaagagaggtgtgagcatgggaacgcctaagctgttaaggaccagcgagtgcgactttgtgttcgaatgggagactcctgtcgtctgtcctgatgaagtgaggatggatggctgtaccctgacagatgagcagctcctctacagcttcaacttgtccagcctttccacgagcacctttaaggtgactcgcgactcggcacctacagcgttggggtgtgcacctttgcagtcgggccagaacaaggaggctgtaaggacggaggagtctgtctgctctcaggcaccaagggggcatcctttggacggctgcaatcaattgaaactggattacaggcaccagggtgaagcggtcgttttaaagttacgttgaatggtgatcgtttgccctccagaaaccgattgacggcgttcccctgtgtcttccctttcatatttcaatggggaaggagctacgagggagtgcatcatagagagc

SEQ ID NO: 165250 - DNA, 638 bp, Homo Sapiens
cttcctgcctctgccctacaaataaagttctcactcttgaaagaaactacaccagggttaggagatcaaatgtggcatgtgactgtgactttgtagatgagtggaacctctgccataactctttctgctccccaaaatgtcctgagaatttggctaggacagaacattagtcattgaccgctcctagccagatctggagaactgagctaggcacaaaattccatctcagttactataatcaaaaaccttctgctgctttgatacttagttttttggccatgcatcttggcaggaatgtaagtttgattgactgtgttaaccttcatattgagagccttttgaagcagaaatctcttttattggtacacatacaacttgatttcaaaaatggaataaattagaatataatggcatagtataattaagcttggtttcatctgagatctgcaaccacattaaagggtgtcagaaaaattttttaaaatgtatttacttagagttctttcatctggggaacaaaagtaaaacaaagtgaattatataatataatagtccttttagaacagcagaggggtatccaaaaatcaaaccaatgacctactaagaaaagcagaggatcacttttctaacaacagtcc

SEQ ID NO: 165251 - DNA, 1234 bp, Homo Sapiens
gggtttcccggcggggtcctgcggagttggcggaggctcctccagggactggggcacagatctgcgtagaaacgggtggcggggaagacaggggaggagagctctgagtgggaagcggagccgggggcctgggacccgtcgcgtcagagccaggcaagtgaaccggagcaaacgacttccgatccagtctgcgctgttgcggctcccgtttgggatttgatttgcagcatctttgagcctctacgacaaaaaaccgcgaagcacgcccagccctcccccggcaccccgaaaagcacccactccctcccggggacacagctgggcgcgtccacacccccgcagccccacaccatgttgtgcggaaggacttccactccccgcctgtgtcgttgatgtcagaccccaggccagcctccgggcgctgcagttctcccggctaatgctgaggctgcggctccggctctagcacaggcaccagccgccgccgcacccggcctcagcgcccaccgtctgcatgtgcccgccgtagccgtctgcccagcccgcagcccgcgctccacagagcgctggaagaacaccgttggggggccccttctgccctcgagagaagcggtcttggaggtatcgatttaagggggtgggatttttttccgtggatctatcaattcacaattcgaatttggaagaaagaaggaaaacatgacgtctccagccaaattcaaaaaggataaggagatcatagcagagtacgatactcaggtcaaagagatccgtgctcagctcacagagcagatgaaatgcctggaccagcagtgtgagcttcgggtgcaactgttgcaggacctccaggacttcttccgaaagaaggcagagattgagatggactactcccgcaacctggagaagctggcagaacacttcctggccaagacacgcagcaccaaggaccagcaattcaagaaggatcagaatgttctctctccagtcaactgctggaatctcctcttaaaccaggtgaagtgggaaagcagggaccataccaccctgagtgacatctacctgaataatatcattcctcgatttgtacaagtcagcgaggactcaggaagactctttaaaaagagtaaagaagtcggccagcagctccaagatgatttgatgaaggtcctgaacgagctctattcggtcatgaagacatatcacatgtacaatgccgacagcatcagtgctcaga

SEQ ID NO: 165252 - DNA, 469 bp, Homo Sapiens
cgccaaatgtgaaatgatgtcatagaggaagaccttgcaaaggaggttcaaaatggaagactgtttaggctcctagcaaaattgggaacaatcaatgagaggccggagtttcagaaggatcccacttggtcagagactggagaccgttatctgttgaaactctttagggatcatctttttcatcaggtgacagaagcaggtgctccctggattgacctcagtcatataatttcttgtcttaacaagctagatgctggtgtgccagaaaaaataagcctgatttccagaggtgagaagagtgtacttgtggtgacctacagtgacttaaagcgctgctttgaaaatacttttcaagaactgattgcagctgcaaatggtcagttgtagtatttgctaaaaaagcacgcaggacatggctaaagaccttaaccaatagcaaattgcactacagctgaacttttcatcatct

SEQ ID NO: 165253 - DNA, 957 bp, Homo Sapiens
  misc_feature (191)..(191): n is a, c, g, or t
  misc_feature (444)..(444): n is a, c, g, or t
  misc_feature (531)..(531): n is a, c, g, or t
  misc_feature (544)..(544): n is a, c, g, or t
  misc_feature (569)..(569): n is a, c, g, or t
taaaaatgtaggagtaactaaaacagataggatataaaacctagagaccgtttgagttggctaagatggcacagcctatgcctaagagtgaagattgtgcaagggcagggtctggtgaggaagaggagagagtgcaacataggcagagtgaggggggattcccacaattttctaagacagaaaagtggggngaatcagtagttactggaaagaataggcaatgcctgactggatagaaaaagattctatgcctttgtcaaattttcacaaaagcgacttaagcctatactgcgggatgttcacactacgtccctttagtgcagttacggtacttcagggctgcaagtaaccaaatacaactaaaattgtcttatacaataaggggcgtaattatctcatataacaaaaagcttggcatgaaggaaatttcaacaaattcacaancggcaacaaaaaactctgtttcttctacctttccaccattcctgtgttctcagttccaatatggctgctaacatccatatgtcttcnccgcacatctctntaaaagctacaaaaagatttcccanaagcgtctggaaaatttcctgtcccatctccattggccagacccacctcccatgggactgcctcttgtgaagcacacaaagggcagataccaaacggtaccgttagggagacccagaagatggaccatccaggatagagacatgaagggcagaagagggcccagggatgtgtgtccctcagctggactacagggaaggagttttggtcaggggaagaaaagcctcatttcctatcagtcactggtggaatgactaaagatgctaatggactcaaccaaaaaaatggccggaggcgtgagacagaagaacaagaaaaggtgtgcaggtgcactccgtccacagcgctgtagaaggagacattcccagtcccacgatccaggtaaacccc

SEQ ID NO: 165254 - DNA, 417 bp, Homo Sapiens
agcctatcatgccactgggagagtgtagctcagtgttagagtagcagcaatagacagaatgacagcgactcactgagtcaacccagtacttttagtaccccaacactatgtgaataaaggcagctagaaaatggactcaataatactagcaagccttcatggcaacaagcccatattaagacttactagaacaagttaaaaaaacatcttccatttccatccatgcatgggaaaagggctttagtatagtttaggatggatgtgtgtaataactaataaaatgataagatatgcatagtgggggaataaagcctcagagtccttccagtatggggaatccattgtatcttagaaccgagggatttgtatagattgttgatctactaattaattcttcacttatatctgaattttcaa

SEQ ID NO: 165255 - DNA, 826 bp, Homo Sapiens
  misc_feature (227)..(349): n is a, c, g, or t
gagtggcatgcgcggggcccaattgaatccgagctcgttatggatccgcttgatagaaccagttaaatcatcgggggttcttttggttaggttcataggcgcccggtttctccccggggtttttatatggtaggaaatcaagcatgcatactttatcaggtggtccctgggaacacatagtagctagttccatttctttcttgggatcttgtgtcgaatgagaaagnnnnnnnnnnnnnnnnnnnnnnnnnnnnnnnnnnnnnnnnnnnnnnnnnnnnnnnnnnnnnnnnnnnnnnnnnnnnnnnnnnnnnnnnnnnnnnnnnnnnnnnnnnnnnnnnnnnnnnnnnnnactaaagttcagaaatttctgtaagacaagtacattaatgaaatgtttccaaagaaatactgaacaatatatactctagtttgctgaggttccagctcaagagttcaaacctaattcttgtgcaataaaaatcagcatggatcttagatgatctagaatacactgtgttttgaaatccacagctggtttcatttttaaccattatgaaaaaccagtactcctattccatcaaatgtgttttataagcaataaataaatccagatccactgtattatgcaacatacatctttggaaagcaacataaacagagagatcagatcagtagaaatatacacagttaaaagaaatacacaaaatactgtagttttattaaaaactactacttgagaaagaaatctttccacaaatagcataaaactgtagaatgatgaaaggatatgggaaaagctttacaaaagcttaattccatgtatctc

SEQ ID NO: 165256 - DNA, 633 bp, Homo Sapiens
atcgttatgctgagtatgttaagctctttatgactgtttttgtagtggtatagagtactgcagaatacagtaagctgccctattgtagcatttcttgatgttgcttagtcacttatttcataaacaacttaatgttctgaataatttcttactaaacattttgttattgggcaagtgattgaaaatagtaaatgctttgtgtgattaaatctgattgcacatgttcttcacgagagctaaattacaattgctcatttataaaaccatcaaaaatattccatccatatactttggggacttgtagggatgcctttctagtcctattctattgcagttatagaaaatctagtcttttgccccagttacttaaaaataaaatattaacactttcccaagggaaacactcggctttctatagaaaattgcactttttgtcgagtaatcctctgcagtgatacttctggtagatgtcacccagtggtttttgttaggtcaaatgttcctgtatagtttttgcaaatagagctgtatactgtttaaatgtagcaggtgaactgaactggggtttgctcacctgcacaataaaggcaaacttcacagcaaactgcaaaaggtgtttttgcagtagtaacg

SEQ ID NO: 165257 - DNA, 1341 bp, Homo Sapiens
tcacactggactatcagtcaggtgattaatagggaaggagttaggagaagtgcctataaatgaaaaaaaggctgacttgctccgatactataaattcatgcatcaggataggcaaggagtggcacggaatttactatgccaaaaagaaaaacggagataatatacaacaaaatgtgaagataatacctgtcattggacagggaggaaaaattagacactatgtttccattatcagagtatgcaatggcaacaataaggctgagaaaatatccgaatgtgttcagtctgacactcatacagataatcagacaggcaaacataaagacaggagaaaaggctcactagacgtcaaagctgttgcctcccgtgcaactgaagtttccagccagagacgacactcttccatggcccggatacattccatgacaattgaggcgcccatcaccaaggtaatcaatattatcaatgctgcccaggaaagtagtcccatgcctgtgacagaagccctagaccgtgtgctggaaattctaagaaccactgagttatattcaccacagtttggtgctaaagatgatgatccccatgccaatgaccttgtagggggcttaatgtctgagggtttgcgaagactaatcagggaatgaatatgttctttcaacaaaaaacactcaaatggtttcaagcaatataatcactcccatctcccttgatgatgtcccaccacggatagctcgggccatggaaaatgaggaagtactgggactttgatatttttgaactggaggctgccacccacaataggcctttgatttatcttggtctcaaaatgtttgctcgctttggaatctgtgaattcttacactgcgtccgagtcaacgctaagatcatggttacaaattatcgaagccaattatcattcctccaagtccctaccacaattctacacattctgctgatgtgcttcatgccactgcctattttctctccaaggagaggataaaggaaactttagatccaattgatgaggtcgctgcactcatcgcagccaccattcatgatgtggatcaccctgggagaaccaactccttcctgtgtaatgctggaagtgagctggccattttgtacaatgacactgctgtgctggagagccaccatgcggccttggccttccagctgaccactggagatgataaatgcaatatatttaaaaacatggagaggaatgattatcggacactgcgccaggggattatcgacatggtcttagccacagaaatgacaagcactttgagcatgtcaacaaattgtcaacagcatcaacaaaccttggcacactagaga

SEQ ID NO: 165258 - DNA, 1028 bp, Homo Sapiens
  misc_feature (95)..(116): n is a, c, g, or t
  misc_feature (146)..(146): n is a, c, g, or t
  misc_feature (795)..(850): n is a, c, g, or t
cggaggcggggtacaagagcgagaggagatgatcccccccggggtgggaagaccttttgttccgcgtttttgttacagcaggagcgagtttcccnnnnnnnnnnnnnnnnnnnnnnaatggcccaccgcattaggccggagcgcanccagggtccgtccagaattttagcaggtcaagggtcgcaagagccagtattcgaaaaaggagtggcccccctttttttagagatctagaatgtttacatgtagttaagagcaaagtgctatgggggtttagaccaggactgtttgtttgctctcctgccctaccaccaagcagagcagcagggctcctggggagagggatttcaacccccctgatggcagggggtgctctggggaggagagaggagagaacaggctgttttggaaaattccagcactttgacttcgggccatgcgtctctcctggacgttctgagtacggatcgctcaggcctcctgccgtctccaaaaggagtggtcagccggtctgcaggacacctctcagtttctccttttaccagcaggaaaatgtacatttaagcataaaccacaaggctgcacacggtgagaccaggccactgcccagggagctgctgtcggaggaggagtgtggaaaaggggccagggaccccgcaccccacaccaaattaggaacaggtagaatcccaaaggcaaggcccggccacttgtagctaccctgatccagtctcttgagcagcacagctagaggcctgtggcccccgactcccagccatactcagacctgagcannnnnnnnnnnnnnnnnnnnnnnnnnnnnnnnnnnnnnnnnnnnnnnnnnnnnnnnggacccggcgggaagagcccgtgctcagagctccgaacttcactttacattccagtcccgggttacactagcacaaaggacacaaggaatccgatttatttacaaaatattaaaaagtcagttaatcatctacacagtaccccccatcctgccattatttatacatgcactagtttgg

SEQ ID NO: 165259 - DNA, 679 bp, Homo Sapiens
ggtccacactcctcctccgacagcagctccctgggcagtggcctggtctcaccgtgtgcagccttgtggtttatgcttaaatgtacattttcctgctggtaaaaggagaaactgagaggtgtcctgcagaccggctgaccactccttttggagacggcaggaggcctgagcgatccgtactcagaacgtccaggagagacgcatggcccgaagtcaaagtgctggaattttccaaaacagcctgttctctcctctctcctccccagagcaccccctgccatcaggggggttgaaatccctctcccccaggagccctgctgctttgcttggtggtagggcaggagagcaaacaaacagtcatggtctaaaacccacatagcactttgctcttagttacatgtaaaattttagatttctaaaacaggtgggcaatcattttgaatactgttctgtgaccctgactgctagttctgaggacactggtggctgtgctatgtgtggccatcctccatgtcccgtccctgtagctgctctgtttagacagcggacagacgctcacgcccaggggatgtcctcaccctgtcgccgcgcggtttcccttcgcagatgtgtatactcatgataggtcagaaagtgtatccgctacaataaagttctggttctaactaactccaaaaaa

SEQ ID NO: 165260 - DNA, 963 bp, Homo Sapiens
  misc_feature (780)..(835): n is a, c, g, or t
gtatacaacatctgcgaaaggggaaacccgcgccggcgaacagcgtgaggaacatcccctggggcgtgagcgtctgtccgctgtctaaacagagcagctacagggacgggacatggaggatggccacacatagcacagccaccagtgtcctcagaactagcagtcagggtcacagaacagtattcaaaatgattgcccacctgttttagaaatctaaaattttacatgtaactaagagcaaagtgctatgtgggttttagaccatgactgtttgtttgctctcctgccctaccaccaagcaaagcagcagggctcctgggggagagggatttcaacccccctgatggcagggggtgctctggggaggagagaggagagaacaggctgttttggaaaattccagcactttgacttcgggccatgcgtctctcctggacgttctgagtacggatcgctcaggcctcctgccgtctccaaaaggagtggtcagccggtctgcaggacacctctcagtttctccttttaccagcaggaaaatgtacatttaagcataaaccacaaggctgcacacggtgagaccaggccactgcccagggagctgctgtcggaggaggagtgtggaaaaggggccagggaccccgcaccccacaccaaattaggaacaggtagaatcccaaaggcaaggcccggccacttgtagctaccctgatccagtctcttgagcagcacagcttagaggcctgtggcccccgactcccagccatactcagacctgagcannnnnnnnnnnnnnnnnnnnnnnnnnnnnnnnnnnnnnnnnnnnnnnnnnnnnnnnggacccggcgggaagagcccgtgctcagagctccgaacttcactttacattccagtcccgggttacactagcacaaaggacacaaggaatccgatttatttacaaaatattaaaaagtcagttaatcc

SEQ ID NO: 165261 - DNA, 421 bp, Homo Sapiens
  misc_feature (28)..(28): n is a, c, g, or t
  misc_feature (47)..(47): n is a, c, g, or t
attttaacatgtaaactaagaacaaaantgcctatgtgggttttaanaccatgactgtttgtttgctctcctgcccctaccaaccaaagcaaagcagcagggctccctgggggagagggatttcaaacccccctgatggcagggggtgctctggggaggagagaggagagaacaggctgttttggaaaattccagcactttgacttcgggccatgcgtctctcctggacgttctgagtacggatcgctcaggcctcctgccgtctccaaaaggagtggtcagccggtctgcaggacacctctcagtttctccttttaccagcaggaaaatgtacatttaagcataaaccacaaggctgcacacggtgagaccaggccactgcccagggagctgctgtcggaggaggagtgtggaaaagggg

SEQ ID NO: 165262 - DNA, 427 bp, Homo Sapiens
ccctctctcctcccccaagagcaacccccctgcccatcaggggggttgaaaacccctctccccccaggagccctgcctgctttgccttggtggtagggcaggagagcaaacaaacagtcatggtctaaaaccccacatagcactttgcctcttagttacatgtaaaattttagatttctaaaacaggtgggcaatcattttgaatactgttctgtgaccctgactgctagttctgaggacactggtggctgtgctatgtgtggccatcctccatgtcccgtccctgtagctgctctgtttagacagcggacagacctcacgcccaggggatgtcctcacgtgtcgccgcgcggtttcccttcgcagatgtgtatactcatgataggtcagaaagtgtatccgctacaataaaaatctggttctaact

SEQ ID NO: 165263 - DNA, 728 bp, Homo Sapiens
acaacagacatctctcttggcagatttgcatcataaactacagagctgtgactgctacaatataaacgacactggctatgcccactgggggacaattagacattgcactcgcttagaacacatctaggaaccagggactgactgctggaaagtactgtgattcttttcttccaacagctcatttatttaggcccaactacagcccactcattcatggcatggacggacaaacacaattagtctaaagtactaaggtggagagaaatgttaaggatttatctgtcattagacaatgcaaacacagtcacaatgtaaaaggttgttatcagtcttaacccctattttctaaaatacagcaatgtgagaaacatggacgaaagcagttcgagttgcaaactttggtcttcccctgcacctcaggagaagcacctatttgagactagcactaatacctacgacggcacatgcttagtaaacaagcactccaactagcaaagaatgtattcacaactgatttccaactctaccggaaaacttctcaataggggccactgcctacaattctttggtgttttgtggccaaatgtgttacttgtgcaccaaagagttttttaaaaagagatttgcctacgggtgagcactgaagtatacattgtgccaatgcaattattgtcttggagaccttctagaacttgctaaatcatatagcaagaagagaatgagttcag

SEQ ID NO: 165264 - DNA, 1991 bp, Homo Sapiens
  misc_feature (307)..(323): n is a, c, g, or t
  misc_feature (367)..(391): n is a, c, g, or t
  misc_feature (405)..(432): n is a, c, g, or t
  misc_feature (474)..(486): n is a, c, g, or t
  misc_feature (508)..(525): n is a, c, g, or t
  misc_feature (533)..(684): n is a, c, g, or t
gtctcccccggctttttcgtcccgctggggggggagaaatattttatggctatcacggcggggcacagggaggtttgttgattatccccgcgcggcgagtgtaacagtgtgtcacaaaataacccgttgtgtggagaggtggtccgccccctttccgccgcgggaggaggtttgtataggattatcccacgccctctcccccttaaaaaaagtggcaaaggcgggcgggggtgggtgtcatttattttttgagaggccccgcgcgggcacccccccttggggtggtatgcccgccgggaaagtctgnnnnnnnnnnnnnnnnngcgggtaggtttttttaaaaaaacctccctttgttccccccccnnnnnnnnnnnnnnnnnnnnnnnnntggacccacgcccnnnnnnnnnnnnnnnnnnnnnnnnnnnnagaaaaaaatagtcaccggtgttccttctttttcggggcggnnnnnnnnnnnnnaaatgggttaaaaaattttttnnnnnnnnnnnnnnnnnncggttttnnnnnnnnnnnnnnnnnnnnnnnnnnnnnnnnnnnnnnnnnnnnnnnnnnnnnnnnnnnnnnnnnnnnnnnnnnnnnnnnnnnnnnnnnnnnnnnnnnnnnnnnnnnnnnnnnnnnnnnnnnnnnnnnnnnnnnnnnnnnnnnnnnnnnnnntatgattcaaggatttattaagtcatacatgcaaaacataatgctaattgcattagcaaaagatcaatgtaaaaacactccacaattctgcaactgtcaatttaaaaaattctgttgtagtggctgaagggtcccacgctgtattctcgccagtgagttaagttgtacagaacatcgtcagcactagcacagtttacagaacctcacagacccaaaggaacatcaataggcaaagcgactacaggaggcgtgtgtccgcgtgggcgaggtaaagagggtcagtattggtcaagtgacagtgtcggtaatctggcaagacagtgatgttaagaaggttcatagtttaagaattatctaaaatattttaaaaactataaagctgcaacacatgatttttacacctagttactagaaaactaaggaaagcacttattagctctgaataaagtaacatggaaagcacttttactaatcgacaaaaaaaccttctaatgcattatcagaaagattttataatacaaggaggcatattgctcagtcagaaggggttctataagaaaagcacttactaagttagcgactaacagaacaaccagtttaaagatgaattaaatgcccaatttggggaggcatggcaggtgtaagagaaaggaaaagcttaagaaaacatttcctgataataccaacctttctttcatcatctactgcatttgacagaaattaaccttttagagtttttacccgtgacactttcattccttgtacaatgtagtgtaaatctccacttcgtattttgtcaaaatactgtctttgtcctttgatcacacacaccccacccggcacacccacagctaaacagaattcttcattagaggaaatagcagttctgttcaaaatctccgcaaaagctggtcagaaaactcgctatgaaatcacaaagactgatccaaagagctgagctgctacgctcactccattacagtacaatgttatgtcgggaacacgtgctgctaactcactggtgagttcaatggcaacgcttcattcgggaggctgttctgctttacgcatctgagaactacataggagagcaagtgtctgcacctcctaactgcagaagctaccgtcttctcaaagacgaaggtctttgcaaagttcagtgctcggtgttctcggcacaacaatgcagtgtagttcagaaggtattttggcaactcttaatctgaacaagaatggggggggcgcttttgaaaaataaggcttagaaggcttgtcattttagggctaaatttaattcatgggggacc

SEQ ID NO: 165265 - DNA, 512 bp, Homo Sapiens
gtgattcagaggatccccgtcggatgcaagtgtcctctggatgcaaagtgtcggtaatctggcaagacagtgatgttaagaaggttcatagtttaagaattatctaaaatattttaaaaactataaagctgcaacacatgatttttacacctagttactagaaaactaaggaaagcacttattagctctgaataaagtaacatggaaagcacttttactaatcgacaaaaaaaccttctaatgcattatcagaaagattttataatacaaggaggcatattgctcagtcagaaggggttctataagaaaagcacttactaagttagcgactaacagaacaaccagtttaaagatgaattaaatgcccaatttggggaggcatggcaggtgtaagagaaaggaaaagcttaagaaaacatttcctgataataccaacctttctttcatcatctactgcatttgacagaaattaaccttttagagtttttacccgtgacactttgcatccagag

SEQ ID NO: 165266 - DNA, 552 bp, Homo Sapiens
ggcgttctagaggtccccgaaggtgtccgcgtgggcgaggtaaagagggtcagtattggtcaagtgacagtgtcggtaatctggcaagacagtgatgttaagaaggttcatagtttaagaattatctaaaatattttaaaaactataaagctgcaacacatgatttttacacctagttactagaaaactaaggaaagcacttattagctctgaataaagtaacatggaaagcacttttactaatcgacaaaaaaaccttctaatgcattatcagaaagattttataatacaaggaggcatattgctcagtcagaaggggttctataagaaaagcacttactaagttagcgactaacaggacgaccagtttaaagatgaattaaatgcccaatttggggaggcatggcaggtgtaagagaaaggaaaagcttacagaaaacatttcctgataataccaacctttctttcatatctactgcatttgacagaaaataaccttttagagttttacccgtgactcttgcatccagaggggatactctgaccactgca

SEQ ID NO: 165267 - DNA, 405 bp, Homo Sapiens
tctggacaccacattcaaattcttatctaccagatcctacagtggctagtctgagtctgaggtaacagctcagtcatccctttgggtcttagtgatgtcatccttgtttggtccaccttcatcactgcttttgccaaacaccaaacgtctatcagaaacaggcacagctggcccgctctcatctattttaagccacaggatcccaacaggacagaagacattgcctcctggtagtctactgtgacagtaatgctctcataacctttttctcaaggtcactctctatagcctcttatcatggctcacttgatccagcgtttagttcttcctgactctagatttagatcaagcaattgtaaaaacccatgaggtggcgcctcattaatctaggattctgaggtctta

SEQ ID NO: 165268 - DNA, 391 bp, Homo Sapiens
  misc_feature (214)..(214): n is a, c, g, or t
  misc_feature (217)..(217): n is a, c, g, or t
  misc_feature (237)..(237): n is a, c, g, or t
  misc_feature (315)..(315): n is a, c, g, or t
agctcggtaccagatgtgtttctgccctctgactccagtggttgcagaattagcccaggaactagaattggatggagtcacacaaaccaagggaaggggattgtttgaggggggcactcagtcacatggggctgaggccaaagagaatgaagatatattttaaaattctggatttggcaaaatttaggctagtctttacttttcataaacctcntcncatgttagagcagcaaaganaaaccagtttgccaagaggtcacgagattggcagtgaggaatggggagtttgtttaaagacaacactagatacttttngaagtttacctattctgtggtcccttttattgactaaatggtgcccttcattcatgaagcaagtatctatttagtg

SEQ ID NO: 165269 - DNA, 478 bp, Homo Sapiens
  misc_feature (28)..(28): n is a, c, g, or t
  misc_feature (41)..(41): n is a, c, g, or t
  misc_feature (71)..(71): n is a, c, g, or t
  misc_feature (127)..(127): n is a, c, g, or t
ggaaagtgcccttagacacctacagtanctaagacaatgtnggaatatatcattcgccctctataacaatntaatgtattcagttttgacctgtgccttcatatcatgtaccctctctagtcaaagnggtattacagacattcagtgacaatgaatcagtgttaattctaaatccttgatcctctgcaatgtgcttgaaaacacaaaccttttgggttaaaagctttaacatctattaggaagaatttgtcctgtgggtttggaatcttggattttccccctttatgaactgtactggctgttgaccaccagacacctgaccgcaaatatcttttcttgtattcccatatttctagacaatgatttttgtaagacaataaatttattcattatagatatttgcgcctgctctgtttacttgaagaaaaaagcacccgtggagaataaagagacctcaataaacaagaataatcatgtg

SEQ ID NO: 165270 - DNA, 681 bp, Homo Sapiens
  misc_feature (55)..(170): n is a, c, g, or t
gctgtcctgtaccttgtaggacagcagccctgtcctagaaggtatgtttagcgtnnnnnnnnnnnnnnnnnnnnnnnnnnnnnnnnnnnnnnnnnnnnnnnnnnnnnnnnnnnnnnnnnnnnnnnnnnnnnnnnnnnnnnnnnnnnnnnnnnnnnnnnnnnnnnnnnnnnttctcaagcacttttaagcataaggtgagtattcatacaagaaatttaaggggaattaacattgtttaaataaaagctatgtgttcctattcaacaatatttttgctttaaaagtaagtagagggcataaaagatgtcatattcaaatttccatttcataaatggtgtacagacaaggtctatagaatgtggtaaaaacttgactgcaacacaaggcttataaaatagtaagatagtaaaatagcttatgaagaaactacagagatttaaaattgtgcatgactcatttcagcagcaaaataagaactcctaactgaacagaaatttttctacctagcaatgttattcttgtaaaatagttacctattaaaactgtgaagagtaaagaaaactaaagccaatttattatagtcacacaagtgattatactaaaaattattataaaggttataattttataatgtatttacctgtcctgatatatagctataacccaatatatgaaaatctc

SEQ ID NO: 165271 - DNA, 421 bp, Homo Sapiens
  misc_feature (46)..(46): n is a, c, g, or t
  misc_feature (364)..(364): n is a, c, g, or t
  misc_feature (374)..(374): n is a, c, g, or t
  misc_feature (396)..(396): n is a, c, g, or t
  misc_feature (406)..(406): n is a, c, g, or t
ggatgctgcatcaggtcagtgtttaaaaacgctcgttgatgacganaaccctcctgtctcttttgtaaaattttctccaaatggtaaatacattctcactgcaactttggacaacactcttaaactatgggattatagcagaggcaggtgcctgaaaacatacactggtcataagaatgagaaatattgcatatttgccaatttttcagttactggtggaaagtggattgtgtctggttccgaggataaccgggtttacatttgggaaccttcagactaaagagattgtgcaggaaattacaaggccatacagatgttgtgatctcaggcagcttgttcatcctacaggaaaacctcatcggcntcagcaggcnttagggaaaatggacaaaacanttaaactgtngggtggaggtaacca

SEQ ID NO: 165272 - DNA, 260 bp, Homo Sapiens
acgcatcgagctcggcaccctacaagttaaaaaggccttctttgctttggtagccaacggtgtccgagcagcgccactgtgggagagtaaaaaacaaagttttgtaggaatgctaacaattacagatttcataaatatactacatagatactataaatcacctatggtacagatttatgaattagaggaacataaaattgaaacatggagggagctttatttacaagaaacatttaagcctttagcaaatagtacctcca

SEQ ID NO: 165273 - DNA, 491 bp, Homo Sapiens
aaatttcccgatttatcactagagtgagtaactaactaactgctttataaagctatcctggtattcatatgccatatactagggaaacaaccaggccaatctccattcgatttcatttctcactttgttcacttgcatattaatcacgtatttcctaaagtattatttagtagaccacaccagcacaatggttcctccagcttttggcaggtggtcttactgtacagaagatataaatgacacatacaaccttcccctgctccctccccatgagcatgatgcatgttgtagacagacagtaacatttccatatgtacatgtgcacaaatacattaaaaacatttcagaattatataaaattgtacattacaggaagtagaaccataaagattatcctaaatgtaactacagagaaaatgtgtgcaggaagagcccagtaaagtacacagcctgtggggcagagtatttttcatcatgtgagatcaagtact

SEQ ID NO: 165274 - DNA, 559 bp, Homo Sapiens
  misc_feature (549)..(549): n is a, c, g, or t
ctaagtattcattttaaattaaagataatctgactccttatgacatacccacttgcagatgtataaatagcagatgcattcaaaacagtgcaagatttaattaatttaggacaatattccaatcaatcccaatgcaggttttaaattactcgtgcacgtttatatagaatcataaaaataaacctctaatatgtaatcagcttatagccaattcagaaaactccacaccaatacaacaactgtggaaatcatgagatatgactgcggggagaaaagcaaaacctagcatcaaaagtgcatatactcattgtaactacaatcttactatatattcctacttttgttttaaaaaaagttttctttaaactatatgtctcaaagggatactaaaggtataatttcatattcttttttgaatttaaaaaacatatacgtaatcctcctttgttttggtaagttcaaatatgaattgacagtggggtaattggattgtggattctttaagaaagctctaagaagagaatacaacatactatatcttctttaagngtatgagctg

SEQ ID NO: 165275 - DNA, 971 bp, Homo Sapiens
  misc_feature (25)..(25): n is a, c, g, or t
  misc_feature (28)..(28): n is a, c, g, or t
  misc_feature (48)..(48): n is a, c, g, or t
tttacacttatttctggcattagcnaanttgtgttgagggaactatanaacttttagtgtgacagctgctagaagggagagcagacagcccgcggtgggcaagctgggagttgcatccgcagcagtccgcttcaacccagctcctctccacccttcctgaccctccacaaaagctctgccgtgaccagacccaacccaactggcccctggtcccaagagcagatgagctgcttgggccttccacttggtgtcccatgccaggcggacctggaggtgtcagccatggccctgaccacttcagaagccaacaggcaaatgttctctgttcatagtgccaagaatgtgggtcacgtgggcttaccccccaggatggacacagaagtccctaagcagtctgcagctgggccagcctctcccgtgggtgcagagcagcccagatgtggccatcattaaggcaaagaagcatcgagatgcccaccactccccgggtaagagccaggccccggcctggccacgccacagaggaacgcagagcacacaagcaggaccccaccacgtgctgttccagatcgcccagtctccctctattggtacactatcaattgtgcagtgccccagggaggtcccaaatggccctcacaagaggcacagcccctaacgccctcagccaggcggtgcagtgggacgaagcagcgtattggggagggccagagcatcggcaccggtgacccagctctcccaccccaggccatcgcagggcagcctcagggcaggcgccaccactgctcctgctcagcccgcagtatctgcagccgctgcagctgtgtggcttggtagaaaagtctcaggcactgaggtttacttcaagggagaactgactggtgcccccgtccacactcatcaccctggacacaacctcgggggcttcactaaaggagggaaggatgtggaaactagtctctctcactccc

SEQ ID NO: 165276 - DNA, 707 bp, Homo Sapiens
aggcttcctgcattgcttccctgtgagtccaaggccttcccccaccactgggcagaggctggacagcacggacttctagagagagccgcgttgccagttcctctcccactcgctcgtccttatccaccacgctattatagtttccgttgtcctccaccagcatttcccttactctgaagttccggcattcacatcattcatgttttcttttgtcttttagctaaaggaaaagcattggcgatttgtctgattctggttttgagttactctttgttcagtaatgcactttattttattgtccaaagagagtcagagctaagcatacaggcttgggggtgagccctgctgtgagagttcaggccctgggaggctcagccacctcctcttgtgggaaggaggtctcagccccacctcgcatcttcacctgcccttggtgtggacacaccctctcatgctaccagcaccataatccagtgggggtgactgggtgcacacctgcccaggtgaacacagcggctgccagtctcctggtcccgagaggaggtggggcctggccctggctccctccaaccagctgctcctgggacacaggtgctcctgcttcggctctgtttcggctcacaggtgtgcatcactgggcttggatttgcattacattgaccccagccctgcagtggaacctaataaaagcgcctgaagcaaaaaaa

SEQ ID NO: 165277 - DNA, 1014 bp, Homo Sapiens
  misc_feature (421)..(438): n is a, c, g, or t
  misc_feature (959)..(967): n is a, c, g, or t
gggtggcgaactcggcacgagggttgacaagtcccccgccgtgttggaaagacctctcgcctctacgtggcacctggaattggggcgcacagggaggggcggatgctgccaccacccagccttctctttattttcagtgctttttgtttggcctccctgcccccatgtttttctggctgggagctcttggttacccccttgtctgactgcttggtggcaggcaccctgcctgtgagggccactttcctcttctagtagctgttgtctggtggggacgcagtggccctggacacggctcccctctgcaggtctgcaggtcggtttgctgcctgccctcctcctctcacccgatgtccaggtgggattttaaagtctgcattggttataacaacagttatcagtaattcctgcccagaagacnnnnnnnnnnnnnnnnnnaagataaaaactgcacaaaaggggagtgagagagactagtttccacatccttccctcctttagtgaagcccccgaggttgtgtccagggtgatgagtgtggacgggggcaccaatcagttctcccttgaagtaaacctcagtgcctgagacttttctaccacagcacacagctgcagcaactgcaaaaactgccggcctgaaccagaacaatggagcgcccctgccctgagagctacccctgcaatggccctgggtgaggaaaactgacccacccacccgcccacgctctcgggccctccccaataaactgctttctccccccacactgtcacagcccggactgtaagaactttaaggcgtctcgcccctcttgggaaggggccctttgggaacttcccctgggggccgcggcccaccttgattccgggccccactaaagaagggagcctggcgccaatcttgggaatcccccccgggcgggagagcattccttgagggggctctttgcgttctccctaannnnnnnnnccaacaagccgcgggatagtggctctttcacccccaggcaccgccgc

SEQ ID NO: 165278 - DNA, 929 bp, Homo Sapiens
  misc_feature (609)..(609): n is a, c, g, or t
  misc_feature (684)..(684): n is a, c, g, or t
  misc_feature (687)..(687): n is a, c, g, or t
  misc_feature (752)..(752): n is a, c, g, or t
  misc_feature (773)..(773): n is a, c, g, or t
cgtgacccacattcttggcactatgaaagagaacatttgcctgttggcttctgaagtggtcagggccatggctgacacctccaggtccgcctggcatgggacaccaagtggaaggcccaagcagctcatctgctcttgggaccaggggccagttgggttgggtctggtcacggcagagctattgtggagggtcaggaagggtggagaggagctgggttgaagcggactgctgcggatgcaactcccagcttgcccaccgcgggctgtctgctctccctcctagcagctgtcacactgaagttttgtcctctgctgtctcctctggtcctgagatgagctgtgagcctaggtggccaaggcttcctgcattgcttccctgtgagtccaaggccttcccccaccactgggcagaggctggacagcacggacttctagagagagccgcgttgccagttcctctcccactcgctcgtccttatccaccacgctattatagtttccgttgtcctccaccagcatttcccttactctgaagttccggcattcacatcattcatgttttcttttgtcttttagctaaaggaaaagcattggcgatttgtctgattnctggttttgagttactctttgttcagtaatgcactttattttattgtccaaagagagtcagagctaagcatacanggncttgggggtgaagcccctgctgtgagagttcagggccctggggaagctcagccacctcctcttgntggggaaggaggtctcagccnccacctcgcatcttcaccctgcccttggtggtggacacacccctctcatgctaccagcaccataatcccagtgggggggtgactggggtgcacaacctgccccaaggtggaacaccgccggcctggccaagtctccttggtcccgaaaaaggaagg

SEQ ID NO: 165279 - DNA, 1381 bp, Homo Sapiens
  misc_feature (885)..(885): n is a, c, g, or t
ggggaagccggtggccgcggctgcggaacgggcggaggctgccggtttcgtaaccgtcgctcctcctcgctgactcgcgggctgtgaggcctgggtcggctcgggccgcaccgcgcggggccgctcggagtggaggccgcctgggggcaggcgggctagaggagcaggtacatgtgaagattttttggcagcttagcgtggaaaccattgaccaccctgctctcatttctacctgttctgtgttggcaagggagagtgcccaaatgagcaagatatcgccgcaaaacagcactccaggggtgaacggaattagtgttatccatacccaggcacatgccagcggcttacagcaggttcctcagctggtgcctgctggccctgggggaggaggcaaagctgtggctcccagcaagcagagcaaaaagagttcgcccatggatcgaaacagtgacgagtatcggcaacgccgagagaggaacaacatggctgtgaaaaagagccggttgaaaagcaagcagaaagcacaagacacactgcagagagtcaatcagctcaaagaagagaatgaacggttggaagcaaaaatcaaattgctgaccaaggaaataagtgtactcaaagatttgttccttgagcatgcacacaaccttgcagacaacgtacagtccattagcactgaaaatacgacagcagatggcgacaatgcaggaacagtaaacctcaccctttccagactttagagcttgtggcttgaatgttaaaggtgtgaccaccgacaccactcatgtcaatggctgaaagttgtccatttccatgactcaaagacccattggaggctaattttctgggatcagcactgaagagttgattagctaaaaatgttangccttgtaattcgaatatctggttttaaatgatagaggtttttgtgggaaccaaaatcccccaaatgttaaggtatatggtaaaaaaagaaatatctgggatcccgatgttcttaataaatcctgacttcccaagaaatgcttcttttttaagttgacaaaaggaatggggaactggcaggccgcgcagaaggttcttggttttaatggataggctgaattggattaagaaaagttgaatgccacctatggtaatctatttgtgattttcttctaaattatgtattataaattcgtagagctatagaaagcaatgagtgtgtaatttggagtgattttatatatggcataaactttgttttaacataattagtactgttttcccccaaaagtacaagtttttgagtagcaatgtcaggttaagtaaagaaacttcatcacatcttataggtagtgtgtggccaattgacttaaaaaatacaaataacatttagtca

SEQ ID NO: 165280 - DNA, 693 bp, Homo Sapiens
gagggtccatgtaaataggacgaggtagacagtgcatgattgtaggagaagggttgaagggaggacatgattccaaaaaagatcgttctcaatgtgtcgtctgactcaaccagctggcagattacacttgccaagtcgttccctttccttctaagtcagttggctccatattcacttgaatatgcctctgtttgggcaaagcaagatacctccacttaacctttatccaaggaagctcttggtgtcctcttggtcataaagttgtctcctacctaacccagttttaccaaatggaagtaaaaggggacaaactatggaagatggactccatgccattgcagtcagccaccattctcttttccatataaggagccccattacataagctacgggtgaggttggaacagctatgtttcataatttcaagagtgtgaccaccctgctctagtcatcatcattggatgaatccagttgactctttggcaaaagggtgatacttttcactaaaaatgcctactcctcctgttgatgttccttttctgtttttaccttgtccaatttccacactagtcatttttttatatttagaggatcagatttagcgtggaaatgagtcaaaattcgtgtatgtctaggatgtggatcgagatgagaggtacggccgatcgatcagctacgtcgtagaatcccaaa

SEQ ID NO: 165281 - DNA, 991 bp, Homo Sapiens
  misc_feature (596)..(596): n is a, c, g, or t
  misc_feature (683)..(693): n is a, c, g, or t
  misc_feature (771)..(785): n is a, c, g, or t
aaatgtaataagaagtttattggatttctaaatataataaagtagttgcaactcttttacagaaaaaagaaatataatttccatattcattcttatagagcattgaaaaaacataattggtagagaaaactgatagaaggtaaatagaaaaacaggttttaatatagtcagataatgcataaacacaaaagaaaatacctaaatcacttgcttataacagattttattctcttattttcatactgaactatgtgtgctattttggatacatcagtgatggtttgtaatgtagtgaataaatgcaatttgctaagaatacaagaaaaaagagaaacctatattttaggaataccatggctctgtcagtatcacacatatgaaaatagacatattctttatatgtttttgtgtgcctttccctaagtcagggaatgttattcagacttgcagctcatcacggtggggctatgattgtgcttagctagtaggaagtgctgctcttagtagacacatttagcatagagaaaacccggcttctcacccatctccggccttatctacccacttgtaaacaaccatttaaccttttacataangactatccttccatggtcataatcatcagattgaaactcagagcaaagccatgctgtgtttcttcccagtccatttgtttccaaggnnnnnnnnnnntctctgtatcccaacatccttatgacattacactgaaatttttgaactcattttccagcgctaaaatctgatcctctnnnnnnnnnnnnnnntgactagtgtggaaattggacaaggtaaaaacagaaaaggaacatcaacaggaagagtaggcatttttagtgaaaagtatcacccttttgccaaagagtcaactggattcatccaatgatgatgactagagcagggtggtcacactcttgaaattatgaaacatagctgttccaacctcacccgtagcttatgtaatggggctcct

SEQ ID NO: 165282 - DNA, 1152 bp, Homo Sapiens
  misc_feature (96)..(96): n is a, c, g, or t
  misc_feature (218)..(218): n is a, c, g, or t
atgacctactcatgcgcttctccttctcttccccctctcactggtccttccacaggggctccagcggggccccacagacgagcaggatgcctgtcnccatgagtgccaagaacagacccggaaccctggacaagcccggcaagcagtccaaactgtaggatccccgccaatatcgtcaggtagttttaccttaaacccacttttggatggacgctatntcagttaagcaagtcactgacttagtttataccaaatattgtgctttctttgtaagataacggtttacatagacatcctggatctgggggcatgaagaaagtctaaataaacctttgttacacttttttaccacgcttttgcatgcttgcaataaaacatcttttactttgtgactccaaactccaaattttaactgttaacacacggtgccagaccaggtggcttttctttggtgaatgtagtgtttcatctgaacacctcgggaagcagagacaaaccaacctgtggttgaactgccctcaacgtcaccactactaacgtctatgttgactgtattgtgttagaagcacattaacacaccctcacaatgcccgacccccaccccagtaattatccagacgcatggcccacctggcacacaggaaatggtagagctggaatgatgggactcctctcacaaatgtattctcacattcctcctttcccgtccatcctttgctatgtacatggggggtttctaccagggccagtagagcacaacaagacttagctcaggccttgaactgtgtctggttggttttctttgagtgaagtattctcagaagggctatgttgccaggccctgtgggttgatcatgtgaccgccttgtctgacaaaatgtctcccgccatcttaattttgcaaggctaatggaagtgctaagaaatctggtggggactttaagcctacgtcccccaccttacctgcttctaagagtccagcccagttctcccagctctgggaaaagcaggtctctgccctcttctagtggtgacagctctaacctccctgatccacctgcgactaaaccatcgattgctgtgctgaaccctctcagcccccaaacaggaccacctggctgcactgctgcctccctgcagcccggctgtgcg

SEQ ID NO: 165283 - DNA, 1259 bp, Homo Sapiens
agatctaagtggtgggccccctctgagatggtgactgcaaccagagtgtgtgtgatatccttagttactccacctcctgaccaggggtctagttcaccattgctgaaaacaatgtttgtgtgtgaactaatgtttttgcctccatacatagtagtgatccaggagggccttggtctcacaccccactgttgaaaacagtcatcagaaagttcctttaagttccatgagtgaggttcaaacatgtcatcgacaccattagtacaaaagggcatgactacttctgtgcaggcctgatagctccaacccagtgttcccagactgctagttgctgtctctgaaatattcaggcatttcacctggcccgaataattgtaatatacattcagagcttggaaaatattctgcagcagcagtgaatcagatacattgggatttttcaaatactggcacactaccttgataggccaagcaggcaaaggctgtaaaaagttagaggcataaggatagtccaccattgccagattcacccaggtttcagagatccagtctttcaaatgttggatgtcctgagaagttaatgggctgcataagtgaagggctccagtaagccactgcaaaccactgccagtatttgagagtcgattaatggcatcccaggacctgtggatgctctctgaacaatgtggaccgcttttcctaaaatctgtagttacgatcttcataaatacaccacaaggtactaaatcctcaaactgccagataggggcagaagctgcaagagctccaactaccatatgaggatatttcatcctaaaccaggcagcaagcatgccaccataggagcctcctatggcaatgacaggttgattttcagctcctgggattgttcttttcaagtgtttgattaactctgcaaaatcagccagagcttgttctgatgtcaggaaattcaagtgtctggaatccttgaatgagttgtcaccaaaggggagagactctccatagtatcgatgttcagcaaacaccaacatagctttcagttcctcagccacatcccacatgaaccccgtgttattacaaaaccagataatgtccccttcattaccagtgtagaaaagtattgatccaccatttttcttccagtatttatcagctactaggtaccgctgattaaaagttttcacagtattaaatccaaaatgatcaaccttctgttggaagtagagaaccgaatagttcttggctacagccgggaggta

SEQ ID NO: 165284 - DNA, 539 bp, Homo Sapiens
  misc_feature (16)..(16): n is a, c, g, or t
gggtcgacccacgcgntccatttctccaaaagagattgaaagaatggtgggcatcatccatcgaaaatttagttccattcagatgcagctcaaacaaagcacttgtgaagcagttatgattttaagatcaaggttccttgatgccagacggaaaaggcgtaacttcagtaaacaggccacagaaatcttgaatgaatatttttactcacacctcagcaacccctaccccagtgaagaagccaaagaggagctggacaagaaatgcagcatcacagtgtcacaggtatccaattggcttggcaacaaacgaatcaggtacacgaagaacattggcaagtttcaggaaagaagccaatctctatgctgcaaagacggccgtgacagctgcacacgccagaagcagcagctgtgcagaacaaccagaccaattcgccccaccagaccaaattccggttctcctggttctttaacctcccaaattctcgggacactgttcaatgaacatgcagagtctgaatgggggattctaacccaagggt

SEQ ID NO: 165285 - DNA, 1078 bp, Homo Sapiens
tgtaatagagttgtaccaagtcagaaaaattcatgctcatgaccatcacatggacactacctcctcaacagcaacattacagggtgaagccacttcattatatatcctggactgcttggacatgaaggcaaaggcagcattctttctttccttaggaaaaaatgctgggctcttgcactgtttggtggaaatggtgagacaggatttgagcaaaattctacttattcagtgttcagcatttctattacattgactgatgagggttatgaacatttttatgaggttgcttacactgtctttcagtatttaaaaatgctgcagaagctaggcccagaaaaaagaatttttgaagagattcggaaaattgaggataatgaatttcactaccaagaacagacagatccagttgagtatgtggaaaacatgtgtgagaacatgcagctgtacccattgcaggacattctcactggagatcagcttctttttgaatacaagccagaagtcattggtgaagccttgaatcagctagttcctcaaaaagcaaatcttgttttactgtctggtgctaatgagggaaaatgtgacctcaaggagaaatggtttggaactcaatatagtatagaagatattgaaaactcttgggctgaactgtggaatagtaatttcgaattaaatccagatcgtcatcttccagctgaaaacaagtacatagccacggactttacgttgaaggctttcgattgcccggaaacagaatacccagttaaaattgtgaatactccacaaggttgcctgtggtataagaaagactacaaattcaaaatccccaaagcatatatacgtttccatctaatttcaccgttgatacagaaatctgcagcaaatgtggtcctcttgagatctttgtctatatccttacgcataaccttgcggaaccagcttatgtagcagatgtggcctgctggagtattcactggtagctggagcactgcctgtattattcgtagtgctcggtttttcccgcctactacctctactgtttccgcgcataatgactacccgccggtgttctcttccc

SEQ ID NO: 165286 - DNA, 858 bp, Homo Sapiens
  misc_feature (15)..(15): n is a, c, g, or t
  misc_feature (82)..(82): n is a, c, g, or t
  misc_feature (87)..(159): n is a, c, g, or t
  misc_feature (197)..(253): n is a, c, g, or t
ttcaaaggatgctanctgtgtgtcaggccccacactaagtgctctgctctgatatactcaaggccattaatcttcaggaccnccatnnnnnnnnnnnnnnnnnnnnnnnnnnnnnnnnnnnnnnnnnnnnnnnnnnnnnnnnnnnnnnnnnnnnnnnnntggaatttttttcctctttgaacataacctctcccttnnnnnnnnnnnnnnnnnnnnnnnnnnnnnnnnnnnnnnnnnnnnnnnnnnnnnnnnnagctaagtatgcattcctcaatagtagacagtacaacatgtttataacaagccaattacattatgttctttgcatgttctaaagttgtgtatgtgtgtgcacatctgagcacgtgcacatatacgcctgagccaaaaacacgagaacccactgatctcaccactggggcaagctaggtcagagcttagtgattcacactgaaattggcaaattggatttaacccaattaatagtgtgtgtgtggcaggagtcatgtccctcacatcctttgtacaaatgaaaattactcttaattccttcagatttataataactctgtactttggtttcagggtgacatttgggaaggattttgtttagaattaatggagtggcacattttgcagcctttttgcttgattgcatgtaatggaaatgccctatattttcctgcaaaataagtactaaattcattatcgttaagcaaatgtacaatatgctcaggcaccgcagagagctgggcacgggcccatgtgagcatcactttggaagtagggctcttcaacagggacccttgaactttaaagaaaggaacttctttttgccttctaattgatcatttaaac

SEQ ID NO: 165287 - DNA, 433 bp, Homo Sapiens
  misc_feature (367)..(377): n is a, c, g, or t
ttggccttattcttcacattccttttacttggcaagtcataaagaaatttctctgccagtgaacctttacgcttccatgaaattcccctattttctgtggttgttaatgattgattaatgagcaatttcagacaccttgaccatggataatgaataccactatgctaaataacaatttgccttcacatgccttcacaaatttagtacctgcacctctacttctactgccctgcctctttcctgaagacagccatgtgaagacctttaaaactagtgggataaccaattattaataaattatcccttaaaagaaatcgcacttgatttcttttagcctcagaataatttctaagtaaataggagtttnnnnnnnnnnngaaatactgtaacattgaatgtagtaagtgtttcaaagaaatgttaaaaaatgaaa

SEQ ID NO: 165288 - DNA, 2360 bp, Homo Sapiens
  misc_feature (1785)..(1918): n is a, c, g, or t
  misc_feature (1931)..(1944): n is a, c, g, or t
  misc_feature (2053)..(2063): n is a, c, g, or t
  misc_feature (2100)..(2140): n is a, c, g, or t
  misc_feature (2170)..(2179): n is a, c, g, or t
  misc_feature (2260)..(2268): n is a, c, g, or t
  misc_feature (2299)..(2308): n is a, c, g, or t
ctgccaagtattccaaagtgttccgtagctagactggtgcaggctcgttgtaccactgcaaccgactgacgttactgtagttcctagaatgctgtgagggcggggggttcagatcaacataaagcctaacttgctggagttgtagtctcaaggctttctctcttgcttaactaaaacctaaggaccactgtttttggtagcaattatatggttactatccactgcagtcctcagttgttggggtaaatcccacatggcagagtaaggcaccccacagaaattaacttggagagcctgagaaattcccagtggccttggcatagctgtctagacaccatctctaggaaaatttaattctgtccctggccagctattgttcttccacttcgttttctgctgtcccaaggccagatgagtggaatcaccatctgactgtggtcagtaaaatgtatctggcgtgaacagcaggataacccatgttctccacataaggataaccttacgtgaaaccttcctgctgacaaccatgcagaggaatttttccactataagtcagagccttcctccccatctggaattcacagctgttccctggcagcacacaggagggtattaaggacctttgtgaggctaggtacactgtccacacctctttggggaagttacgataacttatttaccatcataattcagtctcttcttattctacagtgtgcactttatgcctctcgccttttgataatagttgttcagtgaaggaagtcagctgccagaatattaagaagggtctccctttatgtcagtacaactgttagggcggccttcccatttactttaggtttcaagaggattcaccggaagcacatgccccggtctagtcccatttgaaacagttctgctttactgagaccctaggccggtctccttgctgaccctagcgctgctgcctaggtgccatttcctttcctcctcagtcaaatacaggctgcacattttgtcacttaatgccagtacaatctgtgttactcctaaggacttttgggattttgatgagacctgcgagggagaagacactgagaagccagtgatctgcaagcatttgctcttgtttccacatcacctctgggatatttcagctgttgtttccaaatggcaaatcatcaactaaaagcacttgtttcaagttttgttctgcactcccacgactgaagttgtagattgagccgaataaccatgggaagtgaccaagcaaagacactcgattggagtcagttgaatatttgtaccctcagtggagcccttctggtcttttcttccacttctgcagaatttcctctagcaaatacttctttctccttgcttgcctccaccatgatatttgaataagagatggccagaggataacacttgtctcttaaaaactaagctaaaaagaacctagaaccttcaattgagcagttgtgaaaattgctaatggtgccaaggccaagcaaagagtttcagaaaatgactgagaaggagcgataacccccagaatgcaaaatcaggggcatcattatccggtgcttgaaacaaggagctccgctctacaactggtttttttaggacttgtgaggaacacagcaacggaaatccatccacaaaggatgcagtgccccaacttgtactgcgcctgaatagtcatgtgataatttactgaagaaatctagtgtactttaaatttttttcataaaagtttacattgtattgtaggttaacattaaatgttttatagcaaaaacttcnnnnnnnnnnnnnnnnnnnnnnnnnnnnnnnnnnnnnnnnnnnnnnnnnnnnnnnnnnnnnnnnnnnnnnnnnnnnnnnnnnnnnnnnnnnnnnnnnnnnnnnnnnnnnnnnnnnnnnnnnnnnnnnnnnnnnngattttggggcgnnnnnnnnnnnnnnaaaaattttttaaaacctttttttggggggcggggcccaaaagggaagggaaaggggccaaatttttttcaagagaaaccgggggaaaaaaaaggtgtggaattccccnnnnnnnnnnnccccccggggaacccagaggcttggaaaaaacccaannnnnnnnnnnnnnnnnnnnnnnnnnnnnnnnnnnnnnnnnccccccacgggcctccaaatataattgaannnnnnnnnnggggcccttttatgagaaaagggggggtgaaattttactaaaaagtttccgggcgcaaaagtggagaaccccttcccaaannnnnnnnnaagaaatacccgaaatccgccgcggggccgnnnnnnnnnnttggcgcctctccgaataaataacttttccccccaggggaaaaaaggggggc

SEQ ID NO: 165289 - DNA, 718 bp, Homo Sapiens
  misc_feature (665)..(665): n is a, c, g, or t
cccgtactattttgaggtgctagttgtaatgctttaatgatttaaaatgataaacttttcttttcatacagataaagacacaataaataaaatcagagatttacgaatgaaagctgaagattatgaagtagtgaaggtgattggtagaggtgcatttggagaagttcaattggtaggttattttaatgagaatacaaaaggactttattaaattaaaataatccacttgtgtgtttaacatattatttgggaaaatactgtttttatagaattgttgctttaagttcctttagacattgttgcctgagggtatggaagcctagtgtcaaatctagccatagtgggaagtgttttccccaagtatctgtggcagaaaagaagtgtcaggcatcagaagataaatctttgctcctaatattagactaaaatgctgtagaacagtaagctttataaacaggaagcagcttacatagccgtgtggaggggggaaagtgtcttgtaatataggaaataaaaatttttttaaaacattacttctgataattaaagtcttgacattagctacttggaataatttggcagaagagaagaaataaaaataactgaaacagtaaggctaaattatttagcaagtattcaaagcacttagtacattgttctgtganacccttgagcttaaattgtaacaaaaggttcattattttcccttttcaattta

SEQ ID NO: 165290 - DNA, 484 bp, Homo Sapiens
  misc_feature (51)..(62): n is a, c, g, or t
cgtttatcataggaggtggggcatggtccccagcacaactcttctgggttnnnnnnnnnnnngccaggtgattcctttgtgtgttatgtcgtaagtggagtgacttcatcatatatggaagaagatttctatattcagctttttctgcaggttggagtcagcatagagttggaaaatcagctttggctttctttcctgtctcatttcctctagtgttctcctttttattgtcatcagctctcaacaactctgccacttttgtgtcccaaggtaataagatgtaggaaacaaaacattgtaaagtggagcaagaaaagttatctaattaaccacatcagagtcaaatgtcttgggtgacactaaggaggatatgggcaggtgataccagagtgctttatcttgtgatgttgatacagtagcagcctctcagacattcagccaggttggatttctcatgagttgtcacctccataatataacgtga

SEQ ID NO: 165291 - DNA, 578 bp, Homo Sapiens
ggactccggattcctccacaccacccacacaccagtcggcagcctccctggtgtgatcccctgggcccgtttgttgtcgggggagaagacttagacccttttgggcctcggagaggtggcatgattgtggatcccctgagatctggcttcccaagagcacttattgacccttcctcaggcctcccgaaccgacttcctccaggcgctgtgcccccaggagctcgctttgacccctttggacccattgggaccagcccacccggacctaacccagaccatctccccccgccgggctacgatgacatgtacctgtgaaggcctcaagaatgtaacatcccaggcttccctccattctcctggagctgccaccgctgtccccatcagcaaccatgttcttgcaggctgggggcaagggattctgctcatgtgtttgcagaccggctgggatagcctccccaccccttatcagagccaagacacctgctgcagctctccacatagctgcagatagctcccaaagagaaatcagtgtgtctctttcaccatcagctcctcccctttcacctccgtaatattac

SEQ ID NO: 165292 - DNA, 1191 bp, Homo Sapiens
tgggggagctattctgcagcttaggtggaggagcttgcagccaggggttcctgggctttggataagggggtggggaaggcttattcccagccggtctggcaaacccatgaggcggaatccccttgcccccaagcctgcaaggaacatggttgctgatggggacagccggtggcaggctccaggagaatgggagggaagcctggggatgttacattctgagggctttcacaggtacatgtcatcgtagcccggcggggggagatggtctgggttaggtccgggtgggctggtcccaatgggtccaaaggggtcaaagcgagctcctgggggcacagcgcctggaggaagtcggttcgggaggcctgaggaagggtcaataagtgctcttgggaagccagatctcaggggatccacaatcatgccacctctccgaggcccaaaagggtctaagtcttctcccccgacaacaaacgggcccaggggatcacaccagggaggctgccgactggtgtgtgggtggtgtggaggaatccggagtgggtccacctctctggcggtagcaggggggaactcccggtggggactgcttacattagccttttcccactgctcatggataggtgtgatgattccagacacaatacgagaccgaagctcctcactgttcttgtaggtcctgtggaagtcacccaggtgttctgcatcgatataatcatccaagttcagggtcaagtctgccacttgctgtgagccatattccagcacattgaggatcatgctgctctccacggtgatggctttcacaaggagctttctggacccatccttatactcataccggaggacatacaggtctttattgttgttccacccagctggcagcagttctgacttcttatcattgggacccggctggtcaccgacacccaagccgcagtaaccgtgtgtcaccacttcccaatgcaagaagcagacgagcgcgtcctgcctgcaggtgatggccggcgctgccgatgcgaacagtacctccaggcccgccatgagcgcccgcgacttcggcgtctggaggaaagaagggggcgggggtagtgcagtgagccggctccgcggccggggtagctataactccgcttccctcttgcgctggttcttgccgagtccacacctgagaccaaaatggagacgcccccc

SEQ ID NO: 165293 - DNA, 248 bp, Homo Sapiens
tctgaaggtgattcttaggcttctagatggttccacatgggtggatgatagtaccagtaaccaagacatgaaacacagagaaacaagaacatttggaggagcaaatactgtgttggcttcttgacaggtttacttcctgagcattgggtctctgtgggcttcatctagaaatgtatgttattatattccgtaggtagatgtgtaacctcttcaccttattcatggctgagtcacctcctaatataacg

SEQ ID NO: 165294 - DNA, 161 bp, Homo Sapiens
atgaataaggtgaagaggttacacatctacctacggaatataataacatacaatgacttataaagtgactacatgcatatgagcaagccaagtacagagatgcctagagacccactacagctgtgcttatcaggaaaggccagatatgttttctacaaaac

SEQ ID NO: 165295 - DNA, 700 bp, Homo Sapiens
ccgaccgaacatataaggaggtgcaatatcaatttatggagtaaaaattctagaacccaaaacaaaggaagttcaacacaattgccagcttcatagaatatctttttgtgcagatgataaaactgacaagaggatattcactttcatatgcaaagattctgagtcaaataaacatttgtgctatgtatttgacagcgaaaagtgtgctgaagagatcactttaacaattggccaagcatttgacctggcatacaggaaatttctagaatcaggaggaaaagatgttgaaacaagaaaacagatcgcagggttacaaaaaagaatccaagacttagaaacagaaaatatggaacttaaaaataaagtacaagatttggaaaaccaactgagaataactcaagtatcagcacctccagcaggcagtatgacacctaagtcgccctccactgacatctttgatatgattccattttctccaatatcacaccagtcttcgatgcctactcgcaatggcacacagccacctccagtacctagtagatctactgagattaaacgggacctgtttggagcagaaccttttgacccatttaactgtggagcagcagatttccctccagatattcaatcaaaattagatgagatgcagtttatatatggtagaatccagaaagacaccaattatatgaagctgattgag

SEQ ID NO: 165296 - DNA, 689 bp, Homo Sapiens
agaggttccggctatacatatctcattggaatgaaatgtaatgttttttaataaatagcaaattttcattttttcactacctttataaaacaaattaaatatttagagtataactgatcataactaacatcaccttgcatttactaataaatactctaaatacatttggtttattattggaatttatatccttataattttacctgctagaaattagtgaccttgtggcattatgtttaaagtttacattttcccagtgatgtgaacagtatttatacataaaatgatatctgtccaatgaatagtaacatgtttgttggtttaaaaacagaacatgtttagtttgacattggcatgtctcttcagaatttaaaaagttatctttaaggtatggcttttgggaaatcattaataaactagccatctggaaaatgaatacaaatttcaagatgctaactaaatagaactcagacacaaggcaggtatttgtataatatgtctttcaattacaaattcatctacagtagaaacagaaaggaacataaaagtatgatctactttacagtaagctgtttttaaaataaaaattacagatcaatagtgaaggtgaggaaatttaactgagaaaatttcaaaatattaaatattcaaaacatgaccatgaataatactatttaagtataatataa

SEQ ID NO: 165297 - DNA, 873 bp, Homo Sapiens
ggactgacatctttgatatgattccattttctccaatatcacaccagtcttcgatgcctactcgcaatggcacacagccacctccagtacctagtagatctactgagattaaacgggacctgtttggagcagaaccttttgacccatttaactgtggagcagcagatttccctccagatattcaatcaaaattagatgagatgcaggaggggttcaaaatgggactaactcttgaaggcacagtattttgtctcgacccgttagacagtaggtgctgacatcaagaacaagaaatcctgattcatgttaaatgtgtttgtatacacatgtcatttattattattactttaagataggtattattcatgtgtcaatgtttttgaatattttaatattttgaaaattttctcagttaaatttcctcaccttcactattgatctgtaatttttattttaaaaacagcttactgtaaagtagatcatacttttatgttcctttctgtttctactgtagatgaatttgtaattgaaagacatattatacaaatacctgccttgtgtctgagttctatttagttagcatcttgaaatttgtattcattttccagatggctagtttattaatgatttcccaaaagccataccttaaagataacttttttaaatccgaagagacatgcccatgtcaaacttaaacaggtttctggtttttaaaccaaccaacatgtttactatttcactgggacagaatatcaattttttaggaaaaaaatactggtcccccatcactgggcgaagaatgccaaaccttttaacacataattggcccacaaggggccaccttaaattttcctcaaccgagggaaaaaaata

SEQ ID NO: 165298 - DNA, 616 bp, Homo Sapiens
taatcattagggaggtgatggctttctaattcatcgtcaagtcctgtgattctactttatggatatccctgacatctacacccaaagcttttgtctgaattggttttctaatgtatattttaatcatttctttcccagaatatggcagcagcctgttagttgactgtcctgcctcctgtttgccctcttatctgtcctccacagagtaattatattccagaaacgccacctcctggatatatcagtgaagatggagaaacaagtgaccaacagttgaatcaaagtatggacacaggctctccagcagaactatctcctactactctttcccctgttaatcatagcttggatttacagccagttacttactcagaacctgcattttggtgttcgatagcatattatgaattaaatcagagggttggagaaaccttccatgcatcacagccctcactcactgtagatggctttacagacccatcaaattcagagaggttctgcttaggtttactctccaatgttaaccgaaatgccacggtagaaatgacaagaaggcatataggaagaggagtgcgcttatactacataggtggggaagtttttgctgagtgcctac

SEQ ID NO: 165299 - DNA, 405 bp, Homo Sapiens
tatggaggtgacatgcaagttaacaataattaataaaaaatcttggcatttggttgctgaggctctttgagagctaaatatactgcctatatattatacttaataagacagcagttgttaggaagtgtttgcagtcagaatttaaacttgtttctaatcatactaagcatttaaaatattattttatttgaaggcgctgtgtgctatcttgaacatcagctttttagtataatttagatatccaagtttaactgaggttagttgctaagtgtaaaacattcaagtaattcatgttttggggttaggcatttgggcaaatgataaataacagacatgttctaaagtgccaagagacttcacttaatagtcctgagcataattagcaaaatgtacataggattaaca

SEQ ID NO: 165300 - DNA, 772 bp, Homo Sapiens
  misc_feature (286)..(300): n is a, c, g, or t
cgcagtcgactttagagatcccccgttatcattaagaggtgcatattctcacctctctctccttgggggttgatgaagctgttcccgtccacgtatagctcgcagtctattgatgcccaaggctggtcctggaggttaggtccgctagagtaaatttgagtccaacacctctacacagttatgctcgacagggctttagctgccgggagcaaggtggtgggttcagggtgtttccagtttagtagatcaatggttgaaaagggctgatagatgaaagtctgttgtnnnnnnnnnnnnnnnggatgtgggcctggtcattataatagacaggtcctcgtgtctccctgagaggcatttgcatagcctctcagatctgagatggcccacttgactatcctgatttccttccttggtctctcgaagctccgatcctccccttcaaggtaaaacctggagcgtgttagctcctgaatctcatttctgagggggttgttggcctcagtaaagcggggtaggctgggatatatggagaaagaatttctgttatctctggcggctcccgcaaaactggcttctcttgctgtttctgggactccctttttaactctgtctgccggcgaagctgctcttttacttttggctttttcgcaataagctgttcaacagggctaagtttatgctggttttgcctatattatatttaaccatgagtcaatataaaggaatttgatctaggtacactggctgccctctgaccctgtacctcataatg

SEQ ID NO: 165301 - DNA, 652 bp, Homo Sapiens
ccggtacccgtaatcataaggaggtgtgacgttagcatgtcagtttgtactctttcaatctttttgatgtggcacttagggctatgaactttcctcttagcaccgcctttgctgtatcacagaggtttcgataggttgtgtcattattgtcattcagtttgaagaatttttaaatttccatcttgatttcgtttttgacccaatgctcattcaggagcaggttatttaatttccatgtatttgcatggttttgaaggttccttttggagttgatttctagttttattccactgtggtctgagagagtgcttgatatagtttcaattttcttaaatttatttaggcttgttttgtggcctatcatatgatctgtcttggagaaaatcccatgcgatgttgaataaaatgtgtattctgcggttgccagatgaaatgttctgtaaatatctgttaagttcatttgttccaaggtatagcttaaatccattctttctttgttgactttctgtcttgatgacttgtctagtgctatcagtggaatactgaagccccccactattactgtgttgctgtctatctcattcttaggtctattagtaattgtttcataaatttggaaactccagtattaggtgcatatatgcaccgggga

SEQ ID NO: 165302 - DNA, 601 bp, Homo Sapiens
  misc_feature (233)..(233): n is a, c, g, or t
tagaggatcccggctcataagtaataaggaacgatgctcagaaaaagcaggacttaactatactggaacaatggacttaacagatgtatgcgaacatttcatccaataactgcagaagacacattctattcacagctcatggaattttctccaagatagaccatatgataggccataaagcgagcctcaataaatttaagaaaattgaaattatatcaagcactctctctggnccacaatggaataaaactggaaatcaactccaaaagggaccttcaaaaccatgcaaatacaagaaaatttgaataacctgctcctgaatgagcattgggtcaaaaatgaaatcaagatggaaattttaaaattctttgaactgaatgaccataatgacacaacctatcaaaacctctgggatacagcaaaggcagtgctaagaggaaagttcatagcctacatcaaaaagactgaaagagcacaaactgacactctaaggtcacacctcaaggaactagagaagcaagaacaaaccaaacccaaacccagcagaagaaaggaaataacaaagatcagaccaggactgaaatgagccgggtcctctaag

SEQ ID NO: 165303 - DNA, 620 bp, Homo Sapiens
tcacaatcctaaacataaaggcacctaacactggagctcccaaattaataaaaccatcactaatagacctaagaaatgagatagacagtaacacaataatagtgggggacttcaatatgtcactgacagcactagacaggccaatgagacagaaagtcaaccaagaaacaatggacttaaactatattctagaacaaatggacttaacaaatatttacagaacattctacccaacaactgcagaacatacattcttttcatcagcatatggaacattcttcaagatagaccctatgataggccacaaaacaagtctaaataaatttaagaaaatcaaaattatattaagcactctctcagatcacagtggaataaaaatagaaatcaactccaaaaggaaccctaaaactatacaaacacatggaaattaacctgctactgaatgatcatgaaatcgagatggaaattaaaaaaatcttcaaattgaacaaaaatagtgatacaacctatcaaaacttctggaatacagcaaagtcagtgataaaagggaagttcatattcctaaacacctacatcaaaaagtctaaaagagcacaaacagacaatcaaagttataacgg

SEQ ID NO: 165304 - DNA, 930 bp, Homo Sapiens
  misc_feature (34)..(34): n is a, c, g, or t
atcaacatcccaacctacgagagggtcaccaagngtggatcgttggcattgtggaaaagggaaaccgaacggcccggatcattgacaagccgcgagttattgaagtcctgcctcgtggggccacagctgctgttcttgctcctgacagttcaaatgcctcctctgagcctagctcgtgagatgaaagaacagaagttgtttggaccttagagccattgtccacaatcacggatggttctcaagagttgattgtaagaaatttccaaagaaggctgcctgcatagtggttccggctgccctttctaggtgattggaatcagcccatctaaagcagtctttatatgcattccgaggccagagtaacattttgaactttggggggatatttgttcatcacttgggtagaagaggagcaaaaatacctctgttttctcttgccaaagtaagatgaagctattccaggttgagggatttttctttgcacggggttgattaatttctgcacagggagtgagattattaaagtaacacacacacaaagtaaattgcaaaatgaaaaaaattagaagcaaatgagttttggaccaatattgttgataaatctaaattgttaagagagatcttataatgcaacatcaaattctttattcaattttactgaagtactggctctttcctgctctggacaagaattgagcaacttgtctgatgactgggaaaggaggacctgcaaccatctgacttggtctctgttaatgacgtctctccctctaaaccccattaaggactgggagaggcagagcaagcctcagagcccaggcctcagtggtcattaagatgttaagtcttttgcggcagattcctggtgatttgatcaataaagagtaatttcttgctaaataaataaaagaaaccttgttgaaaaactaa

SEQ ID NO: 165305 - DNA, 1104 bp, Homo Sapiens
gtgtgacaacatgttgatgttactcagcgtcagccagagtatgagtgaggaggaacgcgaaaaggtaacgccactcatggtcaaaggctttcgggatgcggctgaggaaggagggacggcagtgaccggtgggcaaacggtggtcaacccttggattataatcggtggagttgccactgtagtatgccaaccaaatgagttcataatgccggacagcgccgtcgttggggacgtgctggtgttaaccaaaccgttaggaacccaggttgctgtcaatgcccaccaatggctggataatcctgaaagatggaataaagtaaagatggtggtctccagagaagaggtggagctggcctatcaggaagccatgttcaatatggctaccctcaacagaactgctgcaggtttaatgcacacatttaatgcccatgcggccacagatatcacaggctttggcattctaggacactcccagaaccttgcaaaacaacaaagaaatgaagtgtcctttgttattcataatctgccaataattgccaagatggctgccgtcagcaaggccagtggacggtttgggcttcttcaaggaacctcagctgaaacctctgggggattactgatttgtctgccaagagaacaggcggctcgcttttgttctgaaatcaaatcctccaagtacggagagggtcaccaagcgtggatcgttggcattgtggaaaagggaaaccgaacggcccggatcattgacaagccgcgagttattgaagtcctgcctcgtggggccacagctgctgttcttgctcctgacagttccaatgcctccctctgagcctagctcgtgagatgaaagaccagaagttgtttgggaccttagagccattgtcccccaccccgggatggctctcacagagttggattgtaagaaaatttccaaaagaaggcttgccttgcatattgggttcccggctgccccttctctaaggtgaattgtgaaatcaaccccactctaaaggccgttcttttattaatgcattttcccgaagggccaaaaagtaaacattttttgaaactttttggggggggaatattttgggttccattccc

SEQ ID NO: 165306 - DNA, 957 bp, Homo Sapiens
  misc_feature (911)..(911): n is a, c, g, or t
gggaggaagattgtgcatgccgtgggtctgacggcttgagtagcgctagggagaatccctgcaggtaatatttgacttttgcttcatattaatctgagtggaaaataaaagggccctcttctcctctcgcttccctgccgggcaggcgccatggcggaagcctcggcgacgggcgcctgcggagaggcgatggcagcggcggaaggctcctcgggcccggcgggcttgactctgggccggagcttctcgaactaccggcccttcgagccccaggcgttgggcctcagcccgagctggcggctgacgggcttctccggcatgaagggctgaggctgcaaggtcccgcaggaggcgctgctcaaactcctggcgggactgacgcggccggacgtgcggcccccgctgggccggggcctggtgggtggccaggaagaggcgtcccaggaagccggcctgccggcaggagcgggccccagccccacctttccagccctgggcatcgggatggactcctgcgtcatccccctgaggcacgggggcctgtcactggtgcagaccacggacttcttttaccccttggtagaagatccctacatgatgggggcgcatagcttgtgccaacgtgctgagtgacctctacgccatgggggattactgagtggtgacaacatgttgatgttactcaggcgtcagccagagtatgagtgaggaggaacgcgaaaagggaaccgccactcatgggccaaaggctttcgggatgcggctgaggaaggagggacggcagtgaccgggtgggcaaacggtggtcaaccccttggattataatcgggtggagtttgccactgttagtatgcccaaccaaaatgaagttcataaatgccgggacagcggccggtcgtttgggggaaacntgcttggttggtttaccccaaaaccggtttaaggaaaccccagggc

SEQ ID NO: 165307 - DNA, 826 bp, Homo Sapiens
cacattttttggccacaattttaaccttcgggaggttgtggtggtttacctgttaaactaaattctgcaccttgcccctggggccggaaaagttaaatcccaccccccgggccaaaaggaaaaaatccccttcaaacctggaaaaaagcttcatcttaatttgggcaagagaaaaacagaggttatttttgctcttcttctacccaagtgaggaacaaatatccccccaaagttcaaaatgttactctggcctcggaatgcatataaagactgctttagatgggctgattccaatcacctagaaagggcagccggaaccactatgcaggcagccttctttggaaatttcttacaatcaactcttgagaaccatccgtgattgtggacaatggctctaaggtccaaacaacttctgttctttcatctcacgagctaggctcagaggaggcatttgaactgtcaggagcaagaacagcagctgtggccccacgaggcaggacttcaataactcgcggcttgtcaatgatccgggccgttcggtttcccttttccacaatgccaacgatccacgcttggtgaccctctccgtacttggaggatttgatttcagaacaaaagcgagccgcctgttctcttggcagacaaatcagtaatcccccagaggtttcagctgaggttccttgaagaagcccaaaccgtccactggccttgctgacggcagccatcttggcaattattggcagattatgaataacaaaggacacttcatatctttgttgttttgcaaggttctgggagtgtcctagaatgccaaagcctgtgatcc

SEQ ID NO: 165308 - DNA, 781 bp, Homo Sapiens
ctccttaccatccaggaagtggatgagttccttctgcggctgtccaagctcaccaaggaggatgagcagcaacaggccctacaggacattgcctccaggtgtacagccaatgaccttaaatgcatcatcaggttgatcaaacatgatctgaagatgaactcaggtgcaaaacatgtgttagacgcccttgaccccaatgcctatgaagccttcaaagcctcgcgcaacctgcaggatgtggtggagcgggtccttcacaacgcgcaggaggtggagaaggagccgggccagagacgagctctgagcgtccaggcctcgctgatgacacctgtgcagcccatgttggcggaggcctgcaagtccgttgagtatgcaatgaagaaatgtcccaacggcatgttctctgagatcaagtacgatggagagcgagtccaggtgcataagaatggagaccacttcagctacttcagccgcagtctcaagcccgtccttcctcacaaggtggcccactttaaggactacattccccaggcttttcctgggggccacagcatgatcctggattctgaagtgctgaagtggtctccattcttatgcacctggactcgctctccatcgtacttgatctcagagaacatgccattgggacatttcttcattgcatactcaacggacttgcagcgctccgccttggggtggggaaaaccaagcctggagactttcaatgaggggctgctaagcagcgacagccagagacctgcaactaggtatgtgagggctg

SEQ ID NO: 165309 - DNA, 584 bp, Homo Sapiens
  misc_feature (388)..(388): n is a, c, g, or t
  misc_feature (565)..(565): n is a, c, g, or t
cagcctcacatacctagttgcaggtctctggctgtcgctgcttagcagcccctcattgaaagtctccaggctttgttttccccaccccaaggcggaggctgcaaggtccgttgagtatgcaatgaagaaatgtcccaagggcatgttctctgagatcaagtacgatggagagcgagtccaggtgcataaagaatggagaccacttcagctacttcagccgcagtctcaagcccgtccttcctcacaaggtggcccactttaaggactacattccccaggcttttcctgggggccacagcatgatctgggattctgaagtgcttctgatagacaacaagacaggcaaaccactgcccttggggactctgggagtacacaagaaagcagncttccaggatgctaatgtctgcctgttggttttggattgtatctactttaatgatgtcagcttgatggacagacctctgtgtgagcggcggaagtttcttcatgacaacatggttgaaattccaaaccggatcatgttctcagaaatgaagcgagtcacaaaagctttggacttggntgacatgataaccggggtg

SEQ ID NO: 165310 - DNA, 906 bp, Homo Sapiens
gggccctctcctttgaagccaggcatgctgaacttgcccaaggctgacgttgatgtctcaggaccataggtggatgttgaagtcccagatgtgagccttgaaggtccagaagggaagctgaagggccccaagtttaagatgcctgagatgcacttcaagacccccaagatctccatgcctgatgttgatttcaatttaaagggacccaaaatcaaaggagatgttgatgtttctgccccaaagctggagggagagttaaaaggtccagaattggatgtcaaaggtcccaaattagatgctgacatgccagaagtagctgtggaaggcccaaatggcaagtggaaaactcctaagttcaagatgccagatatgcactttaaagctcccaaaatctctatgccagacctcgatctacacttgaagagccccaaggcaaaaggagaggtggatgtagatgttcccaaattggaaggggaccttaaagggccacatgtggatgtcagtgggccagacattgacattgagggaccagagggcaaattgaaaggccctaagttcaagatgcctgatatgcatttcaaagcccccaatatttctatgcctgatgttgatctaaatctcaaaggacccaaaatcaagggggatgtggatgtgtctgtgcctgaagtagaaagtaaacttgaagtaccagatatgaacatcaggggccccaaagttgatgtaaatgcccccgatgtccaagctccagactggcacctgaagatgcccaagatgaaaatgcccaagttcagcatgcctggcttcaaagcagagggccctgaagtagacgtcaacttgcctaaggctgacgttgacatctcaggacccaaggtggacattgaaggcctgatgttaatctgagacact

SEQ ID NO: 165311 - DNA, 405 bp, Homo Sapiens
  misc_feature (20)..(20): n is a, c, g, or t
cttcgtacttgggcacagancgatccacatcccttgactttggggcctttcaagtgtaagtccacatcaggcatggagatcttgggggccttgaaatgcatctcaggcatcttaaacttgggacccttcaacttcccttctggaccttcgaggctcacatctggggcttcgatgtccaccttgggtcctgagacaacaacgtcagccttaggcaagttcacatccacttctgggccctcgcctttgaggctgggcatgccgaacttgggcattttcatcttgggtattttcaggctccagtccaggccttggccttccacatctggtgctttaatatctaccttgggacctctgatgtccacatctggaacctgcatttcaccctctatctttggtgcagagata

SEQ ID NO: 165312 - DNA, 647 bp, Homo Sapiens
gtgacgttaagatgtgatatgaaggacctgaaggagagctgaagggcccaagttcaagatgccagagatgaatatcaaggcccccaagatctccatgcctgatgtggacttgcatatgaaaggtcctaaagtaaagggagaatatgatatgacagtgccaaagctggaaggggacctgaaaggcccaaaagtagatgtcagtgccccagatgttgaaatgcagggtcctgactggaacttgaagatgccaaagattaaaatgcccaaatttagcatgcccagcctcaaaggagaggggccagaatttgatgtgaacctgtccaaagcgaatgtggacatttctgcaccaaaagtagatactaatgctccagatctgagccttgaaggacctgaagggaagttgaaaggcccgaagtttaagatgcctgagatgcacttcagagctcctaagatgcctttgccagatgttgacctggatcttaaaggacccaaaaatgaaaggaaatgtagatatctctgcaccaaagatagagggtgaaatgcaggttccagatgtggacatcagaggtccaaggtagatttaaagcccagatgtgaaggcaaggctgaatggagctgaaataccagatgaatgccagtcagctgcc

SEQ ID NO: 165313 - DNA, 991 bp, Homo Sapiens
gggtggcgaattccgcacgaggaactttggggcctttgatgtcacatcaggagcttttatctctccttctacttttggaactgttacatcataatctcctttcattttaggacctttcaaatgcaaaccaacatctggtatggatatcttctgaggctttatactcatctctggcatcttgaatttaggacccttcagtttcgcatctggaccttcaatattcacatctggaacatcaacatccaccttgggtcctgagacatcaacgtcagccttgggcagcttcacatccacttcaggaccctctcctttgaagccaggcatgctgaacttgggcattttcaccttaggcatcttcaggtgccaatctgggccatgaacatccacatctggagcactaatatcaactttgggccctttaatatcaacatcaggaactttcatgtcaccttctacctcaggcaaggacacatccacatctcccttcaattttggccccttaagattcaggtccaccatcaggcatggagatcttgggggccttgaagtgcatctcagggatcttaaacttggggcccttcagctttccttccgggccccgagcggagagggggcgccctccttctcccgcgcccagaggcccggcccgctctggcccgagccccagcctggcctccgacccaactccgggtcgtggcgccgcctggggggtcctggccccccgggaaagagacagcaggccctggaaaaccaggccggtgggccgggccaagccggaaagctcgggccgcccaaaggccgggaaccggatccccggtgggccggaacctggctgcaatgtgagcccttggcctaaaccctggctgggggtccgcccacgggccggtaaaccgggaacaccggcccttgccccttgggcaaaaacccggtgggacccccctaccccgggggcacggcctctcccccggcaagaattttgcgaaggcgccct

SEQ ID NO: 165314 - DNA, 358 bp, Homo Sapiens
tgctgggattacagatgtgagccatctcgccgggccagaggtatgtttttatttttagtttaccagtttaggggtaagcttttataaggtacatgaggagacaaaccagataaatgcttgatcggttgcagagatgcagtcgccttatttggacttgccaccccgaaataatacaaaggtcaagatttcagttggaagagtttattcaagcagaaagatagcaatggcccattcaggaaaaaaaacagactccagagaaatggactcagtactctaaaattagaagttaagttctttcttatattaccaggaaaagaggtcctgatcagaccccaagagagttcttggatctcacaca

SEQ ID NO: 165315 - DNA, 832 bp, Homo Sapiens
aacgactttcaatcttcagatgtttcgttgaatctatttaaagcttcaccatggcaatatgtatttcccttaaaacactgcaaacaaatatactaggagtgtgcccttttaatctttactagttattgtgagattgctgtgtaagctaataaacacatttgtaaatacattgtttgcaggacgaaaacttctgagttacagctcaggaaaagcctgctgaatttatgttgtaagcattacttaacacagtataaagatgaaaagacaacaaaaatatcttcatacttcctcatcccctcattggaacaaaaccttaaactgggagaaccttagtcccctctctttcctcttcctcctccacttcccacttattgtcaccttgtaatattcagagagcacttggattatggatctgaatagagaaatgcttacagataatcattagcccacataccagtaacttatacttaaagatgggatggagttgtaaacgtgcttctataatacaatataacttggtcaaaggcaagggttgactcttggtttcattttgacatggcatgtcctgaaataaatatgggaattccacatagtggggaacacacaacaaacaaaacgacacgagagcgcccagcaccacagacacgaaaaacaagaaggcaaccccgcgggcgcgggcaggagcagacacacaccccacccacaaagacggcagacccagaacgagcgagcggagaacacggacaaaaggggacgggagcgaacacgggggcacggcccgtgggcgcgagccgcgagcggaaggcccgccggcgacgcgaccgcaggagcg

SEQ ID NO: 165316 - DNA, 925 bp, Homo Sapiens
gtgccgtgggtgtgttccgggaggatccaaagactcgggaagagttcctgactctcattaggagctgagcttcattcagtgtgtgtgcgttggttgccgatcgtactgccagtagcattgtctgtctgtccggtcttgtttgtacattccattttcaattgttacagatgtgaactttattccttgtcactaattatatttaaaattatttctaggaagtcaaataaatataataaagggttgagccctctactttcttcttgccaccttttggtggcaatattaaagtgaactgctaatagtgtaagtacgtgcacaaaaccactgccagataaccagaggggcctgggaagggagaagaattagtgtatttttttcaaatagtacagtaatttgcctcataagcataggagcatcgggaatgagagggaactgtgcccagtatactgttttttttcttcctccaataaaagtggtgtactgccgaaagtgctaaaatatttagtgcggcattgctctgtgaatacaagttcaacagacttcacttgggtcatgtttattaaaccaccagtgacatttaaaaatatatttatagcagtcgtaatgttagtcaccaagggaaggtggtggaatgtctatgttttagattttactgtgagctaaaaaggcacattgctaccttctattgtttttagattcaagaatacggaattacttcctggtgctcgcttaccattggcatttctcctgttacacaccgggggatttacgacattttaaccttctctgccggccttggataaacaaatattcacctttaaaactggtacgcatcaccttttctgacctctcttttacacaaaaacgccaactcacattcccaattggaaaacattcaaggtatctccctccacccgtgataaaa

SEQ ID NO: 165317 - DNA, 600 bp, Homo Sapiens
cacacaaaacctgggactgagggccagccgtcttaatgtcctgtaaattctgctctcggatcttgttcctcatctcctggacctcttttgggttagtgttcaatggaacaaacaggttagggacagcagaggtggaagttctatgtccatcctctttagtccacttagtcttcgacttgggactgcttccattctgcccttcctcggaagcttcgtcgccccggccagagttcagccatcttgtcttctcccgctgctgcttctgaaaactgtgtctgagtggggaacaagtgcccgaatcaccgtcactagcaaaggagtaacctgtgacactagcaggaacctccacatcgctgtattttttagacttctctctcagagcagggtatcgataagggtagccagttctgtagcccagattatcgagcatccgcatgagggcttcaaattcctgctcaccaatctgccacttgggaggcgatccagtgccttcccctaccggagaccctggggaacgggacttggctttgtacttctcaggattcagcaggactaagttgtctggtcctcctgcactggccagagttcgaacctggatct

SEQ ID NO: 165318 - DNA, 664 bp, Homo Sapiens
atcacattgcttttcatgaccctgtcatctcatgcttccagttggctttggtgttggatgattttcagagcagtgaaccaatggtctctgaggggcctcccctgctggtcccagggttatggggctcagctctgtcgtccagcctacctaatgacccagattcagctgggctttccagatggtggttttccatcagtcatgactttgacttccagcatttaactggtctttatgtggctgcatccggctcccatggcgactctgctggagtgaaccagattagatgtggtcattggttcagtcctctctgtgaatgttcagtgcatgaccagatgtgagataaactgaataaattggatgctatgtcacttattgttgtcataatcctgacttttcaactgttcttgatattacagtggactaaagaggatggacatagaacttccacctctgctgtccctaacccgtctgttccattgaacactaacccaaaagaggtccaggagatgaggaacaagatccgagagcagaatttacaggacattaagcaggctggtccctcaagtcccagtttttgtgtggtgtagtgatggacaggagcatcgtccagggagagctggtgacggcctccaaagccattcattgaaaaggataccagccccac

SEQ ID NO: 165319 - DNA, 1713 bp, Homo Sapiens
  misc_feature (565)..(565): n is a, c, g, or t
  misc_feature (719)..(719): n is a, c, g, or t
agacccagccccggtggctgaagaggctgccccctcagctgtcgaggagggggccgccgcggaccctggcagcgatgggtctccaggcaagtccccgtccaaaaagaagaagaagttccgtaccccgtcctttctgaagaagagcaagaagaagagtgactcctgaaagccctgcgctaacactgtcctgtccggagcgaccctggctctgccagcgtccccggccacgtctgtgctctgtccttgtgtaatggaatgcaaaaaagccaagccctccgcctagaggtcccctcacgtgaccagccccgtgtagccccgggctgacccagtgtgtgctcagcagccccaccccaccctgccccttgtcctctcagagcctcagcttctgggggagacatgctctccccacaggggggaggcactaagtcatggtcctggctggaaggtactgaaggcttctgcagctttggctgcacgtcaccctcctgagcctcacctttcctgccgtccctcctgttgtgaaatcaccacattctgtctctgcttggcttcccctccaccctanagtctcaggtgacggactcagactcctggcttcatgtggcattctctctgctcagtgatctcacttaaatctatatacaaagcccttggtcccgtgaaaacactcgtgtgcccaccagcggccctgaagaggcaggtctggggcagatgctggngcaggaaacccagcggcagatgggcctgtgtgcacccacgtgatgctatgcatgtctgaccgacgatccctcgaccagaatcagattcaggagctcagtttctttttcacttgggtctctggattcctgtcatagggaaggtatatcaggagggggaagaggcctttctagaattttctttgagcaggtttacaatttagcttacatttttcgactgtgaacgtgaataggctgctttttgctttcttctttccagaccccacagtagagcacttttcacttatttgggggaggcttcaggggactgttctcaccttaactcagccagaaagatgccctagttgtgatcaaaggtaactcgaggtggagggtagccctggggcccctcgacatcaccgtcattgatggagcctgaaccgtgtgctcctcggcagatgctgttgttgttacttccctccaagaggctggaaaagggctcagagctgctgagcaggaaccggagggtgacccatttcaggaggtgccggtaccagcctgactaggtacaggcaagcttgtgtggggcccaacaggcccttggtagagctggtgccagatgtgggctcagatcctgggcatgatgggccgagccacctcggatcccactgattggccagccgagcgagaaccaggctgctgcatggcactgaccgccgcttccagcttcctctgagccgcagggcctgctacgcgggcaagcgtgctgcctctcttctgtgtcgttttgttgccaaggcagaatgaaaagtccttaaccgtggactcttcctttatcccctcctttaccccacatatgcaatgacttttaattttcacttttgtagtttaatcctttgtattacaacatgaaatatagttgcatatatggacaccgacttgggaggacaggtcctgaatgtcctttctccagtgtaacatgttttactcacaaataaaattctttcagcaagaaaaa

SEQ ID NO: 165320 - DNA, 408 bp, Homo Sapiens
  misc_feature (25)..(25): n is a, c, g, or t
  misc_feature (30)..(30): n is a, c, g, or t
  misc_feature (99)..(99): n is a, c, g, or t
agaccccgggcaatgaatgggcccnagccnaccctgggatccccactgaattggcccagccgagcgagaacccaggctgcctgcatggcaactgaccgnccgctcccagcttccctctgaagccgcagggcctgctacgcgggcaagcgtgctgcctctcttctgtgtcgttttgttgccaaggcagaatgaaaagtccttaaccgtggactcttcctttatcccctcctttaccccacatatgcaatgacttttaattttcacttttgtagtttaatcctttgtattacaacatgaaatatagttgcatatatggacaccgacttgggaggacaggtcctgaatgtcctttctccagtgtaacatgttttactcacaaataaaattctttcagcaagttccttgtct

SEQ ID NO: 165321 - DNA, 553 bp, Homo Sapiens
tgtgctcgcgagaagttaagaggctctggagtcagactgcctgggctcaccttctctcagctggtggacacacggatcctcagagtctgtttgcttatctgtaaagtggggtaacggtactggcttcaaccagctactatgagaatttatatgtgataatgactgacaaagcaggcagcatgctgcctagagcgtgacagtccataatcattagctattatcgtcaccttcgtgtgtgttaagctttgcctaggggtggagtggggcaggaccctagaactggttactaaggttaccttctaatgaccctgaatgtaggagtgagggaacgacggagcaggtgaagctagtgtcaaactcttgaacgtgttccaagaggtcatatgtactaaatcaccacattctgtttcacgtttgtccctaagggatttttaacacgcagcgacaaaacctcaagagaagggtccctgatagggaacaatcttgtgatcacatccttaaataccgagaaatgagacccttcactacgtgtaagaaatcgtccagtcctgca

SEQ ID NO: 165322 - DNA, 871 bp, Homo Sapiens
acccacagaccattgtgctgatgagtgacctggctactaccctggatgcacagggccgctttgatgaggcctatatttatatgcaaagggcatcagatctggcaagacagatccatcatcctgagctacacatggtactcagtaatctagctgcagttttgatgcacagagaacgatatacacaagcaaaagagatctaccaggaagcactgaagcaagcaaagctgaaaaaagatgaaatttctgtacaacacatcagcggacgagttggctgagctgtcaaagaaaagtagacctttgacaaattctgtcaagctctaaatccatttttgtgtagggagaataatgtctagtaatgtggaagaatggctatcattcctgtctctgtggcacccgatcaatggcttaaatctgtcgtttttgatattcaggtttcctcaatttagccttagtgaaggaggggttgtacacactgccatttttgtattttaaaggaaaaatgactttcattcccaactgattatgacctttcaggatgtcgtcaagtgatgctttcagttgtaacacgtgacttggtgctgtccctgctggtctaagtagaactgtagattcatatgggctggtgttcctgtgcgctgtgggtgtggtgattcagcctggcatttctaccacaagtttttggtctgctgatttgctgccctgtcttctcttactttactttgtcatacctggccaactgaccagaattaccttcctcatggcaagggggattatggtgaattgttgttcttatagtctgtttcatgaagcacaggtggaatttaatacataaaagagaaaatatcttagtttgctaccagcactgagcacc

SEQ ID NO: 165323 - DNA, 494 bp, Homo Sapiens
ggtctactactactactaaattcgcggccgcatcgacgaagggctggtgacatgaagagaggtggcgtgacgtgtggataatgaggaagcattggtgacaggaagaggggtggtgtcacctgtggatgctgaggaagtgtcggtgacaggaagaggggtggtgtgacctgtggatgctgaggaagggccggtgacaggaagacgggtggtgtcacctgtggatactgacgaagcgtcggtgacaggaagaggggtggtgtgacctgtggatgctgaggaagggctggtgacatgaagaggggtggcgtgacctgtggatgctgaggaagtgttggtgacatgaagaggggtggcatgacctgtggatactgaggaagtgtcggtgacaggaagagaggtggcgtgacctgtggatgctgaggaagggctggtgacatgaagagaggtggcgtgacgtgtggataatggtcgacgcggccgcgaatttagtagta

SEQ ID NO: 165324 - DNA, 444 bp, Homo Sapiens
ggtctactactactactaaattcgcggccgcgtcgacccgacacttcctcagcatccacaggtcaggccacccctcttcctgtcaccagcctttcctcagtatccacaggtgacaccacgcctcttcctgtcactagcccttcctcagcatccacaggtcacgccactcctcttcttgtcaccgacgcttcctcagcatccacaggtcaggccacccctcttcctgtcaccgacacttcctcagcatccacaggtcacgccacctctcttcatgtcaccgacacttcctcagcatccacaggtgacaccacccctcttcctgtcaccgagcacttcctcagcatccacaggtcacgccacccctcttcatgtcaccagcccttcctcctatttcccattagtcgacgcggccgcgaatttagtagtagtagtaggcggccgctc

SEQ ID NO: 165325 - DNA, 370 bp, Homo Sapiens
ggtcgactactactactaaattcgcggccgcatcgacccgcttcctgtcaccgatacttcctcagcatccacaggtcaggacacccctcttcctgtcaccagcctttcctcagtatccacaggtgacaccacgcctcttcctgtcactagcccttcctcagcatccacaggtcacgccacccctcttcttgtcaccgacgcttcctcagtatccacaggtcacgccacctctcttcttgtcaccgacgcttcctcagtatccacaggtcacgccaccgctcttcatgtcaccgatgcttcctcattatccacaggggacaccacccctcttcctgtcaccagcccttccgtcgacgcggccgcgaattta

SEQ ID NO: 165326 - DNA, 882 bp, Homo Sapiens
gttcaccagccgccagagcctgcaggcactagcctgctatgctgacatctctgtctctgaggggtccgtcccagagtccgcagacatggatgttgtactggagtccctcaagtgcctgtgcaacctcgtgctcagcagccctgtggcacagatgctggcagcagaggcccgcctagtggtgaagctcacagagcgtgtggggctgtaccgtgagaggagcttcccccacgatgtccagttctttgacttgcggctcctcttcctgctaacggcactccgcaccgatgtgcgccagcagctgtttcaggagctgaaaggagtgcgcctgctaactgacacactggagctgacgctgggggtgactcctgaagggaacccacccacgctccttccttcccaagagactgagcgggccatggagatcctcaaagtgctcttcaacatcaccctggactccatcaagggggaggtggacgaggaagacgctgccctttaccgacacctggggacccttctccggcactgtgtgatgatcgctactgctggagaccgcacagaggagttccacggccacgcagtgaacctcctggggaacttgcccctcaagtgtctggatgttctcctcaccctggagccacatgggagactccacggagttcatgggagtgaatatggatgtgattcgtgccctcctcatcttcctagagaagcgtctgcacaagacacacaggcttgaaggagagtgtagctcccgtgctgagcgtgctgactgaatgtgcccggatgcaccgcccagccaggaagttcctgaaggccccaggtgctgcccccctctgcgggatgtgaggaacacggcctgaaggtgggggagatgctgcggac

SEQ ID NO: 165327 - DNA, 1229 bp, Homo Sapiens
ggggctttcttccccccaaccttccaagggccgggggtcctccacattccccggccagaggggggggcaggcaccctgggccctttcagggaactttcctgggctggggcgggtgcattccggggcacattccagtcaggcacgctccagcacggggagctacacttctcccttcagccctgtgtgtcttgtgcaaacgcttctctaggaagatgaggagggcacgaatcacatccatattcactcccatgaactccgtggagtctccatgtggctccagggtgaggagaacatccagacacttgaggggcaagttccccaggaggttcactgcgtggccgtggaactcctctgtgcggtctccagcagtagcgatcatcacacagtgccggagaagggtccccaggtgtcggtaaagggcagccgtcttcctcgtccacctcccccttgatggagtccagggtgatgttgaagagcactttgaggatctccatggcccgctcagtctcttgggaaggaaggagcgtgggtggcttcccttcaggagtcacccccagcgtcagctccagtgtgtcagttagcaggcgcactcctttcagctcctgaaacagctggctggcgcacatcggttgcggagtgccgttagcaggaagaggacacgcaagtcaaagaactggacatcgtgggggaagctcctctcacggtacagccccacacgctctgtgagcttcaccatctaggcgggcctctgctgccagcatctgtgccacagggctgctgagcacgaggttgcacaggcacttgagggactccagtacaacatgccatgtctgcggactctgggacggacccctcagagacagagatgtcagcatagcaggctagtgcctgcaggctctggcggctggtgaacgggtccaggcagttgcggtcccgggacaggattcggacactctgcagccagatgacacggtgggagggtggcaagccctgttccaggacggagaccagcagctccgccagtctcttccggtcctcctgttgggcatcatcaaacgtgaagctctgggagtgctcctggttgtatgaccgcagagcttccataatcacatcctcctcacccgtctccacggcttctgcaaccgcccggggctccatggcgcgccggggaaggcgggacgggcgacgcgtgggtcgacgatatcccaaaattccggaccgtaccagcc

SEQ ID NO: 165328 - DNA, 174 bp, Homo Sapiens
gcctactactactatacggctgcgagaagacgacagaagggtggtcagtaggagagcacgttcagagggaagagccatctcaacagaatcgcaccaaactatactttcaggatgaatttcttctttctgccatcttttggaataaatattttcctcctttctatggaaatctgt

SEQ ID NO: 165329 - DNA, 1054 bp, Homo Sapiens
  misc_feature (867)..(867): n is a, c, g, or t
ggggcacacgctggtcacgcggtcagctattgacacttcctggtgggatccgagtgaggcgacggggtaggggttggcgctcaggcggcgaccatggcgtatcacggcctcactgtgcctctcattgtgatgagcgtgttctggggcttcgtcggcttcttggtgccttggttcatccctaagggtcctaaccggggagttatcattaccatgttggtgacctgttcagtttgctgctatctcttttggctgattgcaattctggcccaactcaaccctctctttggaccgcaattgaaaaatgaaaccatctggtatctgaagtatcattggccttgaggaagaagacatgctctacagtgctcagtctttgaggtcacgagaagagaatgccttctagatgcaaaatcacctccaaaccagaccacttttcttgacttgcctgttttggccattagctgccttaaacgttaacagcacatttgaatgccttattctacaatgcagcgtgttttcctttgccttttttgcactttggtgaattacgtgcctccataacctgaactgtgccgactccacaaaacgattatgtactcttctgagatagaagatgctgttcttctgagagatacgttactctctccttggaatctgtggatttgaagatggctcctgccttctcacgtgggaatcagtgaagtgtttagaaactgctgcaagacaaacaagactccagtggggtggtcagtaggagagcacgttcagagggaagagccatctcaacagaatcgcaccaaactatactttcaggatgaatttcttctttctgccatcttttggaataaatattttcctcctttccttcgncggtgggcacctaatctccaaaccaacctggtcggccgccctcggccctcaaaaaacttttcctaaaccattccttttgggccgcgcggccccccgtagggaaacggaacaaggggccataagctggtttccctaaggaaatcccctggtcaaggaacaaaagggcttgggaattctccacccaaat

SEQ ID NO: 165330 - DNA, 1202 bp, Homo Sapiens
gtctgaacttgagaccgcgtggggattggagggtttgggtaccccgccatggccgccatcaatgcacgcaagatgaaatttgctctgctaaaaggctccttcagtgagcaaggcatcaacgagtttctcagggagctctcttttgggcgtggctccacggcacctgtaggaggcggggctttccctaccatcgttgagagagagccttgggacggcagggatggcgagcttcccgtggaggatgacattgacctcagtgatgtggagcttgatgacttagggaaagatgagttgtgagagccacaacagaggcttcagaccattttcttttcttgggagccagtggatttttccagcagtgaagggacattctctacactcagatgactctaccagtggccttttaaccaagaagtagtacttgattggtcatttgaaaacactgcaacagtgaacttttgcatctcaagaaaacattgaaaaattctatgaattgttgtagccggtgaattgagtcgtattctgtcacataatattttgaagaaaacttggctgtcgaaacatttttctctctgactgctgcttgaatgttcttggaggctgtttcttatgtatgggttttttttaatgtgatcccttcatttgaatattaatggctttttccattaaagaataaaatattttggacaatgccgataaatgtatgaagttagtatccacatcataaattcagagtgatgtttagcagtaaatcaatattttgaagtgatacacagatgtctttcctccccacaaacttttttaaacaaaaaacaagacctcttttctttagatggtgccacctatgcccaccacaacagagattttacatggaaaccgggctcagtgagaactgatttcctgcccaatatttgtctttgggctgtctctagtgactaattattaaggaatctagctggttatacagttcaaggctttctatgttgttaatgaacctcaaaatagccgttaagacatgaaatacagcagcaggttaccaatgcgaacaggtagttcgcatttatgtaaaacattcagaaaatgaagttttgaatttgttggaacattcaaaggacttgagagcattttattgtaacttaaaaaaataaatacaactgtcactacaaaaacaaacgggaaacaaccccacaaccctacacaac

SEQ ID NO: 165331 - DNA, 1753 bp, Homo Sapiens
  misc_feature (1505)..(1505): n is a, c, g, or t
  misc_feature (1604)..(1604): n is a, c, g, or t
ggggtgcggcacgctgcagggctgaagcggcggcggcggtggggactgcacgtagcccggcgctcggcatggctctcctggtgctcggtctggtgagctgtaccttctttctggcagtgaatggtctgtattcctctagtgatgatgtgatcgaattaactccatcgaatttcaaccgagaagttattcagagtgatagtttgtggcttgtagaattctatgctccatggtgtggtcactgtcaaagattaacaccagaatggaagaaagcagcaactgcattaaaagatgttgtcaaagttggtgcagttgatgcagataagcatcattccctaggaggtcagtatggtgttcagggatttcctaccattaagatttttggatccaacaaaaacagaccagaagattaccaaggtggcagaactggtgaagccattgtagatgctgcgctgagtgctctgcgccagctcgtgaaggatcgcctcgggggacgaagcggaggatacagttctggaaaacaaggcagaagtgatagttcaagtaagaaggatgtgattgagctgacagacgacagctttgataagaatgttctggacagtgaagatgtttggatggttgagttctatgctccttggtgtggacactgcaaaaacctagagccagagtgggctgccgcagcttcagaagtaaaagagcagacgaaaggaaaagtgaaactggcagctgtggatgctacagtcaatcaggttctggcctcccgatacgggattaaaggatttcctacaatcaagatatttcagaaaggcgagtctcctgtggattatgacggtgggcggacaagatccgacatcgtgtcccgggcccttgatttgttttctgataacgccccacctcctgagctgcttgagattatcaacgaggacattgccaagaggacgtgtgaggagcaccagctctgtgttgtggctgtgctgccccatatccttgatactggagctgcaggcagaaattcttatctggaagttcttctgaagttggcagacaaatacaaaaagaaaatgtgggggtggctgtggacagaagctggagcccagtctgaacttgagaccgcgttggggattggagggtttgggtaccccgccatggccgccatcaatgcacgcaagatgaaatttgctctgctaaaaggctccttcagtgagcaaggcatcaacgagtttctcagggagctctcttttgggcgtggctccacggcacctgtaggaggcggggctttccctaccatcgttgagagagagccttgggacggcagggatggcgagcttcccgtggaggatgacattgacctcagtgatgtggagcttgatgacttagggaaagatgagttgtgagagccacaacagaggcttcagaccattttcttttcttgggagccagtggatttttccagcagtgaagggacattctctacactcagatgactctaccagtgggccttttaaccnaagaagtagtactttgattggtcattttgaaaaacactggcaaacagtgaaactttttgcatctcaaagaaaacatttgaaaaattctatgaatttgtntgtagcccggtgaatttgagtccgaattctggtcacataaatatttttgaaagaaaaccttggcctgtccgaaaacatttttttctcctctgaactgcctgccttgaaatggttccttgggaaggctggtttccctaatgggatggggg

SEQ ID NO: 165332 - DNA, 850 bp, Homo Sapiens
gtctgaacttgagaccgcgttggggattggagggtttgggtaccccgccatggccgccatcaatgcacgcaagatgaaatttgctctgcaaaaaggctccttcagtgagcaaggcatcaacgagtttctcagggagctctcttttgggcgtggctccacggcacctgtaggaggcggggctttccctaccatcgttgagagagagccttgggacggcagggatggcgagcttcccgtggaggatgacattgacctcagtgatgtggagcttgatgacttagggaaagatgagttgtgagagccacaacagaggcttcagaccattttcttttcttgggagccagtggatttttccagcagtgaagggacattctctacactcagatgactctaccagtggccttttaaccaagaagtagtacttgattggtcatttgaaaacactgcaacagtgaacttttgcatctcaagaaaacattgaaaaattctatgaattgttgtagccggtgaattgagtcgtattctgtcacataatattttgaagaaaacttggctgtcgaaacatttttctctctgactgctgcttgaatgttcttggaggctggtacttatgtatgggtcttttaatggtgatcccttcatttgaactattactggctttttccattaaacgactaaaatatttcggacaatgccgataaactgtatgaagttagtatccacatcataaattcagagtgatgtttagcagtacatcaatattttcgaagtgatacacagatggttttcctccccaaaaactttttaacaaaaaaccgaactcttttctttcgatggggcccctatgcca

SEQ ID NO: 165333 - DNA, 742 bp, Homo Sapiens
  misc_feature (678)..(678): n is a, c, g, or t
  misc_feature (720)..(720): n is a, c, g, or t
cacagaagccggggatgaaaagccctgtgtaggggaataatgaggctcttcactgcagagaacggcggctctttgcgagcatcagtctatgagataacttttctttctcaattttctaatctttttggccttgggtgttctgtgggccacacgggagtgagttttatgaaagtggtatttttttctggaatgtactactcgtttagcagccttcatatttttcaactctagcctttgcattttctaaaattaaaatggtgtaggctaagtctttcaatctgtctctgacctgaggtagggcttatgcagggctggaggcagaaggcacgcccatggagaagggtttcagcacagaggagactgctgccttatgctcttgggtgaatgaaggcttggtgtagacggcgtttcccgctaccttctcaggcccctgcactatgtgaggctgttccagctcccttggggctggactcccgagccttttttctttggcagcattctccacaaatgcctgggcaccctgttccctcctgatgctctgctttcccacctctttgaagtgccttttctggatgctccttgggcccatgaggactctgttcactctctgcaggtttttgcctacactttgaatctttgccaggcggttttcctgtggttgggacagtttctaatttnttttcaaatatttgggcatttaaatttggttaaccagaaggntgggactgcataaggatgggca

SEQ ID NO: 165334 - DNA, 952 bp, Homo Sapiens
aatgaagcatgggccgggtactgggatctggaagagtgaatgggagccaaggaaagagacacagagggaagtgtcccctagggaacaaggggcagagcagagtgtctggctagtgttcacttggattctgagcttatgtgaagtccatgggctagaaacccagtctgcctattgggatagagggggcacaagtgtaactgtgtttgagaatacaggctttatacagaaacacatttcaaagtgtccatgaaaaaaagagtataaatgtcttctaatttgaagaggcccccattcctttctgatgtgccaggccaggatgtgatatttcagctcccagcaactctgggcagctcctgggactcagatcattttccttctttatagtagaggtttctgtgccagccaggctcagccagggtgcctactggtaccagggagtctttctaacccagcgcagtgtaaatccagcatctgttcgaatttggattgaagcagcttcagcttcccgcacagtctccttcacagaatgcatgaggttctgggcatagtgaaccagcatctctgtggcctgctcagactcctcatcactgatgttgggtccggcccagcatggtggccttcactgtggacaggattttgagctgggtgcttatggttgggattcgctcacatacctgtaagaggttggttctaatccgtttatctgtgcactgcttggcaacctccttgggccaaccgagtcacctcatctgaggccttggcgatgtccttggcacactgaatgagtgcccgcttggtacaactgccccctcttaccagccgagacatctcagccatcagcagagccatgcgcttggctgctgcaatgatgtcattgcccttgctggaccatttgcgagcttcatcatggagctgtctggcagccatcatcattggctggttaatcacctca

SEQ ID NO: 165335 - DNA, 673 bp, Homo Sapiens
acaggagtcgtccaggagacgctgagctgtggggaggatctgagggagaaagagacggaggcaggcagaacacggcctaggtgaacccatggaggcctgggcctaacaggaaggctgttatgcggcctggcccggagctaattgcaggagggggtgccgacctcacccacctgctgagggagctcactgatgaggtactgagcaaacttttgcagctggtccctctgtagccgggacagggactctgagactggggctcgcaggcagactgcagaagcgttgtggatgcggaagagacagagtgccacgacgtgggtgcaccatttggccccagccccacaggtacagctgcaggaagtgacccggcagcggtcaaacatcacagccacgttgtaggcccctttaggagggaccatctgaggtggcaccactgtagcactcaggtggaaccctatctgcaatgggtccttcacagcccgcatgcggaagagctgatcccctcgctgaaactcatccgcactgccattggccaggcacgaatacagccgaatgtcctcttcattctcagggaagctccaaaaagcaattcggagctgtagctgctcaggcacgggtgggtaaactttctccacacttcaatgggattgagtgcactgcttgtgaagtccacatg

SEQ ID NO: 165336 - DNA, 602 bp, Homo Sapiens
cgcaaagctcggaccgcggcagccgttctcaggaggaggtatctgagagcagctcgagcgcagaccacctggcctaatagctacctccctgattcatcgtctgtgtctcatgggccagtggcaggggtgacaggcggtcccccagcacttgtgcactctagtgcactcccagaccccaacatgctggtgtccgactgcacagcttcctcctcggacctgggctcggccatcgacaagatcatcgagtccaccatcgggcccgacctcatccagaactgcatcactgtgaccagtgctgaggatggcggggccgagaccacacggtacctgatcctacagggcccagatgatggagcccccatgacatcaccaatgtccagttccaccttggcccacagcctagcagccattgaggccctggcagatggccccacatccacatccacatgcctggaggcacagggtgggcccagttccccggtgcagctgcccccagcctccggtgccgaagagccggacctgcagagcccggaggccatgatggaggtggtggtggtgcagcagttcaaatgcaagatgtgccagtaccggagcagcaccaa

SEQ ID NO: 165337 - DNA, 1333 bp, Homo Sapiens
  misc_feature (449)..(489): n is a, c, g, or t
  misc_feature (668)..(676): n is a, c, g, or t
  misc_feature (1113)..(1121): n is a, c, g, or t
  misc_feature (1296)..(1296): n is a, c, g, or t
ccatcccagcccagcgcagccatggcagctaccgacagcatgagaggggaggccccaggggcagagacccccagcctgagacacagaggtcaagccgcacagccagagcccagcacggggttcacagcaacaccgccagccccggactccccgcaggagcccctcgtgctacggctgaaattcctcaatgattcagagcaggtggccagggcctggccccacgacaccattggctccttgaaaaggacccagtttcccggccgggaacagcaggtgcgactcatctaccaagggcagctgctaggcgacgacacccagaccctgggcagccttcacctccctcccaactgcgttctccactgccacgtgtccacgagagtcggtcccccaaatcccccctgcccgccggggtccgagcccggcccctccgggctggaaatcggcagccnnnnnnnnnnnnnnnnnnnnnnnnnnnnnnnnnnnnnnnnngtactgccacgacccagtaccgggccccttcttttccctgaaccgccactctggggccctgggacgggcttctacccctgccttccccaaggctccctgggcccttttgacccctgtaacccggtccgttaaatggccctcccgccggaccggcttttgtcaacgcgttccaccccggnnnnnnnnntcaggaaacactttgcctccccctccgcctacccgctgagccagaaaagaacctttgcgttgaccccgtcgcgcccacactcaactcacggacacttctattgcggcggtacagtgcgcgcctctgaagtttcttcccactgaatatgtgtaacctctacgggcagcacggcaccgacatgcacacgcctgtgggagggacattgtgcgacgtatacaggccaattttcccgccggacgagaatctgtgggccaatcctggtatagcccactcccctgcaccccgcactcgcgcgacaaccagcaaatatgcgggggtcgcctcgcgcggtgtaccctctccctaccagcttcggacagggtaccgggcccgtcatatctcgcctttctaagaaacgtctcgatttagcagtgtgtccacgctctgacgctcgactnnnnnnnnnagatgctatgcccgccgcgcctattctctcggagatacctcgcaatttgaatatagtcagtcgacgccccgtttgcgtgcaactcgagagatatctagccaccgcttctactcatcgatcgagccgaccaacaaaattgccccagagacagtgttgtacactgagaccctttgtntattaatcaccgtccccataatatccctacaatataa

SEQ ID NO: 165338 - DNA, 1128 bp, Homo Sapiens
atgtggagctgatgaagcacttgcacggtacaggccaaggatgaacaggccccatccgctgcaacaccacagtctgcctgggcaaaatcggctcctacctcagtgctagcaccagacacagggtccttacctctgccttcagccgagccactagggacccgtttgcaccgtcccgggttgcgggtcgtcctgggctttgctgccacccacaacctctactcaatgaacgactgtgcccagaagatcctgcctgtgctctgcggtctcactgtagatcctgagaaatccgtgcgagaccaggccttcaaggccattcggagcttcctgtccaaattggagtctgtgtcggaggacccgacccagctggaggaagtggagaaggatgtccatgcagcctccagccctggcatgggaggagccgcagctagctgggcaggctgggccgtgcaccggggtctcctcactcacctccaagctgatccgttcgcacccaaccactgccccaacagaaaccaacattccccaaagacccacgcctgaaggagttccgccccagcccccacccctgttcctgccacccctacaacctcaggccactgggagacgcaggaggaggacaaggacacagcagaggacagcagcactgctgacagatgggacgacgaagactggggcagcctggagcaggaggccgagtctgtgctggcccagcaggacgactggagcaccgggggccaagtgagccgctgctacgctcaggtcagcaactccgaccacaaatcctccaaatccccagagtccgactggagcagctgggaagctgagggctcctgggcaaccaggcctggccggagccaagctcccaggagccacctcctgacggtacacggctggcccagcgagtataactggggtggccagagtccagcgacaagggcgaccccttcgctaccctgtctgacgtcccagcacccagccgaggccagactcttggggtgaggacaactgggagcggcctcgagactgacagcccgacaggtcaaggctgcagctgggccggaagagcgcgaggagccgcggcccgaagatgaccgcaaacgcgacgagaggaaggtggcacagacccaa

SEQ ID NO: 165339 - DNA, 695 bp, Homo Sapiens
cggtcgcttactagacacaaccctgcgcgtaccggcccccctccccggttagcgggcggttgtaaggtctccggcgggcgctgcctgccttcctcccagagggtgtttcctagaaactgataaatcagatcgtgcctctttacccttggctttcgaagcaaattgatgttcacgtctgacgtgggcgcgggctgcgcaggcggcgccagaccccagccgcctcccaggggctagactgagcccggcacaaggggtgtgaaatagaatttattgtggctctgattatgtacacgtgagatggcctggctgggccggccgggctcacatggtttgtacaataaatacatctgtggggcgggctctccgcagccgggaagggccaccgccacggttcagtccagcttccgggctcccagcttcatggggcccttggccaccttcctctcggcgcgtttggcctccatctcccgccgccgctcctcgcgcttcttccgggccagctcagccttgacctgtccccaagagtctggcctcggctgtaaagagaagtgtgggctgcagtggggcccacttctggctgaggtccaccatctctaccctctcgccagacctgtgctgggtacctgggtgctgggacgtgcagacagggtagcgaaggggtcgcccttgtcgctggactctgggccaccccagcc

SEQ ID NO: 165340 - DNA, 1494 bp, Homo Sapiens
  misc_feature (805)..(814): n is a, c, g, or t
  misc_feature (1072)..(1072): n is a, c, g, or t
cgcaaaggtcctaagtagcgagcctgggtggcgtaattccgcacaaggggaagacccgacccagctggcagaagtgggtgagtggcttacactcgtgttccctctttccctgccatgtccttgactgtgacctgtttgtgtcccacccccactggagtttctgaaaggtcctagtgagcagacttgactcagctcccccttcacagatgggagaaatcaggcctggagaaaggaggggtggctgcagggcactgtcagttcctgctgtcctgtcacccatgggtgcctgacgtgcccatacccacctctctctcatgccactgcccagagaaggatgtccatgcagcctccagccctggcatgggaggagccgcagctagctgggcaggctgggccgtgaccggggtctcctcactcacctccaagctgatccgttcgcacccaaccactgccccaacagaaaccaacattccccaaacgacccacgccctgcaaggcgacgtgtccctggccccagcctgcatcaactgggcctgaccagggcctcgacaagcttgcaggccacacaaggaaacctccttaaacttgatctggaacctcccccccgggcggggaatgcgtccaaaaagggcggaaataataaggggaagccctcgcgcggttaacgggcttccaccaggtaccaaccccttgttggggacctctcccttgcggcgccccttcctttcgcccaccgagagattgccacccgtttttcagtcctaggccccactcctcctggagcccttgagcttcaacagagcannnnnnnnnntttggcaacaggccctcccgtcacggacagaccaatctcctgcgtttcatcccccacccgatacaaagcacttcatctattgtaccccaaaaatagcgatgtactctctacactattttgtatcccgcctctgtacatttatttaccccccgttcggaccgcccaacaggtcccccctctattacaaccccaataagcacccctctccctggcccgggtgcagcccacctcgtggcgatgtgtgcaccgcaaacaacnttcaccactccggcaagtggggaacgaggtgggtttccccacagctggatttaattggtctccctcttatatcgatcagccgccttcctaaagcgctacttccctccactctgcagtactcgcgtatcccagatgcgcagtgcgatctacaccacctcgctgctaatatttaccatcgccacccctgatctagaggacgaccccatcgcgaagatcttaaagaatgcgctaccctcctctacatatgtcgctctgcctgctcgtctgtgctgtcccctccgcccccttagtgtcactctaccactgtttcttcacccactccccccctgtctcggagcatataacacaccaaaaactcaaacacagtgagtggtcgacccacccaccgtgcacagacacccgctctctccgctcctctacag

SEQ ID NO: 165341 - DNA, 237 bp, Homo Sapiens
ccagggacagtcaattagattaaaatggtaagcaatatgaaggctatcaaaggagaaagaacaggatggagataacgagcaacattcaagacctaagtcacgtaggcatcctcagtttccccaggtgcttaggtcgagtttatgccaggattgtctaatacatttccctaagttgggaataagttctggagagaagctcaaaagcaagaacctttctcccccaggcttcagagtcct

SEQ ID NO: 165342 - DNA, 263 bp, Homo Sapiens
aggtgcagacactgggcaacatctggcccaggcaggaggctggctcagagaaggctttcctgaatggcctctccctggagggtaaacagacttgaggaaaatagggtgtgggaaggggctggatactagggaacagaccttgccaacaagaggtacagcattcacgctggctggcagcaagatggtgtgccagtggagacagcagaagctggataggtctagagcgcaagaggagccagagaagagaataaatcaaaattgca

SEQ ID NO: 165343 - DNA, 1273 bp, Homo Sapiens
  misc_feature (92)..(116): n is a, c, g, or t
  misc_feature (942)..(942): n is a, c, g, or t
gaatagcagagccttagcggtgacctgtttgtttcgcgcctgcgctctgccctgtttcctgcctggctggtggcggcggccattttgttcannnnnnnnnnnnnnnnnnnnnnnnnggttggagcgcagtgtccggagcgggctggggggagagagcccgagagcagggttcggtgccttttcctctgtccccagccggtgcccagagcccccatcgccttcagtctgcacaaggtcatcggggccgtgccgctgattcagggcgagtacatgatcccctgtgagaaggtgtccaccctgcccgcgatcacactgaagctgggaggcaaaggctacaagctgtccccagaggactacacgctcaatgtgtcggaggccgggaagaccctctgcctgagcggcttcttgggcatggacatcccgccacccagcgggccactctggatcctgggcgacgtcttcatcggccgctactacactgtgttttgaccgtgataacaacagggtgggcttcgccgaggttgcccgcctgtatttcccaaggcgtcccgcgcgccagtacagaagctgaggatagtcccatagctggaggcccctggcccggggggccctcgcacacgaacccacacacttcgcccgtccacttgttttgggcgccctgggaagccggctggcccttgccccgatttggctgttttggtcctgggggttttccccctccctggggttctataaattgcttgcctgccctgggctgatcttctccaattctggttgggtgggggtgttataaccttgattcccataggcacaaaattcttggtttcccgtgacattggtgaaagtacccccgaccccaaaggctttggcccaagtccgaaaatcctcccgtggtatcccctgggggggcttccccctttccatttttccaagggggagttncccgcctccgcccggggccccttatccctcagtgccccggtcttgggggattgaatgcccgcgttaaccccccaagacactaggggaccgttcccttcctccggaggcccccttccgcttttgggagacaccctgggcgctcttggcccttggagaggggccccccctttcgtgccccccattctttggtgggcctcccagatttggaggcctcttcttgccaccccgctcaacccgtggtttctagatggttccccgcgtggtcccccgctctttatatgggtatgaggccgctctttctataacagcgtgcttggcaaggaatctttca

SEQ ID NO: 165344 - DNA, 1125 bp, Homo Sapiens
  misc_feature (1063)..(1072): n is a, c, g, or t
gctgggtggcgaattcggcacgagggagattggcatcgggacgcccccccagtgcttcacagtcgtcttcgacacgggctcctccaacctgtgggtcccctccatccactgcaaactgctggacatcgcttgctggatccaccacaagtacaacagcgacaagtccagcacctacgtgaagaatggtacctcgtttgacatccactatggctcgggcagcctctccgggtacctgagccaggacaccgtgtcggtgccctgccagtcagcgtcgtcagcctctgccctgggcggtgtcaaagtggagaggcaggtctttggggaggccaccaagcagccaggcatcaccttcatcgcagccaagttcgatggcatcctgggcatggcctacccccgcatctccgtcaacaacgtgctgcccgtcttcgacaacctgatgcagcagaagctggtggaccagaacatcttctccttctacctgagcagggacccagatgcgcagcctgggggtgagctgatgctgggtggcacacactccaagtattacaagggttctcttgtcctacctgaaatgtcacccgcaatgcctactgggcaggtccccctggaccaggtggaaggtggccagccgggctgacccctgtgcaaaggaaggcttgtgaggccattgtggaaccaggcactttccctcatgggtggggcccggcgggatgaaaggtgctccaacctgcaaaaaggccattgggggcccgtggccccctgaattccagggcgaggacattgattccccccgggaaaaaggggttcccactcctggcccgcggattccaccttaaaactggggagggcaaagggttaaaaagcctgtccccccaaaggacatcaccccttcaagggggtccccaaggccgggaaaaacccccctggccgtgagcgggctttcttggggaatgggagattcgcgcccaccccggggggggcccctcttgggatccccgggggcaattctcttttttccgggccgtacaaataacttggggatttatacccctgaaaacaaaannnnnnnnnntttccccacgaggagtggccgcgctttttaattaccagggggagtcagctgct

SEQ ID NO: 165345 - DNA, 884 bp, Homo Sapiens
ggcctgggtggcgaattcggcacgagggaagctgggaggcaaaggctacaagctgtccccagaggactacacgctcaaggtgtcgcaggccgggaagaccctctgcctgagcggcttcatgggcatggacatcccgccacccagcgggccactctggatcctgggcgacgtcttcatcggccgctactacactgtgtttgaccgtgacaacaacagggtgggcttcgccgaggctgcccgcctctagttcccaaggcgtccgcgcgccagcacagaaacagaggagagtcccagagcaggaggcccctggcccagcggcccctcccacacacacccacacactcgcccgcccactgtcctgggcgccctggaagccggcggcccaagcccgacttgctgttttgttctgtggttttcccctccctgggttcagaaatgctgcctgcctgtctgtctctccatctgtttggtgggggtagagctgatccagagcacagatctgtttcgtgcattggaagaccccacccaagcttggcagccgagctcgtgtatcctggggctcccttcatctccagggagtcccctccccggccctaccagcgcccgctgggctgagcccctaccccacaccaggccgtcctcccgggccctcccttggaaacctgccctgcctgagggcccctctgcccagcttgggcccagctgggctctgccaccctacctgttcagtgtcccgggcccgttgaggatgaggccgctagaagcctgaggatgaactggaaagagtgagaggggacaaaacccacccttgtttggagccctgcaagggtggttgcctggggacttgaaccccgtccccaggggggcatgttattgggccctgg

SEQ ID NO: 165346 - DNA, 1180 bp, Homo Sapiens
  misc_feature (786)..(801): n is a, c, g, or t
  misc_feature (811)..(866): n is a, c, g, or t
ccatttcaccccccaccctacggtcctaagtagcgaggcctgggtggcgaattcggcacgagggagattgtcaccaccatcccaaccataggcttcaatgtagaaacagtggaatataagaacatctgtttcacagtctgggacgtgggaggccaggacaagattcggcctctgtggcggcactacttccagaacactcagggcctcatctttgtggtggacagtaatgaccgggagcgggtccaagaatctgctgatgaactccagaagatgctgcaggaggacgagctgcgggatgcagtgctgctggtatttgccaacaagcaggacatgcccaacgccatgcccgtgagcgagctgactgacaagctggggctacagcacttacgcagccgcacgtggtatgtccaggccacctgtgccacccaaggcacaggtctgtacgatggtctggactggctgtcccacgagctgtcaaagcgctaaccagccaggggcaggcccctgatgcccagaagctcctgcgtgcatccccgggatgaccagactcccggactcctcaggcagtgccctttcctcccacttttcctcccccatagccacaggcctctgctcctgctcctgcctgcatgttctctctgttgttggagcctggagccttgctctctgggcacagaggggtccactctcctgcctgcttgggacctatggaaagggggcttcctgggccaaaggcccccctctttcccagaaggagggagccaggggatcctggggcttttcccnnnnnnnnnnnnnnnnccgggctttnnnnnnnnnnnnnnnnnnnnnnnnnnnnnnnnnnnnnnnnnnnnnnnnnnnnnnnnaaaacggcgtggaaggggggccttttttccccgggtgtgggttcgcccttaataaaaaggggtggggccaacctctggggaattcctcttgtgaggttaaatctaaaaatttttttcgccttggggggggcttttgggcgccccagctccagtgtcgtatgatcgaaagcgtcacgacagaaacacgatatcgcagctaccagtgcttgatctcctacacactctgttcagtgtaccccttctcaccaatatgcagtctttctgcaacgttcccccggggggcgcactccttatttcttccctcggaggagccc

SEQ ID NO: 165347 - DNA, 1013 bp, Homo Sapiens
  misc_feature (685)..(685): n is a, c, g, or t
  misc_feature (725)..(725): n is a, c, g, or t
  misc_feature (967)..(967): n is a, c, g, or t
gatgctgggtggcacagactccaagtattacaagggttctctgtcctacctgaatgtcacccgcaaggcccactggcaggtccacctggaccaggtggaggtggccagcgggctgaccctgtgcaaggagggctgtgaggccattgtggacacaggcacttccctcatggtgggcccggtggatgaggtgcgcgagctgcagaaggccatcggggccgtgccgctgattcagggcgagtacatgatcccctgtgagaaggtgtccaccctgcccgcgatcacactgaagctgggaggcaaaggctacaagctgtccccagaggactacacgctcaaggtgtcgcaggccgggaagaccctctgcctgagcggcttcatgggcatggacatcccgccacccagcgggccactctggatcctgggcgacgtcttcatcggccgctactacactgtgtttgaccgtgacaacaacagggtgggcttcgccgaggctgcccgcctctagttcccaaggcgtccgcgcgccagcacagaaacagaggagagtcccagagcaggaggcccctggcccggcggcccctcccacacacacccacacactcgcccgcccactgtcctgggcgccctggaagccggcggcccaagcccgacttgctgttttgttctgtggttttcccctccctgngttcagaaatgctgcctgcctgtctgtctctccatctgtnttggtgggggtagagctgatccagagcacagatctgtttcgtgcattggaagaccccacccaagcttggcagccgagctcgtgtatcctggggctccctcaatctccagggaagtcccctccccggccctaccagcgccccgctggggctgagccccctaaccccaaaaccagggcggtcctccccgggcccctcccttgggaaaacctggccctgccctaaagggccccttcggccccaantttgggcccccgctgggggttcttgccacccctaacctggttcacc

SEQ ID NO: 165348 - DNA, 961 bp, Homo Sapiens
  misc_feature (378)..(378): n is a, c, g, or t
  misc_feature (713)..(713): n is a, c, g, or t
  misc_feature (764)..(764): n is a, c, g, or t
  misc_feature (840)..(840): n is a, c, g, or t
  misc_feature (877)..(877): n is a, c, g, or t
  misc_feature (896)..(896): n is a, c, g, or t
  misc_feature (924)..(924): n is a, c, g, or t
  misc_feature (930)..(930): n is a, c, g, or t
  misc_feature (933)..(933): n is a, c, g, or t
ggcacttccctcatggtgggcccggtggatgaggtgcgcgagctgcagaaggccatcggggccgtgccgctgattcagggcgagtacatgatcccctgtgagaaggtgtccaccctgcccgcgatcacactgaagctgggaggcaaaggctacaagctgtccccagaggactacacgctcaaggtgtcgcaggccgggaagaccctctgcctgagcggcttcatgggcatggacatcccgccacccagcgggccactctggatcctgggcgacgtcttcatcggccgctactacactgtgtttgaccgtgacaacaacagggtgggcttcgccgaggctgcccgcctctagttcccaaggcgtccgcgcgccagcacnagaaacagaggagagtcccagagcaggaggcccctggcccggcggcccctcccacacacacccacacactcgcccgcccactgtcctgggcgccctggaagccggcggcccaagcccgacttgctgttttgttctgtggttttcccctccctgggttcagaaatgctgcctgcctgtctgtctctccatctgtttggtgggggtagagctgatccagagcacagatctgtttcgtgcattggaagaccccacccaagcttggcagccgagctcgtgtatcctgggggctccctttcatctccaggggagtccccctccccgggccctaccagcgncccgctggggctgagccccctaccccacacccaggccgtcccttcccgggnccctccccttggaaaacctgccccctgcctgagggccccctcttgcccagctttggggcccagctgggggctctgnccaaccctaccctggttcagtggcccccgggcccccnttgaaggaaatgaggccgnctaaaaagccctggagggatggaactgnaaaagnaantgaaaaaggggaacaaaaaccccaccct

SEQ ID NO: 165349 - DNA, 996 bp, Homo Sapiens
  misc_feature (762)..(762): n is a, c, g, or t
tgctgcccgtcttcgactacctgatgcagcagaagctggtggaccagaacatcttctccttctacctgagcagggacccagatgcgcagcctgggggcgagctgatgctgggtggcacagactccaagtattacaagggttctctgtcctacctgaatgtcacccgcaaggcctactggcaggtccacctggaccaggtggaggtggccagcgggctgaccctgtgcaaggagggctgtgaggccattgtggacacaggcacttccctcatggtgggcccggtggatgaggtgcgcgagctgcagaaggccatcggggccgtgccgctgattcagggcgagtacatgatcccctgtgagaaggtgtccaccctgcccgcgatcacactgaagctgggaggcaaaggctacaagctgtccccagaggactacacgctcaaggtgtcgcaggccgggaagaccctctgcctgagcggcttcatgggcatggacatcccgccacccagcgggccactctggatcctgggcgacgtcttcatcggccgctactacactgtgtttgaccgtgacaacaacagggtgggcttcgccgaggctgcccgcctctagttcccaaggcgtccgcgcgccagcacagaaacagaggagagtcccagagcacgaggtccctggcccgggggcccctcccacacacacgcacacactcgcccgtccactgtcctgggcgccctggaagccggcgggcccaagcccgacttgctgntttgttcctggggttttccccctcccctggggttcagaaatgcttgcctgccctgtcctgcctctccatccggtttggggggggcgcacgagcttgatcccaacaccacagaatcctggtcttccgtgcactttggcaggacacccccacccccagcttttgggcaaaccccgagccttcggtggatattccttgggggccctcccccttttccattcttcccacggggaaagg

SEQ ID NO: 165350 - DNA, 1101 bp, Homo Sapiens
  misc_feature (1022)..(1030): n is a, c, g, or t
gggtggcgaattccgcacgagggtggaggtggccagcgggctgaccctgtgcaaggagggctgtgaggccattgtggacacaggcacttccctcatggtgggcccggtggatgaggtgcgcgagctgcagaaggccatcggggccgtgccgctgattcacggcgagtacatgatcccctgtgagaaggtgtccaccctgcccgcgatcacactgaagctgggaggcaaaggctacaagctgtccccagaggactacacgctcaaggtgtcgcaggccgggaagaccctctgcctgagcggcttcatgggcatggacatcccgccacccagcgggccactctggatcctgggcgacgtcttcatcggccgctactacactgtgtttgaccgtgacaacaacagggtgggcttcgccgaggctgcccgcctctagttcccaaggcgtccgcgcgccagcacagaaacagaggagagtcccagagcaggaggcccctggcccggcggcccctcccacacacacccacacactcgcccgcccactgtcctgggcgccctggaagccggcggcccaagcccgacttgctgttttgttctgtggttttcccctccctgggttcagaaatgctgcctgcctgtctgtctctccatctgtttggtgggggtagagctgatccagagcacagatctgtttcgtgcattggaagaccccacccaagcttggcagccgagctcgtgtatcctggggctcccttcatctccagggagtcccctccccggccctaccagcgcccgctgggctgagcccctaccccacaccaggccgtcctcccggggccctcccttgggaaaactgccctgcctgagggcccctctgcccagcttgggcccagctggggctctgccacccctacctggttccgtggtccccgtggccccgttggaagaatggaggccgccctcaaagggccttggaagcatggaaccttgggaaaaggaagttgaaaaagggggaaaacaaaaannnnnnnnntttggtttttggaagacccctgccaaggggatggggttggactctggggagacactgtgaaaaccccccct

SEQ ID NO: 165351 - DNA, 1925 bp, Homo Sapiens
  misc_feature (1351)..(1351): n is a, c, g, or t
  misc_feature (1608)..(1608): n is a, c, g, or t
  misc_feature (1684)..(1684): n is a, c, g, or t
  misc_feature (1793)..(1793): n is a, c, g, or t
  misc_feature (1853)..(1853): n is a, c, g, or t
ttcacaccaaggggaaggccagtggccctgggggaggagcagggacccctctctctcttactcgcttcctgggtttagaactcaggaccccgatctcagtctggagctccctcctgcaccctggctggcggtgtgctgggtgacaggactctggaggggtaccctgagtgcagctgtcggaggaggcagggcggtggggggggcagcacagaagcctctaaggccccaggtgcagtcctggacctcgtggagccgcatggagtgaggagaggatcccgctgcacaagttcacgtccatccgccggaccatgtcggaggttgggggctctgtggaggacctgattgccaaaggccccgtctcaaagtactcccaggtggtgccagccgtgaccgaggggcccattcccgaggtgctcaagaactacatggacgctcagtactacggggagattggcatcgggacgcccccccagtgcttcacagtcgtcttcgacacgggctcctccaacctgtgggtcccctccatccactgcaaactgctggacatcgcttgctggatccaccacaagtacaacagcgacaagtccagcacctacgtgaagaatggtacctcgtttgacatccactatggctcgggcagcctctccgggtacctgagccaggacaccgtgtcggtgccctgccagtcagcgtcgtcagcctctgccctgggcggtgtcaaagtggagaggcaggtctttggggaggccaccaagcagccaggcatcaccttcatcgcagccaagttcgatggcatcctgggcatggcctacccccgcatctccgtcaacaacatgctgccccgtcttcgacaacctgatgcaacaaaagctggtgggaccaaaacattcttctccttctacctgagcagggacccagatgcgacaactgggagtgagatgatgctgagtgacacagactccaaacattactaggaccatcatgcccatacctgaatgcgcaccgacctgtcctactgaagggacacacgcgtcataaaactgcgcccggcacttagcctcctataccctacggcacccaatccccccgcaactaacccagtggctctcactcggtcacctcaccgttcacgccgcatttttgcccccccacgtacagtgagtgaccgcatacgcgcgccgccacaccgtaatagtctccgcgcaaggtcctgaccgcacgcacccgtctccgaatatttgttccacagaatcacacagggcctgactacagcagtttgaccccgcccctcttacttagctcaatcggcaaccggcgccagcaacctatgaacagctcgagtcgcgcctgnacccccaggtgcatgcgctgtgtattcgccacacagtgatataatacccggcccgatagggaagctggacgcttgcgctgtcgcgcgctcggcgggtgagcgtgatgaacgcactccacctggaattccttatccttgcgctgctcggcccactatgcagattccctgatcgccgccctctactcgcgcacctgttcagtacctcctctggttagttagcctgactctcactcggcgcgcccacgcgttatgtattntgatctcacgccagagcgtgtgattgatacggtcgtcgcaataccagagatggactgctgatgcctgatggagcgncttccaacgtgaacacgtcctacatcatatgagccgctgggaccgagtagtgcagtgtgccgcggagtcgcgcacgcgctgcctatatgaggtgcactagtctgctcgngatgatagagtcccatcgcacaccgcgtacacgcgtcttgtgatggatgttctacgtgcngcccctccagtgagactccagcccagcagagccggcgactactcagtaaccgccgccaagtccccactgccc

SEQ ID NO: 165352 - DNA, 884 bp, Homo Sapiens
cggcccaagcccgacttgctgttttgttctgtggttttcccctccctgggttcagaaatgctgcctgcctgtctgtctctccatctgtttggtgggggtagagctgatccagagcacagatctgtttcgtgcattggaagaccccacccaagcttggcagccgagctcgtgtatcctggggctcccttcatctccagggagtcccctccccggccctaccagcgcccgctgggctgagcccctaccccacaccaggccgtcctcccgggccctcccttggaaacctgccctgcctgagggcccctctgcccagcttgggcccagctgggctctgccaccctacctgttcagtgtcccgggcccgttgaggatgaggccgctagaggcctgaggatgagctggaaggagtgagaggggacaaaacccaccttgttggagcctgcagggtggtgctgggactgagccagtcccaggggcatgtattggcctggaggtggggttgggattgggggctggtgccagccttcctctgcagctgacctctgttgtcctccccttgggcggctgagagccccagctgacatggaaatacagttgttggcctccggcctcccctcatcaaagaaggcccccgaccctctctttttcgtccaatttggccaattctgccggctttccccatactcggagcgtttttttgtcgggcgcgcaacaacccagcctccctaaaagggacccatgggtgcaaacaccggctgccattcccccccctttttattttcaccaagggtttattattttgtccgcgcccacccgccttttgtgattgtggcccccttcttttttccctcgaccaccctattcttctgccctgccctcccaaa

SEQ ID NO: 165353 - DNA, 971 bp, Homo Sapiens
  misc_feature (14)..(14): n is a, c, g, or t
acgagcgagcctgngtggcgaattccgacgagggcgggctgaccctgtgcaaggagggctgtgaggccattgtggacacaggcacttccctcatggtgggcccggtggatgaggtgcgcgagctgcagaaggccatcggggccgtgccgctgattcagggcgagtacatgatcccctgtgagaaggtgtccaccctgcccgcgatcacactgaagctgggaggcaaaggctacaagctgtccccagaggactacacgctcaaggtgtcgcaggccgggaagaccctctgcctgagcggcttcatgggcatggacatcccgccacccagcgggccactctggatcctgggcgacgtcttcatcggccgctactacactgtgtttgaccgtgacaacaacagggtgggcttcgccgaggctgcccgcctctagttcccaaggcgtccgcgcgccagcacagaaacagaggagagtcccagagcaggaggcccctggcccggcggcccctcccacacacacccacacactcgcccgcccactgtcctgggcgccctggaagccggcggcccaagcccgacttgctgttttgttctgtggttttcccctccctgggttcagaaatgctgcctgcctgtctgtctctccatctgtttggtgggggtagagctgatccagagcacagatctgtttcgtgcattggaagaccccacccaagcttggcagccgagctcgtgtatcctggggctcccttcatctccagggagtcccctccccggccctaccagcgcccgctgggctggagcccctaccccacaccagggccgttcctcccgggcccctcccttggaaaacctgcccctgcctgtagggccccctctggcccaaccttggggcccaagctggggctctgcccacccctaacctggttccaggggtccccggggccccgtttggagggatgaagagcccgct

SEQ ID NO: 165354 - DNA, 1016 bp, Homo Sapiens
gccctccagccttctgccgctcgccctctgcctgctggctgcacccgcctccgcgctcgtcaggatcccgctgcacaagttcacgtccatccgccggaccatgtcggaggttgggggctctgtggaggacctgattgccaaaagccccgtctcaaagtactcccaggtggtgccagccgtgaccgaggggcccattcccgaggtgctcaagaactacatggacgctcagtactacggggagattggcatcgggacgcccccccagtgcttcacagtcgtcttcgacacgggctcctccaacctgtgggtcccctccatccactgcaaactgctggacatcgcttgctggatccaccacaagtacaacagcgacaagtccagcacctacgtgaagaatggtacctcgtttgacatccactatggctcggacagcctctccgggtacctgagccaggacaccgtgtcggtgccctgccagtcagcgtcgtcagcctctgcccagggcggtgtcaaagtggagaggcaggtctttggggaggccaccaagcagccaggcatcaccttcatcgcagccaagttcgatggcatcctgggcatggcctacccccgcatctccgtcaacaacgtgctgcccgtcttcgacaacctgatgcaacaaaaactggtggaccagaacatcttctccttctacctgagcaaggacccagaagcgcaacctgggggtgagctaatgctgggtggcacaaaactccaagtattacaagggttcctctgtcctacctgaatgtcaacccccaaggcctactggcacggtccacctggaaccaagtgggaagggggccacacggggctgaccccgcgcaaaggaagggctgtgaaggcccattgtgggaaacaggcaactttccccccatggtggggcccccggcgggaatgaaggatgcacctaaactgccaaaaagggccatcccggggaccgggcccggctggaatcaaggggccgcattcacatggaa

SEQ ID NO: 165355 - DNA, 1068 bp, Homo Sapiens
  misc_feature (569)..(578): n is a, c, g, or t
  misc_feature (689)..(721): n is a, c, g, or t
  misc_feature (724)..(744): n is a, c, g, or t
gggcctcatctttgtggtggacagtaatgaccgggagcgggtccaagaatctgctgatgaactccagaagatgctgcaggaggacgagctgcgggatgcagtgctgctggtatttgccaacaagcaggacatgcccaacgccatgcccgtgagcgagctgactgacaagctggggctacagcacttacgcagccgcacgtggtatgtccaggccacctgtgccacccaaggcacaggtctgtacgatggtctggactggctgtcccacgagctgtcaaagcgctaaccagccaggggcaggcccctgatgcccagaagctcctgcgtgcatccccgggatgaccagactcccggactcctcaggcagtgccctttcctcccacttttcctcccccatagccacaggcctctgctcctgctcctgcctgcatgttctctctgttgttggagcctggagccttgctctctgggcacagaggggtccactctcctgcctgctgggacctatggaaggggcttcctggccaaggccccctcttccagaggaggagcagggatctgggtttccnnnnnnnnnnctgttttgggtgtactctaggggccaggttgggagggggaaggtgagggcttcgggtggtgctataatgtggcactggatcttgagtaataaatttgctgtggtttgtaannnnnnnnnnnnnnnnnnnnnnnnnnnnnnnnnccnnnnnnnnnnnnnnnnnnnnnaaaatatggctcgggcagcctctccgggtacctgagccaggacaccgtgtcggtgccctgccagtcagcgtcgtcagcctctgccctgggcggtgtcaaagtggaaaggcagggtctttggggaggccaccaaagcagccaggcatcaccttcttcgcagcccaggttcaatggcatcctggggtatgggcctacccccggtatctcccgtaaacaaggggcgtgccccttctttcaaacaccttgaatgcaacacaaaagcctgggggggaaccaaaaaatttcttccccctttctaacctgaagcaaggggcccccacaatg

SEQ ID NO: 165356 - DNA, 1319 bp, Homo Sapiens
  misc_feature (1210)..(1210): n is a, c, g, or t
atccggctataagcgcacggcctcggcgaccctctccgacccggccgccgccgccatgcagccctccagccttctgccgctcgccctctgcctgctggctgcacccgcctccgcgctcgtcaggatcccgctgcacaagttcacgtccatccgccggaccatgtcggaggttgggggctctgtggaggacctgattgccaaaggccccgtctcaaagtactcccaggtggtgccagccgtgaccgaggggcccattcccgaggtgctcaagaactacatggacgcccagtactacggggagattggcatcgggacgcccccccagtgcttcacagtcgtcttcgacacgggctcctccaacctgtgggtcccctccatccactgcaaactgctggacatcgcttgctggatccaccacaagtacaacagcgacaagtccagcacctacgtgaagaatggtacctcgtttgacatccactatggctcgggcagcctctccgggtacctgagccaggacaccgtgtcggtgccctgccagtcagcgtcgtcagcctctgccctgggcggtgtcaaagtggagaggcaggtctttggggaggccaccaagcagccaggcatcaccttcatcgcagccaagttcgatggcatcctgggcatggcctacccccgcatctccgtcaacaacgtgctgcccgtcttcgacaacctgatgcagcagaagctggtggaccagaacatcttctccttctacctgagcagggacccagatgcgcagcctgggggtgagctgatgctgggtggcacagactccaagtattacaagggttctctgtcctacctgaatgtcacccgcaaggcctactggcaggtccacctggaccaggtggaggtggccagcgggctgaccctgtgcaaggagggctgtgaggccattgtggacacaggcacttccctcatggtgggcccggtggatgaggtgcgcgagctgcaaaaggccatcggggccgtgccgctgattcagggcgagtacatgatccccctgtgagaaagggtgtccaccctggccccgcgatcacactgaaagctgggaggcaaaggctacaagctgtccccagaagactacacgctcaaaggtgtcgcaaggccggggaagacccctctgccctgaagcggctttcatggggccatggacattcccgggccacccagncggggccaacttctgggaatccctgggggcggaagttcttttcattcgggccgctttacttaacccttggtgtttttggaaccggtgaaccaaacacaaaccagggggg

SEQ ID NO: 165357 - DNA, 904 bp, Homo Sapiens
  misc_feature (812)..(821): n is a, c, g, or t
ctgaagctgggaggcaaaggctacaagctgtccccagaggactacacgctcaaggtgtcgcaggccgggaagaccctctgcctgagcggcttcatgggcatggacatcccgccacccagcgggccactctggatcctgggcgacgtcttcatcggccgctactacactgtgtttgaccgtgacaacaacagggtgggcttcgccgaggctgcccgcctctagttcccaaggcgtccgcgcgccagacaagaaacagaggagagtcccagagcaggaggcccctggcccggcggcccctcccacacacacccacacactcgcccgcccactgtcctgggcgccctggaagccggcggcccaagcccgacttgctgttttgttctgtggttttcccctccctgggttcagaaatgctgcctgcctgtctgtctctccatctgtttggtgggggtagagctgatccagagcacagatctgtttcgtgcattggaagaccccacccaagcttggcagccgagctcgtgtatcctggggctcccttcatctccagggagtcccctccccggccctaccagcgcccgctgggctgagcccctaccccacaccaggccgtcctcccgggccctcccttggaaacctgccctgcctgagggcccctctgcccagcttgggcccagctgggctctgccaccctacctgttcagtgtcccgggccccgttgaggatgaggcccgctagaggcctgaaggatcgacctgggaagggagtgaagaggggaccaaaaacccaaccttgtttgggagccctgcaannnnnnnnnncctggggaactgaatgcccggtccccagggggggcattggaattgggccttgagaaagggtggggcgtttggcgccacttgga

SEQ ID NO: 165358 - DNA, 1116 bp, Homo Sapiens
  misc_feature (915)..(925): n is a, c, g, or t
  misc_feature (963)..(963): n is a, c, g, or t
  misc_feature (1062)..(1062): n is a, c, g, or t
ggggctgctgctgcgccccatccccccgcggccggccagttccagcccgcaccccgcgtcggtgcccgcgcccctccccgggccccgccatgggcctcaccgtgtccgcgctcttttcgcggatcttcgggaagaagcagatgcggattctcatggttggcttggatgcggctggcaagaccacaatcctgtacaaactgaagttgggggagattgtcaccaccatcccaaccataggcttcaatgtagaaacagtggaatataagaacatctgtttcacagtctgggacgtgggaggccaggacaagattcggcctctgtggcggcactacttccagaacactcagggcctcatctttgtggtggacagtaatgaccgggagcgggtccaagaatctgctgatgaactccagaagatgctgcaggaggacgagctgcgggatgcagtgctgctggtatttgccaacaagcaggacatgcccaacgccatgcccgtgagcgagctgactgacaagctggggctacagcacttacgcagccgcacgtggtatgtccaggccacctgtgccacccaaggcacaggtctgtacgatggtctggactggctgtcccacgagctgtcaaagcgctaaccagccaggggcaggcccctgatgcccggaagctcctgcgtgcatccccgggatgaccagactcccggactcctcaggcagtgccctttcctcccacttttcctcccccatagccacaggcctctgctcctgctcctgcctgcatgttctctctgttgttggagcctggagccttgctctctgggcacagaggggtccactctcctgcctgctgggacctatggaaggggcttcctggccaaggccccctcttccagaggaggagcagggatctgggtttccnnnnnnnnnnnctgttttgggtgtactcaaagggcccaccgttgttgangaaaaggggaaaagggaaagggcctttccggggggggcgcttaaatggtgcgcacgggagaccttgagacaaaaaaatttccgcctgggggcgttggtnaacaaactaataccactaaggatccgagccgccgccaggctgtttactcgcccc

SEQ ID NO: 165359 - DNA, 917 bp, Homo Sapiens
  misc_feature (578)..(578): n is a, c, g, or t
ggcacttccctcatggtgggcccggtggatgaggtgcgcgagctgcagaaggccatcggggccgtgccgctgattcagggcgagtacatgatcccctgtgagaaggtgtccaccctgcccgcgatcacactgaagctgggaggcaaaggctacaagctgtccccagaggactacacgctcaaggtgtcgcaggccgggaagaccctctgcctgagcggcttcatgggcatggacatcccgccacccagcgggccactctggatcctgggcgacgtcttcatcggccgctactacactgtgtttgaccgtgacaacaacagggtgggcttcgccgaggctgcccgcctctagttcccaaggcgtccgcgcgccagcacagaaacagaggagagtcccagagcaggaggcccctggcccggcggcccctcccacacacacccacacactcgcccgcccactgtcctgggcgccctggaagccggcggcccaagcccgacttgctgttttgttctgtggttttcccctccctgggttcagaaatgctgcctgcctgtctgtctctccatctgtttggtggngggtagagctgatccagagcacagatctgtttcgtgcattggaagaccccacccaagcttggcagccgagctcgtgtatcctggggctcccttcatctccagggagtcccctccccggccctaccagcgcccccctgggctgagccccctaacccacaccagggccgtccctcccggcccctccctggaaaacctgccctgcctgtagggcccctctggcccagcttgggggcccagctgggcttctgccaccctaacctgtttcaagggccccgggccccgcttgaaggaatgaagccccctaaaaagcccttaaggaatcaccttggaaaggaatga

SEQ ID NO: 165360 - DNA, 412 bp, Homo Sapiens
ctcaacttgctcagtgctttattgaaccaaggccctaacagatgactcagcagggccttcaagcacagccctgcccccatcttgagattcagaatccagagggtgctcagtccttggtttagctgcttctgtgacatttcctcttgaatagctccaaaccctaagtgtaaatatttttgtccacacaaataggcacacatatattcctgctgcaggctgtcatgctcaacaaaacgctcccacctggtttgggtatgcaaggcactgcgcatccacggccatccacgggcatccacccatccatccaaccttccatccatccgcaacaagacagcagcaagttctgagcagtcaggccccagggttcacagcagtaggggcttgggtttcaacaaggctcatgattcaagcc

SEQ ID NO: 165361 - DNA, 986 bp, Homo Sapiens
agctaaagaccttccgcctcaagactcgcagctgggctggggagcggagccggcgggagctctgtagccggctgcaggaccagtgaggggcctgcgccagtcctgctacctcccttgcctttcgaggcctgaagccagctgccctatgggcctgccgggctgagggcctgctggaggcctcaggtgctgtccatgggaaagatggtgtgggtgtcctgcctgtctgccccagcccagattcccctgtgtcatcccatcattttccatatcctggtgccccccacccctggaagagcccagtctgttgagttagttaagttgggttaataccagcttaaaggcagtattttgtgtcctccaggagcttcttgtttccttgttagggttaacccttcatcttcctgtgtcctgaaacgctcctttgtgtgtgtgtcagctgaggctgggggagagccatggtccctgaggatgggtcagagctaaactccttcctggcctgagagtcagctctctgccctgtgtacttcccgggccagggctgcccctaatctctgtaggaaccgtggtatgtctgccatgttgcccctttctcttttcccacgtccctgtcccaccatacgagcacctccagcctggacagaagctcttactctttcctatttccgcgttacctgtgggcttgggccgtttgactttacgcccatctcaggacctttccgtaaactgtttaggttccccgggccaatatccgttacccactccggcccccgttttgttgccccacaaaagggaagccattaacccttcggggccccccccgggcacagcgttacggccctgaatccttgagcccggctggaaagccccgccccccaacgggctgggaacccctggggggcctggacgtgctcaaaaatttgcccgcttgtccttgcctggcccccgcataggaacaccccccaatgagagcggcccggcccgaaccg

SEQ ID NO: 165362 - DNA, 887 bp, Homo Sapiens
  misc_feature (612)..(665): n is a, c, g, or t
ttgagttagttaagttgggttaataccagcttaaaggcagtattttgtgtcctccaggagcttcttgtttccttgttagggttaacccttcatcttcctgtgtcctgaaacgctcctttgtgtgtgtgtcagctgaggctgggggagagccgtggtccctgaggatgggtcagagctaaactccttcctggcctgagagtcagctctctgccctgtgtacttcccgggccagggctgcccctaatctctgtaggaaccgtggtatgtctgccatgttgcccctttctcttttcccctttcctgtcccaccatacgagcacctccagcctgaacagaagctcttactctttcctatttcagtgttacctgtgtgcttggtctgtttgactttacgcccatctcaggacacttccgtagactgtttaggttcccctgtcaaatatcagttacccactcggtcccagttttgttgccccagaaagggatgttattatccttgggggctcccagggcaagggttaaggcctgaatcatgagcctgctggaagcccagcccctactgctgtgaaccctggggccctgactgctcagaaattgctgctgtcttgttgnnnnnnnnnnnnnnnnnnnnnnnnnnnnnnnnnnnnnnnnnnnnnnnnnnnnnncgcagtgccttgcatacccaaccaggtgggagcgttttgttgagcatgacagcctgcagcaggaaatatatgtgtggcctatttgtgtggaccaaaatatttaccccttaagggtttgggacctattccataaggaaaatggtcaccaaaaaccaggctaaacccaggggactggagcccacccctcctgggattccctgaaattccccaaggaatgggggg

SEQ ID NO: 165363 - DNA, 670 bp, Homo Sapiens
ggtgactctacaggatctcctctggggtggcacatggggacccgggacgacgagtacgactacctattcaaagtggtgctcatcggggactcaggcgtgggcaagagcaacctgctgtcgcgcttcacccgcaacgagttcaacctggagagcaagagcaccatcggcgtggagttcgccacccgcagcatccaggtggacggcaagaccatcaaggcgcagatctgggacaccgctggccaggagcgctaccgcgccatcacctccgcgtactaccgtggtgcagtgggcgccctgctggtgtacgacatcgccaagcacctgacctatgagaacgtggagcgctggctgaaggagctgcgggaccacgcagacagcaacatcgtcatcatgctaggtgggcaacaatgagtgacctgcgccacctgcgggctgtgcccactgacgaggcccgcgccttcgcagaaaagaacaacttgtccttcatcgagacctcagccttggattccactaacgtagaggaagcattcaagaacatcctcacagagatctaccgcatcgtgtcacagaaacagatcgcagaccgtgctgcccacgacgagtccccggggaacaacgtggtggacatcagcgtgccgcccaccactggacggacagaagcccaacaagc

SEQ ID NO: 165364 - DNA, 932 bp, Homo Sapiens
caagaagctggcttcccaggagactcaatcagttctcaacttggacccatccatcctcccccaaggacttcaatgacagaagagtacagggtcccagacggcatggtgggcctgatcattggcagaggaggtgaacaaattaacaaaatccaacaggattcaggctgcaaagtacagatttctccagacagcggtggcctacccgagcgcagtgtgtccttgacaggagccccagaatctgtccagaaagccaagatgatgctggatgacattgtgtctcggggtcgtgggggccccccaggacagttccacgacaacgccaacgggggccagaacggcaccgtgcaggagatcatgatccccgcgggcaaggccggcctggtcattggcaagggcggggagaccattaagcagctgcaggaacgcgctggagtgaagatgatcttaattcaggacggatctcagaatacgaatgtggacaaacctctccgcatcattggggatccttacaaagtgcagcaagcctgtgagatgatgatggacatcctccgggaacgtgaccaaggcggctttggggaccggaatgagtacggatctcggattggcggaggcatcgatgtgccagtgcccaggcattctgttggcgtggtcattggccggagtggagagatgatcaagaagatccagaatgatgctggcgtgcggatacagttcaagcaagatgacgggacagggcccgagaagattgctcatataatggggcccccaaacaggtgcgagcacgcaagcccggatcaatcaacgagctcctccagagcctcaggagtggtcccccaggtcctccaggggtccaggcatgccacgtggggccgaagacgaggaagaggcacaggaaatgggggtcccctgaggggaaatgaactgtcaaccga

SEQ ID NO: 165365 - DNA, 904 bp, Homo Sapiens
  misc_feature (729)..(729): n is a, c, g, or t
  misc_feature (771)..(771): n is a, c, g, or t
  misc_feature (810)..(810): n is a, c, g, or t
  misc_feature (847)..(847): n is a, c, g, or t
gcctctccaaaatgaagaattccatggcttccatgtctcagcagctcaaggccaagttggatttcttcaaaaccagcatccagattgacctggagaagtacagcgagcaaaccgagtttgggatcacatcagataaactgctgctggcctggagggaaatggagcaggctgtggagctctgtgggcgggagaacgaagtgaaactcctggtagaacggatgatggctctgcagaccgacattgtggacttacagaggagccccatgggccggaagcaggggggaacgctggacgacctagaggagcaagcaagggagctgtacaggagactaagggaaaaacctcgagaccagcgaactgagggtgacagtcaggaaatggtacggctgctgcttcaggcaattcagagcttcgagaagaaagtgcgagtgatctatacgcagctcagtaaaactgtggtttgcaagcagaaggcgctggaactgttgcccaaggtggaagaggtggtgagcttaatgaatgaggatgagaagactgttgtccggctgcaggagaagcggcagaaggagctctggaatctcctgaagattgcttgtagcaaggtccgtggtcctgtcagtggaagcccggatagcatgaatgcctctcgacttagccagcctgggcagctgatgtctcagccctccacggcctccaacagcttacctgagccagccaagaagagtgaangaactggtggctgaagcacataacctctgcaccctgctaganaatgccatacagggacactgtggagggaacaaagaccangagtttcacggccccttaaactgggagctgggttacngaacgggaagaaagaaagagcacagcttgtcctggagcagggcctcctttggaaagt

SEQ ID NO: 165366 - DNA, 1295 bp, Homo Sapiens
ggacaggagagcgccgtctggaagcaggggccatggtcctggctgaccgaggcgtggtttgcattgatgaatttgacaaaatgtctgacatggatcgcacagccatccatgaagtgatggagcagggtcgagtgaccattgccaaggctggcatccatgctcggctgaatgcccgctgcagtgttttggcagctgccaaccctgtctacggcaggtatgaccagtataagactccaatggagaacattgggctacaggacatcactgctgtcacgatttgacttgctcttcatcatgctggatcagatggatcctgagcaggatcgggagatctcagaccattgtccttcggatgcaccattacagagcacctggggagcaggatggcgattgctatgcccttgggtagtgctgtggatatcctggccacagatgatcccaactttagccaggaagatcagcaggacacccagatttatgagaagcatgacaaccttctacatgggaccaagaagaaaaaggagaagatggtgagtgcagcattcatgaagaagtacatccatgtggccaaaatcatcaagcctgtcctgacacaggagtcggccacctacattgcagaagagtattcacgcctgcgcagccaggatagcatgagctcagacaccgccaggacatctccagttacagccccaacactggaaactctgattcgactggccacagcccatgcgaaggcccgcatgagcaagactggggacctgcaggatgcagaggaagctgtggagttggtccagtatgcttactttaagaaggttctggagaaggagaagaaacgtaagaagcgaagtgaggatgaatcagagacagaagatgaagaggagaaaagccaagaggaccaggagcagaagaggaagagaaggaagactcgccagccagatgccaaagatggggattcatacgacccctatgacttcagtgacacagaggaggaaatgcctcaagtacacactccaaagacggcagactcacaggagaccaaggagcaccccaagagccacacaatgggccccaccatgcgccacccgaagagccccaccatgagccacccgaggagccacacgaagagccgcccaacgtgccaccccatgcgcccactaggagccccgcgacgtgccacaccatgggcctctcgacgtgccacgccaggagtccacatccacgagccagtcgatgagccacacgaagagcctctcgaagacccccgctatgcagccacaccagcgtcacgcaatgag

SEQ ID NO: 165367 - DNA, 1214 bp, Homo Sapiens
  misc_feature (707)..(743): n is a, c, g, or t
  misc_feature (946)..(948): n is a, c, g, or t
  misc_feature (950)..(953): n is a, c, g, or t
  misc_feature (958)..(958): n is a, c, g, or t
  misc_feature (1081)..(1082): n is a, c, g, or t
  misc_feature (1137)..(1146): n is a, c, g, or t
atcgagctcgtaccaatgcagcggactcggcagcagatgccaaagatggggatcatacgacccctatgacttcagtgacacagaggaggaaatgcctcaagtacacactccaaagacggcagactcacaggagaccaaggaatcccagaaagtggagttgagtgaatccaggttgaaggcattcaaggtggccctcttggatgtgttccgggaagctcatgcgcagtcaatcggcatgaatcgcctcacagaatccatcaaccgggacagcgaagagcccttctcttcagttgagatccaggctgctctgagcaagatgcaggatgacaatcaggtcatggtgtctgagggcatcatcttcctcatctgaggaggcctcgtctctgaacttgggttgtgccgagagagtttgttctgtgtttcccaccctctccctgacccaagtctttgcctctactcccttaacagtgttgaattcaactgaaggcgaggaatgttggtgatgaagctgagttcaggactcggtggaccctttgggaatgggtcatgaaagctgccatggggtgaggaaagaggagacagtgggagaggacaatgactattgcatcttcattgcaaaagcactggctcatccgccctacttcccatcccacacaaacccaatcgtaaataacatatgacttctgagtacttttgggggcacaacnnnnnnnnnnnnnnnnnnnnnnnnnnnnnnnnnnnnnctccagagcactttggtctagactaggctttgggtggttccaattggtggagagaagctctgaggcacgtcatgcaggtcaagaaagctttctttgcagtagcaccagttaaggtgaatatgtattgtatcacaaaacaaacccaatatccagatgaatatccgagatgttgaataaacttagccatttcgtacacatggaannncnnnnccccnttacaccctaccgccgccacaaggccctaacctctgttaacagtccataacaccttacgtcctaataccccctgccctaacgcaacccgaccttttttttcccctacccccttttaagcgaanntgctttttgggggggcccccggccccaagaaaagttttcataaaaattttctttnnnnnnnnnncgccccaagggaaaaagaaacggggcgcccaccgtttttttaccaaaaaacccgggcacgtaaaacgg

SEQ ID NO: 165368 - DNA, 925 bp, Homo Sapiens
  misc_feature (844)..(844): n is a, c, g, or t
  misc_feature (881)..(881): n is a, c, g, or t
  misc_feature (898)..(898): n is a, c, g, or t
  misc_feature (905)..(905): n is a, c, g, or t
tccgttgccaagtctcagcttctgcggtatgtgctttgcactgcaccccgagctatccccaccactggccggggctcctctggagtgggtctgacggctgctgtcaccacagaccaggaaacaggagagcgccgtctggaagcaggggccatggtcctggctgaccgaggcgtggtttgcattgatgaatttgacaaaatgtctgacatggatcgcacagccatccatgaagtgatggagcagggtcgagtgaccattgccaaggctggcatccatgctcggctgaatgcccgctgcagtgttttggcagctgccaaccctgtctacggcaggtatgaccagtataagactccaatggagaacattgggctacaggactcactgctgtcacgatttgacttgctcttcatcatgctggatcagatggatcctgagcaggatcgggagatctcagaccatgtccttcggatgcaccgttacagagcacctggggagcaggatggcgatgctatgcccttgggtagtgctgtggatatcctggccacagatgatcccaactttagccaggaagatcagcaggacacccagatttatgagaagcatgacaaccttctacatgggaccaagaagaaaaaggagaagatggtgagtgcagcattcatgaagaagtacatccatgtggccaaaatcatcaagcctgtcctgacacaggagtcggccacctacatttgcagaaagagtattcacgccctgcgccagccaggatagcatgagctcagacaccgccaggacatctccagttacagcccgaacacgggaaactcctgattcgactggccaaggncccatgcggaaggcccgccatgagcaaggactgtggnaccctgcacggatgcanaaggaanacctctgggggaactttggt

SEQ ID NO: 165369 - DNA, 222 bp, Homo Sapiens
gtacccggctctttgtgtggctcatcgggtggccctttgtgtggcacttcgcgtggcgctttggggggctcgtagggggtttacttaggccaagtgtgaggactgtaaccaggaaacacagattcaacgttgccctgaatatacactctcccagggcttttttaatggataaaagaaataaaacattaccaccatagctaacatctcctcttcccaccacga

SEQ ID NO: 165370 - DNA, 1334 bp, Homo Sapiens
tcctggtggtgctgctcatcgactttgcgcactcctggaaccagcggtggctgggcaaggccgaggagtgcgattcccgtgcctggtacgcaggcctcttcttcttcactctcctcttctacttgctgtcgatcgcggccgtggcgctgatgttcatgtactacactgagcccagcggctgccacgagggcaaggtcttcatcagcctcaacctcaccttctgtgtctgcgtgtccatcgctgctgtcctgcccaaggtccaggacgcccagcccaactcgggtctgctgcaggcctcggtcatcaccctctacaccatgtttgtcacctggtcagccctatccagtatccctgaacagaaatgcaacccccatttgccaacccagctgggcaacgagacagttgtggcaggccccgagggctatgagacccagtggtgggatgccccgagcattgtgggcctcatcatcttcctcctgtgcaccctcttcatcagtctgcgctcctcagaccaccggcaggtgaacagcctgatgcagaccgaggagtgcccacctatgctagacgccacacagcagcagcagcagcaggtggcagcctgtgagggccgggcctttgacaacgagcaggacggcgtcacctacagctactccttcttccacttctgcctggtgctggcctcactgcacgtcatgatgacgctcaccaactggtacaagcccggtgagacccggaagatgatcagcacgtggaccgccgtgtgggtgaagatctgtgccagctgggcagggctgctcctctacctgtggaccctggtagccccactcctcctgcgcaaccgcgacttcagctgaggcagcctcacagcctgccatctggtgcctcctgccacctggtgcctctcggctcggtgacagccaacctgccccctccccacaccaatcagccaggctgagcccccacccctgccccagctccaggacctgcccctgagccgggccttcttagtcgtagtgccttcagggtccgaaggagcatcaggctcctgcagagccccatccccccgccacacccacacggtggagctgcctcttccttcccctcctccctgttgcccatactcagcatctcggatgaaagggctcccttgtcctcaggtccacgggagcggggctgctggagagagcggggaacctcccaccacagtggggcatccggcactgaagccctggtgttcctggtcaccgcccccaggggaccctgcccgcttcctggacttcgtgccttactgagtctctaagactttttctaataaacaagccagtgcgtgtacc

SEQ ID NO: 165371 - DNA, 698 bp, Homo Sapiens
  misc_feature (61)..(61): n is a, c, g, or t
  misc_feature (333)..(333): n is a, c, g, or t
ctccttaccaccatcccccatccctcatcacgcatcaccaatctccatccccattcccaancacctttcccgcttccagatccccatctcccatctccgttctcgatccacgttcccatgtcacttcccgacttctattctccgtttcattctcagttaccctttccatcccctatcccattccattcgccgttccccttcttatgaccgattccattccctgatccggatcgctttcccatccatattcccattcctatcctcagtacctatccctatcgcgaccgccatccgcatcccgctcccctaacagatatggttttcccccacctntgccacagatacagcatctgcccatagccggcgccttctagtcgtaatgccttcagggtctaagtagaatcaggttctttcagagccccatccccccgccacacccacacggtggagctgcctcttcttccccttcctccctgttgcccatactcagcatctcggatgaaagggctcccttgtcctcaggctccacgggagcggggctgctggagagagcggggaactcccaccacagtggggcatccggcactgaagccctggtgttcctggtcacgtcccccaggggaccctgcccccttcctggacttcgtgccttactgagtctctaagactttttctaataaacaagccagtgcgtgtca

SEQ ID NO: 165372 - DNA, 895 bp, Homo Sapiens
ggatcccgaggtccgcgccccgcgcccggcgccgggcgcccgaagccgggagccgccgccatgggggcctgcctgggagcctgctccctgctcagctgcgcgtcctgcctctgcggctctgccccctgcatcctgtgcagctgctgccccgccagccgcaactccaccgtgagccgcctcatcttcacgttcttcctcttcctgggggtgctggtgtccatcattatgctgagcccgggcgtggagagtcagctctacaagctgccctgggtgtgtgaggagggggccgggatccccaccgtcctgcagggccacatcgactgtggctccctgcttggctaccgcgctgtctaccgcatgtgcttcgccacggcggccttcttcttctttttcaccctgctcatgctctgcgtgagcagcagccgggacccccgggctgccatccagaatgggttttggttctttaagttcctgatcctggtgggcctcaccgtgggtgccttctacatccctgacggctccttcaccaacatctggttctacttcggcgtcgtgggctccttcctcttcatcctcatccagctggtgctgctcatcgactttgcgcactcctggaaccagcggtggctgggcaaggccgaggagtgcgattcccgtgcctggtacgcaggcctcttcttcttcactctcctcttctacttgctgtcgatcgcggccgtggcgctgatgttcatgtactacactgagcccagcggctgccacgaggggaaaagtcttcatcagccctcaaccttccccttctgtggtctggcgtgtccaatcgcctgcctgttccttgcccaaaggtcccaaggacgccccaaccccaaacttcggggtcctggccttgcaaggc

SEQ ID NO: 165373 - DNA, 379 bp, Homo Sapiens
  misc_feature (28)..(28): n is a, c, g, or t
ctgttcccaggctcccaggggaaaaagntgtggcccaggctgctcctcgaggaggctgggagctggccgactgcaaaagccagactggggcacctcccgtatccttggggcatggtgtggggtggtgagggtctcctgctatattctcctggatccgtggaaatagcctggctccctcttacccagtaatgaggggcagggaagggaactgggaggcagccgtttagtcctccctgccctgcccactgcctggatgggcgatgccacccctcatccttcacccagctctggcctctgggtcccaccacccagccccccgtgtcagaacaatctttgctctgtacaatcggcctctttacaataaaacctcctgctccac

SEQ ID NO: 165374 - DNA, 1170 bp, Homo Sapiens
ctaggcgagctgcaggtactcaggtgcgagctgcagtaactcaggagcgagctgccatgtaatgtcaattagaaacaagatttaagtctctggaccacccttcttaccccctgtggcctgttggtcacactgccccttcctcgtgtttctgtagccaggcacaggctaacgaggactcagagagtgcctgctatgataattttagcccctgagctgcagctcgccggcgagctgctgaggggatctggcggtggagcgctaggatcagacgcccccgcgatgaccagctcccccgtctccagagtcgtgtacaacggcaagaggaccagcagcccccgctccccacccagcagcagcgagatcttcaccccagcccacgaggagaacgtccgcttcatttacgaagcctggcagggtgtggagcgagacctgcgaggccaggtgccgggtggcgagcggggcctggtggaggagtatgtggagaaggtccctaaccccagcctgaagaccttcaagcccatcgacctgagtgacctgaagcgccggagcacgcaggatgccaagaagtcctagagcgcccggtgcccctccccggcctccggaagatcagggtgcgaggtgtcggttccctcctgtcctgtggtcctgcccctgggatgggggtgccttgctccagcgggctgcagatcccagcactggcgtgactgacggctgaggcctgcctctccttcccaagcccccttccttcatccttgggggtctcaggctgcccccatcatgggggtctgggccctgcccaccctcctgccctcccccagccacctggctgcatttttgaagctgcctggcccccaggggccctgacctgacctctctcctctcccctcaccctcctggccctggccactgcaggatcaggaggggagaagaaggagcctctgctgcctcccaggctgctgggactgggctggttttgtccttggagtggtcaggatacaggaccaggggcagccccaccccatccaggcctgggctccccgccagacccttgctgctcccgtgggcctgggacacgctgggggagctttctcacaccctaccccctacccgtccaggcctgggcttctttccctgaaatccagcttccaggatggggcacccagctccttt

SEQ ID NO: 165375 - DNA, 811 bp, Homo Sapiens
ggcctgggtggcgaattcggcacgaggcggttccctcctgtcctgtggtcctgcccctgggatgggggtgccttgctccagcgggctgcagatcccagcactggcgtgactgacggctgaggcctgcctctccttcccaagcccccttccttcatccttgggggtctcaggctgcccccatcatgggggtctgggccctgcccaccctcctgccctcccccagccacctggctgcatttttgaagctgcctggcccccaggggccctgacctgacctctctcctctcccctcaccctcctgcccctggccactgcaggatcaggaggggagaagaaggagcctctgctgcctcccaggctgctgggactgggctggttttgtccttgaagtggtcaggatacaggacaagggcagccccaccccatccagcctgggctccccgcagacccttgctgctcccgtggcctggacacgctggggagcttctcacacctacccctaccgtccagcctggcctcttccctgaatcagcttcaagatggcaccagctctttgggcctaggatactgccgggccccccaagggggtccccagcaaccaggcctggcctcctggtgtctgcggtcacagtggcccctgggcaggggcacccaggctgaccctgaggtgctgctgctgggtctgtcttggctctggggtgtgctgggagggtcaccaggtcccttttccttcctgtgccctctgaaagctaaatgtctgtgtggctgtggagctcgagggtctgtgaataaaggcggcggcactgggaaa

SEQ ID NO: 165376 - DNA, 478 bp, Homo Sapiens
  misc_feature (34)..(34): n is a, c, g, or t
  misc_feature (381)..(381): n is a, c, g, or t
tgacgagccgcactcggcaccaccgcggtggtcnggaaaccctcgcttctcccccccaaccccgtcgaggcgaagtggaggagggtcctctgcgagcgggtcgctacggcagcgctaccataacggaggcagagacagaggcggcggcccgggggatccggtacccccaaggcacgcctctcagatcgctagagaaggcttttctcaccgagggtgggtcacactccccccacccgccagccgctcctcctcgggcccgcagagcgccgagggacgcctggggaagggagggggccctgcggtacgaggaaacacctgcgcgcggccacctcgagcgttcgcgttcagggcgggggccgacacggtgcgcgcgtgcaccantccagcaaggcccccccgtccacccacctccttccttccgaggcagagcgcctccgaagtcaacccacacacgaccggtcggaggcagaacggcagc

SEQ ID NO: 165377 - DNA, 546 bp, Homo Sapiens
cctcctccctcctctgcctcctctgtgctgtcagcacagaggaggggagggcctgggtgatggtgaggtgggtccccgtgatggactgccacgacagcctccctgatctgtatgtccagctggacttggcagaagtacacagactggtcctccttccgcaggttcgagatcctgaggaagcctcccttgttcttgctttccccttgagatcaggaatgaggcacagatgtctgctctcactgcctcccttcacggtactggagtcctagccagcgcgctatgcctggcttctgcctcccaggggtggagactccctccccaatctcttcacccccaaagaagcacagccaaggcccatgtcagaggaactgtgttgctgacttagtcacagcaggaaacgacaggacggccccctggcgggggtgagctgtgtccaaagtagctgggcagcagctggtgttgatagtggcataagggacgtggagagcagcctgggaggcctggctgggtgcccatgctcgtgctctcagtgccgagtccgctgca

SEQ ID NO: 165378 - DNA, 472 bp, Homo Sapiens
gctacctataggatccccaatctgtcttcaggatgatgtgaggccaggcagcaggccctggtgcagtgtgcggtgtgggtggggagtgatgcccaccaggactggccctgtacggggtgagctgtgtcaaagtagctgggcagcagctggtgttgatagtggcataagggacgtggagagcagcctgggaggcctgcctgggagcccatgctcgtgctctcagcgcctaggagctgctgtgggatggctgtgagcctaggggcagggcggtgcttctgtcggcacagcagatgaaggaggtagccacagtcaaagagaaggactcctgagacccccaagatcccggccaggtctgcccgcagaaatgggggcaggacgtcggcgggacagacgagccctgggcacagacggcaagaatcagatggatggccagttcccgagcccctacctagcatgctgaagaacaggatgg

SEQ ID NO: 165379 - DNA, 746 bp, Homo Sapiens
ggaaggctcctggcccccacagccctcttcggagcctgagcccggctctccccactcacctcaacccccaggcagcccctccacagggcccctctcctgcctggacagctctgctggtctccccgtcccctggagaagaacaaggccatgggtcggcccctgctgctgcccctgctgctcctgctgcagccgccagcatttctgcagcctggtggctccacaggatctggtccaagctacctttatggggtcactcaaccaaaacacctctcagcctccatgggtggctctgtggaaatccccttctccttctattacccctgggagttagccacagctcccaacgtgagaatatcctggagacggggccacttccacgggcagtccttctacagcacaaggccgccttccattcacaaggattatgtgaaccggctctttctgaactggacagagggtcagaagagcggcttcctcaggatctcaaacctgcagaagcaggaccagtctgtgtatttctgccgagtcgagctggacacacggagatcagggaggcagcagtggcagtccatcaaggggaccaaactctccatcacccaggctgtcacgaccaccacccagaggcccagcagcatgactaccacctggaggctcagtagcacaaccaccacaaccggcctcagggtcacacagggcaaacgacgctcagactcttggcacataagtctggagactgctgtgggggt

SEQ ID NO: 165380 - DNA, 978 bp, Homo Sapiens
  misc_feature (396)..(451): n is a, c, g, or t
gtacccagaggctgaatggccgctgcatcagcaacgaatttaaggtggaggtgaatgtaatccacacggccaaccccatggaacacgccaaccacatggctgcccagccacagttcgtgcacccggaacaccgctcctttgttgacctgtcaggccacaacctggccaacccccacccgttcgcagtcgtccccagcactgcgacagttgtgatcgtggtgtgcgtcagcttcctggtgttcatgattatcctgggggtatttcggatccgggccgcacatcggcggaccatgcgggatcaggacaccgggaaggagaacgagatggactgggacgactctgccctgaccatcaccgtcaaccccatggagacctatgaggaccagcacagcagtnnnnnnnnnnnnnnnnnnnnnnnnnnnnnnnnnnnnnnnnnnnnnnnnnnnnnnnntgacatcaccagcgccgagtcggagagcagcgaggaggaggagggggagcagggcgacccccagaacgcaacccggcagcagcagctggagtgggatgactccaccctcagctactgacccgtgcccccggccacctcggtttctgctttcgaagactctgctgccatccgttctcccagtcccaagggtccacagatgtacaaagtcatttcggccagtaggtgtgcagacccctccccgccacgatcgtcgctgtgcttggtgtgtaggaccctaggctccccgcccaccctctgcctggtcgcgctcttcagtcccacgaggagctgacacgtcctctctggccgccatccggctcgcacaggggcctcccagcgcctcagggcccgcgttttgtgtctggagtctccccccggggaagaggacactgtgccccttccaactcaagaaaagccatgcccacctggggctcccttggaccaaaggggaaaaaacatggctcaactccccaccccgggtaaaacca

SEQ ID NO: 165381 - DNA, 778 bp, Homo Sapiens
  misc_feature (750)..(750): n is a, c, g, or t
gggtgccattgggtgtggacagaaagctagtgaaacaagaccatgacaagtcactggccggctcagacgtgtttgtgtctctcttttcttagctcagtgagtactgggtatgggtcacattgccaaatcccggatcacaagtctccatgaactgctggtgagctaggataataaaacccctgacatcaccattccagaagcttcacaagactgcatatataaggggctggctgtagctgcagctgaaggagctgaccagccagctgacccctcacactcacctagccaccatggacatcgccatccaccacccctggatccgccgccccttctttcctttccactcccccagccgcctctttgaccagttcttcggagagcacctgttggagtctgatcttttcccgacgtctacttccctgagtcccttctaccttcggccaccctccttcctgcgggcacccagctggtttgacactggactctcagagatgcgcctgggagaaggacaggttctctgtcaacctgggatgtgaagcacttctccccagaggaactcaaagttaaggtgttggggagatgtgattgaggtgcatgggaaaacatgaagagcgccagggatgaacatggttttcatctccaggggagtttccacagggaaattaccggattcccagtttgatgttaggaaccttttcaaccattaatttcaatccctgttcatcttgatggggggttcttcaattgtgnaatggggaccaagggaaacaggtttttt

SEQ ID NO: 165382 - DNA, 390 bp, Homo Sapiens
agatgtgaattgaaggttccatgaaaaccatgaagagcccccacattaacacatggtttcattctccagggaagttccaccaggaaataccggatcccagctgatgtagaccctctcaccattacttcatccctgtcatctgatggggtcctcactgtgaatggaccaaggaaacaggtctctggccctgagcgcaccattcccatcacccgtgaagagaagcctgctgtcaccgcagcccccaagaaatagatgccctttcgtgaattgcattttttaaaacaagaaagtttccccaccagtgaatgaaagtcttgtgactagtgctgaagcttattaatgctcaaggcaggcccaaattatcaagctaataaaatatcattcagcaac

SEQ ID NO: 165383 - DNA, 510 bp, Homo Sapiens
cctccttcctgcgggcacccagctggtttgaaactggactctcagagatgcgcctggagaaggacaggttctctgtcaacctggatgtgaagcacttctccccagaggaactcaaagttaaggtgttgggagatgtgattgaggtgcatggaaaacatgaagagcgcccaggatgaacatggtttcatctcccgggagttccacaggaaataccggatcccagctgatgtagaccctctcaccattacttcatccctgtcatctgatggggtcctcactgtgaatggaccaaggaaacaggtctctggccctgagcgcaccattcccatcacccgtgaagagaagcctgctgtcaccgcagcccccaagaaatagatgccctttcttgaattgcattttttaaaacaagaaagtttccccaccagtgaatgaaagtcttgtgactagtgctgaagcttattaatgctaagggcaggcccaaatttttcaagcttaataaaaatattcatt

SEQ ID NO: 165384 - DNA, 485 bp, Homo Sapiens
ccctggtccaatccacaatgaggacccccatcagatgaacaaggaatgaaataaatggtgaaaagggtcctaacatccagctgggaatccggtaatttccctgtggaactcccctggaagatgaaaccatgttcaaccctggcgctccttcatgttttcccatgcacctcaatcacatctcccaacaccttaactttgagttcctctggggagaagtgcttcacatccaggttgacagagaacctgtccttctcccaggcgcatctctgagagtccagtgtcaaaccagctgggtgcccgcaggaaggagggtggccgaaggtagaagggactcagggaagtagacgtcgggaaaagatcagactccaacaggtgctctccgaagaactggtcaaagaggcggctgggggagtggaaaggaaagaaggggcggcggatccaggggtggtggatggcgatgtccatggtggctaggtgagtgtgag

SEQ ID NO: 165385 - DNA, 611 bp, Homo Sapiens
cgtccgtcgaccgctgcaaacacacgtgtcttctggcgccggctctccttgatgaggcggtcgtaggcaaacttgagggctgagggtgtccaggtgccacctgcaatccactcgaggttcttgacagcctccttgaagctcgacagggagtcgatatgttcgtcgtccagctggatggcctcaaaggtgccctcgtggctgtactgcaccacgcccacacgcgtccctgtctcggacttggggtccttagcgatggcacccagcctgttgaccacgttgatgacgaagttcttctccagtgtgaagttggtgtacccaatgctctcggagctgtcgatgacgaataccacgtccagggcgccacagcgcttctcacagtcgcagcacccgcaggtctccctcacgtaggtcatgacgtcacactccgtgagaccggggtctccaggggggccgggctcaccctcgggtcctgggactcctcttggcccccgagggcctggctcaccagggggaccagtatccgcaggctctcctttctctcctttcctcccaggttctcctttcaacctaaatcgcctcgcctcccttgtacagctgaccagtacgacgtg

SEQ ID NO: 165386 - DNA, 199 bp, Homo Sapiens
cagatgcagtctgatgaaagggcaggaaggcattcttagtccaggagccaccatgacaggctgttagtgtaccagctcctctgcccctggcctcgtcgaggactacactgcgatagagtgggaaggaggcgtttggcttcggctaggcctgtgatcagctgccagcagtttcctgacatttgtttctcgaagctgcttc

SEQ ID NO: 165387 - DNA, 1307 bp, Homo Sapiens
  misc_feature (929)..(930): n is a, c, g, or t
  misc_feature (948)..(948): n is a, c, g, or t
  misc_feature (1079)..(1079): n is a, c, g, or t
ggctttagcccttctagcaagatggaaggtggtcactttgtgcctcctgggaagaccacagctggctcggtggactggactgaccggctgggtctcaggaacttggaagtgtccagctgtgtgggttctgggggctcgagcgaggccagggagagtgccgtgggacagatgggctggtcaggtggcctgagcttgagagacatgaacctgaccggctgtttggaaagtggagggtctgaagagccggggggaatcggagttggggagaaggactggacttctgatgttaatgtgaagagcaagatttggctgaggtcggggagggaggaggccacagccaggccagagagagtggcgtggggcagactgactggtcaggtgtggaggccggagagttccttaaatcaagggagcgtggagttggacaggcagactggacacctgaccttgggctgagaaacatggccccaggggcagtctgcagtcctggagagtccaaagagcttggggtgggccagatggactggggtaacaatctgggcctgagggatttggaggtgacctgtgacccagactctggaggttctcaggggctacggggatgtggagtggggcagatggactggacccaggacttggcgccccagaatgtggagctctttggggctccaagtgaagccagggagcatggggtgggcggggtgagccagtgcccagagcccggcctgaggcacaatggcagcttgtctcctggcctggaggccagagaccccttggaggccagggagctgggggttggtgagacaagtgggccagagacccagggtgaagattactcctcgtcttccttggagccacaccctgcagaccctggaatggagacagggagagccctcagcttcggagcaagcccctggcagtgcccgggnnccgcccccaccctccggnttcccaggcctgcttggaggagatgctgggcagccagcaactccaagggcgggggctcggaaggagtcagcggcctcgggcctttggggggctggtggaaggagaaagaacccggggcagttgctgcccanaaaggaggtgcttggaccctgggcaggaacttctccaccctccggaaggccgcaacccttgatggtgaaggccagccaaaaagaaaaacctgggatggcacctgggggctccttcaaccaccagggggggacgcatcagggggccaacacaagaacttcttcggggaaccttcccaagggcccttccgggccaaaaccccccaggtcagggatcttctcccttccatg

SEQ ID NO: 165388 - DNA, 510 bp, Homo Sapiens
cccaactgcttcaagccctgaaactgaagaagaagaaggtctgagaagtcactgaggttcttcccacctggcagtctcagcagtgcccattcctgtggggtccctgggtgaggagacggctggagccccaccatgccccaggctgcagcctctgtcccctccacctctgaggagcgtctggggaggcacatttatgcactttgtatcaccctccgaactccccccacaccttcccttccctggatttcatcactagtggttgaaggttttgtcccttcctctcttgcttccttttgaagctctgcttcctcctccagcctcccttgggttttcttttgataccaatttatagcattttttataaaagcctttgatttttataatgggtgggactgtatccctgcctcaccccaggtctccgtctgccccgccaggtaccccacagagaccaatgacattttgccacttgaaacaataaataaagttttttgggaattggtgctgtccaaa

SEQ ID NO: 165389 - DNA, 1195 bp, Homo Sapiens
  misc_feature (104)..(104): n is a, c, g, or t
tccagcggtctccttcaccccagggacccccacaggaaattggcactgcctgagactgccaggtgggaaagaacctcagtgacttctcagaccttcttcttctncagtttcagggcttgaagccagttgggcgacgatccttctgaccctgaggatttctctggcttgggaggtaacgtgaggggctttcccagtcctgggaccttgcaggatttcgaacgctggaccgcggactccttctggctcgacttgctctcagccagctctccctcctcagctgagcgattccgggggcgcagcttggccttcagggctgaggggctcaggccaggaaagaggttgactttcagccccttggtgcccaacgacatccgtgtccggcggctctgaggttcctccactacctcttcatctgaagatggcacccgagatgcccgtggctctgttagagtcctggaacaggtgtgcatccgagtctgctgcatccgacaggcccaaggtacccccaggccgaatgaccggggcccggttgcccacgcttgcgccccaagttggcacggctccgatacatggcactgtcgaggatctcggtgtcctcaatgaaggagaagtcctgactgggggatctggcaggagggccttgggagggtcgccgagaagtctgtgctggcccctgatcgctccacctggctgctgaagagccccaggtgccatccacgtcttctgtctggctggcctcaccatcaggctgcggcctccaggagggtggagagtccctgccaggctccagcacctcctcttgggcagcacctgccccggctccttcctcctccaacaggcccccaaggcccgaggccgctgactccctccgagccaccgccttggagctgctggctgccagcatctcctccagcaggccctgggagccggagggtgggggcgggccgggcacctgccagggcttgctccgaagctgagggcttctcctgtctccattccagggtctgcagggtgtggctccaggaagacgaggagtaatcttcaccctgggtctctggcccacttgtctcaccaacccccagctcctggcctccaggggtctctggcctccaggccaggagacagctgccttgtgcctcagccgggctctggccgacgcgtggtcgacgatatcccgtacttccggaccgtacca

SEQ ID NO: 165390 - DNA, 837 bp, Homo Sapiens
ggaagcagctgagggctgcaggagtgggagccggcctgcaggctctgaggtgggggtcccgcccaggacattccttcttggggtgtgggataagtgcagggcctgagctctaagccttagtcaggggtgagaaggtgctggaatcaattcttcctctggcccagaccctggaagggttgacaaatgtaggtggcagtacccagggtgaataggctggcagtgtgcatgggcatgtgagcagtgtgcttgggcgcgggcatcaggacaggtgagtctgggcctcctctgtgctgtcggacagcacagaggagggacagcacagaggagatctagggtgatgccattggtgccacatgaactgttttcagtcaccagcgagtagatgtccacaccattcaggccccctttcttgatcttggcgggagttccccagtcagtccagtacatgaagccatgaacaggatccaccacgatggcccttggcttggagccgttctccctgaataacgttttcctcttcacgcccttggtatccgcaacagagacagtgcccaggacagagtcggtccagtagatgttgctgtggatccagtccacagccagcccgtcgggggcctggatgtccctgctgaagacggtgtcataggaagagacgccgtgggctctgtcaaagctgggtgctgcagatcattctctgggacaggtcagaccagtagattctattgctggccacctcccgggtccagagcgaccaaagttcctcaggttggggatgaggctggtgtactcgctccggtccagcgtcatctttagcctcgttgccggggtaccgagctc

SEQ ID NO: 165391 - DNA, 875 bp, Homo Sapiens
gggtcttccgggcaaaatggcgatgggactaatgtgcggacgccgggagcttctgcgcttgctacagtccgggcgtcgggtccacagcgtcgcagggccctcgcaatggcttgggaaaccgctgaccacacggctcctattcccagcagccccgtgctgctgtcgcccacactacctcttccttgcggcttccggcccccgcagcctcagtacctctgctatctcttttgcagaagtccaggttcaggcccctcctgttgttgctgcaactccctcacccacagcagtacctgaggtggcttctggagagactgcagatgtagtccaaactgctgcagagcagagcttcgctgaactggggctggggtcatacaccccagtgggactgatccagaatttactggaatttatgcatgttgatctgggcctaccttggtggggggccattgctgcatgtacagtctttgcccgctgcctgatttttcctctcatcgtgacgggccagcgagaggcagccaggatccacaatcacttgccagagatccagaagttttccagtcgaatcagagaggccaagttagcaggagaccatattgagtattacaaggcttcctcggagatggcactttaccagaaaaaacatggtattaaactctataaacctctcattctccctgtgactcaggccccaatcttcatctccttcttcatggctttgagagagatggccaacttcctgtgccccagcctgcagacaggtggcctctggggggttccaggatctcacgggtatccgatcccatctaccatattaccaatgggcagtcaactgctaacaatgtgggctggtcctagaggctaaggtgctgagaacg

SEQ ID NO: 165392 - DNA, 1293 bp, Homo Sapiens
gggttgctgcaactccctcacccacagcagtacctgaggtggcttctggagagactgcagatgtagtccaaactgctgcagagcagagcttcgctgaactggggctggggtcatacaccccagtgggactgatccagaatttactggaatttatgcatgttgatctgggcctaccttggtggggggccattgctgcatgtacagtctttgcccgctgcctgatttttcctctcatcgtgacgggccagcgagaggcagccaggatccacaatcacttgccagagatccagaagttttccagtcgaatcagagaggccaagttagcaggagaccatattgagtattacaaggcttcctcggagatggcactttaccagaaaaaacatggtattaaactctataaacctctcattctccctgtgactcaggccccaatcttcatctccttcttcattgctttgagagagatggccaaccttcctgtgcccagcctgcagacaggtggcctctggtggttccaggatctcacggtatccgatcccatctacatattaccactggcagtcactgctacaatgtgggctgttcttgagctaggtgctgagacaggtgtgcaaagttctgaccttcagtggatgagaaatgtcatcagaatgatgcccctgataaccttgcccataaccatgcatttccccacggcagtgtttatgtactggctctcctccaatttgttttccctggtccaagtatcctgtctccggattccagcagtacgcactgtacttaaaatcccccagcgtgttgtacatgacctggacaaattacctccacgggaaggcttcctagagagcttcaaaaaaggctggaaaaatgctgaaatgacgcgtcagctgcgagagcgtgaacaacgcatgcggaatcagttggagctagcagccaggggtcctttacgacagacctttacccacaaccctctcctacaacctggaaaggataaccctcccaatatccctagcagcagcagcaaaccaaagtcaaagtatccctggcacgacacacttggctgacttatgttctgtgcgcattctggcaggaattctgtctcttcagagactcatcctcaaaacaagacttgacactgtgtccttgccccagtcctaggaactgtggcacacagagatgttcattttaaaaacggatttcatgaaacactcttgtacttatgtttataagagagcactgggtagccaagtgatcttcccattcacagagttagtaaacctctgtactacc

SEQ ID NO: 165393 - DNA, 1174 bp, Homo Sapiens
  misc_feature (1014)..(1014): n is a, c, g, or t
  misc_feature (1097)..(1097): n is a, c, g, or t
tggacagcacagaggaggactgtagcgacggctcagatgagaaggactgcgactgtgggctgcggtcattcacgagacaggctcgtgttgttgggggcacggatgcggatgagggcgagtggccctggcaggtaagcctgcatgctctgggccagggccacatctgcggtgcttccctcatctctcccaactggctggtctctgccgcacactgctacatcgatgacagaggattcaggtactcagaccccacgcagtggacggccttcctgggcttgcacgaccagagccagcgcagcgcccctggggtgcaggagcgcaggctcaagcgcatcatctcccaccccttcttcaatgacttcaccttcgactatgacatcgcgctgctggagctggagaaaccggcagagtacagctccatggtgcggcccatctgcctgccggacgcctcccatgtcttccctgccggcaaggccatctgggtcacgggctggggacacacccagtatggaggcactggcgcgctgatcctgcaaaagggtgagatccgcgtcatcaaccagaccacctgcgagaacctcctgccgcagcagatcacgccgcgcatgatgtgcgtgggcttcctcagcggcggcgtggactcctgccagggtgattccgggggacccctgtccagcgtggaggcggatgggcggatcttccaggccggtgtggtgagctggggagacggctgcgctcagaggaacaagccaggcgtgtacacaaggctccctctgtttcgggactggatcaaagagaacactggggtataggggccggggccacccaaatgtgtacacctgcggggccacccatcgtccaccccagtgtgcacgcctgcaggctggagactggaccgctgactgcaccagcgcccccagaacatacactgtgaactcaatcctccagggctccaaatctgcctagaaaaacctctcgcttcctcagccctcaaaagtggagctggggaggtanaaaggggagggacactggggggttctactgaccccaactggggggccaaaggttttgaagacacagccttccccccggccagnccccaagcttgggcccgaagccgccgtttgggggatatccggccctccccctgttttggtaagggaacccccccgcc

SEQ ID NO: 165394 - DNA, 440 bp, Homo Sapiens
gaagacagctcagaggaggtggacagcacagaggggtcactgctattcatctttcccgagatccccttctcggggacgctgcggcccctcttctcacccctgtccagcagcccgaccccgatgactatctgccggccgaaaggtgggtccggggacaccctggctccccagtgactcgggccctcctggaggagtcctgttgcctctcctgcccctccaggccactgagtgtcttggccacttggaggacctgggaggcgggagtgtgtcctttgagcaagaggaggaactcctggtgcctttctgagcctgcgttgagagaaccccaattctacgcactccagggaaactgtgggagagtgtgcggcacggctccgtcctccctgggagacccctccagccccggttgccggcttattgcaaccatgccttaccaaaag

SEQ ID NO: 165395 - DNA, 961 bp, Homo Sapiens
agagagcatttagtgtctcatagagaagacaggacatcattcatcactttcatgatggtgagcctatagatcttactgtatttcttctgtcggttggccaggaagccggccagttgagttacaaaacatttctctttgagggttctgaactgctggttcttctctgccagctgggggcgcaatttctcattgatttctagaatgttcgtctctgccttctcgctggacaaagggccggctgataccaccatgctgacgtttgtggcagaagaggtggggccggggactgagagaatgtttagagcatcctgacattcatcatgagaggattctctgtctacaaccagagttgagttgacttcgtcttcctcaaatgtgattttgatgttcttgtgaggctggttggagtcacaagggccgtggctatttgaacaagtgatggcacattcctccagtgagtcctcagggactttgctctcttcagccttctgcacctccctgggctgagcttttggacaaggtgctgtgccagtctacacccctcagccagctgttcttggaggtcctgcccctgggacttgtccggctcatccagagtgaggagggcctggagatgctcattcaatgagcgggaggcatctctcccttcccgtaacttctcccttaactgggtcagctctcgttcctgagagtgaaccaggactttatattgcctgagctcctcagcttgcttcagctgctctgcaagcttctcctccttgaactgtcgctcattcctcagcataaattttatgaggtctttacactcttcatacttgtatttcttctgccgctaggccaggaagccggccagttgagttacaaaacatttctctttgaggcttctgaactgctgtttcttctctgccagctgggggcgcaatttctcattgatttctagaatgttcatctctgcgtcgac

SEQ ID NO: 165396 - DNA, 372 bp, Homo Sapiens
caagtggacctaaagaaacgagttccgctactccgggacgagactccaaaaccatccaaaagggatcagaaagtgggcgtgggaggcagaaatctcctgcacagagtgacagcacaacacagagaagaactgtaggcaaaaaacaacccaaaaaggctaagaaggcagctgctgaagagcctcgtggaggcctgaagatagaaagtgaaacccctgtagacttggctagcagcatgccctccagcagacacaaagcagccaccaaaggctcaaggaaacccaatataaagaaggagtctaagtcttcccctcgacctacagcatagaaaaagaaatataagtcaacaagtaaatcttcccagaaatcaaggg

SEQ ID NO: 165397 - DNA, 1001 bp, Homo Sapiens
acaggcgcggtgaagaggtggtatcagctggaaaaggacaggtcgaagagggtggtaaagtcccttgggatctcatcactctcctggagacactctcgattccgctttgatagggtggctgtgtagggcagcatcatgtagtcagaaatctctgggtcctcagcatcaatctggtttaggtggatgtctcctgtcgtgagccactggaaaacaacatccatgattttgctgttttcttctttgtccaaatattgatcactgaacatgtgacatgaaccaagcactgccagcttcccaccttggttctttgagtgatagaaagccaaaatgggtctgttaagtgggaagcagacagaacctgtagacagaaccgccactgctggtttcatgacactcaatgtggcaccaaaaggatacacaaaggtgagagcctgggcattgtttccactgctttcctcatcaatgatcccaggcacagcctttcctgcagctcggctaatttccctgttcaagactccactggaaactagagcttctttaggatggaaatatttgtgatatacatttctaaccacagcatcattattaaccatgattccatattcttctagtaaaaagttaatattggtgtcaaatctggattctccaccttctcctagcatcacaaagacatctccaccagtgtcaagatatttcttcaggatttcaaactcagctgcagtaaatttttcccttggcccagctgtaatccacagttttactccatttaacttctcagatgtgatttcatcttttaagctctgaatcttccaattactccgaagttttttctgcatggatttgtagccattgttggtggtaaatatctcctttttgtaggcattgaaaagaatggtgctccgcagctctttctccatggttacctgacgccgcccagcatcccgcggccaggtatccaaggccgcttagtaaccggagaggcgcgtcggtgcgccgggccc

SEQ ID NO: 165398 - DNA, 776 bp, Homo Sapiens
ggctcggcaccccctgaggaagatgaaaggaaaaagaggcgacgagaaagaaataagattgcagctgcaaagtgccgaaacaagaagaaggagaagacggagtgcctgcagaagaagcgggaggccgaggctcggctgctgtgggccaacaagcctgataagctgcagcaggccaaggacgagatcctcgagtgggagtctcgggtgactcaatatgaaagggacttcgagaggatttcaacagtggtccgaaaagaagtgatacggtttgagaaagagaaatccaaggacttcaagaaccacgtgatcaagtaccttgagacactcctttactcacagcagcagctggcaaagtactgggaagccttccttcctgaggcaaaggccatctcctaatggaccaaggaccccagagcccacctgtgtgacgctgcctttttatacactgtcctcctccaccttgatggacccctagtgatgcatcctgcctaggctggacttaaccccttcctccctgtccccacgaccaactgtccccagttactctaaccgttatttcatttagcttccatatatattttcttacctaagagaatagtttcctgctttaagcaaaagacctacaataggtggtggaattatgggatggggtggagtattgatataaatatataaatacaaatgtatatttttcaggatgtggtttaggaactgggaataacgttttctgttactcctgatggtgccatgaaaaggttatgtaataaaatatttta

SEQ ID NO: 165399 - DNA, 862 bp, Homo Sapiens
ccagctgcttgggtggaggaaaaaattgagcagctccaccacggacagccaacaaatgacttcttcctccttgctgagctcctgagtgactacattcgcctcctggccatagtccgcgctgccttcgaccagcgcatgaagacatggcagcgctggcaggatgcccaagccacactgcagaagaagcgggagcacgaggctcggctgctgtgggccaacaagcctgataagctgcagcaggccaaggacgagatcctcgagtgggagtctcgggtgactcaatatgaaagggacttcgagaggatttcaacagtggtccgaaaagaagtgatacggtttgagaaagagaaatccaaggacttcaagaaccacgtgatcaagtaccttgagacactcctttactcacagcagcagctggcaaagtactgggaagccttccttcctgaggcaaaggccatctcctaatggaccaaggaccccagagcccacctgtgtgacgctgcctttttatacactgtcctcctccaccttgatggacccctagtgatgcatcctgcctaggctggacttaaccccttcctccctgtccccacgaccaactgtccccagttactctaaccgttatttcatttagcttccatatatattttcttacctaagagaatagtttcctgctttaagcaaaagacctacaataggtggtggaattatgggatggggtggagtattgatataaatatataaatacaaatgtatatttttcaggatgtggtttaggaactgggaataacgttttctgttactcctgatggtgccatgaaaaggttatgtaataaaatattttaaaatcaggtgggtacgt

SEQ ID NO: 165400 - DNA, 1097 bp, Homo Sapiens
ggggcaggaagggcatccactagggggtcccctacaagggggaaggagggacccgtgtataaaaaaggcaggggtccccacaaggtggggttttgggggtccctgggttccattagggaagatggcccttttccctcaggaaaggaagggtttcccagttactttgccaagctgctggtgggagtaaagggagggtctcaaggtaacttgattcagggggttctggaagtccttggatttctctttttcaaaccgtatcattcttttcggaccactgttgaaatccttctcgaagtccctttcatattgagtcaccccgagactcccactcgaggatctcgtccttggcctgctgcagtttatcaggcttgttgggcccacagcagcccgagcctcggcctccccgcttcttctgcagtgtggcttggggcatcctgccagcgctgccatgtcttcatgcgctggtcgaaggcagcgcggactatggccaggaggcgaatgtagtcactcaggagctcagcaaggaggaagaagtcattgttggcctgttcctggtggagctgctcaattttttcttccacctcagccagctgggagagtgcccgtgacaatgccgtgttgtcctcagagctcccaagcatggctagactctttgcaaactgggctgtgttcagcgctagctctttcctatggttgactagagtttctacaacagcatgcagtttccgtaagcgctgctcctcacactctacctcctggagcttctcctcaaaccaaatgtctgattcattcatcttgatggtcattttgctgacggcatctgtggctttgttgaacatcttgaggagaccagcaccactcaatgtctgggtacccacggcacgtggcagctcttctttttccaagaactctctgacgtcagggtcctgtaacatggtaggatgatttacaatcctctgaaggtacctttctaaagcggccctccgtttttcaagaaattctgcagaagaagaatcttccttcccaactttcacttttgtcatccctatgaggctcttctccgggggcggcctcgtgccgaattcgccacccaggcc

SEQ ID NO: 165401 - DNA, 1340 bp, Homo Sapiens
ccaggtggggggctttgggggccttcccttcccaaggggtttgcccaatttttttccattccgcctggttcgaaaaggaaggcgcggggactagtggcccagggagggggaaaagtaagtccactcagggaggttcaacaaaggaggaaggaagtccattgttggcccgtttcctgtgggagctgctcaatttttctttcccctcacccagctgggagagtgcccgtgacaatgccgtgttgtccctcagagctcccaaagcatggctagactctttgcaaactgggctgtgttcagcgctagctctttcctatggttgactagagtttctacaacagcatgcagtttccgtaagcgctgctcctcacactctacctcctggagcttctcctcaaaccaaatgtctgattcattcatcttgatggtcattttgctgacggcatctgtggctttgttgaacatcttgaggagaccagcaccactcaatgtctgggtacccacggcacgtggcagctcttctttttccaagaactctctgacgtcagggtcctgtaacatggtaggatgatttacaatcctctgaaggtacctttctaaagcggccctccgtttttcaagaaattctgcagaagaagaatcttccttcccaactttcacttttgtcatccctatgaggctcttctccgggggcggagggacaatgaagccattctgagagtgcttctcggaaagcttctcataaagacccagaaagtcactaaatcttctttttactgcaaactgtttgcttctgaacaatggtaagcttgtctgtgttgtaactttgtaggctacatatgcattcataccatcccctatcttctcaggatcagttataccgactgtcaaatcaaattgatcctcctgttcttcttcctctagctcctcataggttggctggggcttcgaagaatttgtggcttcctgaggaggaagagaaatgagtgttttggctagcaccttcttctgattattttgtgtgctgtccaaggatagctccactgtggcatctgcaaagagatcctgtggctcttggtcttgttcttcatggatcccattttctttggagccattgttgatgggaagaagggatgtagttatctttggagactgatgtttactgaccaccgcggcgccggtgaaaatgtcctccccctcggtgtcgctgtccccagcctcgggttctgatcccccggccgccccctcggactccggctccaggccggggaagggcggaggcagtctctccgaagcgctacagccaccaccacccgacgccatcttcttccacccgcggcccc

SEQ ID NO: 165402 - DNA, 620 bp, Homo Sapiens
ctgtatcccggggagacctgagtatgatggagcatggtagggttgggagtcaagtcaagctcacagcatttcagggttagggagataagctgtctgcagcagtcaatagttgagggttcagcagggcttccaacaggcagaataagggactgaactgccagcttcagggcaggggacaagccatctctcctgataggaaagggtcaggggttgagtagagtcttcagcaaagctgggaagttgggtgttccccagcctgttacaggatcccagccaggaccagagcagaaaccctggccctctacctcttcatccagacaggactcatggcagccacgggttacatcaaagagtcctgccccatgctgctggtagagccttgggttgagaaagccaagaggggggcggccactaaggatcctgtgctcattgatcaaggataggatccccccaaacactggagtagaggccgaggttccggacacccatggaatgggcactccattgctgaccacccagtagccatcagaaagtgcagccacatctgggtaggcacggccactggcattgaagtaactggatggtggcaggtgagggctagagctcagtaacagctgcta

SEQ ID NO: 165403 - DNA, 502 bp, Homo Sapiens
  misc_feature (75)..(75): n is a, c, g, or t
  misc_feature (90)..(92): n is a, c, g, or t
  misc_feature (96)..(96): n is a, c, g, or t
  misc_feature (340)..(341): n is a, c, g, or t
  misc_feature (346)..(346): n is a, c, g, or t
ttttggggtgggggcgagggcgcccttttaatgggaaaccccttaagggccttgtgggggcccttgttgtggggnccacccataaaaccnnnaaanccccgggggattccccccgggggtttaaaataaaggggggccagggtttttttggcccagcccgggcagtggtcccttaaaaccacccttggggggcaccccccaaatttccatggaggaaagggacttggtactggggagaccctgcccctttatgaggcaggaagtaaagactgtggattcactgacactgattagcatgctggtcctcccaggtctcactgaatcctaggatctaggaatnntttcnctgaggcagccccttcctgatctacttcagttacttctgctgagaaccagaaagaggttcagaaaccttcagaccaatagatttctcttaactgagacagagacttgtttagtttttttccacagacattaaaaacccagacagaatatgttcccc

SEQ ID NO: 165404 - DNA, 256 bp, Homo Sapiens
ctgaggaaaaggaaaggcaattgctctcagcatgaccgggccttggagcggttctatgaacaggtggtccaggctatccagcgccacatacactttgatgttgtaaagtgcatcctggtggccagcccaggatttgtgagggagcagttctgcgactacatgtttcaacaagcggtgaagaccgacaacaaactgctcctggaaaaccggtccaaatttcttcaggtacatgcctcctcagggggtgcgagctcga

SEQ ID NO: 165405 - DNA, 709 bp, Homo Sapiens
ccatcgactcgcacccctacaatggtgactctgctgggctgccagctcgcttaacattggagttcagtgcttttgacatgagtgctcccaccccagcccgttgctgcccagctattggaacactgtataacaccaacacactcgagtctttcaagactgcagataagaagctccttttggaacaagcagcaaatgagatatgggaatccataaaatcaggcactgctcttgaaaaccctgtactcctcaacaagttcctcctcttgacatttgcagatctaaagaagtaccactttctactattggtttttgctatcctgcccctctgtcttccagagagtttacctctcattccggggccaccgaggtttggatcaaaaggttttcacctaaatccgattggaagcactaaaagtgggcactatgatcattctttgttcaaaaaataaggagtcacaagctccttccttcacctccttaatccagccatgaattaaaaacctggcggcttgggttttccttgccttaaaacccctacaccggattttctttctacaaggtccacggggccgaaaaataaccattttggtgggattattgattccctggagaactttaagcccaagtacaccctgggaatgggcccctttgaagggaaattttttgtgggctcctaagagccgccccaccgcaatgtgagttaaccaac

SEQ ID NO: 165406 - DNA, 206 bp, Homo Sapiens
aagctcccaacaagattatcatgtggaataccaccattaggagtgggtttttcaggagaagatggaatatcaaatgtttcattaatatgactttctagatcttgttgcgaatgtgaataatgtatttggttccaactgtttttctttgactgtttgggtgtaaagctggaggcttcccatctccaggggtctcttgtagggagctt

SEQ ID NO: 165407 - DNA, 664 bp, Homo Sapiens
  misc_feature (561)..(561): n is a, c, g, or t
  misc_feature (591)..(591): n is a, c, g, or t
  misc_feature (625)..(625): n is a, c, g, or t
gtgtgagccaccatgcccggcccagaatactttttaaaagaagagcaggttagaggaaagaaaaaaattgatgctgaatgtggtgatgaaagcatgtttctaaaatgggaagcagatgcttaaagaggaaagactaatctgggattttgccccatttctctggtttttcactcctatatttaattctcacaatcgtgtcgtcacatagtgcaaaaaacaaaattcttgtaaagtccccaggagtttatgcttgggtgaaagttttagcctgagtattttcttcctctaaaaaaggtgggaaatgagacattgaggaattaacatataaatgtctgctatgggtttaagagaactggcgtatttggaatgcttcttacactaacactgtctcattgtaaaatataaaaccccttactctaactacatttttattcctctggtagtgtggtatccagggcaacatatcacttctgctatgtaattctaaggaattctcatttctaggagtacctgaggccaaacaaatacacaacgggaaggctggcagctgtattcattcantaggcaattttgctccatccattattttantacccttggaacccagggttttcccgcccatggntttggaaggcaaaaatcagtctccttggctggaaaaggg

SEQ ID NO: 165408 - DNA, 651 bp, Homo Sapiens
cgctcattaccgtagtataaattgtgaggttgttataaactggaaccaccgacaaaatctggaaaagtgcctccaggctgaggtttgcttgtcctgtagcattaagggccttgatggcagatgttctccggtcatcttccttgggtgctggcttccagtggtcgtaatttgtctcaactcggaaccacgctccattcaaaggatctagaggccaaatgtctgctgggccatctctgttcctcgtgatgaccaccccctcccggggggacgtgccaccaacaatgtaataaacatcagcaataaggggagtcttggccaacttgccaacagctgcttcgaagttttccgactcactcagggtagcgcggatcagccagctgacgggaatgtgtctccgaaacagggcagcgatagcattctcccaccaacagcctttatctcgttcatcaccagaaactgtaaacttgtgtgggctctggccagtccataatcctacatagccaataaaagtagttcctgtgaatgcaatctgcccattctttaagaattgcacatccactgtcagcttgcgtaagacattcccaaaaggataatccaaaattccgaccatggtaaatgtgcctctggagtctgagccacatactggccaga

SEQ ID NO: 165409 - DNA, 931 bp, Homo Sapiens
  misc_feature (888)..(888): n is a, c, g, or t
  misc_feature (897)..(897): n is a, c, g, or t
  misc_feature (907)..(907): n is a, c, g, or t
gaaaattaacaagaatgagcggaaagggaaggctgagatcacactgctggtgcagggccaggagctcccagagttctgggaggcactgggtggggagccctctgagatcaagaagcacgtgcctgaagacttctggccgccgcagcccaagctgtacaaggtgggcctgggcttgggctacctggagctgccacagatcaactacaagctctccgtggaacataagcagcgtcccaaggtggagctgatgccaagaatgcggctgctgcagagtctgctggacacgcgctgcgtgtacattctggactgttggtccgacgtgttcatctggctcggccgcaagtccccgcgcctggtgcgcgctgccgccctcaagctgggtcaggagctgtgcgggatgctgcaccggccacgccatgccacggtcagccgcagcctcgagggcaccgaggcgcaggtgttcaaggccaagttcaagaattgggacgatgtgttgacggtggactacacacgcaatgcggaggccgtgctgcagagcccgggtctctccgggaaggtgaaacgcgacgccgagaagaaagaccagatgaaggctgacctcactgcgcttttcctgccgcggcagccgcccatgtcgctggccgaggcggagcagctgatggaggagtggaacgaagacctagacggcatggagggtttcgtgctggagggcaagaagtttgcgcggctgccggaagaaggagtttggccacttctacacgcaggactgctacgtcttcctctgcaggtactgggtgcctgtggagtacgagggaggagaaaaagaaagaagacaagggaggaaaaggccgagggccaaagaaaggcgagggaagcaacccgcctganggcagaggnagaaaacagnccagaggaagggaccttcccagtg

SEQ ID NO: 165410 - DNA, 247 bp, Homo Sapiens
atgtggagaaggtgctggggcaacacggaggacaactgtggtcgtgtcagctccgcaaggtcgatgagcgtgcctggttactgcactgactgtttccttccgagtcaggcagggttaaggtagccacctcgccattgatgacctgcccttcaataattgttttgtaagagttgatgacccgggagaggttgtcactggcttgcaggatgtcccccaaactgttatcattgtcctcagtctcactggc

SEQ ID NO: 165411 - DNA, 569 bp, Homo Sapiens
  misc_feature (196)..(196): n is a, c, g, or t
  misc_feature (281)..(281): n is a, c, g, or t
  misc_feature (300)..(300): n is a, c, g, or t
  misc_feature (311)..(311): n is a, c, g, or t
  misc_feature (360)..(360): n is a, c, g, or t
  misc_feature (390)..(390): n is a, c, g, or t
  misc_feature (396)..(396): n is a, c, g, or t
  misc_feature (408)..(408): n is a, c, g, or t
  misc_feature (415)..(415): n is a, c, g, or t
  misc_feature (446)..(446): n is a, c, g, or t
  misc_feature (455)..(455): n is a, c, g, or t
  misc_feature (488)..(488): n is a, c, g, or t
  misc_feature (495)..(495): n is a, c, g, or t
  misc_feature (525)..(525): n is a, c, g, or t
  misc_feature (546)..(546): n is a, c, g, or t
ccggtaccagttcaatcagcttctcatctgcggaaagcacagaacttgagtggcaatgtgtggtggctttggcaacagatcccaatatcctgagcctgagtggtaaggtgctgccatcctgtgaccttgctcgacgctatggccttcgggatgtggacggccgccccgtccaagactatttgtctttgagctctgntctctcaaacgtgtccggcctgggctggctggcctcctacctgccctccttcctccgtgtgcccaagtggattattgccctctanactagcaagttctaacccncctggtctganactacgtctctgcttgtcttctcatttggacttggtggttcgtcctgtnctcagtgaaacagtcagcctttcttgtttncccatncccttgatatgnagagaantccctctgcctgtgtgtcccgtggtgagttnctggggtgncccctaggttcccttctttgtgccttggttttnccttgtnccttctttttactttttgccttagtattgnaaaatgtctacttggagtctnataaaaaaacttatttctacttt

SEQ ID NO: 165412 - DNA, 408 bp, Homo Sapiens
  misc_feature (374)..(374): n is a, c, g, or t
aaagagaaatgagacttttattagctccaagagcatttttcaatacaaaggcaaaaagtaaaaagaagaacaaggaaaacaaaggcacaaagaagggacctaggcgcacaacagaactcaccacggacacacagcagagggcttctcttcatatcaagggtatgggtaaacaagaaaggctgctgtttcactgagacaggacgaaccaccaagtccaaatgagaagacaagcagagacgtagtgtcagacccaggagggttagaacttgactagtgtagagggcaataatccacttgggacacacggaggaaggagggacaggtaggaaggaccagaccagacccaggacaggacacgtgtgagagaacagagnctcaaagacaaatagtcttggacggggcggccgt

SEQ ID NO: 165413 - DNA, 264 bp, Homo Sapiens
ggtccgaggagatatggagaatatggaatatctatttagaaatataagaatctttccagactctctggagtcttccaccagatgatgcataaagaacatccctagtaaataggaacccaagaaaatagctgaaggccaatactgatctgtgactcctgcattaggagatggacttccagagtagaaagttctccacatctcttttccttagtagctcgccattgccatcatatctccgaccctccttcctccccgggatacagg

SEQ ID NO: 165414 - DNA, 623 bp, Homo Sapiens
cccatacagagtaacaactggcttggtgtgggcccaaggcaagtaataatagtagttgccatcaaatacagcacggctgtactgagttgttgatgccaaaggcttacaggtggggtcaaacattgttgccatagttcccaatgctgacttcaaactgaatggcctcaccaacatcttgcaacatgggtggctgaatgaaacacggcagaacaggctgtacttccgccttcgctggtatttctcaacaaccagcaggtcatcattttgaaatgggctcaagctttttatctggttggtgtcttctcaagaaaaggtggctaattcaaccaagatcctgcctctgtaggcaactccttcccccttgccagtattcagctcatcataaggggtcatgggaatcccgtgtactctcatggggcgtccaataaagattcagggtaacaaggtccaatacgttggaacaaagcctacctctgtttctcctgtgtttactgtatatgatgcagccccagttcccgaagatgagaaatcttccacttccccaccagaggcagcaattttagagagtgtatatatctgttccaactacatcatttttattaatacttcctcagtcatatata

SEQ ID NO: 165415 - DNA, 1881 bp, Homo Sapiens
  misc_feature (1181)..(1248): n is a, c, g, or t
  misc_feature (1420)..(1450): n is a, c, g, or t
tattttcctttctttgttccctgtacggcctcactgagcgcgtgattagaccctcatggccgactccaatgggttcagagatagttttactttattatttgcatacttgatttaattgaatagagtatataattaaagttttgattcttatgtgtttttattagcccagacatctgtaatgtttttgcactggtgacagacaaaatctgttttaaaatcatatccagcacaaaaactatttctggctgaatagcacagaaaagtattttaacctacctgtagagatcctcgtcatggaaaggtcccaaactgttttgaatggaagaacaagtaagagtgaggccacaagttcccaccacacgagggcttttgtattgttctactttttcagccctttactttctggctgaagcatccccttggagtgccatgtataagttgggctattagagttcatggaacatagaacaaccatgaatgagtggcatgatccgtgcttaatgatcaagtgttacttatctaataatcctctagaaagaaccctgttagatcttggtttgtgataaaaatataaagacagaagacatgaggaaaaacaaaaggtttgaggaaatcaggcatatgacttaatacttaacatcagatctattctataatatcctactactttggttttcctagctccataccacacacctaaacctgtattatgaattacatattacaaagtcataaatgtgccatatggatatacagtacattctagttggaatcgtttactctgctagaatttaggtgtgagattttttgtttcccaggtatagcaggcttatgtttggtggcattaaattggtttctttaaaatgctttggtggcacttttgtaaacagattgcttctagattgttacaaaccaagcctaagacacatctgtgaatacttagatttgtagcttaatcacattctagacttgtgagttgaatgacaaagcagttgaacaaaaattatggcatttaagaatttaacatgtcttagctgtaaaaatgagaaagtgttggttggttttaaaatctggtaactccatgatgaaaagaaatttattttatacgtgttatgtctctaataaagtattcatttgataaaaaacacacaacaaaccctaaacacacaaaccaccttaannnnnnnnnnnnnnnnnnnnnnnnnnnnnnnnnnnnnnnnnnnnnnnnnnnnnnnnnnnnnnnnnnnntcaatccactcatgtcactcgtccaccctttccccctttccctttccctcaatcggattgcccatccctcacctccttttacactttccctatcccttatacagccttttcgctttggcgtcacccgcgaccctcccccatgtaaaatacttttccgattctgaactcacannnnnnnnnnnnnnnnnnnnnnnnnnnnnnntacccttcatttgctccacatcccacattcccccacccccttccccttgccgctcctctcccgtctacaccctcctatcactcttgtgtgccccgccaatagcgcgtccgctcctcgtaccgcctcccccctccccgcatatatatatttccccgcccctcccgcacacagcacagtatgtcttacaccccccacaacaccactttcttcaccgccgcgcgtatacacacacgcgtgttttcacagtccgtgtaccccttttttacacctgccacccttcatacatagcgcctccccctcccgccatatccttacatctttcattctcgcaattatcaccaaatcagccatacctttatctgcacccgcgcctattgaaactcctactactcacccagccacatgcgaccctcttatccgcttccaccgtt

SEQ ID NO: 165416 - DNA, 612 bp, Homo Sapiens
ccttccaacatctcatttctactcccttggtccttttgtttttgttctggactcttgggagtggaaatgagaatgagtttattcctactggagcttagttccaatgcatttggctccagaaagaccccagtgccttttgacaatggccagggttttacctacttcctgccagtctttcccaaaggaaactcattccaaatacttcttttttcccctggagtccgagaaggaaaatggaattctggttcatactgtggtcccttgtaacctcaggtctttaatgtgatcactttcaaatttaaaagatccaggtggaaatatttttactatagtaataattctacaaaatacctgaattcttaacactgttatatttcagtataagtggtggctttttcttttcatgtctttgatctggttttattcctgtaattcagccacctgattttgtgaggggggggaataatatgtggtttttgtacaaacatgtttctcagtgtgttgttattttggaaaaaatgaggggagggagtttggcaagaatggagaaaatgaatgaagaaggcctaatctctctctttttcagtgaataaatggaacaccatttctgga

SEQ ID NO: 165417 - DNA, 639 bp, Homo Sapiens
ggatagggaggtgtttataaaacacttgagaacttttttccttaatatcagaaagcaaaaaaataaaaccacaattgagatttgcctttcaaaccctcaggtttgcctctaaccaggtgtccctggtcaccatcagagtactggaatacggggaaccgagggagacccttggtccttttgtttttgtttctggactccttgggagtgggaaatgagaaatgagttttattccctactgggagcttagtttccaattgcattttggctccagaaaagaccccagtgccttttgacaatggccagggttttacctacttcctgccagtctttcccaaaggaaactcattccaaatacttcttttttcccctggagtccgagaaaggaaaatggaattctggttcatactgtggtcccttgtaacctcaggtctttaatgtgatcactttcaaatttaaaagatccaggtggaaatatttttactatagtaataattctacaaaatacctgaattcttaacactgttatatttcagtataagtggtggctttttcttttcatgtctttgatctggttttattcctgtaattcagccacctgattttgtgaggggggggaataatatgtgggtttttgtacaa

SEQ ID NO: 165418 - DNA, 345 bp, Homo Sapiens
ccagggcagcaagggccctggcgaggacttccgaatggcaaccctctaaagccgaacccagacccccagggctgagttaaaggagaaattcaccgccttctgcaaggcccagggcttcacagaggataccattgtcttcctgccccaaaccgataagtgcatgacggaacaataggactccccagggctgaagctgggatcccggccagccaggtgacccccacgctctggatgtctctgctctgttccttccccgagcccctgccccgctccccgccaaagcaccccctgccactcgggcttcatcctgcacaataaactccggaagcaagtcagtagagctgg

SEQ ID NO: 165419 - DNA, 383 bp, Homo Sapiens
  misc_feature (40)..(40): n is a, c, g, or t
  misc_feature (185)..(185): n is a, c, g, or t
  misc_feature (188)..(188): n is a, c, g, or t
aacttcaaacccctggggaaatccctaatgttcccgtcangcaacttaacggtttggggcaaggaaagacaaggtaaccctctgtgaaacccctgggccttgcaaaaaggcggtgaaatttctcctttaaactcaagccctgggggtctgggttcggctgtagagggtggccatgcggaagtccntcncagggcccttgctgccctggctgtacagcagcgcgtactggtcgtagtcggtctccaccactgggaaaaaagttctcaagtgttttataaacacctccctataccctctcatatgtaaagctttagaaaatatatagaaaaagatatccaaaagatgtccaccttgcattctaaataatgaaactgccacttgag

SEQ ID NO: 165420 - DNA, 469 bp, Homo Sapiens
ctaaggatcccgtgatccccatacagagtacgagacccccctagatgtagagtggagggagggtggcttaagagttgagctctcggaactgcatgctgctggacaggtatcactgtctttcctagatggcagtcactgaattccattttttcaaggtaatttcttgtgcctctaatagcccaagaatgggaggttgatcagatctgacatgattccttcctgttctgaactgtggggtgtgcacatctctgcttgagtcaggtttgagtagaggcttagagacagttgggtgagaacaaccaaaatcttatcatggtctcagtcataatcattagggaaaactctagccaaatggtttaacttctgcctgtggaactggggattgggtgggcaggaaaaggtgatatccattctttctgataactagatggtgctgagaagcttttgaataaaaactttgctaaatgag

SEQ ID NO: 165421 - DNA, 822 bp, Homo Sapiens
  misc_feature (705)..(765): n is a, c, g, or t
cacatatatgagccgcagaaactgaaaaggagataaaaatctcaaatcagctaggaaaagttaccttcataggatctatagttaatagtttatgctgtaaactattaacaacaatgattgtttaatgctacaagtttacagcaaagacaaaactaaaatagcagcaaattcacaaggcaatacctccacagaatcatcatcccatggttcatgcaatgcctacaaagtgctcccagtgggaatagtttatgctgtacagcataaactattcccaaaagcacacttcatgtgcctcttcttcttttcttgtttcctcagtatggaaaggagtgaacttactgtgaggcatctgaaatatttattaaagccaggcagcaagaagaataaacaaggatttttctatctacaatcatcaataagaagctgaaaagaatgtatcagctgcatctatcttggatggtcttctgactagttgctactgtccaaggaaagaggccatggggtcatctggcctctgacgtttcattctatatgcctccatttcctcttcagtaggttctcgagtttcatacatgctattgtaaggccgcttcctctcatcaatctgcatggtctccttgacatgaagaaggcgggcctcctctgcgttcagtgcctttttcaatttttcatgcttcttttcttcatcatcactatctgaactgnnnnnnnnnnnnnnnnnnnnnnnnnnnnnnnnnnnnnnnnnnnnnnnnnnnnnnnnnnnnngatgcagctccatgagggtttgaggttttttcacaggtagatatagaagagtgcact

SEQ ID NO: 165422 - DNA, 1363 bp, Homo Sapiens
  misc_feature (481)..(493): n is a, c, g, or t
  misc_feature (720)..(729): n is a, c, g, or t
tttagacaattaaggtaagctcagagtgacttttaatatgccaatcaatgttaataaaacacaagtcaaagacaagtgcaaacatgttttagaccaaaattaatgagaaaacaaacagacaatttttttcaacatctgttagccagtattattagtcaaatggctaatcacagataaaatatattttgtgaaaaacttggaatgtcagaagtcattctggcatttcaaacagctatgtacagtatcacgaagatcggtttatatacacaaatattgaagagaaaaaccgggcaaaacatttaaaaacagactaataatacaatcaagtataaaacttagggggagacatttaaaaagagtccgggaaggacattaccagaacaagttacaaaaccagtaattattatactacattaatacagcattccaaaggagggaaagggtgcatttttccaatgcactagcttcaaagttcaaaggnnnnnnnnnnnnnggcaaatagctgcttttcatcaaaagcagctatacatttcacataattgtttcaaaaagaagacctattaacaacaatgattgtttaatgctacaagtttacagcaaagacaaaactaaaatagcagcaaattcacaaggcaatacctccacagaatcatcatcccatggttcatgcaatgcctacaaagtgctcccagtgggatatacaagtctaattcacaattnnnnnnnnnngaaatataagatggacacacaggtacattgaaggctgagtagtaatgagtcttttagcatgtcccttttcaaagggagggtatgtctgtaataaagcccttgagtactttttacaggtcactacagggaaagacaccttttattacaatgcaacagcaaactataagcagcacaccaccacagtggttaaccctggaaaggctggtgtaacatccaacagtgacacatcctacagaagacagactggtaagattagatgaaagcctgacatagcaatcatcaaaatacagctttcaactgtaattcacaataaaagtcctaatcagtaaaactactgacaccaatcgagaaagtaattgcaaactggattctatcagtgatttcaacctagcttcctcttgtcacagtgttcagggggaggtgggaaaggagtagctcagtatatagtaaggctgacagagcggttcattttctttccaataagtcgagatgttctattactctgggtggtggacctagtggccatccggtcagtgaagagtgctctttcctcagctgcagcttttgccatctgtgctttcttgagttctctgacataaaaatagaaaacaaggtattattcctaggaagagat

SEQ ID NO: 165423 - DNA, 989 bp, Homo Sapiens
cttcgatatctaccgactcctggctcagtgcccagtgctacccaaacccagagcacccctacagtccaggccagcaagcccaggccccaggtgaccccgcagcctcaaaccccagttcagcccccgtctgtggctacccctcagtcatcgcagcaacagccgacgcctgtgcacagcccagcctcctggcacaccgctttcccaggcagcagccagcattgataacagagtccctaccccctcctcggtggccagcgcagaaaccaattcccagcagccaggacctgacgtacctgtgctggaaatgaagacggagacccaagcagaggacactgagcccgatcctggtgaatccaaaggggagcccaggtctgagatgatggaggaggatttgcaaggagcttcccaagttaaagaagaaacagacatagcagagcagaaatcagaaccaatggaagtggatgaaaagaaacctgaagtgaaagtagaagttaaagaggaagaagagagtagcagtaacggcacagcctctcagtcaacatctccttcgcagccgcgcaaaaaaatctttaaaccagaggagttacgccaggccctcatgccaaccctagaagcactgtatcgacaggacccagagtcattacctttccggcagcctgtagatccccagctcctcggaattccagactattttgacatcgtaaagaatcccatggacctctccaccatcaagcggaagctggacacagggcaataccaagagccctggcagtacgtggacgacgtctggctcatgttcaacaatgcctggctctataatcgcaagacatcccgagtctataagttttgcagtaagcttgcagaggtctttgagcaggaaattgaccctgtcatgcagtcccttggatattgctgtggacgcaagtatgagttttccccacagactttgtgctgctatgggaagcagctgtgtaccattcctcgcgatg

SEQ ID NO: 165424 - DNA, 274 bp, Homo Sapiens
atcattttcttcttccggaagagaagaggaatcataaatgcaatctgactagaggaaggttttaacaaacctgtttaaggcttgtaagagtcttcccgtgaggttgcggtaacataaaggtgtttgatattcatatgttatctgtaatgtttttctcaagatgatggaggaggatttgcaaggagcttcccaagttaaagaagaaacagacatagcagagcagaaatcagaaccaatggaagtggatgaaaagaaaccggaagaagaaaatgat

SEQ ID NO: 165425 - DNA, 803 bp, Homo Sapiens
  misc_feature (735)..(735): n is a, c, g, or t
  misc_feature (738)..(738): n is a, c, g, or t
  misc_feature (777)..(777): n is a, c, g, or t
taccgcctgaagcaaatttccttacatattcttgtctctgtgtaagctgaatgatcgatgtggtcttttacttggctccctctgctctgttttttggtcctaatttgccagcagtgggggttaccaggcactactttcaatgtagtagactcagcagttctatatcatgcaaattgtaaatgtagagtagaatgtaattgtaacgtagaatgttagaaccaaagatcttagaagttattttctgccttgcccagatctcctgactgatttgaggatcttttctttgttcccattcagcttcacagggacaagggttgggggtggtatcagaggacagccccttagtctcccaagagcactttgatgcttgatcccattctctacattcccccagcccagtcatctaaggccagagctcttttctctgctcaggcattattgacaggataagtcctggcattcagacaggtctggtgaagtgaccaggtactctggcccagaagttctctgtcggctccccccgcaggctccaattcaggtaaactgtcttgagccccaccctcacctgcctgtgctggcaaccagtggcctagaccatgatgtgaagatctgggcacccacagctgaagcttccactgagctgacagggttaaaagatgtgattaagaagaacaagcgggagccgggatgaagatagcttgcaccaaactgacctgtttgatagtcacatgctgnggntccttatgcatcacctgagacagagacgccattaccggngcttggcgaaaacctggggtttgggg

SEQ ID NO: 165426 - DNA, 1070 bp, Homo Sapiens
cgaggcctgggtggcaatctcggacgaggcgctggtggcctccgggcagaagcgggagatgggtgcctcgctctacgtcggctgggccgcctccggcctgctgctccttggcggggggctgctttgctgcaactgtccaccccgcacagacaagccttactccgccaagtattctgctgcccgctctgctgctgccagcaactacgtgtaaggtgccacggctccactctgttcctctctgctttgttcttccctggactgagctcagcgcaggctgtgaccccaggagggccctgccacgggccactggctgctggggactggggactgggcagagactgagccaggcaggaaggcagcagccttcagcctctctggcccactcggacaacttcccaaggccgcctcctgctagcaagaacagagtccaccctcctctggatattggggagggacggaagtgacagggtgtggtggtggagtggggagctggcttctgctggccaggatggcttaaccctgactttgggatctgcctgcatcggtgttggccactgtccccatttacattttccccactctgtctgcctgcatctcctctgttgcgggtaggccttgatatcacctctgggactgtgccttgctcaccgaaacccgcgcccaggagtatggctgaggccttgcccacccacctgcctgggaagtgcagagtggatggacgggtttagaggggaggggcgaaggtgctgtaaacaggtttgggcagtggtgggggagggggccagagaggcggctcaggttgcccagctctgtggcctcaggactctctgcctcacccgcttcagcccagggcccctggagactgatcccctctgagtcctctgccccttccaaggacactaatgagcctgggagggtggcagggaggaggggacagcttcacccttggaagtcctggggtttttcctcttccttctttgtggtttctgttttgtaatttaagaagagctattcatcactgtaattattattattttctacaataaatgggacctgtgcacaggaaaaaa

SEQ ID NO: 165427 - DNA, 1011 bp, Homo Sapiens
ggcctgggtggcgaattcggcacgagggtcggctggaaggaactggtctgctcacacttgctggcttgcgcatcaggactggctttatctcctgactcacggtgcaaaggtgcactctgcgaacgttaagtccgtccccagcgcttggaatcctacggcccccacagccggatcccctcagccttccaggtcctcaactcccgcggacgctgaacaatggcctccatggggctacaggtaatgggcatcgcgctggccgtcctgggctggctggccgtcatgctgtgctgcgcgctgcccatgtggcgcgtgacggccttcatcggcagcaacattgtcacctcgcagaccatctgggagggcctatggatgaactgcgtggtgcagagcaccggccagatgcagtgcaaggtgtacgactcgctgctggcactgccgcaggacctgcaggcggcccgcgccctcgtcatcatcagcatcatcgtggctgctctgggcgtgctgctgtccgtggtggggggcaagtgtaccaactgcctggaggatgaaagcgccaaggccaagaccatgatcgtggcgggcgtggtgttcctgttggccggccttatggtgatagtgccggtgtcctggacggcccacaacatcatccaagacttctacaatccgctggtggcctccgggcagaagcgggagatgggtgcctcgctctacgtcggctgggccgcctccggcctgctgctccttggcggggggctgctttgctgcaactgtccaccccgcacagacaagccttactccgccaagtattctgctgcccgcctctgctgctgccaacaaactacgttgtaagggggccaacggcttccactccggttccctcctcggcctttggatccttccccttggaaatggagcctcagccgccaggggttgtggaacccccccgggaaaggggcccctggcccacaggggcccacatgtggcctgccttggggggaaacctggtgggga

SEQ ID NO: 165428 - DNA, 727 bp, Homo Sapiens
tcggctggaaggaactggtctgctcacacttgctggcttgcgcatcaggactggctttatctcctgactcacggtgcaaaggtgcactctgcgaacgttaagtccgtccccagcgcttggaatcctacggcccccacagccggatcccctcagccttccaggtcctcaactcccgcggacgctgaacaatggcctccatggggctacaggtaatgggcatcgcgctggccgtcctgggctggctggccgtcatgctgtgctgcgcgctgcccatgtggcgcgtgacggccttcatcggcagcaacattgtcacctcgcagaccatctgggagggcctatggatgaactgcgtggtgcaaagcaccggccagatgcagtgcaaggtgtacgactcgctgctggcactgccgcaggacctgcaggcggcccgcgccctcgtcatcatcagcatcatcgtggctgctctgggcgtgctgctgtccgtggtgggggggcaagtgtaccaactgcctggaggatgaaagcgccaaggccaagaccatgatcgtggcgggcgtggtggtcctgttggccggccttatggggatagtgcccgttgtcctggacggcccacaacatcatccaagacttctacaatccggtggggggcctccgggcaaaaacgggaagaagggtggcctcgcttctacgtcgggtggggcccgcctccgggcctggttggttcctt

SEQ ID NO: 165429 - DNA, 859 bp, Homo Sapiens
ctggtggcctccgggcagaagcgggagatgggtgcctcgctctacgtcggctgggccgcctccggcctgctgctccttggcggggggctgctttgctgcaactgtccaccccgcacagacaagccttactccgccaagtattctgctgcccgctctgctgctgccagcaactacgtgtaaggtgccacggctccactctgttcctctctgctttgttcttccctggactgagctcagcgcaggctgtgaccccaggagggccctgccacgggccactggctgctggggactggggactgggcagagactgagccaggcaggaaggcagcagccttcagcctctctggcccactcggacaacttcccaaggccgcctcctgctagcaagaacagagtccaccctcctctggatattggggagggacggaagtgacagggtgtggtggtggagtggggagctggcttctgctggccaggatggcttaaccctgactttgggatctgcctgcatcggtgttggccactgtccccatttacattttccccactctgtctgcctgcatctcctctgttgcgggtaggccttgatatcacctctgggactgtgccttgctcaccgaaacccgcgcccaggagtatggctgaggccttgcccacccacctgcctggggagtgcagagtggatggacggggtttagaggggaggggcgaaggtgctgtaaacaggttttgggcaatggtggggggaagggggccagaagagggcggctcagggttgccccagctctgttggcctcagggaatctctgccctccacccgctttcaagccccaggggccccctgggaggactggatccc

SEQ ID NO: 165430 - DNA, 882 bp, Homo Sapiens
ccgcccgcccacaaagccacaggcaggtgcaggcgcagccgcggcgagagcgtgtggagccgagccgttagcgcgcgccgtcggtgagtcagtccgtccgtccgtccgtccgtcggggcgccgcagctcccgccaggcccagcggccccggcgcctcgtctccccgcacccggagccacccggtggagcgggccttgccgcggcagccatgtccatgggcctggagatcacgggcaccgcgctggccgtgctgggctggctgggcaccatcgtgtgctgcgcgttgcccatgtggcgcgtgtcggccttcatcggcagcaacatcatcacgtcgcagaacatctgggagggcctgtggatgaactgcgtggtgcagagcaccggccagatgcagtgcaaggtgtacgactcgctgctggcactgccacaggaccttcaggcggcccgcgccctcatcgtggtggccatcctgctggccgccttcgggctgctagtggcgctggtgggcgcccagtgcaccaactgcgtgcaggacgacacggccaaggccaagatcaccatcgtggcaggcgtgctgttccttctcgccgccctgctcaccctcgtgccggtgtcctggtcggccaacaccattatccgggacttctacaaccccgtggtgcccgaggcgcagaagcgcgagatgggcgcgggcctgtacgtgggctgggcggccgcggcgcttggactggctgatgggcaccctgctcttgctggtcctgccccatctcatcataagaaaggcacgggacaccttggttctccttaattcgtggaagacgttgttacaggcttcggggatttgagagcaggggggagaagggcttgtttatcggcattgac

SEQ ID NO: 165431 - DNA, 943 bp, Homo Sapiens
  misc_feature (485)..(485): n is a, c, g, or t
  misc_feature (515)..(515): n is a, c, g, or t
  misc_feature (571)..(571): n is a, c, g, or t
  misc_feature (714)..(724): n is a, c, g, or t
aggaactggtctgctcacacttgctggcttgcgcatcaggactggctttatctcctgactcacggtgcaaaggtgcactctgcgaacgttaagtccgtccccagcgcttggaatcctacggcccccacagccggatcccctcagccttccaggtcctcaactcccgcggacgctgaacaatggcctccatggggctacaggtaatgggcatcgcgctggccgtcctggggctggctggccgtcatgctgtgctgcgcgctgcccatgtggcgcgtgaacggccttcatcggcagcaacattgtcaccttcgcagaccatctgggagggcctatggatgaactgcgtggtgcagagcaccggccagatgcagtgcaaggtgtacgactcgctgctggcactgccgcaggacctgcaggcggcccgcgccctcgtcatcatcagcatcatcgtggctgctctgggcgtgctgctgtccgtggtgggnggcaagtgtaccaactgcctggaggatganagcgccaaggccaagaccatgatcgtggcgggcgtggtggttcctggtgggccggncttatggtgatagtgcccgtggtcctggaccggccacaacatcatccaagacttctacaatccgctgggggcctccgggcaaaaccggaagatgggtggctcgctctaactcgggttggccgcctccggcctggtggttcctnnnnnnnnnnntgtgttttgtgggaattgggccccccccgaacagaaaaagcctttaattcccccaaggatttttggtggccccgctttggttgggtggcaaaaaattaagggggaaaggggggcacaggttcccacctcggggccccccccgggccttggggtcttcccccgggaagggaaatccaaccgcgagggtgtgtgacccccccaggaaggggggcccccgcg

SEQ ID NO: 165432 - DNA, 1058 bp, Homo Sapiens
  misc_feature (178)..(178): n is a, c, g, or t
ggcaggtgcaggcgcagccgcggcgagagcgtatggagccgagccgttagcgcgcgccgtcggtgagtcagtccgtccgtccgtccgtccgtcggggcgccgcagctcccgccaggcccagcggccccggcccctcgtctccccgcacccggagccacccggtggagcgggccttgcncgcggcagccatgtccatgggcctggagatcacgggcaccgcgctggccgtgctgggctggctgggcaccatcgtgtgctgcgcgttgcccatgtggcgcgtgtcggccttcatcggcagcaacatcatcacgtcgcagaacatctgggagggcctgtggatgaactgcgtggtgcagagcaccggccagatgcagtgcaaggtgtacgactcgctgctggcactgccacaggaccttcaggcggcccgcgccctcatcgtggtggccatcctgctggccgccttcaggctgctagtggcgctggtgggcgcccaatggcccccctgcctgcaggacgacccgccctaggcgcccagcagcgttcggggcaggcccggctgttctctcctcgcccccctgaatacccgtctgtgccggcgttaatggatggaccaaccccccaatcacggaaagcagcggggacccaacagatgaagcctgaagacgtccgactccctcgatacaaaatggaagggcgatcgtgggcggggcgggggcggcggcggccgcatggctgccccctgtgtcggccccggcggctcgaaaccggcgcggcgaggaagggggaggagctcgcggacgggacaaacaaatgagcagttggtgcgcggagcataatgggtgtcagtgacacggtgggcggcccgatcgcccgacgatgtggcgggacagcactgctggaggtgagcgcttggtggccgacgcggcaaccccgccgttcgcgcaccatgtaggagcggccccgtctagccgcgccgacccgacttctctcttctcgcctgctcgccgatcacgcttactcaactagatacccgatcatacgccgtgtaataacgcccg

SEQ ID NO: 165433 - DNA, 956 bp, Homo Sapiens
  misc_feature (455)..(455): n is a, c, g, or t
  misc_feature (458)..(458): n is a, c, g, or t
  misc_feature (462)..(463): n is a, c, g, or t
  misc_feature (469)..(469): n is a, c, g, or t
  misc_feature (473)..(473): n is a, c, g, or t
  misc_feature (482)..(482): n is a, c, g, or t
  misc_feature (488)..(489): n is a, c, g, or t
  misc_feature (506)..(506): n is a, c, g, or t
ctggtggcctccgggcagaagcgggagatgggtgcctcgctctacgtcggctgggccgcctccggcctgctgctccttggcggggggctgctttgctgcaactgtccaccccgcacagacaagccttactccgccaagtattctgctgcccgctctgctgctgccagcaactacgtgtaaggtgccacggctccactctgttcctctctgctttgttcttccctggactgagctcagcgcaggctgtgaccccaggagggccctgccacgggcaactggctgctggggactggggactgggcagagactgagccaggcaggaaggcagcagccttcagcctctctggcccactcggacaacttcccaaggccgcctcctgctagcaagaacagagtccaccctcctctggatattggggagggacggaagtgacagggtgtggtggtggagtggnganctgnnttctgntggncaggatggntataanntgaatttgtgatttgcntgaataagtgttggacaatgtgacattaaaatttataagaataggacagcctgaatctcctccgatcgcgaccaaggcttaaatatacccacggggaatgcgcacttgctcaaaaaaaccccaagcccaggaaaaccgattgatgacatgaacaaaaaaccatgaattgaaaagtgtatagccccatcccccttattattttcagcggcacccaacgcaccacccaccacagactgcggaaactggtggtaacgaagaccgtgcacaagaggattaagatatacgtcccaatcgagtgagacaatctcacagtcggaattgctgcagaaccacaacatcggaatgaccgcactcccacgtcttctccgtacgccacgaaatatgccgtcccatacaaaaagcgcgacagacacccaactaacaaaccgcgcccccacatatggagcaaca

SEQ ID NO: 165434 - DNA, 1074 bp, Homo Sapiens
  misc_feature (505)..(513): n is a, c, g, or t
  misc_feature (555)..(555): n is a, c, g, or t
  misc_feature (568)..(568): n is a, c, g, or t
  misc_feature (571)..(571): n is a, c, g, or t
  misc_feature (575)..(730): n is a, c, g, or t
atattcgagagtgagtcagttggatgatgcgtcgtcgcgtggtatgagcgagagagacggggtgatccaactgatgccgcagcgcggatcgacgagatgtgacgagatgcggtgcagtgtgtgatatcgcggacgcgtgtaacgagcggcgtgtagggtggtgggtatgtgctgaggtgagtgctgactgtgtgctgtattgggtccatggggcgagtgtgtataccggttatggtgagatagacaacagcaggctaggaacgagcggagtggtaggaagaacgtcgggcgtggggagggggagagaactcatggacagacggatggacacctcgcggaatggatctggagttaggtagtacggtgcgtggggagctggaagtggggtaggccgaggggtgggagtgcgtcatacgatgcttagcctaatgaaggttggtgggtatgctgggacacgctatacgtggttgaggaagaagaccggagttgggtgtgtcgtggtgannnnnnnnntgagagattagtgaagagagataactaatgtagttaatattntcttattattttnttnttannnnnnnnnnnnnnnnnnnnnnnnnnnnnnnnnnnnnnnnnnnnnnnnnnnnnnnnnnnnnnnnnnnnnnnnnnnnnnnnnnnnnnnnnnnnnnnnnnnnnnnnnnnnnnnnnnnnnnnnnnnnnnnnnnnnnnnnnnnnnnnnnnnnnnnnnnnngcgagctggagcgcgcaccaggccatccagcgtgcagccttgcctcggaggccagcccacccccagaagccaggaagcccccgcgctggactggggcagcttccccagcagccacggctttgcgggccgggcagtcgacttcggggcccagggaccaacctgcatggactgtgaaacctcacccttctggagcacggggcctgggtgaccgccaatacttgaccaccccgtcgagccccatcgggccgctgcccccatgctcgcgctgggcagggaccggcagccctggaaggggcacttgatatttttcaataaaagcctttcgttttgctaaccacaacaag

SEQ ID NO: 165435 - DNA, 425 bp, Homo Sapiens
  misc_feature (78)..(78): n is a, c, g, or t
  misc_feature (228)..(228): n is a, c, g, or t
  misc_feature (295)..(295): n is a, c, g, or t
  misc_feature (374)..(374): n is a, c, g, or t
  misc_feature (385)..(385): n is a, c, g, or t
  misc_feature (396)..(396): n is a, c, g, or t
  misc_feature (408)..(408): n is a, c, g, or t
cgggcaccacggggttgtagaagtcccggataatggtgttggccgaccaggacaccggcacgagggtgagcagggcgncgagaaggaacagcacgcctgccacgatggtgatcttggccttggcgtgttcgtcctgcacgcagttggtgcactgggcgcccaccagcgcaactagcagcccgaagcggccagcaggatggccaccacgatgagggcgcgggccgctgnaaggtcctgtggcagtgcagcagcgagtcgtacaccttgcactgcatctggccggtgctcttgccancggcagtttcattccacaggccctcccagatgttcttgcgacgttgatgatgtttgcttgccgattgaagggccgacanggggccacttngggcaacgggnaggacaacggtngttgcccagccaggccc

SEQ ID NO: 165436 - DNA, 973 bp, Homo Sapiens
ctcgtgaggatccctcctgtaatccaagcagtcggctacgacttcaaggctgacatctggtccctggggatcacagccatcgagctggccaagggggagcctccaaactctgacctccaccccatgcgcgtctgttcctgattcccaagaacagcccacccacactggagggccagcacagcaagcccttcaaggagttcgtggaggcctgcctcaacaaagacccccgattccggcccacggccaaggagctcctgaagcacaagttcatcacacgctacaccaagaagacctccttcctcacggagctcatcgaccgctataagcgctggaagtcagaggggcatggcgaggagtccagctctgaggactctgacattgatggcgaggcggaggacggggagcagggccccatctggacgttcccccctaccatccggccgagtccacacagcaagcttcacaaggggacggcccctgcacagttcacagaagcctgcggagcccgtcaagaggcagccgaggtcccagtgcctgtccacgctggtccggccccgtcttcggagagctcaaagagaagcacaagcagagcggcgggagcgtgggtgcgctggaggagctggagaacgccttcagcccctggccgaggagtcctgccccggcatctcagacaagctgatggtgcacctggtggagcgagtgcagagggtttcacacaacagaaaccacctgacatccacccgctgaagcgcactgctgtccagataggggacggaaaggtcgtacgtccccggcctgagctccataagaactgtgctgacttggaaggtgccctgtgctatgtcgtgcctgcagggacacgtcggatcccgtgggcctcccatgccacgtcaccaggtcaccgtctccttcaacccctgcagtgtgcttgtgtgccccttcagggaccctgtttctctatggcccactggcc

SEQ ID NO: 165437 - DNA, 676 bp, Homo Sapiens
caagatccaccgagacatcaaagctgccaacgtgctactctcggagcagggtgacgtgaagctggcggactttggggtagcagggcagctcacagacacgcagattaagaggaacacttcgtgggcacccccttctggatggcacctgaggtcatcaagcagtcggcctacgacttcaaggctgacatctggtacctggggatcacagccatcaaactggccaagggggagcctccaaactctgacctccaccccatgcgcgtcctgttcctgattcccaagaacagcccacccacactggagggccagcacagcaagcccttcaaggagttcgtggaggcctgcctcaacaaagacccccgattccggcccacagccaaggagctcctgaaggcacaagttcatcacacgctacaccaagaagacctccttcctcacggagctcatcgaccgctataagcgctggaaagtcagagggggcatgggcgaggaagtcccagctctggaagaactctgaacatttgatgggcaaaggcgggaaggacgggggaaccaagggccccccatctgggaacgttttcccccccttaaccattccggggccgaagattcccacacaaggcaaaagcttttcaccaaaaggggggaaacggggcccctgggaacaaagttttcc

SEQ ID NO: 165438 - DNA, 1401 bp, Homo Sapiens
gggggagctcccacagctaacatggcggcgccctgtgtgtcctacggcggagcagtttcgtaccggcttcttctctggggtaggggtagcctcgcccggaagcaaggcctctggaaaaccgcggcccctgagttgcaaacaaatgtcagatcccagatattaaggctaagacatactgcatttgtaataccaaagaaaaacgttcctacctcaaaacgtgaaacttacacagaggattttattaaaaagcagattgaagagttcaacataggaaagagacatttagccaacatgatgggagaagatccagaaactttcactcaagaagatattgatagagctattgcttaccttttcccaagtggtttgtttgagaaacgagccaggccagtaatgaagcatcctgaacagatttttccaagacaaagagcaatccagtggggagaagatggccgtccatttcactatctcttctatactggcaaacagtcatactattcattaatgcatgatgtatatggaatgttactcaatttagaaaaacatcaaagtcacttgcaagccaaaagtctgctcccagaaaaaactgtaaccagagacgtgattggcagcagatggctgattaaggaggaactagaagaaatgttagtggaaaaactgtcagatctagattatatgcagttcattcggctgctagaaaagttattgacatcgcagtgtggtgctgctgaggaagaatttgtgcagaggtttcgaagaagtgtaactcttgaatcaaaaaaacagctgattgaacctgtacagtatgatgagcaaggaatggcctttagcaaaagcgaaggtaaaagaaagactgcaaaagcagaagcaattgtttataaacatggaagtggaagaataaaagtaaatggaattgattaccagctttacttcccgatcacacaggacagagaacagctgatgttccctttccactttgttgaccggctgggaaagcacgacgtgacctgcacagtctcagggggcgggaggtcagcgcaggctggagcaatacgactggcaatggcaaaagccttgtgcagctttgtcaccgaggacgaggtcgagtggatgagacaagctggactacttactactgatccacgtgtgagggaacggaagaagccaggccaagagggagcccgctagaaagtttacgtggtaagaaacgctaagggtttgctcccaggaaaggagaggaagagctatatatatgtgccggcatgtggcagacacacagtaaataatggctgaccagcatgagggcagtactgtcagaaatttctttgagctgtgagatggatttattttttaaatgctacctttgtaaaggtggactttttaaaaaaattaaaggggaaa

SEQ ID NO: 165439 - DNA, 1174 bp, Homo Sapiens
  misc_feature (956)..(956): n is a, c, g, or t
  misc_feature (1103)..(1103): n is a, c, g, or t
  misc_feature (1107)..(1107): n is a, c, g, or t
gggttgtcaagcgcagacggcggccccgggacaagctcaaccctgagcaacagtgctatcagagacacctccaggacagccaagcagcggtcgggctccctccctccgaggagcagccaacctcccagagggaccgcctgagccaggtgctgcgagacctcgagcacgagagtacgcccattgtgaagctgggggatgccagcatcgcagcacccttcacctccaagctctcatccatccagtgcatctgccacgtgatcaagcagggccgctgcacgctggtgaccacgctacagatgttcaagatcctggcgctcaatgccctcatcctggcctacagccagagcgtcctctacctggagggagtcaagttcagtgacttccagggccaccctacaggggctgctgctggccggctgcttcctcttcatctcccgttccaagcccctcaagaccctctcccgagaacggcccctgcccaacatcttcaacctgtacaccatcctcaccgtcatgctccagttctttgtgcacttcctgagccttgtctacctgtaccgtgaggcccaggcccggagccccgagaagcaggagcagttcgtggacttgtacaaggagtttgagccaagcctggtcaacagcaccgtctacatcatggccatggccatgcagatggccaccttcgccataaattacaaaggcccgcccttcaaggaaaacctgcccgaaaaaaaacccctggtgtggaatctggcaatttcaactcccggccatcattggcctgctccccggctcctcgcccgacttcaacagccagtttggcctcgtggacatccctgtggagttcaagctggtcattgcccaggtcctgctcctggacttctgcctggcgctcctggccgaccgcgtcctgcagttcttcctggggaccccgaagctgaaagtgccttcctganatggcagtgctggtacccactgcccaccctggctgcgctgggcgggaaccccaacagggccccgggagggaaccctgcccccaaccccccacagcaaggctgtacagtctcgcccttggaagactgagctgggacccccacagccantccntgccttggccagcagaaccagccccaagccagcacctttggtaaataaagcagcatctgagatttta

SEQ ID NO: 165440 - DNA, 829 bp, Homo Sapiens
  misc_feature (532)..(532): n is a, c, g, or t
  misc_feature (634)..(634): n is a, c, g, or t
  misc_feature (664)..(664): n is a, c, g, or t
  misc_feature (723)..(723): n is a, c, g, or t
ttgcagtcagtccggtgtttgcaaatattgtgtgggctccgcgcgctgcgggctgcaggagggtccggccgggcgtctctgcgagcctggagtttgcatgaaactttcacctgcgctccggggagactttcggctccggctcccaccgcgcgcctcgccgccctcgcgaccgcgggctccgtccaacccggcccgacatggacgtgctccccatgtgcagcatcttccaggagctccagatcgtgcacgagaccggctacttctcggcgctgccgtctctggaggagtactggcaacagacctgcctagagctggaacgttacctccagagcgagccctgctatgtttcagcctcagaaatcaaatttgacagccaggaagatctgtggaccaaaatcattccggctcgggagaaaaaggaggaatccgaactgaagatatcttccagtcctccagaggacactctcatcagcccgagcttttgttacaacttagagaccaacagcctgaactcagatgtcagcagcgaatnctctgacagctccgaggaactttctcccacggccaagtttacctccgaccccattggcgaagttttggtcagctcgggaaaattgagctcctctgtcacctncacgcctccatcttctccggaactgagcanggaaccttctcaactgtggggttgcgtgcccggggagctgccttgccagggaaggtgcncagcgggacttcggggaagccaggtgacaagggaaaatggcgatgccttccccgacggcaggaagaaggtgcaccggtgccacttttaacggctgcaggaaagtta

SEQ ID NO: 165441 - DNA, 926 bp, Homo Sapiens
  misc_feature (55)..(96): n is a, c, g, or t
agcgcgagccccgccgccgccgagcatggacgaccccgactgcgactccacctgnnnnnnnnnnnnnnnnnnnnnnnnnnnnnnnnnnnnnnnnnnctgcgaggacggcgaggccgccggcgcgagggacgcggacgcaggggacgaggacgaggagtcggaggagccgcggacggcgcggcccagctcgttccagtccagaatgacagggtccagaaactggcgagccacgagggacatgtgtaggtatcggcacaactatccggatctggtggaacgagactgcaatggggacacgccaaacctgagtttctacagaaatgagatccgcttcctgcccaacggctgtttcattgaggacattcttcagaactggacggacaactatgacctccttgaggacaatcactcctacatccagtggctgtttcctctgcgagaaccaggagtgaactggcatgccaagcccctcacgctcagggaggtcgaggtgtttaaaagctcccaggagatccaggagcggcttgtccgggcctacgagctcatgctgggcttctacgggatccggctggaggaccgaggcacgggcacggtgggccgagcacagaactaccagaagcgcttccagaacctgaactggcgcagccacaacaacctccgcatcacacgcatcctcaagtcgctgggtgagctaggcctcgagcacttccaggcgccactgggccgcttcttcctggaggagacgctggtgcggcgggagctgccgggggtgcggcagagtgccctggactactccatggtcgccgtgcgctgccgacaccagcggcgccaggctggtgcacttcggcctgggagcaacttccggcccccgctgcaaggttcgtctgggggggcccccaagacaagcctggcggaggggttcaagg

SEQ ID NO: 165442 - DNA, 760 bp, Homo Sapiens
ctggctacccttcccttcgtctctgatggtgacatccaaacaataaatatgcaataaatagcgctcctgggctgggccgggccggctgccttcaaaccccactcggcccctaccagtcttctctggccaggacaggcctactggggtgctagatagtaaagtccccaaacatcccagggtcccacaagacctgggatccatctccattttgaggcccaggcctggtttccaaggagacctagcaaagctgggtccaggacagggccaggcaagcagggctggcaggtgggtgctgggaagaggctgttaccccagaccacagcttgttatgtcctggccaagacctcgactccaggccacaagatgacactgggctcaggagtagatggtgatgacttcacggccaccaccgcgcaccaacagcacccgctcaaggccctcggtcagcacctcgaggaactccatgtagttctcgtcgccctcactgttcctgggtgggccaggcatgtttaggagaaccaggcgggcgtcgtgggagcgcgtgacaatgacttcattgagcttcacagcagtgtgcatgcgccgcacattggattggtccggcttaatgtgcaccagctcccggaaattgttcaggggcatggctgggggtcccagggtttcagttcatgttatttgttccctgggtccacgttcatctgggatcttgttcagcccccactgcagactcatctttcctcgtccgagttacaggtcttcg

SEQ ID NO: 165443 - DNA, 980 bp, Homo Sapiens
  misc_feature (575)..(633): n is a, c, g, or t
gtgccggcacgctcagccccgaggccaagtccctgcttgctgggctgcttaagaaggaccccaagcagaggcttggtggggggcccagcgatgccaaggaggtcatggagcacaggttcttcctcagcatcaactggcaggacgtggtccagaagaagctcctgccacccttcaaacctcaggtcacgtccgaggtcgacacaaggtacttcgatgatgaatttaccgcccagtccatcacaatcacaccccctgaccgctatgacagcctgggcttactggagctggaccagcggacccacttcccccagttctcctactcggccagcatccgcgagtgagcagtctgcccacgcagaggacgcacgctcgctgccatcaccgctgggtggttttttacccctaactttttacttagcctttttggtttgtgtccccacccccacctccctctccccagggccccacgttctgcagccttaaggttgaacatgagtgcacgtccatgtcagtgctgtgggactcctgtgcgtgcctcggactgcgtgtgtcggcgggacgcaggcacacgtggnnnnnnnnnnnnnnnnnnnnnnnnnnnnnnnnnnnnnnnnnnnnnnnnnnnnnnnnnnnggcttgggccccatccctggcccgagcatttcatcctgtgggggaggggtgctgacctagtgggaggagccccactgtgatccatgagctgccctgcccacgcctcccctccctgtagcaacacctctgggtgtttggagtttagcttttgtgggtttgctctccctatcccatctcctgtactacacagttcatggcagggtggggaggggtggggttggttcgggtgggtgagggtctttttcctctgtgtgcgatgttgttatctgacagttctccgtccctactggcctttctcctcgtcttcatatttgtacggtacaagcaataaagacactcatttctga

SEQ ID NO: 165444 - DNA, 1190 bp, Homo Sapiens
ccagcacagagcgcatggtgctgtccagccagcagtggaagctgctgtcccagaaggagaaggacgcctatcacaagaagtgtgatcagaaaaagaaagattacgaggtggagctgctccgtttcctcgagagcctgcctgaggaggagcagcagcgggtcttgggggaagagaagatgctgaacatcaacaagaagcaggccaccagccccgcctccaagaagccagcccaggaagggggcaagggcggctccgagaagcccaagcggcccgtgtcggccatgttcatcttctcggaggagaaacggcggcagctgcaggaggagcggcctgagctctccgagagcgagctgacccgcctgctggcccgaatgtggaacgacctgtctgagaagaagaaggccaagtacaaggcccgagaggcggcgctcaaggctcagtcggagaggaagcccggcggggagcgcgaggaacggggcaagctgcccgagtcccccaaaagagctgaggagatctgccaacagagcgtaaccggcgaatacctggcccgcttcaagaatgaccgggtgaaggccttgaaagccatggaaatgacctggaataacatggaaaagaaggagaaactgatgtggattaagaaggcagccgaagaccaaaagcgatatgagagagagctgagtgagatgcgggcacctccagctgctacaaattcttccaagaagatgaaattccagggagaacccaagaagcctcccatgaacggttaccagaagttctcccaggagctgctgtccaatggggagctgaaccacctgccgctgaaggagcgcatggtggagatcggcagtcgctggcagcgcatctcccagagccagaaggagcactacaaaaagctggccgaggagcagcaaaagcagtacaaggtgcacctggacctctgggttaagagcctgtctccccaggaccgtgcagcatataaagagtacatctccaatcaacgtaagagcatgaccaagctgcgaggcccaaaccccaaatccagccggactactctgcagtccaaatcggagtccgaggaggatgacgaagaggatgaggatgacgaggacgaggatgaagaagaggaagatgatgagaatggggactcctctgaagatgcggcgactcctctcgcccggtgttcccagtca

SEQ ID NO: 165445 - DNA, 858 bp, Homo Sapiens
cttccggctctctgtggatggcaggtcatgtgaagacatcaatgagtgcagcagcagcccctgtagccaggagtgtgccaacgtctacggctcctaccagtgttactgccggcgaggctaccagctcagcgatgtggatggagtcacctgtgaagacatcgacgagtgcgccctgcccaccgggggccacatctgctcctaccgctgcatcaacatccctggaagcttccagtgcagctgcccctcgtctggctacaggctggcccccaatggccgcatactgccaagacattgatgagtgtgtgactggcatccacaactgctccatcaacgagacctgcttcaacatccagggcggcttccgctgcctggccttcgagtgccctgagaactaccgccgctccgcagccacccgctgtgagcgcttgccttgccatgagaatcgggagtgctccaagctgcctctgagaataacctactaccacctctctttccccaccaacattccaagcgcccgcggtggttcttccgcatgggcccctccacgtgctgtccccggggacagcatgcagctggccatcaccggcggcaatgaggagggctttttcaccacccggaaggtgagcccccacagtggggtggtggccctcaccaagcctgtccccgagcccagggacttgctcctgaccgtcaagatggatctctctcgccacggcaccgtcagctcctttgtggccaagcttttcatctttgtgtctgcagagctctgagcactgcttgcgtcgcggggtctccctcctgttgctttcctaacccttgctccggggcgttaataaagtcttagcaagcgtcccacaa

SEQ ID NO: 165446 - DNA, 694 bp, Homo Sapiens
  misc_feature (394)..(407): n is a, c, g, or t
ggttcgacgcctggttcaccccacacccgaaggtgccctcagggaccaattctttgctgccagtgactttggtcggaacttggttaaaaacccagacctttttacatgttaggaatttgaagcaatagggccccaagaattaagtgagcccagataattaagtcatctgatggatttcgggggtttaaaaaattgagcccagttgctcaactgtttggttgaaaaccttgctcattttttaatccgaaggctaagtgtcacccctttctctgcctctggctgggccttgctaagggccaaggaaagaaagacattttttagggggcagccagtccaaatgccaaaagaagaccagttcttgccctgattgtatgaaatttgacattttggcacnnnnnnnnnnnnnnggccaatcagattttctatgttctaaggacatggctgctgtagaatagcacagacgtggatgataaattatccccagaagcagcatgacagaatgcctcggggagcacttggaagggaaattgcagttctgttgaaatagaggaaaatcccttggtaaagacacagcctgttaggctcgtgtgggcctccagtatgttcaccaggggaatggctgggatttctcggcactctgcatcatccatcttttcttataggtgggaaaataaacaactttgtgatcctcctg

SEQ ID NO: 165447 - DNA, 848 bp, Homo Sapiens
  misc_feature (790)..(790): n is a, c, g, or t
  misc_feature (826)..(826): n is a, c, g, or t
gggagtgcgccctgcccaccgggggccacatctgctcctaccgctgcatcaacatccctggaagcttccagtgcagctgcccctcgtctggctacaggctggcccccaatggccgcaactgccaagacattgatgagtgtgtgactggcatccacaactgctccatcaacgagacctgcttcaacatccagggcggcttcctgctgcctggccttcgagtgccctgagaactaccgccgctccgcagccacgctccagcaggagaagacagacacggtccgctgcatcaagtcctgccgccccaacgatgtcacatgcgtgttcgaccccgtgcaaaccatctcccacaccgtcatctcgctgcctaccttccgcgagttcacccgccctgaagagatcatcttcctccgggccaatcacggccaccgcatccgtgccagccaggctaacatcatcttccacatcacggaaaggaacctggcgggactctttttgacatcatcaagcgttacatggacggcatgaccgtgggtgtcgtgcgccaggtgcggcccatcgtggcccagtttcatgccgtcctgaagctggagatgaactatgtggtcgggggcgtggtctcccaccgaaatgttgtcaacgtccacatcttcgtctctgagtactggttctgagggctggtctgccgcacagccgcaggtgcacctccaggccaaatcattgctgccagtgactgtggtctgtacttgtttataccctcagacttttttaatgttaggtatttgtagcattnaggccaacatgtatttaaaggttgagccagatggantaagtccatcttgatgtatttt

SEQ ID NO: 165448 - DNA, 480 bp, Homo Sapiens
  misc_feature (37)..(37): n is a, c, g, or t
  misc_feature (193)..(193): n is a, c, g, or t
  misc_feature (415)..(415): n is a, c, g, or t
  misc_feature (420)..(420): n is a, c, g, or t
  misc_feature (427)..(427): n is a, c, g, or t
  misc_feature (446)..(446): n is a, c, g, or t
ggtgtcgtgcgccaggtgcggcccatcgtggccgaanttcatgccgtcctgaagctggagatgaactatgtggtcgggggcgtggtctcccaccgaaatgttgtcaacgtccacatcttcgtctctgagtactggttctgagggctagtctgccgcacagccgcagtgcacctccaggccaaatcattgctgncagtgactgtggtctgtacttgtttataccctcagacttttttaatgttaggtatttgtagcattaggccaacatgtattaagctgagccagatgaataagtccatctgatgtattttcggtgtttaaaaaatgagcccagttgctcaactgtttggttgaaaaccttgctcatcttttaattgcgaaggctaagtgtcaccccctttctcttgcctcttgnttggngccttgnttaagggccaaggaaaganagacattttttagggggcagccagtccaatgcca

SEQ ID NO: 165449 - DNA, 913 bp, Homo Sapiens
  misc_feature (750)..(751): n is a, c, g, or t
  misc_feature (753)..(754): n is a, c, g, or t
ggggagacaggtggggtactcgggaagctggagcgggccggcggtgcagtcacgggggagcgaggcctgctgggcttggcaacgagggactcggcctcggaggcgacccagaccacacagacactgggtcaaggagtaagcagaggataaacaactggaaggagagcaagcacaaagtcatcatggcttcagcgtctgctcgtggaaaccaagataaagatgcccattttccaccaccaagcaagcagagcctgttgttttgtccaaaatcaaaactgcacatccacagagcagagatctcaaagattatgcgagaatgtcaggaagaaagtttctggaagagagctctgcctttttctcttgtaagcatgcttgtcacccagggactagtctaccaaggttatttggcagctaattctagatttggatcattgcccaaagttgcacttgctggtctcttgggatttggccttggaaaggtatcatacataggagtatgccagagtaaattccatttttttgaagatcagctccgtggggctggttttggtccacagcataacaggcactgcctccttacctgtgaggaatgcaaaataaagcatggattaagtgagaagggagactctcagccttcagcttcctaaattctgtgtctgtgactttcgaagttttttaaacctctgaatttgtacacattttaaaatttcaagtgtactttaaaataaaatacttcctaatgggggcctnncnnccacggagcgggcacccgagaagaagaaaattgggggggccgccttcgggcccttcaaaaaaacttttcctaaaaccatttctttttgtggggccgcgggggcccccggtaagggagaaaggggaaaccagggggtcaaaaacccgggtttttcctaaa

SEQ ID NO: 165450 - DNA, 295 bp, Homo Sapiens
aggattcggtcgctcggacagccctgataatgaggggaccaactccgaacatgcaaggaaatatggtgcagtttacgggacagatgtcaggacagatgctgccccagcaagggcctgtgaacaacagtccatctcaggttatgggcattcaggcacaggtcctgcggccaccagggcccagcccacacatggcccagcagcatggtgatcctgctactacagcgaataacgatgtcagtttatctcagatgatgcctgatgttagcattcaacaaaccaacatggtccgagcgga

SEQ ID NO: 165451 - DNA, 182 bp, Homo Sapiens
gcggccgcctactactactatacggctgcgagaagacgacagaaggggacacactctgcacccccccaccccacgaccttggcccgagcccctccgtgaggaacacaatctcaatcgttgctgaatcctttcatatcctaataggaattaacctccaaataaaacatgactggtacgtgtgc

SEQ ID NO: 165452 - DNA, 462 bp, Homo Sapiens; identical to SEQ ID NO: 75377

SEQ ID NO: 165453 - DNA, 447 bp, Homo Sapiens
ggggccctcgcgcggtccggcacagcggacaccaggactccaaaatggcgtcagttgtaccagtgaaggacaagaaacttctggaggtcaaactgggggagctgccaagctggatcttgatgcgggacttcagtcctagtggcattttcggagcgtttcaaagaggttactaccggtactacaacaagtacatcaatgtgaagaaggggagcatctcggggattaccatggtgctggcatgctacgtgctctttagctactccttttcctacaagcatctcaagcacgagcggctccgcaaataccactgaagaggacacactctgcacccccccaccccacgaccttggcccgagcccctccgtgaggaacacaatctcaatcgttgctgaatcctttcatatcctaataggaattaacctccaaataaaacatgactggtacgtg

SEQ ID NO: 165454 - DNA, 171 bp, Homo Sapiens
gggtcgctcggacgagggaattctcactgaagcagctataaaagaaagcggagggcacggcgcctcccctgaagcaccagcagctgttctgtagatggttgttgggccacacgcaaaggacttggttcctgtccccagcttagtggtccgagcggaccggtaccgagctcg

SEQ ID NO: 165455 - DNA, 971 bp, Homo Sapiens
cgcgtgtacaaagacaaagagatgaatctggggtagatttaggtgatagtagaaaaggctcccaaagctcggataggagacctggacaaaaagaaatacctggtgccttctgatctcacagttggtcagttctacttcttgatccggaagcgaattcatctccgagctgaggatgccttgtttttctttgtcaacaatgtcattccacccaccagtgccacaatgggtcagctgtaccaggaacaccatgaagaagacttctttctctacattgcctacagtgacgaaagtgtctacggtctgtgaagctgctgcccctgagctggaggggggtctcattctacaaagagagaggtggcccccctttcttgacctcctcctccttcaagctcaaacaccacctcccttattcaggaccggcacttcttaatgtttgtggctttctctccagcctctcttaggaggggtaatggtggagttggcatcttgtaactctcctttctcctttcttcccctttctctgcccgcctttcccatcctgctgtagacttcttgattgtcagtctgtgtcacatccagtgattgttttggtttctgttccctttctgaactgcccaaggggctcagaaccccagcaatcccttcctttcactaccttcttttttgggggtagttggaagggactgaaattgtggggggaaggtaggaggcacatcaataaagaggaaaccccccagcggaataacaccaacctacaaccttacataccccttgtcgggccgcctcgccccttagaaagctttctaaaaaccattcgtttgggcgcggcggggcccaggaagggaaaggggaaactggggcctatacctggtttccccaagggaaaaaccctgggtgcatggaataaaggggttggggattctccacccaaactaaacaaacccccccgggtggggcaaaaccggaagcgt

SEQ ID NO: 165456 - DNA, 805 bp, Homo Sapiens
tcggcatgagggtcgtcgccgccccccgtcccggcccccctgggttccctcagcccagccctgtccagcccggttcccgggaggatgaagttcgtgtacaaagaagagcatccgttcgagaagcgccgctctgagggcgagaagatccgaaagaaatacccggaccgggtgccggtgatagtagaaaaggctcccaaagctcggataggagacctggacaaaaagaaatacctggtgccttctgatctcacagttggtcagttctacttcttgatccggaagcgaattcatctccgagctgaggatgccttgtttttctttgtcaacaatgtcattccacccaccagtgccacaatgggtcagctgtaccaggaacaccatgaagaagacttctttctctacattgcctacagtgacgaaagtgtctacggtctgtgaagctgctgcccctgagctggaggggggtctcattctacaaagagagaggtggcccccctttcttgacctcctcctccttcaagctcaaacaccacctcccttattcaggaccggcacttcttaatggttgtggctttctctccagcctctcttaagaggggtaatgggtggaagttggcatcttgaaactcctcctttctccctttcttcccctttctctgcccggccttttccatcctggctgtagaccttcttgattgtccagtctgtgtcacatcccaggggattggtttttggttttctggtcccctttttctgaactgcccccaaggggggttcaagaaaccccccaggcaattccccttcc

SEQ ID NO: 165457 - DNA, 487 bp, Homo Sapiens
  misc_feature (11)..(11): n is a, c, g, or t
  misc_feature (32)..(32): n is a, c, g, or t
  misc_feature (39)..(39): n is a, c, g, or t
  misc_feature (59)..(59): n is a, c, g, or t
aacttcttccncctaaaattgccctacagtgncgaaaantgtcctagggtctgtgaaanctgctgccccctgaagctggaaggggggtcctcaattcctaacaaaagagaagaggtggccccccctttccttgacccaccctccctcccttcaaagctcaaaaacccacctccccttattcaggaccggcacttccttaatgtttgtggctttctctccagcctctcttaggaggggtaatggtggagttggcaacttgtaactctcctttctcctttcttcccctttctctgcccgcctttcccatcctgctgtagacttcttgattgtcagtctgtgtcacatccagtgattgttttggtttctgttccctttctgaactcccaaggggctcagaaccccagcaatcccttcctttcactaccttcttttttgggggtagttggaagggactgaaattgtggggggaaggtaggaggcacatcaa

SEQ ID NO: 165458 - DNA, 459 bp, Homo Sapiens
  misc_feature (17)..(17): n is a, c, g, or t
  misc_feature (26)..(26): n is a, c, g, or t
  misc_feature (59)..(59): n is a, c, g, or t
  misc_feature (162)..(162): n is a, c, g, or t
agaaaagaaaaatttanaaaatgccnaactccaaccataaccccttccctaaaaaaagnctggaaaagaaaagccaacaaaacattaaagaaagtgccggtcctaaataagggaaggtggtgtttgagcttgaaggaggagaaggtcaagaaaaggggggcnacctctctctttgtagaatgagacccccctccagctcaggggcagcagcttcacagaccgtagacactttcgtcactgtaggcaatgtagagaaagaagtcttcttcatggtgttcctggtacagctgacccattgtggcactggtgggtggaatgacattgttgacaaagaaaaacaaggcatcctcagctcggagatgaattcgcttccggatcaagaagtagaactgaccaactgtgagatcagaaggcaccaggtatttctttttgtccaggtctcctatccgagctttgggc

SEQ ID NO: 165459 - DNA, 468 bp, Homo Sapiens
gatccgttcgagaagcgccgctctgagggcgagaagatccgaaagaaatacccggaccggtgccggtgatagtagaaaaggctcccaaagctcggataggagacctggacaaaaagaaatacctggtgccttctgatctcacagttggtcagttctacttcttgatccggaagcgaattcatctccgagctgaggatgccttgtttttctttgtcaacaatgtcattccacccaccagtgccacaatggggtcagctgtaccagggaacaccatgaaggaagacttctttctctacattgcctacagtgacgaaagtgtctacgggtctgtgaagctgctgcccctgagctgggaagggggtctcattcttacaaagaggaggaggtgggccccccttttcttggaccttcctccttcctttcaaggttcaaacaccacctccctttatttcagggaccgggcatttc

SEQ ID NO: 165460 - DNA, 848 bp, Homo Sapiens
gcctgggtggcgattccggcacgagggcggagcgacgcggcctgggaggataaggatgaatttttagatgtgatctactggttccgacagatcattgctgtggtcctgggtgtcatttggggagttttgccattacgagggttcttgggaatagcaggattctgcctgatcaatgcaggagtcctgtacctctacttcagcaattacctacagattgatgaggaagaatatggtggcacgtgggagctcacgaaggaagggtttatgacctcttttgccttgttcatggtcatttggatcatcttttacactgccatccattatgactgatggtgtacagctcccaagtgctccctatccagtccaaaggaccctcttgattacagcacaggaacttgatcgttggggaaccccagccccttggaacttggaagacccgtgtttcctggaccgcgaatcagtgtgttgggcatcagtgttttctgcaagggttgtgacctgaaactttttaaaaaccacccacctttggggaagcatttctgaatttatccatcaccaaccatttcttcttggataccatcaagtaacagctattatttgccaagtggagctgtcatttaatttgatgcacctctggattcagatgaaacattaaattgtcttcctcgattctccatcgggtgtagagtttttaaactatccatggcatttcaagtcttctgaaacagcatggctgtatgttgcgtggtccataacaccagtacatgcagccatctaataaagagttttccattggaagaaaggtttttcccataacttgaaataaaatcaaaaatcttttaaattgg

SEQ ID NO: 165461 - DNA, 1508 bp, Homo Sapiens
  misc_feature (391)..(404): n is a, c, g, or t
  misc_feature (1151)..(1152): n is a, c, g, or t
  misc_feature (1350)..(1361): n is a, c, g, or t
  misc_feature (1383)..(1393): n is a, c, g, or t
cagcgcgccgcaggaccgggccgctgagcctgcagccgccccgcgccgtgacctgcgaccctagaccccgactccctttggctcagcccgcgcgccccaggcccggcccgggcggcgcgacgggaggatgagcggcgggcggcggaaggaggagccgcctcagccgcagctggccaacggggccctcaaagtctccgtctggagtaaggtgctgcggagcgacgcggcctgggaggataaggatgaatttttagatgtgatctactggttccgacagatcattgctgtggtcctgggtgtcatttggggagttttgccattacgagggttcttgggaatagcaggaggctttttttcctgttacaggaaaggccattgctgctctggagcnnnnnnnnnnnnnnatgactaaagcaaagaagcagccctacagtggcactcctgggtctggtgcaccactcctcaggagcatctcagattctgcctgatcaatgcaggagtcctgtacctctacttcagcaattacctacagattgatgaggaagaatatggtggcacgtgggagctcacgaaggaagggtttatgacctcttttgccttgttcatggtcatttggatcatcttttacactgccatccattatgactgatggtgtacagctcccaagtgctccctatccagtccaaaggaccctcttgattacagcacaggaacttgatcgttggggaaccccagccccttggaacttggaagacccgtgtttcctggaccgcgaatcagtgtgttgggcatcagtgttttctgcaagggttgtgacctgaaactttttaaaaaccacccacctttggggaagcatttctgaatttatccatcaccaaccatttcttcttggataccatcaagtaacagctattatttgccaagtggagctgtcatttaatttgatgcacctctggattcagatgaaacattaaattgtcttcctcgattctccatcgggtgtagagtttttaaactatcaatggcatttcaagtcttctgaaacagcatggctgtatgtgcgtggtccatagcacagtacatgcagcatctaataagagtttccattgtagaatgttttcacatacttgaataaatcaaatctttaatannaaacaacaaaacacatacactaaaatccctggtcggccgcctccgggccccctcaaaaaacttttctaaaacccttttccttttgggccgcggggccccccattaggggaaaatggaaaattggggcaatataaccgggtttccccaaagagaagaaaccctcggggtcaatgacacaaaagggcggtttgggaaatnnnnnnnnnnnnaatataaaaaaacaaccccccnnnnnnnnnnncaaaacaccggaacacgtgttttctttaaaaaacaaaataccccccacaagaagggggggagatttttcctggaggggggccccctttttcacacgggcgggggatcccttactc

SEQ ID NO: 165462 - DNA, 280 bp, Homo Sapiens
tagaggttcccgcccgctcggacacctcagacctgtgaacagtgcaaacagcaatgtgcttttgatcggaggaggaaggaagaagaaaggttgatggaaagttattatgctggctctgtactttatcgtacaaaagagttttacagaagacgaaagaacaaaggaagagcctgggatcttcacattcaaattcatcttcttcatctcttactgagaaaagaccagcatcatccaaaacatcatcaccaccatcatcaccatcaacattggtccgagcgga

SEQ ID NO: 165463 - DNA, 662 bp, Homo Sapiens
  misc_feature (458)..(548): n is a, c, g, or t
agcctgctggagtggatgcagatgacttccggatcttctgtgggatctgggcaatgagtgaacgatgacatcttggcacgcgccttcagccgcttcccatccttccttaaggccaaggtgatccgtgacaagcgcacaggcaagaccaagggctacggcttcgtcagcttcaaggaccccagcgactacgtgcgcgccatgcgtgagatgaatgggaagtatgtgggctcgcgccccatcaagcttcgcaagagcatgtggaaggaccggaatctggacgtggtccgcaagaagcagaaggaaaagaagaagctgggcctgagatagggtctgtggccaggcacccgctcccacctggccgggcgctggctcctccctcagttctctttggaaaacccccagctgtccacccatcccctgccccaaaaccagtttcaataaatttacgttcatttccnnnnnnnnnnnnnnnnnnnnnnnnnnnnnnnnnnnnnnnnnnnnnnnnnnnnnnnnnnnnnnnnnnnnnnnnnnnnnnnnnnnnnnnnnnnctttctacaccattccctttgggcccgcgggcccaacccggcaaggccaaaatggggccattaccctgtctaccaagcgaaacccctgcgaaatgccctttggggtggggcact

SEQ ID NO: 165464 - DNA, 917 bp, Homo Sapiens
agccggtgaaggggcagaacaggcaggttccctcgacccaggaccccctgttcccaggctatggcccccagtgccctgtagacctggcaggccccccgtgcttgcaacccctatttgggggtctggatggctactggagggccttgcagaggggcagagaaggcaggaccatgacatctagggcctctgaactttctccggggcgcagcgtgacggctggcatcatcattgttggagatgagatccttaagggacacactcaggacaccaacaccttctttctgtgccggacactgcgctccctaggggtccaggtttgccgagtctcagttgtacctgatgaggtagccaccattgcagctgaggtcacttctttctccaaccgcttcacccatgtcctcacagcagggggcatcggccccactcatgatgatgtgacctttgaggcagtggcacaggcctttggagatgagctgaagccacaccccaagttggaagcagccaccaaagccctaggaggggaaggctgggagaagctatcattggtgccctcctctgcccgcctgcattatggcacagatccttgcactggtcaacctttcagattccctctggtcttccgtccgaaacgtctacctcttcccaggcattccaaagctgctgccgcggggtgctggagggggatgaagggactattccaaaaacccagctgttcagttccaactcaaaggagctatatgtggctgctgatgaagcctccatcgcccccattctggcctgaggccaggcccactttggacgtaggccttggcctgggtttctaccctgactggggcagcaactactatcaggttgaagctgactctagactccgaaggaagaaggaccccctggaaggaatgctttggccctaacct

SEQ ID NO: 165465 - DNA, 977 bp, Homo Sapiens
  misc_feature (743)..(743): n is a, c, g, or t
cctagtttcagaagtttcaatagcagcagtggtggctatgaacccagaggtcgtggaggtggccgtggaggcagaggtggcatgggcggaagtgaccgtggtggcttcaataaatttggtggccctcgggaccaaggatcacgtcatgactccgaacaggataattcagacaacaacaccatctttgtgcaaggcctgggtgagaatgttacaattgagtctgtggctgattacttcaagcagattggtattattaagacaaacaagaaaacgggacagcccatgattaatttgtacacagacagggaaactggcaagctgaagggagaggcaacggtctcttttgatgacccaccttcagctaaagcagctattgactggtttgatggtaaagaattctccggaaatcctatcaaggtctcatttgctactcgccgggcagactttaatcggggtggtggcaatggtcgtggaggccgagggcgaggaggacccatgggccgtggaggctatggaggtggtggcagtggtggtggtggccgaggaggatttcccagtggaggtggtggcggtggaggacagcagcgagctggtgactggaagtgtcctaatcccacctgtgagaatatgaacttctcttggaggaatgaatgcaaccagtgtaaggcccctaaaccagatgggcccaggaggggggaccaggtggctctccacatggggggtaactacgggggatggatcgntcgtggtggcaaaggaagctatgatcgagggcggctaccggggcccccggcggggaccctggaaggtttccaaaggggcccgaggtggctcggggaaaaaagggggccttttgccccctggccacaaatggattcccagggggtggagccccccacacggtatcccccaggggaaaaaggcccccaacttttattttatccctgggccttcccccaggcactcttgtgacaaaa

SEQ ID NO: 165466 - DNA, 891 bp, Homo Sapiens
tggctatggacagcaggaccgtggaggcagaggtggcatgggcggaagtgaccgtggtggcttcaataaatttggtggccctcgggaccaaggatcacgtcatgactccgaacaggataattcagacaacaacaccatctttgtgcaaggcctgggtgagaatgttacaattgagtctgtggctgattacttcaagcagattggtattattaagacaaacaagaaaacgggacagcccatgattaatttgtacacagacagggaaactggcaagctgaagggagaggcaacggtctcttttgatgacccaccttcagctaaagcagctattgactggtttgatggtaaagaattctccggaaatcctatcaaggtctcatttgctactcgccgggcagactttaatcggggtggtggcaatggtcgtggaggccgagggcgaggaggacccatgggccgtggaggctatggaggtggtggcagtggtggtggtggccgagcaggatttcccagtgggaggtggtggcggtggaggacagcagcgagctggtgactggaagtgtcctaatcccacctgtgagaatatgaacttctcttggaggaatgaatgcaaccagtgtaaggcccctaaaccagatggcccaggaggcggaccaggtggctctcacatggggggtaactacggggatgatcgtcgtggtggcagaggaggctatgatcgaggcggctaccgggggccgccggcgcgggaccgggggaggctttcccaaaggggccccgggttggtgccgaaaaaaacgcggccctttggtcccctccccacaaaaggctccctatggcgccgaccccccataacgggaatccccagcgggaatattctccccacaccaa

SEQ ID NO: 165467 - DNA, 1155 bp, Homo Sapiens
  misc_feature (817)..(975): n is a, c, g, or t
  misc_feature (978)..(978): n is a, c, g, or t
  misc_feature (981)..(983): n is a, c, g, or t
  misc_feature (985)..(990): n is a, c, g, or t
  misc_feature (999)..(1015): n is a, c, g, or t
attaagacaaacaagaaaacgggacagcccatgattaattggtacacagacagggaaactggcaagctgaagggagaggcaacggtctctttggatgacccaccttcagctaaagcagctagtgactggtttgatggtaaagaattctccggaaatcctatcaaggtctcatttgctactcgccgggcagactttaatcggggtggtggcaatggtcgtggaggccgagggcgaggaggacccatgggccgtggaggctatggaggtggtggcagtggtggtggtggccgaggaggatttcccagtggaggtggtggcggtggaggacagcagcgagctggtgactggaagtgtcctaatcccacctgtgagaatatgaacttctcttggaggaatgaatgcaaccagtgtaaggcccctaaaccagatggcccaggagggggaccaggtggctctcacatggggggtaactacggggatgatcgtcgtggtggcagaggaggctatgatcgaggcggctaccggggccgcggcggggaccgtggaggcttccgagggggccggggtggtggggacagaggtggctttggccctggcaagatggattccaggggtgagcacagacaggatcgcagggagaggccgtattaattagcctggctccccaggttctggaacagctttttgtcctgtacccagtgttaccctcgttattttgtaaccttccaattcctgatcacccaagggtttttttgtgtcggactatgtaattgtaactatacctctggttcccattaaaagtgaccattttagttannnnnnnnnnnnnnnnnnnnnnnnnnnnnnnnnnnnnnnnnnnnnnnnnnnnnnnnnnnnnnnnnnnnnnnnnnnnnnnnnnnnnnnnnnnnnnnnnnnnnnnnnnnnnnnnnnnnnnnnnnnnnnnnnnnnnnnnnnnnnnnnnnnnnnnnnnnnnnnaanaannnannnnnntttgggggnnnnnnnnnnnnnnnnnaaaaaaattttttttaaaacccttctttttggggggccgcgcggccccccaagagggaaaaagaaaaacgggggcacaaaaagttttttcttccaagaaaaaaccccgggggaaacaaaaccaaaaggggtgggtttttt

SEQ ID NO: 165468 - DNA, 423 bp, Homo Sapiens
tctgctcggaccacggcgcttgcggcacggaggacttggaggacgtttccgctcccgcttcttctccttcagcggcaagagacacaggcccgtctgggggtcagtgatacaacgctccatcagctgcaggtaggtgaggttctcctccgtgttagggtcaaagaagcccttggtgtcgtccgaggggtcggtcaggatctcgttcatctcctcatcgaagaggccgcgcttgtaagccacctccacgggcagccggtggctctcctgatgggacgaagactgtcttgctcccatcagtgatgccccacccagccacggatacgacatggtttatatatgtggtgtcctggtattcggcatagatgcctccggtgtatgtagccagtctcttctgttgccattattccacagctagatggacgt

SEQ ID NO: 165469 - DNA, 1106 bp, Homo Sapiens
ccacagttgccaaatacaaaatatcaagtcctctgctgaagaagactggggtcccatcgtttcctgtgtcgcaggtcacttcttcaccaggtggctgactgcatcattgtgaggcagagcatgctgtgcaagtgtcataagtcatcccactttcaactctcaggaacactcgcagccagtgccacgctgtcctcgccatccaatattgatagccaccccagttcctgccagccagcctggcacacataaccataggatcccctctggtcatgggtcaccatgccttttcttaaactgcgcttctagtgacatggccttaaacgatggggtccccaaatgtacagtgctcctcgatggcaaggttgtatctggcgcccttcccatccttataggtgctggtcacgatcctcagccagcctctctcgccccatggttcaccccatgaattccggacaatccagtactcagtcccatcactgatgccccacccagccacagaaacgacatggtttatatatgtggtgtcctggtattcggcatagatgcctccggtgtagttagccagtctttctgttgccattattccacagctgatgggaccatttgcgtagatttctgccatcatcttctccctcccagagagggagccgtagtctcccaccctccagagggtgtagttccggatggcgtggcactctttgaattcattgcatgtcccacattggttaaacttgtcacactcctggtccttggcctggtagttgttgcaggtctcgtcagggatgccgtgctggtgggcgtagtcccacacggacaggtcattacccccttcacaggagccagcgtaaccgcagtcgatgacgttctgcacggacaggagggtggagggccacgctcccttcctcttgatgttgatccgatccgccatagcgctggtgctggcgtgggcccagcaggagccgcagtattgggggatgtgctggttccgggtgatgctggcatagttgacaccatccacattgcgccagtcccagctcttgggcagatccgctggggacaggtactcatgaggccgggggtatgtgctgcgccccagcggagccagc

SEQ ID NO: 165470 - DNA, 480 bp, Homo Sapiens
  misc_feature (41)..(41): n is a, c, g, or t
ctgctgctcgtgctgctggcgggcgcggcgcagggcgcctnctacttccgccggggacagacctgctaccggcctctgcggggggacgggctggctccgctggggcgcagacatacccccggcctcatgagtacctgtccccagcggatctgcccaagagctgggactggcgcaatgtggatggtgtcaactatgccagcatcacccggaaccagcacatcccccaatactgcggctcctgctgggcccacgccagcaccagcgctatggcggaatcggatcaacatcaagaggaagggagcgtggccctccaccctcctgtccgtgcagaacgtcatcgactgcggtaacgtgggctcctgtgaagggggtaatgacctgtccgtgttgggacttacggccaccagcacgggattcctgacgagacctgcaacaattaccaggggcaaggaccagggattttgacaagttttaaccatt

SEQ ID NO: 165471 - DNA, 939 bp, Homo Sapiens
gggagtctatccggcactaggaacagccccgggcggcgagacggtccccgccatgtctgcggccatgagggagaggttcgaccggttcctgcacgagaagaactgcatgactgaccttctggccaagctcgaggccaaaaccggcgtgaacaggagcttcatcgctcttggtgtcatcggactggtggccttgtacctggtgttcggttatggagcctctctcctctgcaacctgataggatttggctacccagcctacatctcaattaaagctatagagagtcccaacaaagaagatgatacccagtggctgacctactgggtagtgtatggtgtgttcagcattgctgaattcttctctgatatcttcctgtcatggttccccttctactacatgctgaagtgtggcttcctgttgtggtgcatggccccgagcccttctaatggggctgaactgctctacaagcgcatcatccgtcctttcttcctgaagcacgagtcccagatggacagtgtggtcaaggaccttaaagacaaggccaaagagactgcagatgccatcactaaagaagcgaagaaagctaccgtgaatttactgggtgaagaaaagaagagcacctaaaccagactggatggaaacttcctgccctctctgtaccttcctactggagcttgatgttatattagggactgtggtataattattttaataatgttgccttggaaacatttttgagatattaaagattggaatgtgttgtaagtttctttgcttacttttactgtctatatatatagggagcactttaaacttaatgcagtgggcagtgtccacgttttttggaaaatggattttgcctccgggtaaggaaaagatgtatgttggctatcctgcagggaaatataaactttaaaataaaattatataccccaaaaaaa

SEQ ID NO: 165472 - DNA, 588 bp, Homo Sapiens
acctcaggatcttggtcgctcggacaccacctcagctctgcagaccttttgggcctcggccacttcctccaccctttggccctggtatgcgtccaccactaggcttaagagaatttgcaccaggcgttccaccaggaagacgggacctgcctctccaccctcggggatttttacctggacacgcaccatttagacctttaggttcacttggcccaagagagtactttattcctggtacccgattaccacccccaacccatggtccccaggaatacccaccaccacctgctgtaagagaccttactgccgtcaggctctagagatgagcctccacctgcctctcagagcactagcccaggactgttcacaggctttaaaacagagcccataaaactatgacctctgaggtttcattggaaagaaagtgtactgtgcattatccattacagtaaaggatttcattggcttcaaaatccaaaagtttattttaaaaggtttgttgttagaactaagctgccttggcagtgtgcatttttgagccaaacaattcaaaaatgtcatttcttccctaaataaaaatcacctttt

SEQ ID NO: 165473 - DNA, 1126 bp, Homo Sapiens
  misc_feature (1049)..(1050): n is a, c, g, or t
  misc_feature (1052)..(1052): n is a, c, g, or t
  misc_feature (1055)..(1055): n is a, c, g, or t
  misc_feature (1058)..(1059): n is a, c, g, or t
  misc_feature (1063)..(1063): n is a, c, g, or t
  misc_feature (1066)..(1066): n is a, c, g, or t
  misc_feature (1069)..(1069): n is a, c, g, or t
  misc_feature (1071)..(1075): n is a, c, g, or t
gaccttccaaaactggggccatttttgtttcccggccgaaaaatcccctccccactcaggaaaagtccccctagaaaagaagaacgcaggcgccccgggtatcacatgacccacttcccggaagcgcagcagaccccgctcaacttcatcctgggttgaggcggaggagaacttccagaattatggcgaagtccgggctgaggcaggacccgcagagcacagctgcagccactgtgctaaagcgggcagtagaactagattcggagtcgcggtatccgcaggctctggtgtgttaccaagaggggattgatctgctcctgcaggttctgaaaggtaccaaagataatactaagagatgtaatctcagagaaaaaatttccaaatacatggacagagcggaaaacataaagaagtacttggaccaagaaaaagaagatggaaaatatcacaagcaaattaaaatagaagagaatgcaacaggtttcagttatgagtcactttttcgcgaataccttaatgagacagttacagaagtttggatagaagatccttatattagacatactcatcagctgtataactttcttcgattttgtgagatgcttattaagagaccatgtaaagtaaaaactattcaccttctcacctctctggatgaaggcattgagcaagtgcagcaaagtagaggcctgcaagaaatagaagagtcactcaggagtcacggagtgctgttggaagttcaatactcttcttcaatacatgaccgagaaattaagttcaacaatggatggatgattaagattggaaggggacttgattattttaagaaaccacagagtcgtttttcccttggatattgtgattttgatttaagaccatgtcatgaaacaacagtagacatttttcctaagaagcatacaaaaaatatatgatgggtggtagcctaatttggattatggctacctttaagtgaatatttggaattttttttaaaagatcacttttataatggatggaattttaccataaacttttatatttcctccccnncnacnacnnaatnacnaanannnnnaacccctggttggccgcctccgggcctccaaaaagctttctagacccttta

SEQ ID NO: 165474 - DNA, 1078 bp, Homo Sapiens
  misc_feature (24)..(24): n is a, c, g, or t
  misc_feature (31)..(31): n is a, c, g, or t
  misc_feature (40)..(40): n is a, c, g, or t
  misc_feature (50)..(50): n is a, c, g, or t
  misc_feature (87)..(87): n is a, c, g, or t
  misc_feature (114)..(114): n is a, c, g, or t
  misc_feature (126)..(126): n is a, c, g, or t
  misc_feature (1004)..(1004): n is a, c, g, or t
  misc_feature (1029)..(1029): n is a, c, g, or t
  misc_feature (1050)..(1050): n is a, c, g, or t
tgaagtaataacgaccctgaacancacggantctgggttnaagttcctgnaataccccaactctacgatccagggtggccccggtgnaaatcctgccctttctgtaacctgggnaagtgcgtatcnacgcttcccgcaaggacatgctggatgccttgggcataactgccttgatcaacgtctcagccaattgtcccaaccattttgagggtcactaccagtacaagagcatccctgtggaggacaaccacaaggcagacatcagctcctggttcaacgaggccattgacttcatagactccatcaagaatgctggaggaagggtgtttgtccactgccaggcaggcatttcccggtcagccaccatctgccttgcttaccttatgaggactaatcgagtcaagctggacgaggcctttgagtttgtgaagcagaggcgaagcatcatctctcccaacttcagcttcatgggccagctgctgcagtttgagtcccaggtgctggctccgcactgttcggcagaggctgggagccccgccatggctgtgctcgaccgaggcacctccaccaccaccgtgttcaacttccccgtctccatccctgtccactccacgaacagtgcgctgagctaccttcagagccccattacgacctctcccagctgctgaaaggccacgggaggtgaggctcttcacatcccattgggactccatgctccttgagaggagaaatgcaataactctgggaggggctcgagagggctggtccttatttatttaacttcacccgagttcctctgggtttctaagcagttatggtgatgacttagcgtcaagacatttgctgaactcagcacattcgggaccaatatatagtgggtacatcaagtccatctgacaaaatggggcagaagagaaaggactcagtgtgtgatccggtttctttttgctcgcccctgtttttttgtagaatctcttcatggcttgacatacctaccagtattntttccccgacgacacatattacatntgaggaatataccttatttantttttgttgtagggtgttctggctttca

SEQ ID NO: 165475 - DNA, 740 bp, Homo Sapiens
gttacttactttggcggggatgaagcagctggcttagaagcagatctggaatgcaaacagatctggcaaaattgggggctggatgacaccaaaatcctcccaggcaacatgaaggataacttctgggagatgggtgacacgggcccctgtggtccttgcagtgagatccactacgaccggattggtggtcgggacgccgcacatcttgtcaaccaggacgaccctaatgtgctggagatctggaaccttgtgttcatccagtataacagggaagctgatggcattctgaaacctcttcccaagaaaagcattgacacagggatgggcctggaacgactggtatctgtgctgcagaataagatgtccaactatgacactgaccttttggtcccttactttgaagccattcagaagggcacaggtgcccgaccatacactgggaaagttggtgctgaggatgccgatgggattgacatggcctaccgggtgctggctgaccacgctcggaccatcactgtggcactggctgatggtggccggcctgacaacacagggcgtggatatgtgttgagacggattctccgccgagctgtccgatacgcccatgagaaagctcaattgccagcaggggcttctttgctacgtaagtggatgctgtcgtccagtccctgggagatgcatttcctgagctgaagaaggacccagacatggtgaaggacatcattaactgaagaagaggt

SEQ ID NO: 165476 - DNA, 1065 bp, Homo Sapiens
ctggtgggtctgcctgtgctgggcagtgtgtccagcctgccgagtcacgctctgtgcgcggttgccctcagtggcgccttgggtctcggcgcctgggcctcactcctgcgcgatgctcctcagcacgtacttgaccgtgtaagcaaaggctgcaaacccaactatcacaaacaaggtcgccagggcgccacccaggagtccgtggtgccggttggcctgctggagccctgcgaggtttgggacggcccccggcgcatgcccgttgagcagctgaatcccgttctggacgaggtgcgtctccccgtctggaaccacgtctggcaaggggagagtctggggtctgctactgagttcgtcttgtgctttctgtttttgtttaatctcctccacgacttcaggaaataattcacaaagactttatctttcaaattaaatgctaaactctgcactgccagttgtcttttcgtgaagtccgacgtctctatactgcccagggtggggcccttctccaccatgaagctcaggagcccagtcaggatggtggagacagaccaggccgggttccacgtgtccgggtggaaatccgtgatagaaagacacagcctggtgttgcacttaaacctcccgttgggagtgatcatatagatactgggaggtttgaaaggaaattctctgggaaaaattagttttccatgataatagccaccttcataaggggtcatctctgggcctcggacgacatagtgccactcgagaatattcgaagggaggggctcggcacagatgtaaggcaccgggtctttcttaatgcgaaggtagtcctgcttcagcctctgggttgccgtggtcggagccctcttactgctggtgctgctcatctctccctgtcgctgcgcgtgggccgccgccgcgctcaggctcgccgtagtcgaggccggagcagggtgcggaaaagcgggcacgccgcgcccgaaaaagccgcaccgccccgggattgggcccaccgaacccgccgcagcgccgccgccggcgcctcagcctccaagatggccgctcgcggggccc

SEQ ID NO: 165477 - DNA, 1072 bp, Homo Sapiens
ctgatctagaggttacctcctgtaattcaagcactcgagctgttatcctagacctgctgcaggaggcactaacagagtctggattaacctcccaggatatcgactgcattgcatacaccaagggccctggcatgggtgccccactggtttctgtggctgttgtggcccgtactgtggcccagctgtggaataagccattggtgggtgtgaaccactgtataggccacattgagatgggccgcctcatcactggagccaccagcccaaccgtgttgtatgtgagtggaggaaatacgcaggtgattgcatactcggaacatcgttaccgtatctttggggaaaccatcgatattgcagtgggcaattgtctggatcgttttgctcgagtgctgaagatttctaacgacccaagtccaggatacaacattgaacagatggcaaagcgaggcaagaagctggttgagctgccatacactgtaaaggggatggacgtctcattctcagggatcctgtctttcattgaggatgtagcccatcggatgctggccacaggcgagtgtactcctgaggatctgtgtttctccctgcaggaaactgtgtttgcaatgctggtagagatcacagagcgagccatggcacattgtggctcccaggaggccctcattgtgggaggagtggggtgtaatgtgaggctacaggagatgatggcaacaatgtgccaggaacgtggagcccggctttttgctacagatgagagattctgtattgacaatggagcgatgatagcccaggctggctgggagatgtttcgggctggacacaggaccccactcagtgattctggggttacacagaggtatcggacagatgaagtagaggtgacctggagggactaataagatcaacagaatcagagtagatagttccttaatcggaacccaaaggaccccgtgcctcaatctctatcctgatgtcatgggagtcctagcaaagctatagactccaagcaaggcttggggtcctttatggaaccccaggatgactcagcaataaaatatttttggttttaaaa

SEQ ID NO: 165478 - DNA, 473 bp, Homo Sapiens
aaatctctcattgcgaacagcaaacccctacatttatgagctgtaagaagaaaatggagacaaacagaaggagggaaaaaccaacctactctgaaagccttcagacattatgactctggtgataagctctttccctctccgtttgctgcttttttctggcctttacaacagaatggaagagaatcatttaagagttcctgtaacagttatgcagaaaatactaaaacccatcaaggcaagatcaccacgcattgaaatattttcatatcaagataaagtcgcacattttccacaatacattgctaaaataaagaggagaaaggcttaggaagtttttttgcagagagtgctggtaaagaattgagcaagtttgctattgtattgtaatgtttctctcaggtttgttcttcctatcatgtttgatattccatgaataattgagatcagccctatgtaagttaagatcataatat

SEQ ID NO: 165479 - DNA, 539 bp, Homo Sapiens
ggcgactctcaaggattcaaatctctcatgcgtaagccaaattctgtacactttgtcaatggcaatgccaactgcatttatctgggagggtgtaggtgggggtaacgtagtgagcaactcttcctcttgcttctccttaaggtttttcttgtgcctcttttccttgatatgcttatgggcaaatgcaatggattcaattaaaacatcacagagtctgcaggtgtactttgctgtagggtagtttcgtggtcgcctatcgagcccgtcaatgcagtcactctccagtctctcctcagcctgctgtaagcctagcagctccttcgttgaaagtacagactcatcgatcacagggccttccaagtctccatcctgctcattttcctcatttctagtcttccgtggcttcctagggtctggacctctgctttcttgttttaatggctggaaactggatgtcaatgtttacatccgaattcttgaaacccaatctgctacaggatgacccatattatcttagggaacaatctggtaacttgtgt

SEQ ID NO: 165480 - DNA, 432 bp, Homo Sapiens
ttcccaaatctctcattgcggaacaggttaatattcctgcacgtcgtatgatgcgatggggggacggatcgcggaaggttgtccgggtgttggatgtcccggtccctgcattggagatggcacttaggcaaatccgggtgcgtgattcaagggtgtggggcgagcgactttaggtcgcgaagcaattggaagtggttccaagaaaagcctctaagcttcagtcatacgagaccgtaccgcaaaccgacacaggtgggcgagatgagtattctaaggcgcaatgagagatttaaatctctcattgcgaaaggggacttggggagcattttcaattccacattcctgattaaaaggtctagttttttaaggtgggtttttcccattcatatttcaacagaaagtatttttttattcttgacccaatgagagatg

SEQ ID NO: 165481 - DNA, 167 bp, Homo Sapiens
tgctctagaggattccaaatctctcattgcgacgtactcccaggcggtcaacttcacgcgttagctacgttactaaggaaatgaatccccaacaactagttgacatcgtttagggcgtggactaccagggtatctaatcctgtttgcgcatgaaagtttggatcctc

SEQ ID NO: 165482 - DNA, 833 bp, Homo Sapiens
ggtatgtacagtcttctcaggatgagcagtaaaacctttgaacaaaggtctgtgtggttgtcttcacgggcaatcaggaagggagagagctggggaccatattctgcaatgcagccaaatccgaggaagagaaactgaagggagaagtagatggcaatggttatgataaaaagggataaaactaaatcttcgggacttctttaatgctacgttaatgtttcactgctcgtctagaaactcctaaatccagctttctatcatctgccccacattggtcccaatgagtacattctgtgatttctaattccagcctctccattcttttctcattattgcctcccccgccccccaactttgtgtaatttacttctgtattcagcagcctggatagcatatcattccatcaccccattttcttgccaccattggccatctttttgtatcattccacttattctgtcttttccattccttcattcaaactgctagagaaaaacagttgtgtaatgaatgccactaaatattcaaggcctcccacctcagccaagtcctcacaccaacacgcagtcacaccaacacacacctttatggggttctgggtccatttccttctctaattaccatggcagttattttacacctctacggctgtccttaatcccataccccaccctcatcaggtgaccctgtttccttttttaagaaaaattaagcctcttaaacattggtttccccagtaaatacttttaaaacttcctaccactacctacaaaggagatggttctatcctaatctaccgaggaggaaaatttgaaattcccacgtagcagaac

SEQ ID NO: 165483 - DNA, 1097 bp, Homo Sapiens
  misc_feature (945)..(971): n is a, c, g, or t
ggacttgtcttggttccagaacctgacgacccggcgacggcgacgtctcttttgactaaaagacagtgtccagtgctccagcctaggagtctacggggaccgcctcccgcgccgccaccatgcccaacttctctggcaactggaaaatcatccgatcggaaaacttcgaggaattgctcaaagtgctgggggtgaatgtgatgctgaggaagattgctgtggctgcagcgtccaagccagcagtggagatcaaacaggagggagacactttctacatcaaaacctccaccaccgtgcgcaccacagagattaacttcaaggttggggaggagtttgaggagcagactgtggatgggaggccctgtaagagcctggtgaaatgggagagtgagaataaaatggtctgtgagcagaagctcctgaagggagagggccccaagacctcgtggaccagagaactgaccaacgatggggaactgatcctgaccatgacggcggatgacgttgtgtgcaccagggtctacgtccgagagtgagtggccacaggtagaaccgcggccgaagcccaccactggccatgctcaccgccctgcttcactgccccctccgtcccaccccctccttctaggatagcgctccccttaccccagtcacttctgggggtcactgggatgcctcttgcagggtcttgctttctttgacctcttctctcctcccctacaccaacaaagaggaatggctgcaagagcccagatcacccattccgggttcactccccgcctccccaagtcagcagtcctagccccaaaccagcccagagcagggtctctctaaaggggacttgagggcctgagcaggaaagactggccctctagcttctaccctttgtccctgtagcctatacagtttagaatatttatttgttaattttattaaaatgctttnnnnnnnnnnnnnnnnnnnnnnnnnnnaaaactcgaggccatctatgtccgggtgcgggagaaaggaggtaattgaaaatggccccctgggtccattagctgggtttcccggaccccagccttttccttggtaacaaaggggggtaaaattcc

SEQ ID NO: 165484 - DNA, 912 bp, Homo Sapiens
gggagctttggggttgtccctggacttgtcttggttccagaacctgacgacccggcgacggcgacgtctcttttgactaaaagacagtgtccagtgctccagcctaggagtctacggggaccgcctcccgcgccgccaccatgcccaacttctctggcaactggaaaatcatccgatcggaaaacttcgaggaattgctcaaagtgctgggggtgaatgtgatgctgaggaagattgctgtggctgcagcgtccaagccagcagtggagatcaaacaggagggagacactttctacatcaaaacctccaccaccgtgcgcaccacagagattaacttcaaggttggggaggagtttgaggagcagactgtggatgggaggccctgtaagagcctggtgaaatgggagagtgagaataaaatggtctgtgagcagaagctcctgaagggagagggccccaagacctcgtggaccagagaactgaccaacgatggggaactgatcctgaccatgacggcggatgacgttgtgtgcaccagggtctacgtccgagagtgagtggccacaggtagaaccgcggccgaagcccaccactggccatgctcaccgccctgcttcactggccccctccgtcccaccccctccttctaggatagcgctccccttaccccagtcacttctgggggtcactgggatgcctcttgcagggtcttgctttctttgacctcttctctcctcccctacaccaacaaaaaaggaatggctgcaagagccccaaatcaccccattcccggttcactccccgccctcccaaagtcaacaagtcctagcccccaaaacagccccagagcaagggtcctcctctaaagggggacttgaggggcctgtagcaggaaaagactggcccctccta

SEQ ID NO: 165485 - DNA, 938 bp, Homo Sapiens
gggagctttggggttgtccctggacttgtcttggttccagaacctgacgacccggcgacggcgacgtctcttttgactaaaagacagtgtccagtgctccagcctaggagtctacggggaccgcctcccgcgccgccaccatgcccaacttctctggcaactggaaaatcatccgatcggaaaacttcgaggaattgctcaaagtgctgggggtgaatgtgatgctgaggaagattgctgtggctgcagcgtccaagccagcagtggagatcaaacaggagggagacactttctacatcaaaacctccaccaccgtgcgcaccacagagattaacttcaaggttggggaggagtttgaggagcagactgtggatgggaggccctgtaagagcctggtgaaatgggagagtgagaataaaatggtctgtgagcagaagctcctgaagggagagggccccaagacctcgtggaccagagaactgaccaacgatggggaactgatcctgaccatgacggcggatgacgttgtgtgcaccaggggctacgtccgagagtgagtggccacaggtagaaccgcggccgaagcccaccactggccatgctcaccgcccctgcttcactgcccccctccgccccaccccctccttctaggataagcgctcccccttaccccagtcaccttctgggggtcactgggatgcctcttgcaaggtccttgctttctttgacctcttctctccctccctacaccaacaaagaggaagggctgcaagaagcccaaatcaccccattcccggggttactccccgccctccccaagtcagcagttcctaaccccaaaaccagccccagaacaaggggtccctcttaaagggggaatttgaggggccccgacccagggaaaaaaatgggcccctctaaccttttcaccccttttc

SEQ ID NO: 165486 - DNA, 865 bp, Homo Sapiens
ttctgtagccttagcccctagagagccctgtttggggatgggtttgggggttaggacttggctgacttggggaggacggggagtgaaccccggaatggggtgatctgggcttcttgcagccattcctctttgttgggggtaggggaggagagaagaggtcaaagaaagcaagaccctgcaagaggcatcccagtgaccccccagaagtgactggggtaaggggagcgctatcctagaaggagggggtgggacggagggggcagtgaagcagggcggtgagcatggccagtggtgggcttcggccgcggttctacctgtggccactcactctcggacgtagaccctggtgcacacaacgtcatccgccgtcatggtcaggatcagttccccatcgttggtcagttctctggtccacgaggtcttggggccctctcccttcaggagcttctgctcacagaccattttattctcactctcccatttcaccaggctcttacagggcctcccacccacagtctgctccctcaaactcctccccaaccttgaagttaatctctgtggtgcgcacggtggtggaggttttgatgtagaaagtgtctccctcctgtttgatctccactgctggcttggacgctgcagccacagcaatcttcctcagcatcacattcacccccagcactttgagcaattcctcgaagttttccgatcggatgattttccagttgccagagaagttgggcatggtggcggcgcgggaggcggtccccgtagactcctaggctggagcactggacactgtcttttagtcaaaagagacgtcgccgtcgccgggtcgtcaggttctggaaccaagacaagtccaggc

SEQ ID NO: 165487 - DNA, 818 bp, Homo Sapiens
atgacagtgagttaaagcagcggtacggtcggaatcccgggatatcgtcgaccacgcgtccgccttccctttccagtgaaggagcagcatagtgaaatcctggcacccctcaccttttgtgatgacaagatggctgacagtcacggagtccaggagaaggtgctgctctccttgctttctgagtaaacagagtaatgttttttttcttattttcccaaagaaagaaaagggggaaaatatatttgtatgtttagaccagccaaattctgtcattattttagtatcaacctgctgtatattagagcaactgaatataatatggaataagtttgaccaggtcaagttttaggatatagttgaatttctttaaaaagttttctattttatctaaaatctttctattatatctaaattagaatgatcatcctgcgcaaattcagattactgtttgctggctaattgacagtatttctcagcatcactatgtagcattctgttttagcatctttgaattatgatcatttgattggctaattacaaaaagtacaggtttaaactggacttaccttgagttaaaggcaaagaaaatctaaaaacataaatgttatatttcacaagaaatcagttgcatattatccattacatatttagttttaaaaggaggagtcaccttgaattattttctgagtcaccttgagttatttgatctctcagcctgctttctcatctgtaaaaaaggggggaggataactttcacagggtaatggtaggctaaataggagttacagaaaactgttaaatagggaagaactacatta

SEQ ID NO: 165488 - DNA, 253 bp, Homo Sapiens
caaaaaggtacaggtgcccaactgtgatgagatcttctatgctggcacaggcaatctcctgcttcgagatgcggactctatcacactctttgacgtacagcagaagcggactctggcatctgtgaagatttctaaagtgaaatacgttatctggtcagcagacatgtcacatgtagcactactagccaaacacgaacactcatgccctttgcctcctacagccattgtgatctgtaaccgcaaactggatgct

SEQ ID NO: 165489 - DNA, 156 bp, Homo Sapiens
gctgcggcaacccagaggattacaggcaaaagctctacacccccagtggtaggaggagggtcctggcggctcacagcagagcaggcactgccttccttcccaaggccgagaggccatgctgtgacatggcacacacacctgcccaggctgcccggt

SEQ ID NO: 165490 - DNA, 867 bp, Homo Sapiens
gggaatcgcgtatgtcaaaccgtgcagccgcagatcaggtgacttctagcagagaacctgggttttttcctgtgcccactccggcttgtcctcatctctacccatcccctgatgcccaggtcaccgggagggctgctgggagcctctcctgtccccgccgggcagtgtcactgagtccttgaaatcctcccctgccccgcgggtctctggattgggacgcacagtgcagttgaggtctgcgtcgggcttggcttttcacaaaggctgatgtcttaactgtcacccatatggtccctgggccaccgggcagcctggggcggtgtgtgtgccatgtcacagcatggcctctcggccttgggaaggaaggcagtgcctgctctgctgtgagccgccaggaaccctcctcctgtcaatgggggtgtagtatttttgccaaaatatcatgttcaatttcagtagtttgatcagttgaaggctagaagtgtgaagtgcagatgagtgtgtgttcttccccaaggtccccccacagctccaggacaccgctgtcctggcatttgtggccactcactttgtaggaaactcatctccttcctgaggagccgggaggctggaccagtcccgtcgtgcagtcaggtgggcggtgtgtctttccagaaggtcacgtggaaatgtctcgggacttgggtcccggagtgcccgtgaagcgtgtttttgctcctgaggtgcattttctcatcatccttgctttaccacaatgagcaatgaggtcgggttttatatgcaacttattgtatctgaattcctgtagcacacctcataggtatgatttttttaaattaaagaattcagaataaacattttttgatc

SEQ ID NO: 165491 - DNA, 742 bp, Homo Sapiens
accttgaggatcccaaacgcagagaggatagcaagcaagagttcttggtccaacgcgagaacctctctgcgtaaatctctcattggggaagattgtcgcaggaggatcgggcacgtggaaagcctgcaccaccgacctgctgactgactgggagaagaccaagcctgtcacgggcaaccttcgcccagaagaggcacttcaggctctcaccatatatgaggggaagtttggtaggctgaaggacgacagagagaagtgtgcaaaggccaaggaggcgctggaattgacagatactgggcttctcagtggcagtgaagagcgcgtgcaggtggccttagaagaattacaggacctcaaaggcgtttggtcagaactttctaaggtttgggagcaaatcgatcagatgaaggagcaaccctgggtttcagtacagcctcgaaagcttcgacaaaatttggatgccctcctgaaccagctgaaaagcttccctgcccggttgcgacagtatgcgtcctatgagtttgttcagaggcttctgaaaggttacatgaagataaatatgctggtgattgaactgaaatccgaagcacttaaagaccgccattggaaacagctcatgaaaaggcttcacgttaattgggttgtttctgagctaacccttggccaaatctgggatgttgacttgcagaaaaatgaagcgattcaaggctgtactgcttgtgcactacggggagacggtacc

SEQ ID NO: 165492 - DNA, 583 bp, Homo Sapiens
  misc_feature (20)..(20): n is a, c, g, or t
  misc_feature (27)..(27): n is a, c, g, or t
gaccacgccagaaccttgtnagctggncgatgaagatttccgctgcgtctgcaacttctccgaacctcagcccgactggtccgaagccttccagtgtgtgtctgcagtagaggtggagatccatgccggcggtctcaacctagagccgtttctaaagcgcgtcgatgcggacgccgacccgcggcagtatgctgacacggtcaaggctctccgcgtgcggcggctcacagtgggagccgcacaggttcctgctcagctactggtaggcgccctgcgtgtgctagcgtactcccgcctcaaggaactgacgctcgaggacctaaagataaccggcaccatgcctccgctgcctctggaagccacaggacttgcactttccagcttgcgcctacgcaacgtgtcgtgggcgacagggcgttcttggctcgccgagctgcagcagtggctcaagccaggccttcaaggtactgagcattgcccaagcacactcgcctgccttttcctgcgaacaggttcgcgccttcccggcccttaccagcctagacctgtctgacaatcctgggactggggcgaacgcggaact

SEQ ID NO: 165493 - DNA, 708 bp, Homo Sapiens
  misc_feature (27)..(27): n is a, c, g, or t
  misc_feature (55)..(56): n is a, c, g, or t
  misc_feature (63)..(63): n is a, c, g, or t
  misc_feature (66)..(66): n is a, c, g, or t
  misc_feature (76)..(76): n is a, c, g, or t
  misc_feature (88)..(88): n is a, c, g, or t
  misc_feature (138)..(138): n is a, c, g, or t
tgccttccgcgacgagtacttccaganctgtgctcggacgggctccgtcacgccnncggaagnccntgagtcggangcgtcccggcgngggcgagctctggctttgcaagggccctcccttttgggggcttcgcttcnttagccttgctcaggtgcaagtgcccaagggggcggggtgcagaagaatccgagtgtttgccaggcttaaggagaggagaaactgagaaatgaatgctgagacccccggagcaggggtctgagccacagccgtgctcgcccacaaactgatgtctcacggcgtgtcaccccaccagggcgcaagcctcactattacttgaactttccaaaacctaaagaggaaaagtgcaatgcgtgttgtacatacagaggtaactatcaatatttaagtttgttgctgtcaagattttttttgtaacttcaaatatagagatatttttgtacgttatatattgtattaagggcattttaaaagcaattatattgtcctcccctattttaagacgtgaatgtctcagcgaggtgtaaagttgttcgccgcgtggaatgtgagtgtgtttgtgtgcatgaaagagaaagactgattacctcctgtgtggaagaaggaaacaccgagtctctgtataatctatttacataaaatgggtgatatgcgaacagcaaaccaataaactgtctcaatgctgattc

SEQ ID NO: 165494 - DNA, 899 bp, Homo Sapiens
  misc_feature (165)..(185): n is a, c, g, or t
gagcagaaggcttatcaaaagacatttaatacaattagttttcaacaaccccttggtggtccacatctacaaagatatccagcccaacccaaccccccttccaaatcccacccccacagaaaagcacatacttaccagaatttttagcaagtatggtttgggaannnnnnnnnnnnnnnnnnnnnaaaaaaaggcccccagggcagagttatttacagtttaattgccactgtcaactgatctggaccttgatcgggaccgggacctctggcgatccacagatgctggagacttagatctacttgaagaaccacgtttctggctcttctcaggcacgggagacctactaacagaacgggacttgctccggctccggctcctgctcctgctttcttgaccggctgtaagatttgcgactacgggaacgggatcggctacgagacctagaggaacttctggtccgggatcgagacctgcttcttgacctactgtgccttttgctgccttcaattaattttatttttctcccatttatttcctttccagaaagtttttcaatagcattctttaagtcaccataagaggcaaactcaaccaccccttcatttaatttaggtcggtgtgcatccgcaaacgttacttccccagcttgtctcatgaaatctttgagatccttaacacaagataattgtgttaagcaaagaagaggaaaggggacacacaaacaatcacatgatataaaaaaaacaagactactgaaagagaagatgttagcataaagtacaaacatggcatttaccacacttgtatactatcagaattcaaaaattatctatgtcagggcacggaataagcaaatagcatattgcttttaagcaaaatgctcaaagaaattcaga

SEQ ID NO: 165495 - DNA, 504 bp, Homo Sapiens
tcgactctagaggatcaattctcaactataagacgattttctgttcttacaggtggagcatttctgaggaagaaaattcgtattcacaatggaagaaatgcaatgacagcacttgtgttcaactgtgggcaagttcaagccatcagatatcacaagccattctaatgacttccgtcaatagatttgtgttctatgactcatatagattcatcaagaacaactggctaacgtgggaatagaagaacagattatacggcaggacccaaaatcatcactgctaatgactcctgaatcttaaatgctacccctacaataattgttcaatgcagccatccacccttcacataccgtctatcatttcgaggtctgcgactactaaaacggtcagagtatcgtcctctacctcttccacctcgtgaccgagccctagcatgttcaatagtaaccctttcactacagagttcttttccatcaagctcatacacagcatcatctgcatccctt

SEQ ID NO: 165496 - DNA, 845 bp, Homo Sapiens
ggggccctccattttgtggagcgccaaagctgcgaagtgcgtcagttgtggagtggcgtagacgagttaagtcctggtctgcgtggaggtcgacgactccgtcgcagactacggacctgtctgggtctcagccgccaaagaccccgtccggtaggaagtactagccggacatcatgagtggctgtcgggtattcatcgggagactaaatccagcggccagggagaaggacgtggaaagattcttcaagggatatggacggataagagatattgatctgaaaagaggctttggttttgtggaatttgaggatccaagggatgcagatgatgctgtgtatgagcttgatggaaaagaactctgtagtgaaagggttactattgaacatgctagggctcggtcacgaggtggaagaggtagaggacgatactctgaccgttttagtagtcgcagacctcgaaatgatagacgaaatgctccacctgtaagaacagaaaatcgtcttatagttgagaatttatcctcaagagtcagctggcaggatctcaaagatttcatgagacaagctggggaagtaacgtttgcggatgcacaccgacctaaattaaatgaaggggtggttgagtttgcctcttatggtgacttaaagaatgctattgaaaaactttctggaaaggaaataaatgggagaaaaataaaattaattgaaggcagcaaaaggcacagtaggtcaagaagcaggtctcgatccccggaccagaagttcctctaggtctcgtagccgatcccgttcccgtagtcgcaaatcttacagccggtcaagaagcaggagcaggagccggaggcc

SEQ ID NO: 165497 - DNA, 719 bp, Homo Sapiens
gcgtagacgagttaagtcctggtctgcgtggaggtcgacgactccgtcgcagactacggacctgtctgggtctcagccgccaaagaccccgtccggtaggtgagtggctcactttgagggcaagccttctcggatcgaggcttcttcatggccgctcagatcgtgagcggccggggctgctctctttgcggaggatggcgtctaatgagcgcagttgattcgaggaagtactagccggacatcatgagtggctgtcgggtattcatcgggagactaaatccagcggccaggagaaggacgtggaaagattcttcaagggatatggacggataagagatattgatctgaaaagaggcttggtttgtggaatttgaggatccaagggatgcagatgatgctgtgtatgagcttgatggaaaagaactctgtagtgaaagggttactattgaacatgctagggctcggtcacgaggtggaagaggtagaggacgatactctgaccgttttagtagtcgcagacctcgaaatgatagacgaaatgctccacctgtaagaacagaaaatcgtcttatagttgagaatttatcctcaagagtcagctggcaggatctcaaagatttcatgagacaagctggggaagtaacgtttgcggatgcacaccgacctaaattaacatgaagggggtggttgagtttgcctcttatggtgacttaaagaat

SEQ ID NO: 165498 - DNA, 942 bp, Homo Sapiens
tgtccatgtgggaagacctttgtcaaccttaccaagttcctttatcaccggcgtactcatggggtagggggtgtccctctgcccacaacaccagtcccaccagaggaacctgtcattggtttccctgagccagccccagcagagactggagagccagaggcccctgagccccctgtgtctgaggagacctcagcagggcccgctgccccaggcacctaccgctgcctcctgtgcagccgtgaatttggaaaggccttgcagctgacccggcaccaacgttttgtgcatcggctggagcggcgccataaatgcagcatttgtggcaagatgttcaagaagaagtctcacgtgcgtaaccacctgcgcacacacacaggggagcggcccttcccctgccctgactgctccaagcccttcaactcacctgccaacctggcccgccaccggctcacacacacaggagagcagagccctaccggtgtggggactgtggcaaggctttcacgcaaagctccacactgaggcagcaccgcttggtgcatgcccagcacttcccctaccgctgccaggaatgtggggtgcgttttcaccgtccttaccgcctgctcatgcaccgctaccatctacacaggtgaatacccctacaagtgtcgcgagtgcccccgctccttcttgctgcgtcggctgctggaggtgcaccagctcgtggtccatgccgggcgccagccccaccgctgcccattcctgtgggggctgcctttcccctcctcactgcggctccggggagcaaccgctgtgcagcccgctggctgccccaggccccacgggcggctttggagtgtggccaccttgtgggccaagaaaagtgggggctcaagctgcctccgacctgcaggggcacaccaaagccgggcccccatgcaagcctgcctgggggccctg

SEQ ID NO: 165499 - DNA, 382 bp, Homo Sapiens
  misc_feature (111)..(111): n is a, c, g, or t
ctgactccaggagcttacgcatgggtacccgccagggcgtagacacgttcaccaggcactgccactgttctgattacagcgagtatcaatctggtgattccgcagacattntggtttgaattacagaattttttttggtaaatcacagtctagcttccccctttggcttagacaacacaattccttgtgactggcccagaccgcacattacgcaggtgtgctacaggtgtgccgcctcagcactgagaccatgaggcctccagggcatgtaagaggcacagaacactcccagaacccagaatctgctgtcatctgagtgcctgagcaacttacataaccatcagcttttagacgaacttacacatttcctatttgacagaaa

SEQ ID NO: 165500 - DNA, 390 bp, Homo Sapiens
tcccgtcatcgaaacctgatgaggggcacctgtagaatgcaaaattaattcatatgaaaatgagtacacccatggttcaaaaaattctgcttgtttctcagggagaatctctctgcaaaattccaccaggttaatgaaagccgaaaaatctttaggtttagctggatgcaagttagccgctggatctgaagttgggatcatccaaacaccaggcgcctcatctccattctcttgttccccaacagtctgtatttcaagtgtaagatccaatttctcaacgatcttcaaaacggattttacaaattcatcataaagtaaatgattcagactttcactggaggaattcacagagaaaaatgcttcatctgctaaaatagaatccatcatctg

SEQ ID NO: 165501 - DNA, 304 bp, Homo Sapiens
atattactctagactgggttcaagggtttgatgagggttgatgagtcatcgaaacctgtagaaactggcttgccgaaacgtgctactcaagtcacccagtcaggttcaggtggcagattttggtgtggctgacctgctgcctcctgatgataagcagctgctatacagtgaggccaagactccaattaagtggatggcccttgagagtatacactttgggaaatacacacaccagagtgatgtctggagctatggtgtgacagtttgggagttgatgaccttcggggcagagccctatgcaggg

SEQ ID NO: 165502 - DNA, 1280 bp, Homo Sapiens
  misc_feature (1211)..(1211): n is a, c, g, or t
  misc_feature (1234)..(1234): n is a, c, g, or t
  misc_feature (1246)..(1246): n is a, c, g, or t
tagaacctggctggccgaaacgtgcctactccaatcacccagtcaagttcaggtgccaaattttggttgggctgaacctgcctgcctcctgatgattagcagcttgctatacaatgaggccaagactccaattaaagttgggatggcccttgagagtatcccaccgttgggaaatacaacacaccagagtgatgtctggaacttatggtgtgacaattttgggagttgatggaacttccggggcagagccctatgcagggctacgatcggctgaagtaccagacctgctagagaagggggaacggttggcacagccccagatctgcacaattgatgtctacatggtgatggtcaagtgttggatgaatgatgagaacattcgcccaacctttaaagaactagccaatgagttcaccaggatggcccgagacccaccacggtatctggtcataaagagagagagtgggcctggaatagcccctgggccagagccccatggtctgacaaacaagaagctagaggaagtagagctggagccagaactagacctagacctagacttggaagcagaggaggacaacctggcaaccaccacactgggctccgccctcagcctaccagttggaacacttaatcggccacgtgggagccagagccttttaagtccatcatctggatacatgcccatgaaccagggtaatcttggggagtcttgccaggagtctgcagtttcttgggagcagtgaacggtgcccccgtccagtctctctacacccaattgccacggggatgcctggcatcagagtcatcagaggggcatgtaacaggctctgaggctgagctccaggagaaagtgtcaatgtgtaggagccggagcaggagccggagcccacggccacgcggagatagcgcctaccattcccagcgccacagtctgctgactcctgttaccccactctccccacccgggttagaggaagaggatgtcaacggttatgtcatgccagatacacacctcaaaggtactccctcctcccgggaaggcaccctttcttcagtgggtctcagttctgtcctgggtactgaagaagaagatgaagatgaggagtatgaatacatgaaccggaggagaaggcacagtccacctcatccccctaggccaagttcccttgaggagctgggttatgagtacatggatgtggggtcaaganctcaatgccttttctgggcaagnacacagagttgnccacttcaaccttgtacccatcattgcccacttg

SEQ ID NO: 165503 - DNA, 471 bp, Homo Sapiens
gccttccgtgtgcggaaaccctcgattgtacttctgttatctgctcagacaagactggtacacttacaacaaaccagatgtcagtctgcaggatgttcattctggacagagtggaaggtgatacttgttcccttaatgagtttaccataactggatcaacttatgcacctattggagaagtgcataaagatgataaaccagtgaattgtcaccagtatgatggtctggtagaattagcaacaatttgtgctctttgtaatgactctgctttggattacaatgaggcaaagggtgtgtatgaaaaagttggagaagctacagagactgctctcacttgcctagtagagaagatgaatgtatttgataccgaattgaagggtctttctaaaatagaacgtgcaaatgcctgccactcagtcattaaacagctgatgacacacgactcccactctaccagtttcacgtgaccga

SEQ ID NO: 165504 - DNA, 668 bp, Homo Sapiens
  misc_feature (220)..(228): n is a, c, g, or t
catgtatggcacggcgactagcatcgcaacttgatagagggtttgatgaccgtcatcgaaaccctaaacccaggaagtttaccaataagcccaagggtttgatgacggtcatcgaaacccttcttggcagcatctagcaaagctgcatctccactaagcagatcttgaatatctgtatctccatctttaacaagatccaaaggagtatttccatccctgnnnnnnnnngtagggtctgcaccatgctggagcagaagtttgcaaatttcatattttcctttggctgctgcttcatgtaaaggtgtaaatttccataaatcagctacattaactactgctccatgtttaacaagaagttctgcaacttcataatgtccataagaacatgcattgtgcaaaggtacaaggcctcctttatctttagcatgcacatcagctccatgctgtagcagatattccaccacggacactctgttatacccagctgcaaaatgaaggggtgtagactgacgcccttcaatgtctctgcagttgacactctgaacagtacacagtttttttacagtttcgacatctccagcctttgcagcttccagcaattgtctgtctgcctctgaattacctaatgagataccctcttgtaggaagccagggatcctctagaacag

SEQ ID NO: 165505 - DNA, 871 bp, Homo Sapiens
  misc_feature (618)..(796): n is a, c, g, or t
gactcagcactgcccctcaacagggatgactcagcagggatgactcagcactgtcccttagcagcgatgacacagcaaggatgactcagcactgcccctcaccaaggatgactcagcactgccgctcaacagacatgactcagggatggcttagtactgcccctcagcagggatgactcagcagggatgactcagcaccacccctcaacagggatgactcagcagggatgactcagcactgcccctcaacagggatgactgcagggatgactcagcactgcccctcagcagggatgactcagcactgcccctcagcagggatgactcagcagggatgactcagcaccgcccctcaacaggcatgactctgcagagatgactcagcactgcccctcagcagggatggctcagcagggatgactcagcattgcccctcaacagggatgactcagcagactcagcagggatgactcagcactgcccctcaacagacatgactcagcagggatgactcagcaccacccctcagcaaggatgactcagcagggatgattcagcagagataactcggggatgactctgattgtccttcagcagggatgagtctgttttgctccnnnnnnnnnnnnnnnnnnnnnnnnnnnnnnnnnnnnnnnnnnnnnnnnnnnnnnnnnnnnnnnnnnnnnnnnnnnnnnnnnnnnnnnnnnnnnnnnnnnnnnnnnnnnnnnnnnnnnnnnnnnnnnnnnnnnnnnnnnnnnnnnnnnnnnnnnnnnnnnnnnnnnnnnnnnnnnnnnnncattttatgtgaaaatgtgccgaaataattaataaaaaatgttttagaaaaagccaaatcctgtaaggggaccaa

SEQ ID NO: 165506 - DNA, 1317 bp, Homo Sapiens
  misc_feature (992)..(1185): n is a, c, g, or t
  misc_feature (1195)..(1207): n is a, c, g, or t
  misc_feature (1230)..(1242): n is a, c, g, or t
cctactggcacggcctccacccgggctactacctgagcttcctgaccatcccgctgtgcctggctgccgagggccggctggagtcagccctgcgggggcggctgagcccagggggccagaaggcctgggactgggtgcactggttcctgaagatgcgcgcctatgactacatgtgcatgggcttcgtgctgctctccttggccgacacccttcggtactgggcctccatctacttctgtatccacttcctggccctggcagccctggggctggggctggctttaggtgggggcagccccagccggcggaaggcagcatcccagcccaccagccttgccccggagaagctccgggaggagtaagctgtcacgacgctccctctgccagctggtcccgggaattctgtgaaccaggctgctgtctcctccccagaaagagtccttaccttggagagggtcctggagagaatttcctcttccccagctaaataccctgcctgcaactgaagcagacccgggggtgtcctccctgccctctgcccagaggccacctccactcctacaaaatcaaagtattgtccagacaagagtcactggcccctgctccagcttctgggtatccagagagcactgcacttccccaaaacggaaggggcccctgggcagtgggttttgggcaaattccctttctttgcatccacaatgtggggtcggagcttgggggcaggtcctgggagtgggaagcctcttccttgtgtctttcgctccacttttagctcatcgcaccaatattgcagacttggaaggaagcataagcttcccatttcacaaaggggaaactgaggtgcgggtgcgcgggcctggggacggccgtcccatggcttccatctgagccacctcgggaccccagcactcctggcgccctcttctcatcgcttggcctatgacaggtcaccgtgtgtaaatctttcccaataaagtgttgcacaaagnnnnnnnnnnnnnnnnnnnnnnnnnnnnnnnnnnnnnnnnnnnnnnnnnnnnnnnnnnnnnnnnnnnnnnnnnnnnnnnnnnnnnnnnnnnnnnnnnnnnnnnnnnnnnnnnnnnnnnnnnnnnnnnnnnnnnnnnnnnnnnnnnnnnnnnnnnnnnnnnnnnnnnnnnnnnnnnnnnnnnnnnnnnnnnnnnnttgggggcgnnnnnnnnnnnnnaaaaaattttttaaaaccttttnnnnnnnnnnnnnccccaaaaaacaaaggaaaggggcctattttttccccaaaaaaaccccggggaagaaaagggggtggacttcccc

SEQ ID NO: 165507 - DNA, 1439 bp, Homo Sapiens
  misc_feature (1284)..(1284): n is a, c, g, or t
  misc_feature (1290)..(1340): n is a, c, g, or t
cgggaatttgttaccactgccctaataaccgtgccctgacctccagctgctagagagaggatgtccccctagtaaagccaagcaggaattgaaggtttttctaaatctgctcggtcctcactcctaaaggatggctcccctcctgtcatcagaggccaccaaggcttcatatgggccagtgtttcccactgctggggctgtcgacatgagtgatgagggagccactgtattgctagaggtgacacttctccaataatcactgcgaccaggaaaaaagcccccttcctaaaagcctttctaaacatcctaggcattgttgctaaggaatgccttttccttagcaacaaagatcatggggaccccactggcgcctggaacatctccctagcaaccgtgaagcaccttgttattagggatgataaccacaacttccctggcaactgcagtgtccgacaatttagaagggaccatccttggcggcttctctgaatatactgagcttggttgctaaaggactcatagcttagcaaccatagcccttccaggcttttcatggctgtgggcgggccccattaggtaccaaaagaagaaagaccccccttgtcagtggaactgtaccaccccagcccacccaccttcctaccctacaggcaccctctgggccaccctcccttgctgccctagcaagtctgacagccagagggccattgcctggccaggatcccttccttagcatccggggctgggacactagcaggcgtcgggagggggcctggctgagctgcatgtctgtcccccaccctcatcctccaccccccagtccggagaaggcggcttccttggagtatgactatgagaccatccgcaacatcgactgctacagcacagatttctgcgtgcgggtgcgcgatggcatgcggtactggaacatgacggtgcagtggtggctggcgcagtatatctacaagagcgcacctgcccgttcctatgtcctgcggagcgcctggaccatgctgctgagcgcctactggcacggcctccacccgggctactacctgagcttcctgaccatcccgctgtgcctggctgccgagggccggctggagtcagccctgcgggggcggctgagcccagggggccagaaggcctgggactgggtgcactggttcctgaagatgcgcgcctatgactacatgtgcatgggcttcgtgctgctctccttggccgacacccttcggtactgggcctccatctacttctgtatccacttcctggccctgcaancccctnnnnnnnnnnnnnnnnnnnnnnnnnnnnnnnnnnnnnnnnnnnnnnnnnnnaaaggcaacaatcccagcccaaccaagcccttgcccccgggaaaaagcttccgggagggagataagctgttcacgaacgcttcccctctggccagctgt

SEQ ID NO: 165508 - DNA, 282 bp, Homo Sapiens
tcatcgaaaccctgacctaatcggttatgttatctacagattacagacattgtatagaaaagcactttgaaaatccctgtcctgttctgttccattctaattactggtgcatgcagccttcagtcacttactccctgcttgctcaatcgatcacgaccctctcatgcaaacccccttagagttataaagcccttaagagggataggaattgctcactcagggagctcagtttttgagacgtgagtcttgccaatgctcccggccgaataaagcccttccttc

SEQ ID NO: 165509 - DNA, 657 bp, Homo Sapiens
agtacagctactatccagcccaatcaacaagcccagattgtcactcggtcagtgttgcaggcagcagcagctgctgctgctgctgcttctatgcaactgcctccaccccgactacagccccctccattacaacagatgccacagcccccgactcagcagcaagttaccacttctgcagcagcctcctccactccaggccatgccaacagcctccacctcagaaagttcgaatcaatttacagcaacagcctcctcctctgcagatcaagagtgtgcctctacccactttgaaaatgcagactaccttagtcccaccaactgtggaaagtagtcctgagcggcctatgaacaacagccctgaggcccatacagtggaggcaccttctcctgagactatctgtgagatgatcacagatgtagttcctgaggtagagtctccttctcagatggatgttgaattggtgagtgggtctcctgtggcactctcaccccagcctcgatgtgtgaggtctggttgtgagaaccctcccattgtgagtcacggactgggacaatgaatactgcagcaatgagtgtgtggtgaagcactgcagggatgtatatcttggactgggtagcctctagaaatacaaacacagtggtgtatgtgacatagtc

SEQ ID NO: 165510 - DNA, 469 bp, Homo Sapiens
  misc_feature (453)..(453): n is a, c, g, or t
tggtgaaaccactgccagggatgtaaaccttgcccccgggtaaccctcctaaaaattccaaacaccagtggtgtttgtgaaaaatagtcccttccctgttctcccaagcccagtgaagagttaactgcctgggaaagtgtcccaagagcctgtttttgaaacacaagctgggcttctggtagtgcctcatcacaacccatgatggctgttcatgtttcaccccttttcttccttcagcagaggccaggctatggagcagggccactgaatttgctgtaatctggagatgctttttactttcaaccataagcggtaatagcagaggaaagggtgaagggagtctgggcaagcaaagcatagagatggtggggtggtggtggggttgaagaaacttgttggtataattgtcataggacttgcctaaaatattattaaaattacgggagtgtactnagctttgagcctagga

SEQ ID NO: 165511 - DNA, 398 bp, Homo Sapiens
  misc_feature (183)..(183): n is a, c, g, or t
  misc_feature (185)..(185): n is a, c, g, or t
  misc_feature (197)..(197): n is a, c, g, or t
gaaggctgttgcctgtaaaaatgaattccaaactttcctgaaggtggaagcctgttgccatggccccggaaatggaaggaggctgcctgcaaaaatggtaaacttgcctgcctaagtcgggggctgtggaatctgttgtaatggagggggctgtaagtcggggtggaggcagttgccataagnanacaccacagcanagctgctgctgcctgcaacactgaccgagtgacaatctgggcttgttgactgggctggatagtagctgtactggtttggcctagttggagccctcgggaggtcaccactgtggctgggataacagtaaccatccctccttgagacatagtaatagaagagggcaacatttgtttggtaataatcaacttggtgatattggg

SEQ ID NO: 165512 - DNA, 436 bp, Homo Sapiens
  misc_feature (202)..(202): n is a, c, g, or t
  misc_feature (210)..(211): n is a, c, g, or t
  misc_feature (214)..(214): n is a, c, g, or t
  misc_feature (317)..(317): n is a, c, g, or t
  misc_feature (322)..(322): n is a, c, g, or t
  misc_feature (328)..(328): n is a, c, g, or t
  misc_feature (392)..(392): n is a, c, g, or t
cccaatatcaccaagttgattattaccaaacaaatgttgccctcttctattactatgtctcaaggagggatggttactgttatcccagccacagtggtgacctcccgagggctccaactaggccaaaccagtacagctactatccagcccagtcaacaagcccagattgtcactcggtcagtgttgcaggcagcagcagctntgctctgnngtnttctgatggcaactgcctccaccccgactacagccccctccattacaacagatgccacagcccccgactcagcagcaagttaccattctgcagcagcctcctncactncagggncatgcaacagccttccaccttcagaaagttcgaattaatttgacagcaacagccttccttcctntggcaggttcaaggagtgttgccttttacccactttggaaaatg

SEQ ID NO: 165513 - DNA, 510 bp, Homo Sapiens
  misc_feature (238)..(262): n is a, c, g, or t
  misc_feature (365)..(385): n is a, c, g, or t
  misc_feature (500)..(500): n is a, c, g, or t
atgatctctgccaagctatgtagccctggagcacgatatatgatctgctgccaagctggaagttaagttttcctggtttatgccatcggcaccgtactggatcctggccaccgactatgagaactatgccctcgtgtattcctgtacctgcatcatccaactttttcacgtggattttgcttggatcttggcaagaaaccctaatctccctccagaaacagtggactctctaaaaaannnnnnnnnnnnnnnnnnnnnnnnngtcaagaaaatgacggtcacagaccaggtgaactgccccaagctctcgtaaccaggttctacagggaggctgcacccactccatgttacttcctgtcgctttnnnnnnnnnnnnnnnnnnnnnataaagacaaaccaatcaaccacgacaaaggaagttgacctgaacatgtaaccatgccctaccctgttaccttgctagctgcaaaataaacttgttgctgacctgctgtgctcgnagtagattcc

SEQ ID NO: 165514 - DNA, 454 bp, Homo Sapiens
  misc_feature (83)..(103): n is a, c, g, or t
  misc_feature (207)..(231): n is a, c, g, or t
tacgactcactatagggcctatagggcatggttacatgttcaggtcaacttcctttgtcgtggttgattggtttgtctttatnnnnnnnnnnnnnnnnnnnnnaaagcgaagcagaagtaacatggagtgggtgcagcctccctgtagaacctggttacgagagcttggggcagttcacctggtctgtgaccgtcattttcttgacnnnnnnnnnnnnnnnnnnnnnnnnnttttttagagagtccactgtttctggagggagattagggtttcttgccaagatccaagcaaaatccacgtgaaaaagttggatgatgcaggtacaggaatacacgagggcatagttctcatagtcggtggccaggatccagtacggtgccgatggcataaaccaggaaaacttaacttccacttggcaggctctgtgaggttaactggggtggcttcaccttc

SEQ ID NO: 165515 - DNA, 857 bp, Homo Sapiens
ccagtcaccaagacaggcatctcaaatcggctgattctgcatctggaaactgccttcatcttgaaagaaaagctccaggtcccttctccagccacccagccccaagatggtgatgctgctgctgctgctttccgcactggctggcctcttcggtgcggcagagggacaagcatttcatcttgggaagtgccccaatcctccggtgcaggagaattttgacgtgaataagtatctcggaagatggtacgaaattgagaagatcccaacaacctttgagaatggacgctgcatccaggccaactactcactaatggaaaacggaaagatcaaagtgttaaaccaggagttgagagctgatggaactgtgaatcaaatcgaaggtgaagccaccccagttaacctcacagagcctgccaagctggaagttaagttttcctggtttatgccatcggcaccgtactggatcctggccaccgactatgagaactatgccctcgtgtattcctgtacctgcatcatccaactttttcacgtggattttgcttggatcttggcaagaaaccctaatctccctccagaaacagtggactctctaaaaaatatcctgacttctaataacatggatgtcaagaaaatgaccgtcacagacccaggtgaactgcccccaagctcccgaaaccaggttctacaagggaggctgcacccactccatggttacttctggcttcgcttttcccctaacccaaccccccggcaataaagaacaaaccaattcaacccccgaaaaagggaagttgaccctaaaacatggtaacccatgccccctaccctggtaaccctggcttagctcgaaaata

SEQ ID NO: 165516 - DNA, 758 bp, Homo Sapiens
  misc_feature (97)..(110): n is a, c, g, or t
  misc_feature (665)..(665): n is a, c, g, or t
aataatttgcaacctaccaagttaacaggtaaggccaggttaacatgttccaggtcaaacttccctttgtcctggttgattggtttgtcctttaatnnnnnnnnnnnnnntaagggaaagcgaagcagaagtaacatggagtgggtgcagcctccctgtagaacctggttacgagagcttggggcagttcacctggtctgtgaccgtcattttcttgacatcaatgttattagaagtcaggatattttttagagagtccactgtttctggagggagattagggtttcttgccaagatccaagcaaaatccacgtgaaaaagttggatgatgcaggtacaggaatacacgagggcatagttctcatagtcggtggccaggatccagtacgggtccgatggcataaaccaggaaaacttaacttccagcttggcaggctctgtgaggttaactggggtggcttcaccttcgatttgattcacagttccatcagctctcaactcctggtttaacactttgatctttccgttttccattagtgagtagttggcctggatgcagcgtccattctcaaaggttgttgggatcttctcaatttcgtaccatcttaccgagatacttattcacgtcaaaattctcctgacaccggaggaattgggggcacttncccaagaatgaaatgacttgtccccttctgaccggcaccgaagaaggaccagcccagatgcggaaaagcagacagcagcagcatcaccatact

SEQ ID NO: 165517 - DNA, 402 bp, Homo Sapiens
taaggggaaaaacgaaaccagaagtaaacatggaagtgggtgcaaccctcccctgtagaaccctggttacgagagcttggggcagttcaccctggtctgtgaccgtcattttcttgacatcaatgttattagaagtcaggatattttttagagagtccactgtttctggagggagattagggtttcttgccaagatccaagcaaaatccacgtgaaaaagttggatgatgcaggtacaggaatacacgagggcatagttctcatagtcggtggccaggatccagtacgggtccgatggcataaaccaggaaaacttaacttccagcttggcaggctctgtgaggttaactggggtggcttcaccttcgatttgattcacagttccatcagctctcaactcct

SEQ ID NO: 165518 - DNA, 390 bp, Homo Sapiens
  misc_feature (28)..(28): n is a, c, g, or t
  misc_feature (66)..(86): n is a, c, g, or t
  misc_feature (95)..(95): n is a, c, g, or t
  misc_feature (98)..(98): n is a, c, g, or t
  misc_feature (170)..(170): n is a, c, g, or t
  misc_feature (176)..(176): n is a, c, g, or t
  misc_feature (190)..(214): n is a, c, g, or t
  misc_feature (233)..(233): n is a, c, g, or t
  misc_feature (313)..(313): n is a, c, g, or t
  misc_feature (348)..(348): n is a, c, g, or t
  misc_feature (366)..(366): n is a, c, g, or t
ggtagggccatggttacatgttcaggtncaacttcctttgtcgtggttgattggtttgtctttatnnnnnnnnnnnnnnnnnnnnnaaagcgaanagnaagtaacatggagtgggtgcagcctccctgtagaacctggttacgagagcttggggcagttcacctggtctntgaccntcattttcttgacnnnnnnnnnnnnnnnnnnnnnnnnnttttttagagagtccactntttctggagggagattagggtttcttgccaagatccaagcaaaatccacgtgaaaaagttggatgatgcaggtacaggantacacgagggcatagttctcatagtcggtgccagntccagtacggtcccatgnataaaccagggaaacttacttcca

SEQ ID NO: 165519 - DNA, 501 bp, Homo Sapiens
  misc_feature (483)..(483): n is a, c, g, or t
gagaggccagtcaccaagacaggcatctcaaatcggctgattctgcatctggaaactgccttcatcttgaaagaaaagctccaggtcccttctccagccacccagccccaagatggtgatgctgctgctgctgctttccgcactggctggcctcttcggtgcggcagagggacaagcatttcatcttgggaagtgccccaatcctccggtgcaggagaattttgacgtgaataagtatctcggaagatggtacgaaattgagaagatcccaacaacctttgagaatggacgctgcatccaggccaactactcactaatgggaaaacggaaagatcaaagtgttaaaccagggagtttgagagctgatgggaactgttgaatcaaatcgaaggttgaagccaccccagtttaaccttcacagagcctgcccaagctgggaagtttaagtttttccgggggttatggcccttcgggacccgttanttggattccttggggcaa

SEQ ID NO: 165520 - DNA, 175 bp, Homo Sapiens
ggatccccgacaccgaaaccctgaaattaactgataaagtaatttcttccaagtaggtatatttacgccatcaacctctgtagcacaaataaggaagaaaagtagatttaaaaatgcctgctgaatatggttatgatgggggaggaggaatgagcttccaataagggtttgatga

SEQ ID NO: 165521 - DNA, 392 bp, Homo Sapiens
tcatcgaaaccctgaaaacacccagcatggttcctggcatgtagcagttagttagtaaatattagttaaatctgctcttctttccagccctcctctgtgctttacagaaataaggtgcctctactattgtgagtcagattagtataaactatttaggcacagggtttgatgacggtcatcgaaaccctgtcatcaaacccttcatcgaagcaatataagaaggccccccaaataaccgcgttaattggctgtagtggtctacttgtagggtttcgatggtcatcgaaaccctaggtgtgagccaccatgcctggctaataaagagctcttatccaccttttagatttcatttgctaacttggggagagtggtttaaatggagggttgatgac

SEQ ID NO: 165522 - DNA, 902 bp, Homo Sapiens
gggaagagctgcgggccgggtgcggacggcggaggcggcgggactggtccctgcagctcttcagtgggtcatctgtgtgtcacagcctcagaagaccagcgagatggctgccaacaagagtaagggccagagctccttggccctccacaaggtgatcatggttggcagcggaggcgttggcaagtcagccctgacgcttcagttcatgtatgacgagtttgtagaagactatgaacctaccaaagctgacagttatagaaagaaagtggttcttgatggggaagaagttcagatagatattctggacaccgctgggcaagaggactacgcagccattcgagataactactttcggagtggggaagggtttcttcttgtgttctcaatcacagaacatgaatcctttacagcaactgccgaattcagggaacagattctccgtgtgaaggctgaagaagataaaattccactgctcgtcgtgggaaacaagtctgacctagaggagcggaggcaggtgcctgtggaggaggccaagagtaaagccgaaaagtggggcgtgcagtacgtggagacgtcagcgaagaccccgggccaacgtggacaaggtgttctttgacctaatgagagaaatcagaacaaagaagatgtcagaaaacatagacaagaatggcacgaaaagcagcaagaacatgaaaagttttaaagaaagatgttgcttactatgagtgtcaaggtgacggataaagccagctgctcctaaggacacagggctgggttggtaaagagaaggctatggttgacttcttgcttgtgcttcccactctccccgacttcattcactcaaacttctttaaatggggaaaaatttgtgactcagtggctgtcagatgaggtggtaagtc

SEQ ID NO: 165523 - DNA, 1239 bp, Homo Sapiens
  misc_feature (142)..(142): n is a, c, g, or t
  misc_feature (169)..(180): n is a, c, g, or t
tgggtaacgtaattattaaccccaatgttaatttaccaggtaccattaaaaaatggttggttttaacattaccaaaataagccctggtaagttttaaatataactagtgttattaacccaattgtacagaccgttctttatnccaatacatccaattatcaggaatgcnnnnnnnnnnnnccataaataatgcccatttaccaggtgacattttaaacaatgaaaaacaccaacggctctgactgacaactggggcattggtccataaaaaccctttctaaaaatagaaatatttgtagcagcaatgctgtctgtaagcatctgaatacgagtcattgcaagaccatttcaataaattttagttattaaccgtatcttacaaaaaagtctacacataaatttatcttccaaatatggaagaaacaaacaatgtcccacgttgtagtgtcctgcaagtgtcacattgatgcttataacaaaatccatctgtgatcaggcataccacactcacacgacggttcacacagcatatccacaagggaaaataaagaactgaaacactgcgataggaaaagctttggagctaacacaatctcttcagaaaaggcacatttcataatattcgtcatcacagcccagacagatctgcaggagaccttttttagaacagcgtccgctttctaacgaaactcctgcctccgtctaaggcggcactctaacgctcgtttcagagatagcaccacgttggaaggaagaataaaaatgaaaacctcatgagctcactgaggagaatgtgctcttcaaaaagcttccagcgaacagtgtgcaataagattgctaagcttccagagatgtgcaaattctcttgtaagatgtcctgtcagctggcggctccaccaaaaggctaactaaaacattcggaaacacacataaaatcctttaaaaccaagccctaacagggttcagaggaaagagtccgtgggaggcgcataggaaaagcctaggaaagcctcggcagcttccttgacgctggctgtgacgaggacgctgtcaggggacttgccaatggagttggggacaggctcttcggtaaactcggggtcaaagtgccgtaggtcgttgggcccactcacatttgggttaaaagggggagtaatcttcttattaatgagatcatcccagttaattaaggagaagaagacatgactcttatctccagaagtcatcctgcccctatga

SEQ ID NO: 165524 - DNA, 1219 bp, Homo Sapiens
cctcgtgaccatattatagactgtggagatatagtctggattcttgcttttgggtcatcagttccagagaaacagagtcgctgtgtaaatatagaatggcatcgcttcagatttggacaagatcagctacttcctgctacagggttgaacaatgggcgtatcaaaatatgggatgtatatacaggtatggcattcatagtttttaaagcaacatgtattattttatgatgcagggcactgcttataggcactggaattgggatttgaggatttcagcttactgatgggagcaagatggccatcttctcccatcagctttgccgccttagtgatgtaaggctgcttttcactgtcatttaaagtatgccacatctcacccagcttttgtgccacgtctccaatagagatgccggggtttgtggatttgatcttggggcggaattctgaacagtacaggaacaatccacacggtggcctgacgggcgccatattcccactcttgctcccatcaggatagtttactgaagcacaatctcttatactagtgggacataatagcgagaaaaaggaagcaagataaatgggtatgtaggatgaagagttatttaaaatggaactaaagatagaaggaggactgtaggaagaaatggaataatttaaatgtgaggaaagatatctgtggtagacatgtccttccatgactaatttctaattgtaactcaacacacattgaggtatgggccctcctcagtgactttaactagctcagaaacgtactcccccaccaaccccacctcaccgccccccatcccggttctgggagagcattgttattaaggatgcatgacaggaatgttggcagaactggaaagtattaaaaaagcattatcagacagtcttgatattatacattttcagaaatatattaaaaataataaactaaaacccatgatttcaaaagctcactcccacccattttcccctaccttataccctgttgggccgcctccggcctctgaaaaacttttctaaaaccattctgtttgggccccgcggggcccaattagggaaagccgaacatgggtccataacccggttttcctaaggagaaaacccctggtcttggaattaaccgccttgggatttcctcccccatataaaaaatacgccccggtgcggggaaacccgaatgcggttcccgcaacaaattctccccaat

SEQ ID NO: 165525 - DNA, 579 bp, Homo Sapiens; identical to SEQ ID NO: 3440

SEQ ID NO: 165526 - DNA, 468 bp, Homo Sapiens
  misc_feature (35)..(36): n is a, c, g, or t
  misc_feature (338)..(374): n is a, c, g, or t
  misc_feature (402)..(402): n is a, c, g, or t
  misc_feature (416)..(416): n is a, c, g, or t
  misc_feature (439)..(439): n is a, c, g, or t
cattactgcgagagtctgcggccccggtgctccgnnttcgatgagataatattcgctgaggactaccagcgtgtggaagatctggcctggcaccgaaagcactttgtctgtgagggttgtgagcagctgctgagcggccgggcgtacatcgtcaccaagggtcagcttctgtgcccaacttgcagcaagtccaaacgctcctgaagggctgcccacccacagccagaatccacaggatcccaccgagaaggagagccagggtgtgccgagaccatcctaagggtccgatgtgacagcaagcaagtgaaataaacaatgatttgcttttcagtgaggannnnnnnnnnnnnnnnnnnnnnnnnnnnnnnnnnnnnttctagggtttggggtgggttggtaggntcctttgaggggtncagttagtttttcaaaaacccanaattattttttaaggaagtttttaggggt

SEQ ID NO: 165527 - DNA, 875 bp, Homo Sapiens
tgagctcggtaccggacttcctggtgtgttgtgcacaagctgggccatgccctggggctcgagcattccagtgacccctcggccatcatggcacccttttaccagtggatggacacggagaattttgtgctgcccgatgatgaccgccggggcatccagcaactttatgggggtgagtcagggttccccaccaagatgccccctcaacccaggactacctcccggccttctgttcctgataaacccaaaaaccccacctatgggcccaacatctgtgacgggaactttgacaccgtggccatgctccgaggggagatgtttgtcttcaaggagcgctggttctggcgggtgaggaataaccaagtgatggatggatacccaatgcccattggccagttctggcggggcctgcctgcgtccatcaacactgcctacgagaggaaggatggcaaattcgtcttcttcaaaggagacaagcattgggtgtttgatgaggcgtccctggaacctggctaccccaagcacattaaggagctgggccgagggctgcctaccgacaagattgatgctgctctcttctggatgcccaatggaaagacctacttcttccgtggaaacaagtactaccgtttcaacgaagagctcagggcagtggatagcgagtaccccaagaacatcaaagtctgggaagggatccctgagtctcccagagggtcattcatgggcagcgatgaagtcttcacttacttctacaaggggaacaaatactggaaattcaacaaccagaagctgaaggtagaaccgggctaccccaagtcagcctgagggactggatggctgccatcgggagccggccgatgatggggactgatggt

SEQ ID NO: 165528 - DNA, 378 bp, Homo Sapiens
tcatcgaaaccctaggttacgtcgaccccctctaagatacccaagatatgaagccaccagtgtccaacagaaggtcaatttctctgaagaaggagaaactgaagaagatgatcaagacagctctcacagcagtgtcactactgttaaggccagatccagggattctgatgaatctggagataaaaccaccagatcatctagtcaatatatagaatcattttggcagtcatcacaaagtcaaaacttcacagctctatgataagcaacctccagtgctaagctcaggatatcaaaaactccccaggaatggccccacacactgcaagaataaggaccaggatgcaaatgacgcactctgaaagcagagcgggatctcag

SEQ ID NO: 165529 - DNA, 487 bp, Homo Sapiens
attgtgttttcaatggagaaatacatcatctgtttacaaaatagctcttgaaaaatacaaggagtacagatactataaaacaaagcaaactccagtcatgagacactacatacatcatgcgaaagaacagtctgatctccaggttatgaaaactataattaaaaagtcactacacagaaaaggtccaagtttccagcttggcaaaacttgggtgcagttacatgaaacgtttaataaactgaattgttttccccaatgtgtaaacaaaatgacaagactaaatctgtgcctggtaatttcaatctaactctgaagctacacaaaacacacagacaccttgtacatttcacctgttagtatgaccatctttttttcttcggtggtggaaggaagggcaaggtgactgtgtaaagcaaagatgtgggaagtagaaatattgtttactagacattataaagtcatggtgaaaagaaagcttcgattaatg

SEQ ID NO: 165530 - DNA, 1605 bp, Homo Sapiens
cggacgcgtgggcgaccacgcgtccgatggaatgttttatagtgcatacaaatcagcgatcagccagcaaatatttttctttgagcttgtgaaagctctgtgttcttttgccttcaatctgttgtcttcaaaacgaaacaaacaagaaaaagcttcttgcgcctttccctcccctgttttcttcctttttctttttgcttgtatgcacaaggtaggacttacttcgtaagaaacaaaatgccagtattttcttaagccatgatgtgaaaccaatgaccctgtgaccacatggcacagaacactaaattttggtcccatggctgaaacttgagggtgactaaaagtaatgcctgtgaaacatgatatctatctgggatggccatttgatctctaaaaggaattttgtacactccacagaactcctatctatagtaaaattgattttcagttttaaatgtgggcaaaaaggcattttctccaagattttaaaactaattcttatttttaaatggtttaccaaaatttgtcagtacattttacgtgtagaagcattttaaaaatcatttctagcaagcacttgacatctagtcagctctctactcctttattttgttttatcaaaagattaagagctcctttctttgaataaaataatttctcataattaagcagtagaagatctatcttcacaaagtatgagggatgccagatgttgataaacttactctttctgaatctggacaaagtcgacttaacagatttttctgatgagcatgttttatgaatcctccattgtgctccattctatcacatgtgcatttttcatgttaaactgcaattacttaatctcttcccctatccttctaaattaattttctgaagttggagtgtagtcttttcccccttaggctatgcattaatcgaagctttctattcaccatgactttataatgtctaggaaacaatatttctacttcccacatctttgctttacacagtcaccttgcccttccttccaccaccgaagaaaaaagatggtcatactaacaggtgaaatgtacaaggtgtctgtgtgctcgtgtagcttcagagttacgattgcacattaccacggcacagatttagctcttgtcacttcgtttacacattggcggacaaacaattcacgtcttattaaacgctttcatgtaactgcacccaaagttttgccaagctggacaacttggaccttttcctgtgtacgtgactcctcaacttatagttttcataacctggagatcagcactcgttgctttcgcatgatgctatgtacctgtctcatgactggcagctccgctccgctcccatactatctgtactccttgctatttcccaagagctatttcgtaaccagatgatgtcttctcccattgaaacacccatcaacaccacaaccgcgccaacccttcagaacacagcccagcaccacacaccacccagcgcgagcacccgccaaccccgacccccatcgcacaacccgcaccagccccagcgcgcggcgcccataccacccgcagcgcagccccacccacagaccgaccagaaaagcgcggcccccgaggcgcc

SEQ ID NO: 165531 - DNA, 258 bp, Homo Sapiens
caaacgcagagaggaagcagaaacaaatcatccccaagaggggaacagctgcagagtgggttattcatacaacacagtactatacagccatccagatgaactccatgtgcgtgtactgatgtgtttaaagtggaatgaaaaatacacatagaaggtatcacatgttgcgctcatcttcctgcaaaatttcagacaacaaaataatagtcatatgccgtttgtgcacacatctgtctgcggtaactacagaatcaaaaa

SEQ ID NO: 165532 - DNA, 866 bp, Homo Sapiens
atccccaaacgcagagaggactttggtcatctttctgttcctgttgtacgagcccacgagcctgctggtgctggtcggggcgggtgttggagccgccattgagctgtggaaagtgaagaaggcattgaagatgactattttttggagaggcctgatgcccgaatttcagtttggcacttacagcgaatctgagaggaaaaccgaggagtacgatactcaggccatgaagtacttgtcatacctgctgtatcctctctgcgtttgcaaacgcagagaggacaaacgcagagggaacgcagagaggacaaacgcagagaggttctcgcgttgaccaaggaacgtcatactcctgcttgctgatcctctcttgcgttcaaacgcagagaggacttgaataggagatgttctcgcgttgaccaaggaagtcatactcctgcttgctgatcctctctgcgtttgaaacgcagagaggacaaaaagcgaaaccctatcctcaaatacattgggaagccaaaaagctcttctcaaagcacatttcatatccccttgtcccctgtggaagtcaaaccaggcaatgtgaggaacatcattcagctctttgagaacaaccagcagtatgatgccccagaacctgggacacagcgactctcgaccagaagctttcctgaggacctgctggagagtgacagttcacgctcagagattcgcatgggccgctctgaaagcctcaagggccgggaagagatgaaacggtctcgaaaggcagagaacgtgctccgctctcgcagtgatgttgacatggatgctgctgcgaagaaaactcgcatgcaccagtcagccaagtcctctcctctcgggggatcctc

SEQ ID NO: 165533 - DNA, 218 bp, Homo Sapiens
caaacgcacagaggagccatatcagtgtcagtattgtattttcaggtgtgcagatcaatcaaatctgaaaactcacattaagtctaaacatggtaacaatttgccatataaatgtgagcattgtccccaagcatttggtgatgagagggagcttcaacgccatctggatttgaaacaaggacatagacacaccaaagtcctctctgcgtttaggggat

SEQ ID NO: 165534 - DNA, 311 bp, Homo Sapiens
caaacgcagagaggaagcatcagatcatggttgtggtcctccacatcgctgctgttgtagcaggggtgtgggatggactgaaccacaggtatttcttgctctgggccatctttattctgtaggctgtggtctcccaggcgtactgtgtatttcggttttttacagtgggcagctgtaaggacccagttgccacctacaaggacaccgccacagagtagttgctggccctggaacaaggccgcctgccaaggctgcgaatggggtaaacactcatgacaccccagcacaatgtcctctctgcgtttggggat

SEQ ID NO: 165535 - DNA, 414 bp, Homo Sapiens
gagacgtaacatgtctaagaaaacagtttcttgttctgtgaacttcaccagactacagtagatcacaaatattcaagctgaaatctaccagaaaaacctggaaagtgaactccggaaactagaaaaagatacagcagatggggttcatcctattcttttgtggctcagacagtgacatactgctgtacgcggggatctcgaacacgcagagaggacactgctcagctggctgctgatctgccggaaggaatggctaagcccgtggatcttgcgggaggtgagactcggggttgagtcgaggtgaggcggggaaaaagattcagaactttcactgctcaggctgtccatgtcactgaggtcgaaggttactgccttcttggtgggggatcctctctgcgttaggggtaccgagct

SEQ ID NO: 165536 - DNA, 462 bp, Homo Sapiens
ctcggtaccccaaacgcagagaggaaaagctcacatctaaacagcctgtaggttttgtcagttttgacagtcgctcagaagcagaggctgcaaagaatgctttgaatggcatccgcttcgatcctgaaattccgcaaacactacgactagagtttgctaaggcaaacacgaagatggccaagaacaaactcgtagggactccaaaccccaagatcctctctgcgtttgcaaacgcagagaggaagagcatttttactttttcctccatgtttgttctgcagcatttccattgatgcatgctattgtagacttcttaggttgaccttggccttgacctccaccactagctcatgacccaaaactgaagatgtgcatcagaaagggacagattcggtctttctgctgtaaaagatattctgcctaagtgcctgctaaaatgttgtgcatagtcctctctgcgtt

SEQ ID NO: 165537 - DNA, 889 bp, Homo Sapiens
tcttataaagctcacatctaaacagcctgtaggtttgtcagtttgacagtcgctcagaagcagaggctgcaaagaatgctttgaatggcatccgcttcgatcctgaaattccgcaaacactacgactagagttgctaaggcaaacacgaagatggccaagaacaaactcgtagggactccaaaccccagtactcctctgcccaacactgtacctcagttcattgccagagagccatatgagctcacagtgcctgcactttaccccagtagccctgaagtgtgggccccgtaccctctgtacccagcggagttagcgcctgctctacctcctcctgctttcacctatcccgcttcactgcatgcccagctctgtgaaggtcagactgtgaggagaagccaccccttgagcgctccgtctcctgatagtgccagcctggctggtttcctgtttgatgcgctggctccctccctccgaggctacttctcagggctggaagtcccgtcagttctgctgaatactatgtcccaggtgtgtgatggcggctgcaatctgtcttgtgggtattaatgcaatcttcagtggtggctactgttctctagctgttctacaaaactggagcatgctggcttgaaaaacccttgcccagttttgatcccttcaagaactttgtcacagcctctatcacaacatctgtttttctcgaagaaaaaaatataattaataaaaatgttttactcttttacaatgtataattgtaagaaatagcgtattatttgtgaatgcatggtctgaaatttctgtacagtttggagatattttcaaacgaaacgtaagagaagtcaacaataaaaccaagaaaagtgagtatttttataccaaacattttaa

SEQ ID NO: 165538 - DNA, 435 bp, Homo Sapiens
  misc_feature (30)..(30): n is a, c, g, or t
  misc_feature (60)..(60): n is a, c, g, or t
aaacccgtggggactccaaaaccccggtantcctctgcccaaaactgtacctcagttcantgccagagagccatatgagctcaaagtgcctgcactttaccccagtagccctgaagtgtgggccccgtaccctctgtacccagcggagttagcgcctgctctacctcctcctgctttcacctatcccgcttcactgcatgcccagtgtttctctcctgagcaaagcccaacacacctgtcttttgtccacttctccagcaaattagatttgtctctgggaatgtgtttgtaacataccaacctactgcagaccagcagagggagctcccatgttgaatttgtttgttagctattttcccccctttcacaaaaactatttcttgacgacctttgagagatttcaataaaaattttaatcagagcaaaaatgaactc

SEQ ID NO: 165539 - DNA, 447 bp, Homo Sapiens
  misc_feature (26)..(26): n is a, c, g, or t
  misc_feature (51)..(51): n is a, c, g, or t
  misc_feature (193)..(193): n is a, c, g, or t
tgtttgggctttgcccccaggaaaanaaacactgggccatgccagtgaaancgggaataggtgaaaagccaggaggaaggtaagagcaggcgcctaactcccgcctgggtacagagggtacggggccccaaacttcagggctactggggtaaaatgcaggcactgtgaagctcatatggctctctggcaatgnaactgaggtacagtgttgggcagaggagtactggggtttggagtccctacgagtttgttcttggccatcttcgtgtttgccttagcaaactctagtcgtagtgtttgcggaatttcaggatcgaagcggatgccattcaaagcattctttgcagcctctgcttctgagcgactgtcaaaactgacaaaacctacaggctgtttagatgtgagctttataagagaaccctcatagcccttaaatggtctgaaaag

SEQ ID NO: 165540 - DNA, 761 bp, Homo Sapiens
caaacgcagagaggaacatgtctcctgatctacgacaagacttcaacatgatggagcagaggaaacgagttactcagatcctgcaaagtcctgcctttcgggaagacttggaatgccttattcaagaacagatgaagaaaggccacaacccaactggattactagcattacagcagattgcagattacatcatggccaattctttctcgggtttttcttcacctcctctcagtcttggcatggtcacacctatcaatgaccttcctggtgcagatacatcctcatatgtgaagggagaaaaacttactcgctgtaaacttgccagcctgtacagacttgtagacttgtttggatgggcacacctggcaaatacctatatctcagtaagaataagtaaggagcaagaccacattataataattcccagaggcctatctttttctgaagctacagcctccaatttggtgaaagtcaatataataggagaagtggttgaccagggaagtaccaatttgaaaattgaccatacaggattcagtccccatgctgcaatctattcaacacgtcctgatgttaagtgtgtgatacacatccatacccttgcaacagcagctgtatcctccatgaaatgtgggatccttccaatttctcaagagtctcttcttctgggagatgttgcctattatgactaccaagggtcacttgaagaacaggaggagagaattcaactgcagaaggttcttgggacccagtttgtaagg

SEQ ID NO: 165541 - DNA, 463 bp, Homo Sapiens
  misc_feature (21)..(21): n is a, c, g, or t
tactgctaagtaagaaaagtncatggtgaaaaaaaatgtgtccaccatgctactatttaactaggaatctgaatacaaatttgcttatgctaaaagcaagtgcaggaaacgattatttatggaggagggtggaaaccaggtggtgggggacaggattcacagctagatatgtctgaatctattttgtttttgttttgaattcaaaagcatataaatgtttaacacgactataaaaaataatcatgaaacaaagcaatctctgaaatttgaaagcgaaatgacatgaatgaacctaagtctcaaattagtggcatactcacagagaggaaggatttcaaatgatacagtacgtagatatctcactaagaaaaagaattgtgaaacaattttacattgtgttttaggattattattgatgatagtgttgttaccgtttacatctgcctgcctgccgtcctgcatt

SEQ ID NO: 165542 - DNA, 192 bp, Homo Sapiens
cggtaccccaaacgcagagaggactcatgtcattgagcagatttccacgtgaactagcgcactttaccttaacacattgcatttctgagatgctaattaaaagatgtttaccagaggggctgagtgccagattaagaacagcacggtcaaccagattaagttggttgatctcgcaaagagccacatactccc

SEQ ID NO: 165543 - DNA, 246 bp, Homo Sapiens
aatgaagattgccgaatgcatgggtgctgaggcgggcaaaagccggtttgccatggcttcctatagctatggcggtaatcccaacctgagggcaaagcgcatcgtggcgatacccaatgatgtcgatgtcgaggtgggcgattgggttgaggtcagcatcaccgactgccgtctggcgcttaaaaaataaactctggaagcaaaggcccttgagtcacgtacatccttccttcctctctgcgtttg

SEQ ID NO: 165544 - DNA, 314 bp, Homo Sapiens
tagagctctgggtttataaaatagcaatttttcaaaataaaacaacattatttcctctgatgagtgctcctttgggccactagtgaatgtttgttgactcctattcaccaatgattctaatgcacaatttggctgtttcttcctcataccagaagagattaaaaccaatgaactttacaaggtagtgggaaagactgtgaaaggcaacacagtgacagcagagatggccgctgacagcctggggggataggaggaaaaaatgactgagtctcagcagagcataacaatagatggtcatgtcctctctgcgtttg

SEQ ID NO: 165545 - DNA, 246 bp, Homo Sapiens
caaacgtcagagaggagtccacgaagaagaacaagaagaaaccaccgaagaaaacgtctcgttatgaaaggacagataccggcgagataacatcctacatcactgaagatgatgttgtctacagaccaggagactgtgtgtatatcgagagttggagccaaaacacactggtatttcatctgtagcattcaagacttcaaaaagccctttagaatatttctccaagtcctctctgcgtttggagga

SEQ ID NO: 165546 - DNA, 277 bp, Homo Sapiens
agctcggtacccctgacgcagagaggaacataagccctgagagtgcaaaagagctgtggtgggcagcccaagagtgccaagccacaatttatagccagcattcaagtgggagagaagcccacactgtcagaacattgagagggagcatgactgcaacatgtcagaaaatataggggagccacatgaccaaagcaagagcctaccaactaaccagtataactaagcaccacctagctggatcacatcccgaagttccaacaccaaaaacatactctca

SEQ ID NO: 165547 - DNA, 424 bp, Homo Sapiens
gcacaagactaatcccttctgccacctgagctgggctcacccagacccgatcaagacctaggacaagctgactccctgctattcagcagcctgcactctgctccaggaggaactgcacggtctatagacagcaccaagagtaggagtcgggatggaagaggccctggagccccacaaacgacacaaccccttcttgctgcaagagaggagtgggagaagccaggacttggtgacctgtatgatgaacagcaattggagacaggagccacccagcagtccttccacctgcatggcactggccagcccaactttcatctatcctctctgcgtttgcaaacgcagagaggacaaggggcccaaggagtgccatgtagcactcctgctttgtgaggacagctcatgtggtgggtcttgccggctctat

SEQ ID NO: 165548 - DNA, 928 bp, Homo Sapiens
  misc_feature (738)..(801): n is a, c, g, or t
gacccagttaaaatacatcaactgcgtgtgtagccgtgatggtctcttctcggcggagtccgggaagtgaacacggcttgagttatgcatgacgtaagtaggagttcaggatcacttcgtggtcattgctagatgacgaccgttccgttgcttctcctctctgcgtttgagaggatgccacagctcctgtgaatatggccggctccagaaccgccgcagccttggcccccgcgagcctcaccagtgctaggatggctccagcattgtctggtgcaaacctcaccagccccaggatgcccctttctgcctacgagcgtgtcagtggcagaacctcaccaccgctccttgaccgagctaggtccagaacaccaccgtctgccccaagccaatctaggatgacctctgaacgggctccctccccttcctctagaatgggccaggctccttcacagtctcttctccctccagcacaggatcagccgaggtctcctgtgccttctgctttttcagaccaatcccgttgtttgattgcccagaccacccctgtagcagggtctcagtccctttcctctggggcagtggcaacgaccacgtcctctgctggtgatcacaatggcatgctctctgtccctgcccctggggtgccccactctgatgtgggggagccacctgcctctactggggcccagcagccttctgcattagccgccctgcagccagcaaaggagcggtggagtnnnnnnnnnnnnnnnnnnnnnnnnnnnnnnnnnnnnnnnnnnnnnnnnnnnnnnnnnnnnnnnncctcctctggctccagttctagtgactcagagggctctagccttcctgtgcaacctgaggtgacactgaagagggtccccagacccaccccagccccaaaggaggctgttcgagagggacgtcctcc

SEQ ID NO: 165549 - DNA, 350 bp, Homo Sapiens
  misc_feature (52)..(52): n is a, c, g, or t
ctccctggttcatgtgttctggggggtttggggtgggagggaatcagatggnagttggggaggggagatacagttcaggataccccagcctggagtcagggccagggagcatggccccacttgtatccagaagttcccaggggtgattgtgatggtggttgggactggaggttgtataaggtgttcttgaaaggaaggggcaggagttggaattagttggtccctactgtcccccatgaggttgtgaacccctccccccaacttttcatgtttcttaaaggcattttggttttttaaaatctgtacagcaagagcaactttttctgtcaaataaaaatgagaaatgcagg

SEQ ID NO: 165550 - DNA, 1175 bp, Homo Sapiens
  misc_feature (979)..(979): n is a, c, g, or t
  misc_feature (997)..(997): n is a, c, g, or t
  misc_feature (1037)..(1046): n is a, c, g, or t
  misc_feature (1061)..(1061): n is a, c, g, or t
ggggcatgcgcgggggccatattagcagcggttattcggtgagcggtggtggtttattcttccgtggagttaagggctccgtggacatctcaggtcttcagggtcttccatctggaactatataaagttcagaaaacatgtctcgaagatatgactccaggaccactatattttctccagaaggtcgcttataccaagttgaatatgccatggaagctattggacatgcaggcacctgtttgggaattttagcaaatgatggtgttttgcttgcagcagagagacgcaacatccacaagcttcttgatgaagtctttttttctgaaaaaatttataaactcaatgaggacatggcttgcagtgtggcaggcataacttctgatgctaatgttctgactaatgaactaaggctcattgctcaaaggtatttattacagtatcaggagccaataccttgtgagcagttggttacagcgctgtgtgatatcaaacaagcttatacacaatttggaggaaaacgtccctttggtgtttcattgctgtacattggctgggataagcactatggctttcagctctatcagagtgaccctagtggaaattacgggggatggaaggccacatgcattggaaataatagcgctgcagctgtgtcaatgttgaaacaagactataaagaaggagaaatgaccttgaagtcagcacttgctttagctatcaaagtactaaataagaccatggatgttagtaaactctctgctgaaaaagtggaaattgcaacactaacaagagagaatggaaagacagtaatcagagttctcaaacaaaaagaagtggagcagttgatcaaaaaacacgaggaagaagaagccaaagcctgaagcgtgagaagaaagaaaaaggaacaggaaagaaaagggataaataggaatccagagatttttaattaactccatttggggggcaccccattttcagntggtaaaaagccaagtcnctaacttctttccaacaacctaggaaaggggcttttaccnnnnnnnnnnaacctgggtggcagntggggaaaaaataagggaacatttaacattaactggaaatttgggggtcccttttggtcatttttgctgggtccccaattttggaaaataacctttttaattttggtaaaacgt

SEQ ID NO: 165551 - DNA, 928 bp, Homo Sapiens
ggggcatgcgcgggggccatattagcagcggttattcggtgagcggtggtggtttattcttccgtggagttaagggctccgtggacatctcaggtcttcagggtcttccatctggaactatataaagttcagaaaacatgtctcgaagatatgactccaggaccactatattttctccagaaggtcgcttataccaagttgaatatgccatggaagctattggacatgcaggcacctgtttgggaattttagcaaatgatggtgttttgcttgcagcagagagacgcaacatccacaagcttcttgatgaagtctttttttctgaaaaaatttataaactcaatgaggacatggcttgcagtgtggcaggcataacttctgatgctaatgttctgactaatgaactaaggctcattgctcaaaggtatttattacagtatcaggagccaataccttgtgagcagttggttacagcgctgtgtgatatcaaacaagcttatacacaatttggaggaaaacgtccctttggtgtttcattgctgtacattggctgggataagcactatggctttcagctctatcagagtgaccctagtggaaattacgggggatggaaggccacatgcattggaaataatagcgctgcagctgtgtcaatgttgaaacaagactataaagaaggagaaatgacccttgaagtcagcacttgctttagctatcaaagtactaaataagaccatgggatggtagtaaaactctctgctggaaaaagtggaaatttgcaaccctaaccagaaaagaatggggaagaaccgtaatccgaagttctcaaaccaaaaagaaggtggagcagtttggatccaaaaacccccagggaagaaaaaacccaaagccttgagcgggtgggaagaaaagaaaaaggaacggc

SEQ ID NO: 165552 - DNA, 459 bp, Homo Sapiens
  misc_feature (97)..(160): n is a, c, g, or t
ggctctgctgaaaaagtggaaattgcaacactaacaagagagaatggaaagacagtaatcagagttctcaaacaaaaagaagtggagcagttgatcnnnnnnnnnnnnnnnnnnnnnnnnnnnnnnnnnnnnnnnnnnnnnnnnnnnnnnnnnnnnnnnnaggataaatagaatcagagattttattactcatttggggcaccatttcagtgtaaaagcagtcctactcttccacactaggaaggctttactttttttaactggtgcagtgggaaaataggacattacatactgaattgggtccttgtcatttctgtccaattgaatactttattgtaacgatgatggttacccttcatggacgtcttaatcttccacacacatcccctttttttggaataaaatttggaaaatggaaatgaaggaataaattctctgtagcagtaattgttaaatatt

SEQ ID NO: 165553 - DNA, 512 bp, Homo Sapiens
  misc_feature (248)..(257): n is a, c, g, or t
  misc_feature (313)..(360): n is a, c, g, or t
  misc_feature (489)..(489): n is a, c, g, or t
gggagaggccagcgtggggacagccgctcccccagccacaagcgcaggagggagacacctagccctcggcccatgagacaccgctcctccaggtctccataaattgtctttgggggattccaccacacccaatgctctggagccacaaggagtgtcccttcttccccagcagagccgtgggagggtccttgtctgctctcctttgaaccttggcagcccttggatggagggctccctttccctccccnnnnnnnnnnctttgttcctgtgaaatgttaatctccgtgagttcttcctgggttcatgtgttctnnnnnnnnnnnnnnnnnnnnnnnnnnnnnnnnnnnnnnnnnnnnnnnnggatacagttcaggataccccagcctggagtcagggccagggaggcatggccccactttgtatccagaagttcccaggggttgattgtgatggtggttgggactgggaggttgtataaaggtcttcttngaaggaaggggcaggaattggaa

SEQ ID NO: 165554 - DNA, 1186 bp, Homo Sapiens
  misc_feature (739)..(854): n is a, c, g, or t
  misc_feature (1027)..(1090): n is a, c, g, or t
tcgctttctgcgtgttcgtcccctggggtactttctggggtttctcgtgtgggggctcattggccttcccttgggcccgtggctgcgcggtgcttgggggtattccgtggtgctggtattccgtggcgcgctgtgtccgtgcgaggtggtcgcagtggtgggcatgttccctgcgcctcgtgccgttctcctctccagggacacgtgtggatccctgggatgtacttctctggatgatttgacccttgtccgcagggatcctatatggtgttgtgtgtaaggggagggtaaagggagccctccatccaagggctgccaaggttcaaaggagtagcagacaaggaccctgccacggctctgctggggtaagaagggacactccttgtggctccatgagcatttgggtctggtggaatcccccaaagacaatttatggagacctggaggagcggtgtctcatgggccgagggctaggtgtctccctcctgcgcttgtggcttgggggagcggctgtccccacgctggcctctccgggaaaccccgctcactgctgctgctctgctggtcccgtggtgagggctggggcgagggacggcgacgctccacaggcgagtagctgagggaccgagagtccctgagggagtctattggcttccgggggctgcgggacctccgctcgccagggggtggcttcttggggcttgcaggtttgggcaaggcctgagggccaggcttagcnnnnnnnnnnnnnnnnnnnnnnnnnnnnnnnnnnnnnnnnnnnnnnnnnnnnnnnnnnnnnnnnnnnnnnnnnnnnnnnnnnnnnnnnnnnnnnnnnnnnnnnnnnnnnnnnnnnntggaactggaactgctagagcgcctcttccgtttggctggggttggctccggaggacgtccctctcgaacagcctcctttggggctggggtggggctggggaccctcttcagtgccacctcaggttgcacaggaaggctagagccctctgagtcactagaactggagccagannnnnnnnnnnnnnnnnnnnnnnnnnnnnnnnnnnnnnnnnnnnnnnnnnnnnnnnnnnnnnnngaggaactccgccgctcctttgctggctgcagggcggctaatgcagaaggctgctgggccccagtagaggcaggtggctcccccacatcagagtgg

SEQ ID NO: 165555 - DNA, 685 bp, Homo Sapiens
ggacgcgtgggtcgacccacgcgtccggacccacgcgtccgggcttgcagtgtggcaggcataacttctgatgctaatgttctgactaatgaactaaggctcattgctcaaaggtatttattacagtatcaggagccaataccttgtgagcagttggttacagcgctgtgtgatatcaaacaagcttatacacaatttggaggaaaacgtccctttggtgtttcattgctgtacattggctgggataagcactatggctttcagctctatcagagtgaccctagtggaaattacgggggatggaaggccacatgcattggaaataatagcgctgcagctgtgtcaatgttgaaacaagactataaagaaggagaaatgaccttgaagtcagcacttgctttagctatcaaagtactaaataagaccatggatgttagtaaactctctgctgaaaaagtggaaattgcaacactaacaagagagaatggaaagacagtaatcagagttctcaaacaaaaagaagtggagcagttgatcaaaaaacatgaggaagaagaagccaaagctgagcgtgagaagaaagaaaaagaacagaaagaaaaggataaatagaatcagagactttattactcatttggggcaccatgtcagtgtaaaagcagtcctactcttccacactaggaag

SEQ ID NO: 165556 - DNA, 690 bp, Homo Sapiens
  misc_feature (97)..(160): n is a, c, g, or t
  misc_feature (337)..(447): n is a, c, g, or t
ccactctgatgtgggggagccacctgcctctactggggcccagcagccttctgcattagccgccctgcagccagcaaaggagcggcggagttcctcnnnnnnnnnnnnnnnnnnnnnnnnnnnnnnnnnnnnnnnnnnnnnnnnnnnnnnnnnnnnnnnntctggctccagttctagtgactcagagggctctagcttcctgtgcaacctgaggtggcactgaagagggtccccagccccaccccagccccaaaggaggctgttcgagagggacgtcctccggagccaaccccagccaaacggaagaggcgctctagcagttccagttccagctccnnnnnnnnnnnnnnnnnnnnnnnnnnnnnnnnnnnnnnnnnnnnnnnnnnnnnnnnnnnnnnnnnnnnnnnnnnnnnnnnnnnnnnnnnnnnnnnnnnnnnnnnnnnnnnngctaagcctggccctcaggccttgcccaaacctgcaagccccaagaagccacccctggcgagcggaggtcccgcagccccggaagccaatagactccctcagggactctcggtccctcagcttactcagcctgtggacgcgtcgccagtccctcgaaccaaaccctcaaccacgggaccagcaggagcagccagcagtgagcggggtatcccggagaggacagcgtggaggacagacgctccc

SEQ ID NO: 165557 - DNA, 420 bp, Homo Sapiens
aacgcgagaggatcccaggaagtaaaaccgatgttgctgctgaagtcaagaacgatggtaaaaatcaggacactgaagatgcactattaaccgctgacagtgcgcaaaccaaaaatttgaaaagattttttgatggtgccaaagatgttacaggcagtccacctgcaaagcagcttaaggagatgccttctgtttttcagaatgttctgggcagcgctgtcctctcaccagcacacaaagatactcaggatttccataaaaatgcagctgatgacagtgctgataaagtgaataaaaaccctacccctgcttacctggacctgttaaaaaagagatcagcagttgaaactcaggcaaataacctcatctgtagaaccaaggcggatgttactcctcctccggatagcagcaccaccagga

SEQ ID NO: 165558 - DNA, 317 bp, Homo Sapiens
tgcggatcccccaaacgcagagaggatactaaaaacctttagaatcacaaatttagtagaagtggcagctgacagggacaaacccagggtcctccaagagtttggggcgctggactggagtaccttgcgtgcagttatgtcggcgtcggtagtgtctgtcatttcgcggttcttagaagagtacttgagctccactccgcagcgtctgaagttgctggacgcgtacctgctgtatatactgctgaccggggcgctgcagttcggttactgtctcctcgtggggaccttccccttcaactctttcctctctgcgtttg

SEQ ID NO: 165559 - DNA, 909 bp, Homo Sapiens
  misc_feature (738)..(738): n is a, c, g, or t
gggggggagggcggagttaggtcacgagggtgcgcatgcgcaaacagcacatccggtgtggtcgacgggtcctccaagagtttggggcgcggaccggagtaccttgcgtgcagttatgtcggcgtcggtagtgtctgtcatttcgcggttcttagaagagtacttgagctccactccgcagcgtctgaagttgctggacgcgtacctgctgtatatactgctgaccggggcgctgcagttcggttactgtctcctcgtggggaccttccccttcaactcttttctctcgggcttcatctcttgtgtggggagtttcatcctagcggtttgcctgagaatacagatcaacccacagaacaaagcggatttccaaggcatctccccagagcgagcctttgctgattttctctttgccagcaccatcctgcaccttgttgtcatgaactttgttggctgactcattctcatttacttaattgaggagtaggagactaaaagaatgttcactctttgaatttcctggataagagttctggagatggcagcttattggacacatggattttcttcagatttgcacttactgctagctctgctttttatgcaggagaaaagcccagagttcactgtgtgtcagaacaactttctaacaaacatttattaatccagcctctgcctttcattaaatgtaaccttttgccttccaaattaaagaactccatgccactcctcaaaaancaaacaacctgcagccagacaaatactcccccccaggcgcccttttgcgaagcaacagtatagataaggtatatttaaaatgtgttggggcccgcccttgggcccccccgaaaaaagttttctataaacacaatttctttttgggggcccgcggggccccctaataaggat

SEQ ID NO: 165560 - DNA, 310 bp, Homo Sapiens
  misc_feature (15)..(15): n is a, c, g, or t
tgaccctagggttanccaaacgcagagaggaacaatggtactggttaacttttttgttgcattctttcctgccacagaaaagctttcaggaacttggtgctgaagacttctcaagccagtctcatggaagcacatttagttctcagatgtgttcacgctcagcatcatcttgttgcatccttgcttcctagcagtgggttcaacaactcctcattcctgttaggaccgggaagcactaacctcttggggagtggagagggggccagcagcctccgggccctgggacacgaccgcatcctctctgcgtttg

SEQ ID NO: 165561 - DNA, 748 bp, Homo Sapiens
tgaggtgtccccaaacgcagagaggatatcaggaggagatgcaactgtgtgcatccactctcgtaacaagtagctggtcacaaccagaaaggttcatctctcctaagcaaacagcgactctttcagaggaagttccctctttcaatcgtggccttattttcaactctggtgccttctcgtgatgttaatcatttccttttttccccacactaagctctcttttctatctttctctctctttccaatcttacgccatggccatcagttcatttcagccttccagtgctacacccacttcttggctgacacacttctgctctaaggtgactggttttcttgccaattttcaaagagtggtactaacccccaacccgctttccgcaccccgtcctctctgcgtttgcaaacgcagagaggacaggagggagttcatggccgaggactggttggagccggggatgttcatgggagaaggggtcagagatctctgcttgacaacctggttgatgtttcttactgtctcaaagacacgcttctggtgagtgatgtctggagactcggcctcttccaactgcagctccttgcgcatcgttccctcaatctctgctgccaaggaatccatgggaaacaggcccagcgagtgggagcgccgagacgtggtattgggcatggttttgttccggagggtcttcagctcctcctgcgcctcatgcagcatctccgctttggaaaggtaccgagctgatta

SEQ ID NO: 165562 - DNA, 942 bp, Homo Sapiens
gctggtgatcggcgagcttggcgtgggcaagaccagcatcatcaagcgctacgtccaccagctcttctcccagcactaccgggccaccatcggggtggacttcgccctcaaggtcctcaactgggacagcaggactctggtgcgcctgcagctgtgggacatcgcggggcaggagcgatttggcaacatgacccgagtatactacaaggaagctgttggtgcttttgtagtctttgatatatcaagaagttccacatttgaggcagtcttaaaatggaaaagtgatctggatagtaaagttcatcttccaaatggcagccctatccctgctgtcctcttggctaacaaatgtgaccagaacaaggacagtagccagagtccttcccaggtggaccaattctgcaaagaacatggctttgccggatggtttgaaacctctgcaaaggataacataaacatagaggaagctgcccggttcctagtggagaagattcttgtaaaccaccaaagctttcctaatgaagaaaacgatgtggacaaaattaagctagatcaagagaccttgagagcagagaacaaatcccagtgttgctgatatatggcttctgcttctcttgtgtgtgcctcagctctgaagaagttcctgagaatgggttacagatgtcatgttagctgggagtcttcccacatgtggcacttcaaaaggcagcaccactgggcgcctgcacttatttgaaaatggaactttgggagaagtatccctgctagtggctctgtaacttaacagatgacaattaggcttttgtcattgttgccatcatatggaagataatgtttacatccttttaaacatttttatatgacaattcctcaggatttggtaaggcttccaagttgtagcttttagtgtaagtgctggggtggtaataaaatgttaccttc

SEQ ID NO: 165563 - DNA, 194 bp, Homo Sapiens
caaacgcagagaggatagggtaagcacccttaattcaggcactgtccattagcttcctttgcaaaggctacttatggccggtcacaatccagcactcagacagagccaaggcaatatcctcttgcccatggctatgatgtcagacagtggatgagcacctatgcaagtcctcttgcgtttgggggatccgcagt

SEQ ID NO: 165564 - DNA, 770 bp, Homo Sapiens
ggggatgaatactgggagaataaaatgagaactctggagtgagctaaattgatcccaattaagtttttctgcttagcagacagaaggtataattttttgacaccctttcccacctggtgcctatgctaggcttgtcctgagaacatccctcagtaacttgatattcacatgacctacaggatgtcccatctgcagggctgagtcagttggggaacaccagaggctacacagtagctcttcctgctactcggttaatgagcttggcaggttctttgtctcactgaattcttatcatggaaacagcagcagcagccgctaggaaatcttcaagtgtagtgtctgtgctaacccagtggtaaatcccttagatcccctgctggtctctggcagtctccttgattttgggtaccatgtatattttccgctttgactttaacgctttctaggatagggtaagcacccttaattcaggcactgtccattagcttcctttgcaaaggctacttatggccggtcacaatccagcactcagacagagccaaggcaatatcctcttgcccatggctatgatgtcagacagtggatgggctccagcaacaagagacaaaataactaaaggcctttgctctcctctgacattgaggcctggggcttacagtttggaatacaacatgtgaagggtttttgtttggtgtttgaattttttagaagtaaaccttgattaattttattgctaatttaaaaataaaaatgactttgtattgattgtg

SEQ ID NO: 165565 - DNA, 247 bp, Homo Sapiens
atagcggatcccccaaacgcagagaggaggcatatggaattaaggtctttattccagtgacctctgctgattggaaaactttgggctggtacattccatgcattctgacgctgtatgtcctcttgagttacagtgagtgatgaggccacaatcgcagggtggatgatgtgctttttttgggctaataggtgtaaaggaggcatgctgtcctttggcgttaagacagatcatttcctctctgcgtttg

SEQ ID NO: 165566 - DNA, 828 bp, Homo Sapiens
taggctggtacggtccggagttccgggatatcgtcgacccacgtgtcgagacttcttggtacctatgaacataggtcctcccctcaccccaactctaggtttccaggcctcacagccaagctgaagcttggagaaaactctgcattcccatgagggcaaaggcagctgccctccctgaccctatagccccaggcctcatggggggtatgtggggaagggatggggtatccccatggatgctgggatgaggacagaggaagacctgatggggtctcctattccagggaataagccaaattaacactaaaaacggatcaaagctcccacgccagtccactagggccccagtagttgacagccttgctcctctcccaagttctccttcagaacctagttgcttttattcttccagctaccacttgggcacttcacagccagcctagggtcttcggcacctccaagagctgaatctccctccaacccttcttgcctactcctcactgccagctgggacactaggctcagtcctgtgtggtgcccatgatccttctggtgggggaagagtttaagttatagggcatttggctcaaattttaaaagcacttttgtttaccatatatttctggaggctcctgtattctagaacccaatctctcacctggcttggttgcaaggctcatattttttggtacctttcctatagattctgtagcatttgagtgtggcaatatgttaatgtgtgtatagatttctaggaaccaacactactcagtctcctgctagtctgactcctgaagcaatcagccctgtcatactgtattgactgtg

SEQ ID NO: 165567 - DNA, 979 bp, Homo Sapiens
gacccacgcgtccgcacagggctgcgcaggttgcccccgtctgcgaatggaccactggaggggttcaaaggttcgcgtcccagtacgggaatgagcctctttgatctcttccggggctttttcggctttcctggacctcggagcttcagcccaggaggagggatacgtttccacgataacttcggctttgatgacctagtacgagatttcaatagcatcttcagcgatatgggggcctggaccttgccttcccatcctcctgaacttccaggtcctgagtcagagacacctggtgagagactacgggagggacagacacttcgggactcaatgcttaagtatccagatagtcaccagcccaggatctttgggggggtcttggagagtgatgcaagaagtgaatccccccaaccagcaccagactggggctcccagaggccatttcataggtttgatgatgtatggcctatggacccccatcctagaaccagagaggacaatgatcttgattcccaggtttcccaggagggtcttggcccggttctacagccccagcccaaatcctatttcaagagcatctctgtgaccaagatcactaaaccagatgggatagtggaggagcgccggactgtggtggacagtgagggccggacagagactacagtaacccgacacgaagcagatagcagtcctaggggtgatccagaatcaccaagacctccagccctggatgatgccttttccatcctggacttattcctgggacgttggttccggtcccggtagccttgttaaccctcagaggccttcaagtcctttccacctctcacccattgcccaccattaataagcttagcttctcttgccacctcaggggcttggatatgtggaatagtgaactggggccatgtcagtttgtcactcacccaaactgaccaataaaacctttatttatgctattgaaacttctaaaactagg

SEQ ID NO: 165568 - DNA, 978 bp, Homo Sapiens
  misc_feature (803)..(803): n is a, c, g, or t
ggggggcttgctttccggtagcgtgggctgacgcctcgctcaatttctcacagggctgcgcaggtttcccccgtctgcgaatggaccactggaggggttcaaaggttcgcgtcccagtacgggaatgagcctctttgatctcttccggggctttttcggctttcctggacctcggagccacagagatcccttttttggagggatgactcgagatgaagatgatgatgaggaagaagaagaagaagggggctcatggggccgtgggaacccaaggttccatagtcctcagcacccccctgaggaatttggcttcggcttcagcttcagcccaggaggagggatacgtttccacgataacttcggctttgatgacctagtacgagatttcaatagcatcttcagcgatatgggggcctggaccttgccttcccatcctcctgaacttccaggtcctgagtcagagacacctggtgagagactacgggagggacagacacttcgggactcaatgcttaagtatccagatagtcaccagcccaggatctttgggggggtcttggagagtgatgcaagaagtgaatccccccaaccagcaccagactgggggctcccagaggccattttcataagtttgatgatgtatgggcctatgggacccccatccctagaaccagaggaggacaatgatcttggatccccaggtttcccaaggagggtcttgggcccggttctacagcccccagcccaaatcctatttcaagagcatctctgtgaccaagatcactaaaccagaatgggataangggagggagcgcccggactgtggtgggaccactgaggggccgggaccagagaacttacggttaaccccggacaccgaaggcagaattaccaagttcccttaggggggtggaattcccgaaaaatcccccaaagaaccctccccagccccctggaaatggaaatggcccctttttt

SEQ ID NO: 165569 - DNA, 858 bp, Homo Sapiens
ggggacgcctcgctcaatttctcacagggctgcgcaggtttcccccgtctgcgaatggaccactggaggggttcaaaggttcgcgtcccagtacgggaatgagcctctttgatctcttccggggctttttcggctttcctggacctcggagccacagagatcccttttttggagggatgactcgagatgaagatgatgatgaggaagaagaagaagaagggggctcatggggccgtgggaacccaaggttccatagccctcagcacccccctgaggaatttggcttcggcttcagcttcagcccaggaggagggatacgtttccacgataacttcggctttgatgacctagtacgagatttcaatagcatcttcagcgatatgggggcctggaccttgccttcccatcctcctgaacttccaggtcctgagtcagagacacctggtgagagactacgggagggacagacacttcgggactcaatgcttaagtatccagatagtcacccagccccaggatctttggggggggtcttggagagtgatgcaagaagtgaatccccccaaacagcaccagactgggggctcccagaaggccatttcataagtttgatgatggatggcctatggacccccatcctagaaccgagaaaggacaatgatcttggattcccaggtttcccaggaaggtcttgggcccgggttctaaagccccagccccaatcctaatttcaaaaacaatctctgggacccagaatcacttaaacccaaatggggataaatggaaggaacccccggaatggtggtggaaaagggaagggccgggaaccaaacattaaggtaaccccgacacccaaag

SEQ ID NO: 165570 - DNA, 1373 bp, Homo Sapiens
  misc_feature (1266)..(1266): n is a, c, g, or t
  misc_feature (1339)..(1339): n is a, c, g, or t
  misc_feature (1351)..(1351): n is a, c, g, or t
gacccacgcgtccggggcggctgcggcgcagtctgcagcatggcgtacccggggcatcctggcgccggcggcgggtactacccaggcgggtatggaggggctcccggagggcctgcgtttcccggacaaactcaggatccgctgtatggttactttgctgctgtagctggacaggatgggcagatagatgctgatgaattgcagagatgtctgacacagtctggcattgctggaggatacaaaccttttaacctggagacttgccggcttatggtttcaatgctggatagagatatgtctggcacaatgggtttcaatgaatttaaagaactctgggctgtactgaatggctggagacaacactttatcagttttgacactgacaggagtggaacagtagacccacaagaattgcagaaggccctgacaacaatgggatttaggttgagtccccaggctgtgaattcaattgcaaaacgatacagcaccaatggaaagatcaccttcgacgactacatcgcctgctgcgtcaaactgagggctcttacagacagctttcgaagacgggatactgctcagcaaggtgttgtgaatttcccatatgatgatttcattcaatgtgtcatgagtgtttaaatcaagaggaagctgcatgaatgtaatcaacattccaactggagctctcctttgcttgtcctctttgccctcggtaatatgtataaacttacatcacgactttctcttaacagctgttgtaaagtttattactttatgtacaactgaagttttgttttagttttgataataaattctttggaacttccccaaaacctacccacaaccacccccccgcccgtgcctggcttgcctccgtacactcagagaattttccctagacccattccgtttgcgcgcgccgggccccccctagggtaagtcgaaccttggtccataacttgctttccctaagaagatcccctggccgatgaactacgggctttgggattctccacccaacaaaaaaaccgtctccggggcgtttatgcacgctgttttttcacccaactcccatattggccgctccccaaccgccctttatctgcggatctatcccacccccggagcgcccatattcccatccccgcaatattcccccctttatttctccgcccccccctggcccatctcctatcggcgagaccaatgtgcgttggtaaaactctcatctagaagccactttccggccccggaccaatggggcgagtntcccctctcgtccataaattcgctgcgttggaaccgcgataacttcgcgaaatgtccgccgccacgatggtgncatatcctcgantcgcacgatccgcgtgtgcgcg

SEQ ID NO: 165571 - DNA, 197 bp, Homo Sapiens
tgaggatcccccaaacgcagagaggacttggctccaggtggagaggctgctccttgccccacggaggggcctccttgggccctgcacttgggaactcatcccagggcatgtgagcactcgtacttcccgaaggtggaagaaggcatgactcccccatgtcctgctggcaaaagcccccattctcctctctgcgtttg

SEQ ID NO: 165572 - DNA, 951 bp, Homo Sapiens
  misc_feature (654)..(654): n is a, c, g, or t
agagaggataccgagtccatgatgaaggtgtttgggcgctgcaagtcaatgatgccttcacacatgtgtattctggtggaagggacaggaagatttattgtacagacctaagaaaccctgacattcgggtgctaatttgtgaagaaaaagcaccagttctcaagaaggagcttgataaatcagctgaacctcctcctgcaatttgggttgcaacaactaagtctacagtaaataaatggactttgaaaggaattcataattttagagcctctggagattatgacaatgactgtacaaatcctataacacctctttgtacacaacctgaccaggttattaaagggggtgctagtattattcagtgccacattcttaatgataagagacatatattaaccaaagataccaataataatgtggcatattgggatgtattgaaggcatgtaaagttgaagatctgggcaaagtggattttgaagatgaaattaagaaaagatttaaaatggtgtatgtgccaaattggttctcagtagacttaaaaacagggatgttaactattactttggatgaaagtgattgttttgctgcctgggtttctgcaaaagatgctggtttcagcagccctgatgggtcagatccaaaattgaatttangaggacttttactccaagcactcctggaatattggcctagaacacatgtgaatcccatggatgaagaggaaaatgaagtaaaccatgtaaatggggagcaggagaaccgagtgcagaaaggaaatggatattttcaagtgcccccacatacacccggtgatcttttggtggagcctggaggtcgcacactggtttcaggctgcttctgccaaaatccccggggtggaaactgaatcctatgcctccttaatgaaacaaggggccaccatgggggaatttggacttccccggtgggat

SEQ ID NO: 165573 - DNA, 449 bp, Homo Sapiens
gctcggtacctgatttggattctgaagatgcatgaggttggaggtagaaaggaattttgttgaatttgggcatatttttatccacagtgatgtcaattacccattgtggcactgtttcattaagaagcatagactcagtctcacccccggaatctcggcagagcagcctgaacagtgtgcgacctccagcttcaccaaagatcacgggtgtatgtgggggcacttgaaaatatccatttcccttctgcactcggttctcctgctccccatttacatggtttacttcattttcctcttcatccattggattcacatgtgttctaggccaatattccaggagtgcttggagtaaaagtcctcctaaattcaattttggatctgacccatcagggctgctgaaaccagcatcttttgcagaaacccaggcagcaaaacaatcactttcatcc

SEQ ID NO: 165574 - DNA, 791 bp, Homo Sapiens
aggagggatgatttacaagatcccagtgaagaggctagaggaagtcatctggccagacagcagcaggagaaggaaatcaaaacaacatctccccttgaggaggaagaaagagaaataaaatcttcacaaggcttaaagaaaaaatcgaagtctccttcccctcctcgactgactgaagatcgaaagaaggcctcacttgtagcgctgccagagcaaactgccagcgaggaggagactcctccacctttactaacaaaggaagcatcttctccaccacctcatccacagctccatagcgaagaagaaatagagcccatggaaggcccagccccccctgccctcattcagttatctcctcctaatacagatgctgacaccagggagctattagtacctcagcatactgtccagttggtaggaggcctgtctcctttgtcaagtccttcagacaccaaagcagaatctccagcagagaaagtgccagaggagagtgtcctgcctctggttcagaaaagcacactggactgactactcagacccagaaggatcttgaacctgagtcagacagatctgctcagcccctccctctaaaaattgaggaattagcactggacaaaggaatcactgaagaatgtctgaaacagccatctttggaacagaaggcacaggcagcaagagcttctcatacccttttacccaagccacagattgaaaagagtcagctgattcaatcctctagccgggccatcctcatcttcctcctccagtgctagatccaagatctcgtcacg

SEQ ID NO: 165575 - DNA, 276 bp, Homo Sapiens
ggatcccccaaacgcagagaggaggatgctggaagtgttaagaattcattcgatctcgaggggaaaatgttctgtaatgatcggcatatggcatggaagcaggtgggagggaggactctggaacgttattggacctcacaacagcgaggaacacagggagccacaccagctggtaccgttggaggtggtggatagtatcctgcctgtggctactgtgagacttcaaagggtatctgactccttatgatcattgaagatactgtatcttgtcagaac

SEQ ID NO: 165576 - DNA, 576 bp, Homo Sapiens
cataaactattacagcataaactattacagcataaactattccatgagcaaagagaataaacacaaagctgtgagagtattaaatatggacactagatttacatttccaacaagaaattcatctccctccaaagtcccagaccagggctagaatgtggttcatttttaacaatcaaagtggcaagatctgtttggtgatcactgtaaaaacaggaaacatagctaatgccctttcatgttgaggtgctacaaaggtccaagcttttaaagactatggcctcaacgtccatgtgtgaaacaagtgtattagaaaattctttaagtcttgttgccttaacttagagatctccaggcaacaggcctgacgatagccatggctcctctctgcgtttgcaaacgcagagaggaggaggaaagctggtagtaagtgtggagatcttttaattgcaagaaaataatctgggagcctaacatttttgcagtattttaaagtgtgcaaagacttcacaggactagcacattctcaaatgacacctctaagaccaacccaagcataaagatcttctgaggcttata

SEQ ID NO: 165577 - DNA, 509 bp, Homo Sapiens
  misc_feature (27)..(27): n is a, c, g, or t
  misc_feature (37)..(37): n is a, c, g, or t
  misc_feature (43)..(43): n is a, c, g, or t
  misc_feature (47)..(47): n is a, c, g, or t
  misc_feature (49)..(49): n is a, c, g, or t
  misc_feature (52)..(52): n is a, c, g, or t
  misc_feature (86)..(86): n is a, c, g, or t
  misc_feature (118)..(118): n is a, c, g, or t
  misc_feature (494)..(494): n is a, c, g, or t
tggatgcccccctcagataggggtccnttgtccaccntcctcngtgntntcnatatcccgcacaagagtgctactctcctcgctcngggccaataacacttgggggtagctaaagtgnacttgtaaccgacatctggttcctacttcagggtcataaagcctaaatagcccacacgttccccttaaataagacatcacgatggatcacaggtctatcaccctattaaccactcacgggagctctccatgcatttggtattttcgtctggggggtatgcacgcgatagcattgcgagacgctggagccggagcaccctatgtcgcagtatctgtctttgattcctgcctcatcccattatttatcgcacctacgttcaatattacaggcgaacatacttactaaagtgtgttaattaattaatgcttgtaggacataataataccccttggttgtctgactcgccgctgttgtacacacgacggtcacagtcgangcagcgttgtacatc

SEQ ID NO: 165578 - DNA, 794 bp, Homo Sapiens
  misc_feature (507)..(507): n is a, c, g, or t
  misc_feature (556)..(556): n is a, c, g, or t
ggggagtgacccggcgtggctactaggagaaggacgtacggtcctgctagtagaggaatatgtcgagtttctctagggcgccccagcaatgggccacttttgctagaatatggtatctcttagatgggaaaatgcagccacctggcaaacttgctgctatggcatctataagacttcagggattacataaacctgtgtaccatgcactgagtgactgtggggatcatgttgttataatgaacacaagacacattgcattttctggaaacaaatgggaacaaaaagtatactcttcgcatactggctacccaggtggatttagacaagtaacagctgctcagcttcacctgagggatccagtggcaattgtaaaactagctatttatggcatgctgccaaaaaaccttcacagaagaacaatgatggaaaggttgcatctttttccagatgagtatattccagaagatattcttaagaatttagtagaggagcttcctcaaccacganaaatacctaaacgtctagatgagtacacacaagaagaaatagacgcctntccaagattgtggactccacctgaagattatcggctataagagaataagaattgcagaaaataacagtggaagtgattgaaactttctttctgatgagtttcctctaacctaccggaatgggagtaaaaacaactggctacaggttccgccaccctgtttttaatgtgcccgaatcaccttgtgggggaaaaaggtcaaggaaaaggtgttaatcccctttcaaatagggaaaattgg

SEQ ID NO: 165579 - DNA, 1555 bp, Homo Sapiens
  misc_feature (1134)..(1223): n is a, c, g, or t
  misc_feature (1237)..(1251): n is a, c, g, or t
  misc_feature (1295)..(1355): n is a, c, g, or t
ggggcatttccggttcccttcgtttaggtcggctggaaattatgtcctccgtcggttttccgcagtttttccaccaagcgagatatttttgggagttattccctaaataactgcattatatgctcctttcatgacgaaattgctgccgtggagaagactggaggaaactcgaggaagagggagaagccgacaagtgctcgacgggctaggaactgtcctgcttgggtgttagcgtttcccgccgggccagtaaggctgagtgacccggcgtggctactaggagaaggacgtacggtcctgctagtagaggaatatgtcgagtttctctagggcgccccagcaatgggccacttttgctagaatatggtatctcttagatgggaaaatgcagccacctggcaaacttgctgctatggcatctataagacttcagggattacataaacctgtgtaccatgcactgagtgactgtggggatcatgttgttataatgaacacaagacacattgcattttctggaaacaaatgggaacaaaaagtatactcttcgcatactggctacccaggtggatttagacaagtaacagctgctcagcttcacctgagggatccagtggcaattgtaaaactagctatttatggcatgctgccaaaaaaccttcacagaagaacaatgatggaaaggttgcatctttttccagatgagtatattccagaagatattcttaagaatttagtagaggagcttcctcaaccacgaaaaatacctaaacgtctagatgagtacacacaagaagaaatagacgccttcccaagattgtggactccacctgaagattatcggctataagagaataagaattgcagaaaataacagtgaagtgattgaaactttcttctgatgagtttctctaacctacaggatggagtaaaacaactgctacagttcagcacctgttttatgtgccgaatcactgtggggaaaggtcaggaaggtgtagtccttcaataggaaattgtaattaaaatataattttatagaaccatttttatgtaatctgatttgaatgttatagttgataataataaaatcacttacttggttgaccaaccacaagccacaacacccgaacnnnnnnnnnnnnnnnnnnnnnnnnnnnnnnnnnnnnnnnnnnnnnnnnnnnnnnnnnnnnnnnnnnnnnnnnnnnnnnnnnnnnnnnnnnatgtgtctgttcgnnnnnnnnnnnnnnntccaaaaaaccctttccaacatccctctttttggggcccgcggnnnnnnnnnnnnnnnnnnnnnnnnnnnnnnnnnnnnnnnnnnnnnnnnnnnnnnnnnnnnntagcccatccaccccacggttctctcgctctcccccccaaataaaaaaacacccccctccttagaaaaacccaacacttctttttacaaaaaatctcccatacagccactctctcccgccgttctttttagcggcaatctccctcaccagtcgggcggcttaccaaccccaactctccactataaatcaacacatccccc

SEQ ID NO: 165580 - DNA, 512 bp, Homo Sapiens
attttgtatagggtttatttaaattttacagaaacctgatcagagttaagtatgtaattataagtccagtaacaatttctacaaaaatgcacatacaatgccagaactccttaaaagcaactaatatcatatttgtgttttgcataaaacatgcattaatatgttggccaaaatcagtctctacaagaagagacagtccaatacagtcaataagaaaactagttgtgaacaacaggtaaaaaaagaggtttccagttaatgtgaaagaaggaatagtacctttcataaaacaagcccttcagcgctgagttaactgatcggtactattgtgctgcacgtaatgtaacacatcacctccaagacttggtcctgatgggtcataggaagtaagggactttctggtagttacatcagatatttgagaagattaaaagttttccggacatgatggtatactaatagtgcaaccttgcaaaaagggttcgaaacattgtcagacttggaagagttcc

SEQ ID NO: 165581 - DNA, 492 bp, Homo Sapiens
  misc_feature (236)..(356): n is a, c, g, or t
ggaacgaagacactccttctgtccccacctgctccgaagacaaaccaacctccgtttcttttataaacagtcggctttttcttaataagccctcactgtacagaacagcccgttgatggtttatttggggtccccctctccccccagcccttttttctgttggtttagcacaaatacttccctcctccggcacccccattttctacccatcccctcaataaagtttttataaaggnnnnnnnnnnnnnnnnnnnnnnnnnnnnnnnnnnnnnnnnnnnnnnnnnnnnnnnnnnnnnnnnnnnnnnnnnnnnnnnnnnnnnnnnnnnnnnnnnnnnnnnnnnnnnnnnnnnnnnnnncacataggggggccgccccgcccccaaaaaagtttttaaaaactttcgtggggggcggggccccaaaaggaaggggaaatgggcaaaacgggttcccaaggaaacccgggcaaggaaaagggctgggattcccccc

SEQ ID NO: 165582 - DNA, 626 bp, Homo Sapiens
tgtgggtgacagatttttaaaatagaatttagagtatttggggtttagtttgtttacaaataatcagactataatatttaaacatgcaaaataactgacaataatgttgcacttgtttactaaagatataagttgttccatgggtgtacacgtagacagacacacatacacccaaattattgcattaagaatcctggagcagaccatagctgaagctgttattttcagtcaggaagactacctgtcatgaaggtataaaataatttagaagtgaatgtttttctgtaccatctatgtgcaattatactctaaattccactacactacattaaagtaaatggacattccagaatatagatgtgattatagtcttaaactaattattattaaaccaatgattgctgaaaatcagtgatgcatttgttatagagtataactcatcgtttacagtatgttttagttggcagtatcatacctagatggtgaataacatattcccagtaaatttatatagcagtgaagaattacatgccttctggtggacattttataagtgcattttatatcacaataaaaattttttctccagggagacgggcgggggggagaaaaaagaccttgtcggc

SEQ ID NO: 165583 - DNA, 328 bp, Homo Sapiens
ccccgttcactttctacacacgttactttgaagtcaccataaacttcagtatcatcaggccaatatttatagcatttaacccggccaacctcaactaaatttgtaaccatcacaatgcaagcagattgttcttgccaaatcatcctccagaaatcatacactgtttcatgaacgggaccttgggttgcaatgtaatgacttggtctctggtagccatcaatatagttggcattaatataatctgaggaaggatcatcctctacgggttgcaaaatcactctggagtgatcatatgctatgcgtacgacagtgaccgggatactcatag

SEQ ID NO: 165584 - DNA, 715 bp, Homo Sapiens
  misc_feature (141)..(165): n is a, c, g, or t
gacaagggccctccttgtcattgaccttagctaaaccatggcaattcataaatagaggaaacattaatgaattaaaagcattccttattttttaactaatatttgtacattttcttagtctctttccaagtctttgcctcnnnnnnnnnnnnnnnnnnnnnnnnncctttgacagatggtatcccttcctggatcattcatttcaccttggtttctaactttaggtttactttcacttgttatttgacttagcaggtgcaacaaaaacaagaaacaaatgtgcccaccccactttccgcttaactgaaaagcttaaaataaatttctggaattatgtatcctgaagctttgaaatttctttattaatcgatgaaatatgaattctaaattctagcattgaagcttttcaccaaaagaagtctctccaaaataaatcttttgcagcaaagtgatatttattgagttatgtggaaaagatggcttgtatttttcagattattacaacacactgtgcagaattagacagatgttccgtggtgtttggtttccctttcttctctctcctgctcactctgcattatagcagcagcttatttctctaaggctgggacagctgggctctcgggcagtggacgtccctccccacacctgggtcacaagtagtagtgggctgtgctataacccagcatcatgcttaacagcgtgttggcccttt

SEQ ID NO: 165585 - DNA, 289 bp, Homo Sapiens
ttcaatttctacacattatatgcacatcagatgccaagtcaacgagtatttcataaatgtataacataaatatttaagaaagcaaaagagtataaagaaaagatgtggcctttgtcttttaaaaacagaaaatctgaataggaaaaaactatacacgtatctaaatttccacacagagataatgatagacgtagaagatggtgtcatgttacatcccactttttcagctcttacagaattgctacagtaattcacaatatggtggcgtagaactgggatcctctagaat

SEQ ID NO: 165586 - DNA, 640 bp, Homo Sapiens
tcaatttctacacgcggatatactacagtcgaggatagagggagaaactggtggaattttcagcaacttgccattccacgtctctgtctttccagatgataaggattccccacgcaagttagccacaagctgttttacttccttcattttccctttggcatagaaggcctgtgtttggtaaatggctgcctttggcaccaccattcgggaagagcagttctcaatctcagcaaatatctgaattgattcacctggggtatagccctgccttgcaattttggcacttaaggagattgggcctgaggtacagaaccagcaacagagtgtcttttctttttgtgcctgcttggggtgacagtaatgaaggagtgttgatatctatatgctcaaagactgtaaattccttctgttaagtgttactggtaattagccaagccctgtgcaattcggctgttcacccatatagcgcacactgccatgtcggccgtgcgaatgaggtagcgagtggtgtctgtggaagctcgaagctgaaagcatattcatgcctgcctgaatgaatagtgcggaagcctgcttcggaattatcatcagctctttcgtgcccaagtaagatgtctttatggtgtgaaatactctacga

SEQ ID NO: 165587 - DNA, 309 bp, Homo Sapiens
  misc_feature (67)..(78): n is a, c, g, or t
gtcatcctgctaaccaggggacactatgatcttcagtcatttgccactaagtatgatgttagctgannnnnnnnnnnnaagatggcccttatcgggttaaggaagttcctttttactcctagttttgggtgcatttttattaagaaagggtattgaattttgttaaatgcttttgctgcttctattgagatgatcatctagttttggttatttattctactgatgtggtatattacattgattttggtatattaagctaactttgcattcctgggataaatcccacatggtgatggtgtagaaattgaa

SEQ ID NO: 165588 - DNA, 390 bp, Homo Sapiens
  misc_feature (265)..(273): n is a, c, g, or t
  misc_feature (303)..(341): n is a, c, g, or t
ttcaatttctacaccacgtgtctgtagatacaggaccgcagaccttcgctttatcatcataatcacatctaatgtccatcctaacttacgattcatattcagtgcctggaaacagtccctgtatttaacaatacctacacataaaaacaatccactgttacaacttgtatggtcacaaaacattaatgatcttctttagaccaagcaaatgtttttttaccataattgtcgtgcaccaaattcacagccagaatccccaagatcnnnnnnnnntttttgcacaatacaaataataacttaaannnnnnnnnnnnnnnnnnnnnnnnnnnnnnnnnnnnnnntcttacagaactgtgcttggggaaactccattgttgtgtagaaattgaa

SEQ ID NO: 165589 - DNA, 540 bp, Homo Sapiens
actaatacaaaggtgaagtggctcctcccaagtagcagtgctgccggggcctggcccaggcctagccctgggctcacctctcatgctcccaagccaaccctgatgctccaggctccagggtagaccttttccctttagaggttcagtgtccagggagctctatgataattgtgtgaatgaggtgagcgctgactccatgtgagtattttaaggcttggagtcaaagaattaacctaacatgcccaggcagagtccatgtgtcaatggcccgtctccagtttgttctaatttctcaccacgtgtctgtagatataggaccgcagaccttcgctttatcatcataatcacatctaatgtccatcctaacttacgattcatattctgtgcctggaaacagtccctgtatttaacaatacctacacataaaaacatccactgttacaacttgtatggtcacaaaacattaatgatcttccgacgcgtggtcgacgatatcccgggattccggccgtaccagccgcttatacacacttcatagta

SEQ ID NO: 165590 - DNA, 451 bp, Homo Sapiens
  misc_feature (426)..(426): n is a, c, g, or t
tgttctttgataatcgttcattgtctctacactatagcaccataattttgttaaggcaacaaaattttttactgacttttgcacgttaaaaccacttataacctaaggaattttggttaggtaaagaattatatccatatgaataaacactgccaaaatatcctaaagtctatataaaaagtatgcattacaaattaatgagtgtaaattgtgagactacctctcacacaatccctgaaatgattatttaaagactactcttaactattactgagatagtgcttggtccctgaatgatgtaatccttgtgcaaagacccctcaagatacgtcaaagcacaaaagataacagaggaaaggaaacaaacgtattacaacttctgatataaacattcctcataagtttggaatttttcataactcctgnggtaaaagttcttagaatatgtcac

SEQ ID NO: 165591 - DNA, 405 bp, Homo Sapiens
ctgttgcgaggaatgctgagtaaactgtgcgatgttacagagcacattgagtctgtggtcatcgtggttcttctatcttcactgtcacctgtatcctgttacacatactcagttcctaattgtaagctcaattttggtattagcaaaagcatctgtcagtttttcctcaattactcacacctcttcttgcctaaataaaacaaagaaacaaagaaaacaagtgtggtgtcattacacgtctcgggagttcctcgtcactgactttatatatataaaaaaaagaatgcacatgcgggccacgttcacagatagacagattcacccgaaatgagaatgagggccttaaggctgccgaaaacaaatgggtggaaatagcaacgttgtttccgtcgtgtagaaattgaa

SEQ ID NO: 165592 - DNA, 1261 bp, Homo Sapiens
  misc_feature (447)..(471): n is a, c, g, or t
  misc_feature (709)..(718): n is a, c, g, or t
  misc_feature (795)..(804): n is a, c, g, or t
tagcccactgaatgcatctcccccagagaacactgagggtaggggacaggaggctcaggacgcgccctctgaatcgagtgtttcttcttcacaagtcaccaagagaggacatgagggggaaagtccttttttgcccttctccaaaaaataaccttccacagagacaaactgtccttctatccacttttatcttttaataaatatcaaaaggaaaaagctgcaagggtgcaaagggcctgtgccagaagaaaacacacacagggaaaccgctttttttaatcaattgtagagaatagtcatttttaatctaaattagagaattgtgatacaatggcagtcctcaaagacgtaacgagttcatctttctttcaccataggggttatagttggcttgtgctactctggaatcattttactgtttgtttttattatcttaagtgctaattnnnnnnnnnnnnnnnnnnnnnnnnncctgtagtttcattacctttttgaataatgtcatacaaaaaatgtatttgtttttttgtgctgtgagaattgatgtttgtagattaataatcattttgtttagaattacaaaatagtttttaaatattgtctgagaaaagccaaagttaatgcaacctagtggaaactgtaagaccatttgagtattgtttgttttattgatgcatttggattttgttgtttgatggaatttgagccnnnnnnnnnntacgcaggctttcctatttctacaactgattgtacttatgcatttggtaccagtggaactttttatactggagattnnnnnnnnnntggaaatttttgtggcttgctctggtgggcccctgacaatgactgatttcaagtttgatttcgggttgattgattgattgattgatagaaagaaagttgcttttcttttgagaattaaaaactttggctggaattcttttttccctttgcttatatctagcattagaattttgtcttaaaataacagcggtaagtttcactttttattctgtattgtgcagttacacaataaggtaattagatttagaagtactcagtcactttaagtggataaatgtattagttaaaactttagggtttgcttttttgctgtttagatcaaagttttttctgattcttctgtcctcattgtgaacataaccgtgtagttgaaacagtcaaacttatttttgtaatgtatgttattgtgtgatgcagttttttgcttctgtctccaatattaaaccattttcctaat

SEQ ID NO: 165593 - DNA, 394 bp, Homo Sapiens
  misc_feature (36)..(36): n is a, c, g, or t
  misc_feature (85)..(143): n is a, c, g, or t
gttcaatttctacacataacagtcagaaaccacagntgataaactaacctaagaaaatcgtttaacttttatctacctgaaacannnnnnnnnnnnnnnnnnnnnnnnnnnnnnnnnnnnnnnnnnnnnnnnnnnnnnnnnnnattatcaatatccttaagatgtaaatggcttttgcagtgtagaaattgaacgttcaatttctacaccagagatagatacctgaaacaacaacgacaaaacagtcttctgctagaaagaaagaaacagaaaatacttcctcagaggaaacaatatccaccacaaccatatgatgagcaaatgacattgagtatctgtacaattcgagggagtgtaagtgtagaaattgaacgttcaatttctacacaattac

SEQ ID NO: 165594 - DNA, 341 bp, Homo Sapiens
  misc_feature (148)..(149): n is a, c, g, or t
  misc_feature (156)..(156): n is a, c, g, or t
ttcaattgctacacaacaatcatctaaaggagatcatatcttacaggcagctacatgttatggatgaaacacatgtgattaatcaagtgaaagaagatgtatgctatgtgtctcaggatttttatagagacatggatattgcaaagtnntgaaagngagaagaaaatacagtaatgatagactatgtcttgcctgacttcagtacaattaaaaagggcttttgtaagccctattacttatgcctgggaaggtggaaaattgatatcagagaacgatgattttgaagatactggtggtacaagagaagatacgaagaaatgacatagctctgtgaaggtcat

SEQ ID NO: 165595 - DNA, 168 bp, Homo Sapiens
acaggtgtgagccacctcgcctgggcccccttctccatatgcctccaaaaacatgtccctggagagtagcctgctcccacactgtcactggatgtcatggggccaataaaatctcctgcaattgtgtatctcagacatttgtgtctttgatcctcaccctgtgaccct

SEQ ID NO: 165596 - DNA, 561 bp, Homo Sapiens
gggctgcaggtctcgcgtctgccaggagctacggccggaagatggcggcggccgcagagttgtcgctactggagaagtccctgggactgagtaaggggaataaatacagtgctcagggcgagcgacagattccagttcttcagacaaacaatggtccaagtctaacaggattgactactatagcagctcatctagtcaagcaagccaacaaagaatatttgctggggagtactgcagaagaaaaagcaatcgttcagcagtggttagaatacagggtcactcaagtagatgggcactccagtaaaaatgacatccacacactgttgaaggatcttaattcatatcttgaagataaagtctaccttacagggtataactttacattagcagatatactattgtactatggacttcatcgctttatagtgagtatttgtatagttactggctttttttctgtagtgttgagaatgatttttaaaactttgtcttgaatttaaatcagatttgcatttttggcttatcaaataaaaatgaaaggaattcctttatacaaggtgc

SEQ ID NO: 165597 - DNA, 871 bp, Homo Sapiens; identical to SEQ ID NO: 14978

SEQ ID NO: 165598 - DNA, 1187 bp, Homo Sapiens
  misc_feature (336)..(336): n is a, c, g, or t
  misc_feature (449)..(658): n is a, c, g, or t
aggcggtctagaggatcccgtcaatttctacacatagctatgactatgaaaattaaagtgaaagaaactttattttgagtaatatacatatcattcattccatttaattttcatagtgcatagctatgtgtagaagtacacagggaagaataaacattagaaatacctagccatgaaaatatacaagtgaagacatttgatatatccatggacaggcttggaagtattataaaacaggatccattaggaaagaataaaaaccatgcaaaaaaatcttatctaaatcatggcaggcaagtgcaatcaatataaatcatagtctctgggtacaaaaanctatacatgttctttggattaaaagcaaatgggtggcttggcttttatgtccaagccaaaaatcatctatacaagtaaaaagtgtgtgggtcaggcatggtggctcccacacnnnnnnnnnnnnnnnnnnnnnnnnnnnnnnnnnnnnnnnnnnnnnnnnnnnnnnnnnnnnnnnnnnnnnnnnnnnnnnnnnnnnnnnnnnnnnnnnnnnnnnnnnnnnnnnnnnnnnnnnnnnnnnnnnnnnnnnnnnnnnnnnnnnnnnnnnnnnnnnnnnnnnnnnnnnnnnnnnnnnnnnnnnnnnnnnnnnnnnnnnnnnnnnnnngtgtggatactgttatgccaaatgtgaaaataaaatattcaaggccacagatgcaagtcaccaacttacaaagagaatactgaaggtagggtacattaaaaaaatagagaaatgcaataaagaaaatgccacctctgcctaaatcaggaaagagtaaatgcataggcattaaaacagcagctctgcatactacactgcatttctctttgtcaaaaagaattcactgtgtatcattacaaaggtcagtgaataagacgaggcaataaacgtagcgccttggtattagggcaaatttagttttcttttcattttacacatgagggggaaaaaagaagtgtagaactaggaatgctcatctttccattcagtacactaacttttaagtgtgtggcacaaatggaatagagacatgaagtttaatgagatccaagcttccaaaaatgatttcacatttgaaaagctatggaaagatacaattatttactgttttacaaatcaaatgcttaaaccaagtttaaaagttgagacc

SEQ ID NO: 165599 - DNA, 329 bp, Homo Sapiens
ttcaatttctacacctggacaaggacatgctttcctggcttgcatgtggcagccctgtcctgactgcttttgtttccacaggaactgagacattggagtgctttggcccagagatgagggcagcaagtgacccacctgccccttgtctggcttactggctgccgtctttgcagtgggcagttgctcagttttgccatgaccggagggtctaaagatccttttccccttctctttagacttcatcctgtgaagccaatgaatgccacggcccaccaaggttgctaactgcagcttgggaactgccaccatcatcaagtgtagaaattgta

SEQ ID NO: 165600 - DNA, 374 bp, Homo Sapiens
  misc_feature (75)..(93): n is a, c, g, or t
ttcactttctacacagcaaaggtcttcttcaggaaggttacattctaggggggaaggaaggacagtaagttggcnnnnnnnnnnnnnnnnnnncatgtaactcaagatagtgataaatcccaagaaaataaagcaagacagtggtacatatggattaggcgatgctgggtatttcagggtaggcccctaagatctaagacggtcacaaatgctttgttactctccccacggaaagatggagtgtatttccccctctcctgaatctgggctggccctgtgactactgaaccaaaatcctttggttgaagtggcgctatgatggttctaggcctagccttcaagagggtcgcctgcttctacttcactttggaaca

SEQ ID NO: 165601 - DNA, 819 bp, Homo Sapiens
  misc_feature (544)..(544): n is a, c, g, or t
  misc_feature (617)..(617): n is a, c, g, or t
  misc_feature (755)..(755): n is a, c, g, or t
  misc_feature (770)..(770): n is a, c, g, or t
ggtcttcactcgcagcaagtgcgcgtgcgctgcctctcagcccaaattggaaacatggccgtactgtcgctgtgggcgggccggctgcgggtgcagcgcctactggcctggagtgccgcgtgggagagcaagggatggccgcttccattcagcactgccacccagagaactgctggtgaggactgccgttctgaggaccctcctgatgagcttgggccccctcttgctgaacgagccttaagggtaaaagctgttaaactggagaaagaagtccaagatttaacagtgagataccagagagctatagctgattgtgaaaacataaggaggcgaacccagagatgtgtggaagacgccaagatatttggaatccagagtttctgtaaggacttggtggaggtggctgacattttggagaagactacagagtgcatttctgaagaatcggagcctgaggaccaaaagctcactctggagaaggtcttccgaggggtgttgcttttagaagcaaagctgaaaagtgtgtttggcaagcatggcctgnagaaactgacacccattggtgacaaatatgacccccatgagcatgaactcatctgtcatgtgccagctggtgntgggggtgcagccttggcaccgtggcattagtaagacaagatggctacaaacttcatggccgcaccattaggcttggcccgattggaagtggcagtggagtctcaaagaagactgttgagaggccctcaggaaactgnatggtctcccagaancgcagtcacctatgtttccttttatttattaactaaggttggtattcta

SEQ ID NO: 165602 - DNA, 1038 bp, Homo Sapiens
gccatcttgccagcctaccagaagagagaagggcaataacagtagcttggtcagctcagtcagcagcacgtctgaggaggcccggaagagcactcgcccgtccacatggcacagtgccaacaatggggcatgggcaccgtacatgacagtggataggagtagcatcagggtccagcgggcctgcctgggacggcccaggcctggcatacccccatcctctacactcatacccacacaagaccctgggtggctaaggggcagcagggattgcaacacgtttggggaaaatcaagttatggagccagctcccaggaaggagaagccgtggaacattgccagagagaatactgaggatcagaggcatctaccaactccacagtcagggcttgaagagtaaggggctggtggtccttgaagccacagtcttggggcgagtcccatggagctaggaaggggaagaaggaatccagggtgcaggctgaggaactactgtccacaatctgcaggaagggaggcaaggatgaaggtggcaggaaagttggagatagcaaatggatgacagctggggaatccagataaagtgtctccacctgaaggctgagctgctcatcctgcctcttccatggcacctagagctagtcgggccccttgcgtagcaactgcaaatagtcccttaatgtcttctccacgttgggcacagcatatgcctgagccgcatagaatgccagtgcaggtgcccacagcaaagcccaatactgctgatgccctcagtttggccaccacatagccagccaggaatcccttgaggaacggggaggacaacagcgagccatcctggcccactccactgttgacttcgtcttctacacgccgctgcaggctttccagctggttcttgagaaatgccaggtccttaagcttaggcagagaatccttgtcatccgccatcttccgtgtagaaattgaacgttcaatttctacactctgctgttgtacggaaagtacccgggaatcaaagttaagatggaaagaatggaa

SEQ ID NO: 165603 - DNA, 226 bp, Homo Sapiens
tcagtcggtccggcatgtgctgtaagccgagcgtggagaagacattaagggactattgcagttgctacgcaaggggcccgactagctctaggtgccatggaagaggcaggatgagcagctcagccttcaggtggagacactttatctggattccccagctgtcatccatttgctatctccaactttcctgccaccttcatccttgcctcccttcctgcagattgtg

SEQ ID NO: 165604 - DNA, 229 bp, Homo Sapiens
tcaatttctacacatcaaataggaatgtgaaatgggcatgtgttcaagtaggtcgtctgggcccagtgaactataattgttgctttttgaacttcgggggtgggggtgggtgatgtagcaattgttttgcgtagtttggcgtatatatgttagaatttgtttttaagttttacttttgggaaacagttaaaacaacccagtgatggtagatgtgtgtgtagaaattgaa

SEQ ID NO: 165605 - DNA, 672 bp, Homo Sapiens
  misc_feature (190)..(216): n is a, c, g, or t
gagattgaaataaaacagaaaagtaaatgtttttaaaaacttccttaaataacttattgctatgatatcttgtttaacattgtgatattgtacagaaccagagtttgtctgtagtatcatctagctgtagagtaccctgcttggccaaatgaatcactttcatttgtccagtgcaactgaaaatttctcnnnnnnnnnnnnnnnnnnnnnnnnnnncaactaaccagtaggttaatgcatactaaaggtatgaatgcttaagtattttcttcagtttatagtgatatttctgtgtgaatgcccctgtcctttttgtttacaaaatggagaatacaaatttgaaacctagtgaaagatggcaactatcaaagtgttatcttagttttaaagaagcttgggattatgttaatatttagggaagttttatttggattccttgaattagttaccttttgaggcttatggattcttaaagcaataaagcaatattccttttaaaatcattgtttttcttctgtttattaatcattgatttaatctgtgtttttctgttggattagagaaaagatttacctgagaatcttgcaatctctatatcattagctatattataggtagagcttctttgctttatctgtaatctctcctgaacacgttgctttttcaggaatg

SEQ ID NO: 165606 - DNA, 442 bp, Homo Sapiens
ttcaatttctacaccgcccgctacgccgccgccatgtcggcgcaggcccagatgcgcgcgatgctggaccagttgatgggcacctcccgggacggagatacaactcgtcaacgaatcaaattcagtgatgacagagtatgcaagagtcaccttctcaactgttgtcctcatgatgtcctttctggaactagaatggatcttggagaatgtctgaaagtccatgacctggctttaagagcgtgattatgaaattgcatccaatagaacaagattttttctttgaacttgatgccatggatcatctgcagtcattcattgcagattgtgatcgtagaacagaagtggccaagaaaagattagcagaaactcaagaagagattagttgctaaagtagcagcaaaggcagacgtgttcatgagttaaatgaagggatcctctatac

SEQ ID NO: 165607 - DNA, 498 bp, Homo Sapiens
tttgccagcttctccattttatttgaaaataatacttttaaaatgattttgacattttcatatataaatttatttttttcccaactataattttggttttatgtacaagtacacaagtaccaccttatttttaatgtttaccttgaagggtagaaaacaaaatcatgttttataaatgtggtataaaattacacatcttctcatgatgtcatgtcaataatccactacactaaaccaactgtaacaaggtagtacatgctttaaacatccaattaagaataaatctgagccaacaccttgatgatgacaagggaatgtgctgatatcgtgttaaactgatgtggcagtaaaccaagggactaagcacatgattattcaaattaaaacataaaaaggacaaaaggtgtggattttctgggctacatcacataatatttgtctggcgaaaccataatacagatttgggtaaaggagatttttaatagataacaagtaccc

SEQ ID NO: 165608 - DNA, 746 bp, Homo Sapiens
ttgtatgaaacttgtaaaaacaggcgtacggccggaattcccgggatatcgtcgacccacgcgtcgctccccgccggcgggatgtggcgactacgtcgggccgctgtggcctgtgaggtctgccagtctttagtgaaacacagctctggaataaaaggaagtttaccactacaaaaactacatctggtttcacgaagcatttatcattcacatcatcctaccttaaagcttcaacgaccccaattaaggacatcctttcagcagttctcttctctgacaaaccttcctttacgtaaactgaaattctctccaattaaatatggctaccagcctcgcaggaattttggccagcaagattagctacgagactcttaaaacttcgctatctcatactaggatcggctgttgggggtggctacacagccaaaaagacttttgatcagtggaaagatatgataccggaccttagtgaatataaatggattgtgcctgacattgtgtgggaaattgatgagtatatcgattttgagaaaattagaaaagcccttcctagttcagaagaccttgtaaagttagcaccagactttgacaagattgttgaaaagccttagcttattgaaggactttttacctcaggttctccggaagaaacgggtttaggagcaacgatcgtggatctgaagtgaccaagcctttgaaaggtgtccgaccagagaaaatggcccctcgggaagacttgccctcgt

SEQ ID NO: 165609 - DNA, 970 bp, Homo Sapiens
  misc_feature (13)..(13): n is a, c, g, or t
ggagcgagcctgngtggcgaattccgcacgagggttttgtgcagcaaatgtggtggacagactaggtctagagatagatcattactgcccagtgatgatgagctgaagtggggtgcaaaggaagtggaagatcattactgtgatgcctgccagttcagcaatcgattcccaagatataataaccctgagaaacttttggaaacaagatgtggacggtgtggcgagtgggccaattgttttacactgtgctgccgagctgtagggtttgaagctcgctatgtttgggattacacagaccatgtctggacagaagtctattctccttctcagcagcggtggctgcactgtgatgcatgtgaagatgtctgtgacaagccactcctttatgaaataggatggggcaagaagctttcctatgtcatagcattttcaaaagatgaggtagttgatgtcacttggcgatattcctgcaaacatgaagaggtgattgccagaagaactaaggttaaagaagcattacttcgagacactattaatgggcttaataagcagaggcaactgtttttgtcagaaaacagaaggaaagaacttctccagaggataattgtggagcttgttgaatttatatctcccaaaacccctaaacctggagaacttgggggaagaatattcctgggtcagtgggcttgggagagtaaccccgaggtggaatgggggcctacagaggaaaagaaaccttgttttattcccctgtggaaaatgaagaagaatttctaaaacagcttccacccttttgttacaataatggtgaaaagaatcgttaatgtttccgaggtttccaaataaccaattcaaaccccttttttgggaatggggaagaaatggccgcggtgggaaaaaatgggtattccttatattcccgaaaaaagtttggaaaccagaacttggctacattgataaaacacgtcta

SEQ ID NO: 165610 - DNA, 435 bp, Homo Sapiens
ccatagctcagtatgtctgaattccagaggtcacatcagcatctttctgctttgaaaactctcacagctgtggcctgcttcaccttagatgcagtgagacacatagttggtgttccgattttcacatccttccatgtatttatcttgaagagataagcacagaagagaaggtgctcactaacagaggtacattactgcaatgttctcttaacagttaaacaagctgtttacagtttaaactgctgaatattatttgagctatttaaagcttattatattttagtatgaactaaatgaaggttaaaacatgcttaagaaaaatgcactgatttctgcattatgtgtacagtattggacaaaggattttattcattttgttgcattattttgaatattgtcttttcattttaataaagttataatacttatttatga

SEQ ID NO: 165611 - DNA, 1506 bp, Homo Sapiens
  misc_feature (1441)..(1465): n is a, c, g, or t
gacttgtagcttccaatattagaatgtccgtccaccatgtttgattgtggcatggtgttataacgggcgtgggagagtggggaaaagaggagaaaccctaaaataatgctttaatcccagtttgaggtcaggaaccagactgttcccagattaggtggaaaaccgaccccaggaactccacgtgcggtaaatgctgaattttaactgagctaaaaatgtctaggccatccctttttagaattcgcatgactcattgtagtcaaaagctataagaacatattccttaatagttcagcaagctttagggaaagctagctcattgtcttgggttctaaagtccttttgtttgattatttttattataatgaaattaaacttatgactattacagtatgctcagcttaaaacatttatgagtactgcaaggactagcagaagcaggaaaaatcctactaaaaatatttgttgatgggaaatcattgtgaaagcaaacctccaaatattcatttgtaagccataagaggataagcacatccatatgggaggagataaccagtctctcccttcatatatattcttttttatttcttgttataccttcccaaaacagagacattcaacagtagttagaatggccatctcccaacattttaaaaaaactgcaccccccaatgggtgaacaaagtaaagagtagtaacctagagttcagctgagtaagccactgtggagccttaagtggtgaggtcttccaatttcagagtgatgtgtcttcaacttgtatcatcattttagcggaaaaacataatttaattttggtgaaatgagattcatctcgtaacaggattagtaacagcattcactgaatttcacactcttcttttgtgaacagtgaagaaaatgaatggtagctagaagatcaatgggattccagctccagctgcagatggaatgacgatataccaggacaaaaaacacctatattttgatttacaaagctaacagcagttttaaatctgcaacttaattacagaccaactacaccacaaccttttcaaatggcaaaaatacaaaaaagtgttacaaaaatatttcagaaaaagtgcatagtcctaagtgcatagtaaataaaagcactgaaaaatatcttgctagagggagttcagcttggaagttattaccaaagctaaacatttttattttacacaaactatactcaaaaatagctttatgagactgatttctggctaaaagtatcaaagggtttattagtcaagaaacaaatacctcaaccgacaagggtggatagaaaagaaacaaagaagctgcctaccccagaagttcagacttaataaaatttcttcagtattacggtactaatatcccttaatggcagaatgtgataatcatggaattaattattgctaaagtagttttcaaatnnnnnnnnnnnnnnnnnnnnnnnnnccaattaaacttgacacaatctgaccaaacacgtgtcaatt

SEQ ID NO: 165612 - DNA, 216 bp, Homo Sapiens
ttcaatttctacacaccaagagcctgggttgactttattgacaagacccctctaagaatgaacttaagtggaataattaaataggcatctagacattggaaatattgtctcttttgctgagaaaatcatattggatggttgtgtttttctccttcctcactgcacttccccctgacccgttctaatttgtgccctccagaaagtgtagaaaatgaa

SEQ ID NO: 165613 - DNA, 206 bp, Homo Sapiens
gttcaatttctacacagagtccccagcctattcagcccttaatgttctctgaatttgctgaggtaaaaaacaaagatttaaaaagatatcaggaggaaggtgtgataacaactccacaacactcttgatactgaagaatagacaatttactaaagtcagatgctaaaaacaggacgtctgctcagcatcttggtgtagaaattgaa

SEQ ID NO: 165614 - DNA, 896 bp, Homo Sapiens
caagtttctacactggagtggactctctcacgcataaacctgcatgttgttgtgtggtggctcagacatgtgtgtcacaggtccccgctgacctcctccagcacccccaggggtagggctggtggtcacatctgaccagtcagaagcagagtggggtgatgaacttgaccactggtcaggagactctggggatggtgtcaggtagggatgctcaccctggaggtgaccactgtgactgggtgttcgctcagcagcatttgaggaagcataactgtgctgtgaagggggtgtggggtacttgcccacagaggctgggaaaggatgataggctgggagaatggtctgagctacctgcccgtcctgctggggcatcatggcagtggggaaagccacactgggcaaacgggccatttctggaatctggtacatggtgggcagggggcccgcaacagctggagggcaggtggactgaggctggggagcccccgctggttgggcaatactgcctttagggatgagctggaaagtcacaatggggggcaagggctcccgaggggtgcttaatgtgcttcccttcaggtggcctgctctggggagctatgccaggatgggtgccctcagctggagccaggaccataccaaacatctcattgtactgggtctcattcacctccatgcggttcatccaatctgctgggactgggactggatggagcctactcaagcttccagcactgccactgcctggagacacaatgtggtggtgggatagcaactggctcactgagggaagcacagggctggccccatgtgccaaagggtgaatttcatgaaggttagaaaaagatagtgatgctgggcatggactgggcaggagggcggcagggccacatagg

SEQ ID NO: 165615 - DNA, 1355 bp, Homo Sapiens
  misc_feature (838)..(847): n is a, c, g, or t
gggaataaacagcggacggaggggccggcggtggcggagccggagcaagcaggggttcggcggcattacctgtacccattcaccggcggctaccggcggcggcgcgcagcgtgtcaggcggagagacccgccgccaggtgtgcaactgaggaacatggctcaagaaactaatcacagccaagtgcctatgctttgttccactggctgtggattttatggaaaccctcgtacaaatggcatgtgttcagtatgctataaagaacatcttcaaagacagaatagtagtaatggtagaataagcccacctgcaacctctgtcagtagtctgtctgaatctttaccagttcaatgcacagatggcagtgtgccagaagcccagtcagcattagactctacatcttcatctatgcagcccagccctgtatcaaatcagtcacttttatcagaatctgtagcatcttctcaattggacagtacatctgtggacaaagcagtacctgaaacagaagatgtgcaggcttcagtatcagacacagcacagcagccatctgaagagcaaagcaagtctcttgaaaaaccgaaacaaaaaaagaatcgctgtttcatgtgcaggaagaaagtgggacttactgggtttgaatgccggtgtggaaatgtttactgtggtgtacaccgttactcagatgtacacaattgctcttacaattacaaagccgatgctgctgagaaaatcagaaaagaaaatccagtagttgttggtgaaaagatccaaaagatttgaactcctgctggaatacaaaattcttgagcatctgcaaactaaaaattgacttgaggnnnnnnnnnncctaggtcattgggaatgtagagcagtgtatcttgcatgtcatcggaagaatagattttggttttggttttgttttgaaaatgactctgaacatttatttccattgcaatttctgtggctgaggagacttaaactttacaagtattatccttttaagatcattttaattttagttgagtgcagagggcttttataacaaacgtgcagaaattttggagggctgtgatttttccagtattaaacatgcatgcattaatcttgcagtttattttctcattggtgtatgtatatatcgcttttctctgcagcacgatttctcttttgataatgccctttagggcacaactagttatcagtaactgaatgtatcttaatcattatggctgcttctgttttttcattaacaaaggttattcatatgttagcatatagtttctttgcacccactatttatgtctgactcatttgtcacaagagagtgtgtgctgatgagatgtaagttcgtgtg

SEQ ID NO: 165616 - DNA, 797 bp, Homo Sapiens
  misc_feature (369)..(377): n is a, c, g, or t
catcttctacgaaccagtctcaatatggattctcagcacttaattctagagaaaaaaatagtttcgaaatagctcaaataaacaaacaaaaccagcaacagttccaacagtatcataagtaattctgtctaaattctcccatgatactttagatatacctcatttctctaggtaactatatgccctcaccatactggaacaagatttctggaattaaggaagcagtggcacagctattaaataaattacacatatatccctgttacccctttccatctaatatttcctagggaaaaataggtatttagaattagatgtagaaagaaaagagtaatactgtctcacagctggggtgcaaaagtttccagnnnnnnnnngggtagactatgcacatggagggaggaatggaaacacagtattggtgtgtagaaattgaacgttcaatttctacacgagggaggggcgctggccacatgtcactgatggtcagattccaaagtcctttctttatactgttgtggacaatctcagctgggtcaataagggcaggtggttcagcgagccacggcagccccctgtatctggattgtaatgtgaatctttagggtaattcctccagtgacctgtcaaggcttatgctaacaggagacttgcaggagaccgtgtgatttgtgtagtgagcctttgaaaatggttagtaccgggttcagtttagttcttagtatcttttcaatcaagctgtgtgcttaatttactctgttgtaaagggataaagtggaaatcatttttttccgtgg

SEQ ID NO: 165617 - DNA, 844 bp, Homo Sapiens
  misc_feature (661)..(663): n is a, c, g, or t
  misc_feature (666)..(667): n is a, c, g, or t
ggtagcatatgttttttaagacttaagcatttcatgctttaaaataccttcacaagtgaacattacacacagaagttcatttggttttcctttgttttatggtgcatatagcaataaagacccccctccaccctgcaacccccatcccccaccgggcctttgtccctgccttggcttttctccccttctcattctcctctcccctttcctcactgaaggctgtgagttgctttcaatgtgacaacactatgatgtcatttggaaggatttgccaggacagactgattctgagtcctgggtgccgtatgtgtatgcggcagtgttgtcaggcgatcttgtttgaagctctatgttgccataattaccatcaagtacacactgttggcaaaaggctaacacctgactttagaaaatgctgatttgagaacaaaaggaaaggtctttttttcactgcttaaagtggggtcactttgatacctttgcggtcatgtctgtgtctgatgagtgtagaatctctggatgtgcactgtcagtcatgtgtccaccaggcctcgaatatcatatgggaaatgtcatagttaaaaacgtacagccaggcccgtgtgctgttaatagtggtgaaatggccatgttaaaaaaacaccacaccaaccatatttannnaanncctggtcggcccggcctcgccccttcgagaatcttttcctagaaccatttctttttgggcgccccgggccccagctaagggaaaagtgaaacattgggtccctaagcctgggttcccctagggagaatcctcgggcactgggaactaaggggcttttgggaattcctccacccattt

SEQ ID NO: 165618 - DNA, 315 bp, Homo Sapiens
tcactttctacacaagagtattaatttaaccagagacttccaaagcaatacagaaacttacatggatataaaaaccctaacccttttaaaggtcagatttgctaagtgatcaaaaggggtacttgaattgaatcgacacaggaagagtgtgtacagggttatgagtgtaggcagatggttactttggtcatatctccatttgccacctgattacacatgagaatggcatctttactcaccagaaagccagtattataggaggtgtaggaggcattcttggacgtgagacaagaacattgttgtgtagaaattgac

SEQ ID NO: 165619 - DNA, 392 bp, Homo Sapiens
  misc_feature (328)..(344): n is a, c, g, or t
cccttaacggaactgccttaaaaaggcagacgtcctagtgcctgtcatgttatattaaacatacatacacacaatctttttgcttattataatacagacttaaatgtacaaagatgttttccacttttttcaatttttaaacacaacagctataaacctgaacacatatgctatcatcatgccataagactaaaacaattatatttagcgacaagtagaaaggattaaatagtcaaatacaagaatgaaaaacgcagtacatagtgtcgcgaactcaaatcggcatttagatagatccagtggtctaaacggcacgtttttgcttatnnnnnnnnnnnnnnnnngatgtggtttacaagttaaagctacagaatccctttttgctgtaattg

SEQ ID NO: 165620 - DNA, 912 bp, Homo Sapiens
  misc_feature (298)..(298): n is a, c, g, or t
  misc_feature (429)..(539): n is a, c, g, or t
  misc_feature (588)..(597): n is a, c, g, or t
  misc_feature (673)..(681): n is a, c, g, or t
tagtagcatcttttctacaacgttaaaattgcagaagtagcttatcattaaaaaacaacaacaacaacaataacaataaatcctaagtgtaaatcagttattctaccccctaccaaggatataagcctgttttttcccttttttctcctgggaataattgtgggcttcttcccaaatttctacagcctctttcctcttctcatgcttgagcttccctgtttgcacgcatgcgtgtgcaggactggctgtgtgcttggactcggctccaggtggaagcatgctttcccttgttactgtntggagaaactcaaaccttcaagccctaggtgtagccattttgtcaagtcatcaactgtatttttgtactggcattaacaaaaaaagagataaaatattgtaccattaaactttaataaaactttaaaaggnnnnnnnnnnnnnnnnnnnnnnnnnnnnnnnnnnnnnnnnnnnnnnnnnnnnnnnnnnnnnnnnnnnnnnnnnnnnnnnnnnnnnnnnnnnnnnnnnnnnnnnnnnnnnnnccctggccgccccccccgcccccaaaaaatttttaaaaacctttttttnnnnnnnnnnccccaaaaggaaaggaaactgggccaaggtggttccaaaaaaaaccgggacaagaacaaggggtgggatccccacnnnnnnnnncccccggggggaaccggggggtttgaaaaaatccgaaagggattctgggggtctttttgggtattttcaaaagggatcccaaggggactcaaattaaattaaccccccgcccggcccctatccgaagaaggggggaaatacataacccttccggggaacggggaaaccctcccaaacggggttggtaaaaccgaaatcgccgggcggaagcgagacctggggcgccttggg

SEQ ID NO: 165621 - DNA, 1066 bp, Homo Sapiens
acatggcggccaacatgtaccgggtcggagattatgtctactttgagaattcctccagcaacccatacctaataagaaggatagaagaactcaacaagactgcaagtggcaacgtggaagcaaagagtagtatgcttttatagacgacgtgatatttccaacacacttataatgctcgcagataagcatgctaaagaaattgaggaagaatctgaaacaacagttgaggctgacttgaccgataagcagaaacatcagttgaaacatagggaactctttttgtcacgccagtatgaatctctgcccgcaacacatatcaggggaaagtgcagtgttgcccttctgaatgagacagaatcagtattgtcatatcttgataaggaggcataccttcttctactcattggtctatgacccctcattgaaaacactattagctgacaaaggtgaaatcagagtgggacctagatatcaagcagacattccagaaatgctgttagaaggagaatcagatgagagggaacaatcaaaattggaagttaaagttcgggatccaaatagcccacttacggatcgacagattgaccagtttttagttgtagcacgtgctgttgggacattcgccagagccctggattgcagcagttctgtgaggcagcctagtttgcatatgagtgctgctgcagcttcccaagacatcaccttgtttcacgctatggatacattgtatagacacagctatgatttgagcagtgccattagtgtcttagtaccactcggaggacctgttttatgcagagatgaaatggaggaatggtcagcctctgaagctagcttatttgaagaggcactggaaaaatatggcaaagacttcaatgacatacggcaagattttcttccttggaaatcattgactagcatcattgaatattattacatgtggaaaactactgacagatatgtgcaacagaaacgtctaaaagcagcagaagctgagagtaaactgaaacaagtatatatcccaacctacagcaaaccaaatcccaaccaaatatccgcgatgatc

SEQ ID NO: 165622 - DNA, 934 bp, Homo Sapiens
tccgcttgggccttaaaaggtgttggccccctggagtttttggccccccctttgtgtgtgttgggaccgcaagataggtttggccaccgaccagccaggaaagggaagagggaaaagagaaatggttcagaagcacaacatataggcttaagaattaaaagcatttaacattctgccctaatggcagcataaattaatagcaacaaacgccgtcttggctgcctgccgcagccggagggtatttttgcagacctgacgagcaaattttgtgaaatatgtagtatgaaggaagaaagcttgcgggtcttcactgcagactttggactcccagtgtttcggactggcattccctgcatggcctggcgggacacgtgacttctaacacgagggtcctctgtagttgggctaggagataacttctcttcttctgactgggtgggcattttcaagcctccatattttttccaataaagccaacaaattgcacataatctacactgcatattaggtgggccccaagaataccactggtgagactgtgtagcatagcagctctcacaggctctccctaagagaggattctgaggctggaacgtggtccccacagctccattcacagcaccaggcttcccattactagtggatatttggttgggatttggtttgctgtaggttgggatatatacttgtttcagtttactctcagcttctgcggcttttagacgtttctgttgcacatatctgtcagtagttttccacatgtaataatattcaatgatgctagtcaatgatttccaaggaagaaaatcttgccgtatgtcattgaagtctttgccatatttttccagtgcctcttcaaataagctagcttcaggggctgaccattcccggacgcgtgggtcgacgatatcccgggattccggaccgtaccgcc

SEQ ID NO: 165623 - DNA, 1601 bp, Homo Sapiens
  misc_feature (77)..(87): n is a, c, g, or t
  misc_feature (405)..(414): n is a, c, g, or t
  misc_feature (434)..(535): n is a, c, g, or t
  misc_feature (672)..(672): n is a, c, g, or t
  misc_feature (1439)..(1450): n is a, c, g, or t
gagaagcgaagacggcggggaaaaaatgcggcggccgggggcaggcgaagctttgtccggtcttatcttatcaggannnnnnnnnnntagtaacaccagggcaggcacaacgagagttggagtcgggggtggaagagaacacatagtgtcttgcctgctgtgccggccagagtgaccacccgcgaggtaggtgtggcggtcggaccgcgggcgggggggctagaaggagtaggtggagagcgtcacgtaaagaaggacaggcaccaacagagtggtggggtgggtaccggggcgagggagaagaggggaggcggaagggtccgttttaagggagacaatataagaaggattcttttttcctgcggtaggaaggggggggagcaggtggataaaaagccggatatnnnnnnnnnntcacgagccggcgccgagannnnnnnnnnnnnnnnnnnnnnnnnnnnnnnnnnnnnnnnnnnnnnnnnnnnnnnnnnnnnnnnnnnnnnnnnnnnnnnnnnnnnnnnnnnnnnnnnnnnnncgacgctattgccgcgcgacgggggcgaaagcggttaacggggacgaagggggattagggtaggtgggggcgtaacgtccgggatgggccgcgcggaggcggggcagtgttcggggggcggtcgggggggtgtgggngtggttttacatgccagcagtacatatttattattattcatgaatggtgaaaagacttacaaggcccattattatgagtataaccacacatatgaaatatcacttagcggcaacatgggatgaaaaggacagttatatatttatattaaaaaaatacacgtttgcattcaatgtttgcctagaaaaaaaatacatgtacacacgctctttcaagtgctccccataaactgctataaaagcacggaggcatcaagctgtagaagttccacatatacataacatgttgaaatatctcaagcataaaaactgtacgtaacttgcaaaaataaagttcctttcttcaaacattttgatctgagctcaggcaaagcaaataatgaacaccaatgatttttatactatttcacacaatttaaaataatcaacatgaaaaggtcaacagcttcaaaaatcctgaaaatatggaggttacgagaatgaacaatttcatctgaaaagtctacagcagatctgcttcatcctgactctcaaatatttaaggatcataatttactatactcaaactccaagtttagccaggacaaacaaaatgataaaaagaaaaattactgcaaacagggcatgactgccctttagtttctttagacaatttcactagtgcaagagcatcatttacctgaaagatcctaagagtcacaattaaagtactcatacaaaactatttcctttgttctttaaaaagtgccacatactatacttttcatttnnnnnnnnnnnngaacccaacacaaataaactaatgaaagaccgtttgtctccatctcttgtcaatgaggaaaggccaaagtgattctttgattccaattcgaaatggtgttggggataacatacatgttatccccaacacaaaaaatttaaaaatcagctgg

SEQ ID NO: 165624 - DNA, 1107 bp, Homo Sapiens
cttagatgggtggaactccgacgagggccagtgattttcgggtaacgaaagtcatgggatcaagtcggacgaatatagtcgtttctcgtcgaggaggggaggaaaggtgaagcgattgtatgcgttgcgggaagaggtaacattgaaggggttttggaagtttacgtgtcaattctgggatcataacttaaaggccttacactctccgttccagttgccaccagttgatgttggaaagagccatattttcgctcttcggaaggcggtagtgaaataatggggtttggagagcccatgttcgcccatggcgcacaaagaagagaatagggcggttggtaagtaatgttgggctaaggagtgaagggtaccgatgtgaagattttattccatagtaataacaataccaatttggagagcaaagttattttcagcatttttctaaaagtctagtgatatattctgggggtggtaagggtacatgaaaaaagggacttgggatataagttaatgggagatataggtgcactttgcggtatttggtggttaatgttttgaaagtatgcaaaatccacactcaataaagcacactgataaaatagatttccaataagactacaggctttgaaaaacaaactggctaagttggttgagaacataggtagaaattatcgctgattagaaatatttacaaaaaatagctttaaattcatacgctgaagaataaaagaaatgtcttccaagtatacctgatgtcaataagatcccaaataaatcaaatgtaaacaccatctggatggatctgtgttacctagtgacatgcagcgctgcttcatggatagtgaaaacttggcatcccacctctagcataaaactttttctgtaactacaggtttggggagaatgaaagtgatttaactatttatgcctatctgattttttaaaaaataaggatttccagcctctaatatcacaatccttacttaaaatctaattgaataatcactatcattctgcaatcttaatttagttaaagactttcaaaacacagcagcatgacttacagatgtctttgagtcatttatttaatcagtgtagaaattgaagttc

SEQ ID NO: 165625 - DNA, 853 bp, Homo Sapiens
acgcataacagcctggcagtatgatggctagatgcagagaaaacagctccttggtgaattgataagtaaagacagacaagtgtaatgtaaaactctggagaacatcaaagaaaaatggccatgcaactgctctttaatgttttcctacgatatattaatataaaaacaaagtttcagtctcttcacaagaagtaatttatattctctgaattttttcagccacaacaactggattctcttgtctgatttttgctgcagcttctgctttgtaatcatacggacagttgtgcttgtcagagtaacggtgaagtccacaaaacaaatttccacatcggcagtcaaaccctgtaagaccaactttctttctgcacatgaaacatctgtttttctttggtttgggcaattcaggagctttttcttcactctgagaagtactgggctgagaaactgatggactgggctgagtgacaactggctctgacacctctgttttcggggtagttattttgtcctctcttgaaatgctcatttctgtcatttgctgagttacaggcaaggcagccacaggcacatttcttgatttttcagatgtgctgccagcagcaccttcacagttgtttaagctagtgtctgctctctgtacagatgcagaatctgaggtaggagtgtagaaattgaacgttctttcaacaaagatttactgtctattctgtactagaccctgtaggtttgggggtacagtgttaaacatgatagaggctctgccgtcttggactttaatagcttagagaagagagcaaatgagctgacaggtggttataatgtgaattagtgctgtggtgtagaaattgaa

SEQ ID NO: 165626 - DNA, 701 bp, Homo Sapiens
  misc_feature (548)..(556): n is a, c, g, or t
caatggagagtcaaaaagtggaggctcttatggtactacatggggtgcctatggttctaattactctggagacaaatgttcaggccctaatggccaagctaatggtgacactgtgaatgcaactctaatgcagcctggcgtaaatggtcctatgggcactaactttcaagttaacacaaacaaaggaggtggtgtgcaaaaaggtagaataaaagagttctttcaacaaagatttactgtctattctgtactagaccctgtaggttttggggtacagtgttaaacatgatagaggctctgccgtcttggactttaatagcttagagaagagagcaaatgagctgacaggtggttataatgtgaatcagtgctgtggtttaggaattggagagaactcaaagcagaggtatttggtgtaatggtaggctttctggagaaaatgatatttaagccaagaactcttagaagttagctaagagagagatgggaaaatgagtcgacattgctggagtagataaaaccgcatgttaaaggcaggaagatggggnnnnnnnnngttcagtaaagctggaatggggaaatgtagtcagggactgaattttaaagggctttatcaacctcagtaaagagtttggcccatatgttgagggtggctgaaaacatattcatagtgtcatgaacaaccttttatcttcagtctc

SEQ ID NO: 165627 - DNA, 1110 bp, Homo Sapiens
  misc_feature (68)..(79): n is a, c, g, or t
  misc_feature (257)..(277): n is a, c, g, or t
  misc_feature (799)..(799): n is a, c, g, or t
  misc_feature (872)..(872): n is a, c, g, or t
gatagggaaatgttggatatttgagccacagcttaaaataattatattgcagtatccctttaaagccnnnnnnnnnnnntgcatttatattacagttttcctctatgaaagtccttacttatatgatacaagcactgtgttttgtgcttaaactcttcagcggggtagcatcaaagttcttggggaaggatcgtatatgtgggtcccttccctagaagaatggttgctgatatggctactgcttctacatcttgagnnnnnnnnnnnnnnnnnnnnncactgtagcattgagactgcttgattcaagtctggtgctttgccagatgtattaatttccataaatgctttgtgagtttggttaaaatgaagattcacttgggaaaacactgcagctttagtctgtgttactatcttgttatgagtatgtaaaagtaaaatgcatgtgaatttatcatatttgcactatgaaggtatttggttaaaatacaaagacttttaagattttaaggccctttcttccaacagcttttatagttagcagccattctttattttctggatagccaggttttatcacgcttctagtcaggatgctcctattccttcgaaaaattacggtctgactagtgagcaaagtcttgaatttattcaaaagtcctaaataccttctctaggtaagacacttggtagatgagagacggaaggcattgtcaagaaccattttcatgagaggtggtgtgcaaaaaggtagaataaaagagttctttcaacaaagatttactgtgctattctgtactanacccctgtaggtttttggggtacagggttaaacatgatagaggctctgcccgtcttggactttaatagcttanagaagagagcaaatgagctgacagggggttataatgggaattacgggctgcgggtttagggaattggagaaaacccccaagggagaggaattccgggggtaacggtaacggctttcctgggacaaaatggagattttagacccacgaaactctctaaaaagtaaccccacaaagaagggaggggaaacaagggggaccgaccgtggccggggcacccaaataaaacccgggctggtgc

SEQ ID NO: 165628 - DNA, 256 bp, Homo Sapiens
  misc_feature (62)..(62): n is a, c, g, or t
  misc_feature (147)..(147): n is a, c, g, or t
  misc_feature (241)..(241): n is a, c, g, or t
atgtgttcagtttgctacaaagaacatcttcagaggcagcaaaatagtggcagaatgagccnaatggggacagctagtggttccaacagtcctacctcagattctgcatctgtacagagagcagacactagcttaaacaactgtganagggctgctggcagcacatctgaaaaatcaagaaatgtcctgtggctgccttgcctgtaactcagcaaatgacagaaatgagcatttcaagagnggacaaaataactac

SEQ ID NO: 165629 - DNA, 473 bp, Homo Sapiens
ttcaatttctacagcatgcaggcttggatgcgaattcttttcccgattgcgcctcagttcaatttctacacagcaacagacagctaatataccaacatttccccaacttatgtccacagagtccaaaatttgttcttaatctagtaaatctgggagatgtaatggcagatttaattttaacagcagaagaccaaaagcttttaatcattagctaatgaacattgtgtagaaattgaacgttcaatttctacacggcaagtggtcctactacacagaacaggttcatattgaataggtggtaagtcaggtctctctttcagtggtgtaaacagggctgccacaggaacaaccattcttgtagcttccagtcgacttgatggccaaacattccaactaaatcggactccatctcgttcttcattttgttgaatgaattccaaataggttgtcattgtgggtgtagaaattgaagc

SEQ ID NO: 165630 - DNA, 1296 bp, Homo Sapiens
  misc_feature (1227)..(1227): n is a, c, g, or t
  misc_feature (1234)..(1247): n is a, c, g, or t
agaggtgggaccacggggagaggtggggaggggcggtgttaactctttctgctccttgcattttgacatccctgaaggggagctcttggatatcattggccatgtttcaatcgaatggagccactgggccccaacactggctttgagatttagagtcaaagggtagagtgaacaggaaagggtcacgtggtcccatgttgcaacagccccaacatcacgcatgtcattcactgccttgccactccatctccctccgtgctccagccacccctgagctgaggctcccattgtctccatcagagcctgcatgtgtatgccgtcctcccctggtccggtgtttgtgttccccacccctcacagactgcctgagctcttctgtaagctggggtagggtgatggcagtgctccgggaactgggcctgcagccttcctcttctgggactgctgtgaggcagaggaatgatggagaatctagtgtagcagcctccaggcaggattcagcacaacactggggagtcacccttccctcgggcctctgcctaccaacaactgggcttatcactgggaaaacacaaaaaattacacaacccagcaacaacaaaagaactagtcctcttagaatttcttgcgctttgatttttttagggcttgtgccctgtttcacttatagggtctagaatgcttgtgttgagtaaaaaggagatgcccaatattcaaagctgctaaatgttctctttgccataaagactccgtgtaactgtgtgaacacttgggatttttctcctctgtcccgaggtcgtcgtctgctttcttttttgggtttctttctagaagattgagaagtgcatatgacaggctgagagcacctccccaaacacacaagctctcagccacaggcagcttctccacagccccagcttcgcacaggctcctggagggctgcctgggggaggcagacatgggagtgccaaggtggccagatggttccaggactacaatgtctttatttttaactgtttgccactgctgccctcacccctgcccggctctggagtaccgtctgccccagacaagtgggagtgaaatgggggtggggggaagcactgattcccagttagggggtgcctaactgagcagtagggatagaaggtgtgaacctgggagtgcttttataaattattttccttgtagattttatttttaatttatctctgtgacctgccaggnagagggnnnnnnnnnnnnnntgctgttgagcacatgacaaaataaaataaaatggatgattcattctta

SEQ ID NO: 165631 - DNA, 744 bp, Homo Sapiens
ggggaagatggcggcagcggcggcggcggctgcagaacagcaaagttccaatggtcctgtaaagaagtccatgcgtgagaaggctgttgagagaaggagtgtcaataaagagcacaacagtaactttaaagctggatacattccgattgatgaagatcgtctccacaaaacagggttgagaggaagaaaggtcaatttagccatctgtgtgattatcctcgggtttatcctggctgtcatcaatttaataataacacttgttatttgggccgtgattcgcattggaccaaatggctgtgatagtatggagtttcatgaaagtggcctgcttcgatttaagcaagtatctgacatgggagtgatccaccctctttataaaagcacagtaggaggaaggcgaaatgaaaatttggtcatcactggcaacaaccagcctattgtttttcagcaagggacaacaaagctcagtgtagaaaacaacaaaacttctattacaagtgacatcggcatgcagttttttgacccgaggactcaaaatatcttattcagcacagactatgaaactcatgagtttcatttgccaagtggagtgaaaagtttgaatgttcaaagggcatctactgaaaggattaccagcaatgctaccagtgatttaaatataaaaggttgatgggcgtggctattgtgcgtggggaaatgaaaggtggtattccattaatgggcaaaaccattggattttcccct

SEQ ID NO: 165632 - DNA, 1367 bp, Homo Sapiens; identical to SEQ ID NO: 14824
  misc_feature (269)..(309): n is a, c, g, or t
  misc_feature (822)..(973): n is a, c, g, or t
  misc_feature (1060)..(1068): n is a, c, g, or t
  misc_feature (1235)..(1327): n is a, c, g, or t

SEQ ID NO: 165633 - DNA, 757 bp, Homo Sapiens
acactcagctcttcatgcatgcttctgctagtgtcctaaattgggctccatattatccaaaaagtcaagcccatcttcttcttgtcgttcactgcaccaccctccagacccagcactcgatcctcttccttcatagttatatgtcagaccatagtcttgggcatgcttgtgatgttcatcttgattacccagatacacttgttcaccaagacggggctgagtaaaactgtgccactccgagtaagtgtatctgcacttgtacacctccgtgtgtcctcccctgcaggagtccagggtgtgatggtggccagccccccggcaggattccgaggtctggtgtcctcctttcaccatttcgatggtctcctgacctccgtttttgactcctgatcccacggtgccacaaactccctgagcagaagcgcccacagtttggcttgtgaagccattcgcagaatacacgttgtcatctccaggagcgtctctgtttgagacaattaggttctgctgggctaaatcatcaggaattacttttggttgtttagacgtcccagaagccccacagaccagcgtaaacaggatgcaaaagagcaatgctatgcccaacaatattgcaaggatggcccactttccaagttgtactcctccaccgccaatccttggatctacacgatgtgtgcagtcattttcggtaatgacagtcacacagtgtaacatacccatgaagtgacatcttgcatccgacggggatcctcgg

SEQ ID NO: 165634 - DNA, 354 bp, Homo Sapiens
ttccatttctacaccacgttacaggcatattatccacaatccagtgatgttgataattcaataacatgctttttttcaagaattctaacttttgtatgtcttcagctttctctgtatggtatgtttttgtacaaacaagcttacaggtctccttcttattaaacgtaaacttatatggtgaaggttcaattctttccccgaatagtacctgaccaagattttcagatgggcgctttccttctgatgcttggcaaaaatcaaacgctgtgtattcataaggaagaactgattccactgaatcaagtctgttcacaaatagttctatttcggccttgcactcgtcgcctctcatgg

SEQ ID NO: 165635 - DNA, 549 bp, Homo Sapiens
gactatctttttgtgcccctttctgttgtctgtgccagctgcccagtccaggcttccgtgggccgcctgcctcttacaagcagtcgtgcctgtgtccatgcgctcagggccatgctgaagcctgggccgctgccacgttggagaaccccgtgtgagaagtgaatgctgggactcagccttcagacagagaggactgtagggagggcggcaggggcctggagatcctcctgcagaccacgcccgtcactgcctgtggcgccgtctccaggggctgcttcctcctggaaattgacgaggggtgtcttgggcagagctggctctgagcgcctccatccaaggccaggttctccgttagctcctgtggccccaccctgggccctgggctggaatcaggaatattttccaaagagtgatagtcttttgcttttggcaaaactctacttaatccaatgggtttttccctgtacagtagattttccaaatgtaataaactttaatataaagtagtcctgtgaatgccactgccttcgcttcttgcctctgtgctgt

SEQ ID NO: 165636 - DNA, 290 bp, Homo Sapiens
gttcaatttctacataaacataacggacttaattgtcttcagtacgtgaaataattttaaggtgatctagtactttgaaaatttcattcacttaagaacacttaagctgaaaaatagcactatttttcagaggcaatttctcaacagaaaaaggcaatggtaacagtccaattgatggaaatggttgaaataaaatacctgaagtagaaaaaaggtgtaggaacaattttgtaaaaacatagcaccattacctcaacggtgtagaaattgaccgggatcctctagaacag

SEQ ID NO: 165637 - DNA, 230 bp, Homo Sapiens
tcactttctacacaattagatggcacttgcttgccgagtgaagaagatcctgcttgcaagaactggagagtaattttctaatacaacaaaagctggtggaagctgcaaagaaacttgccaatgagccagacctttgtaaaactgtgaaggaaaaagcgaaagcaagattacacagatgcgatgaaaaagcttcaggagattgaaaatgcaataaacgaataccgaattag

SEQ ID NO: 165638 - DNA, 273 bp, Homo Sapiens
caaatgcttgctgctcatcttccttgaccctgaatcttaagagatgatatcagcctctttctcacatgccatggctgcttttaagtcattactcaaccccggcctttttacttttttgatgctagaaaaatgctcccatatcagccatatactacaatatttttcacagtgcaaaagtttattttaaggagaactcagtttaaactgtgtagtatttaacatacacgtgagtgctcaatgatgtttcttcaataaatatatgtctagaaagtg

SEQ ID NO: 165639 - DNA, 519 bp, Homo Sapiens
tagccttggaggatggtccccccatgttcagacaggatttcacggggacaagtgactaagtgcacatggtggatgccttggcgatatcaggcgatgaaggacgtagtagcttgcgataagctgcggggagtgagcaaacacacattgatccgcagatttccgaatggggaaacccggccgaaaggtcatcgtattctgaatacatagggatacgaagcgaacgtggcgaactgaaacatctaagtagctacaggaaaagaaatcaaccgagattcccaaagtagtggcgagcgaaatgggaagagcctgcatgatttagcatctttgataatagaacggaatggaaagtccggccatagagggtgatagccccgtatataaaatcatcggtgtggaactaagtatgcgacaagtagggcgggacacgtgaaatcctgtctgaacatggggggaccatcctccaaggctaaatactcgatatcgaccgatagtgaaccagtaccgtgaggtaaggcggaa

SEQ ID NO: 165640 - DNA, 611 bp, Homo Sapiens
catacaacagtgacaacttgatgaacatctgtgacaggaagaggaaaaatgtacaaaatcatagaagtatatttatataaggatagcttaacctactgtattattcgtaacaaccagagctactaatctgacctgacaactaatatgtttacattagcgccttcttttacaaatttgtgagaagtttcattatgaacactctgctgacaaattgtgaatttaaagccacatgtttctatattaaaaaggatcaaaatgtttggttataaatcctcaggattaaaagtattagaaataattttacatattcaggcaagaagagaaaagctatttaagatttcccagaaatatttaggaaaagagcagcactgggaaatagaaattaatgtaatcagttgcaagatacttgccttctataattataacaacttaatctgttaggcacctttggctattcaataatcattggatgttgtaatagaatgtaagtggcttttaatgtagctccaaggatatttataaattgtgttattgctgttattgttttcaatgtgagtgactattaaattataggaagtggtatccagtgataggcaactggcttaggtttc

SEQ ID NO: 165641 - DNA, 458 bp, Homo Sapiens
ttggttggagagtgaggccagagaatgggcccacttcctctgagtcactgggcccttctctgggcctcactcctccacctgagcccttgcagtctgggaccgaggcgttcgaagaccccagctgcaccaccgtggtcccattgccttttcagctacatccatttgttcgctgtcatccttgtcctggtctgtcaggaactgtgttctaacacctgacagtcttgaccctgatgcctccatcagccctgccacacatgcatcttcgcgcctctcactccacatgtctgcccggctctccatcctcccgtgtccactcagtgattctcacccgaggatgcaggaccccaaggcggcctatcagaagcatcttttgggctcggtttcttcttttgctattgtctatgttccttttagagattgcttttttttccccttactttttctgagctgaacactgc

SEQ ID NO: 165642 - DNA, 619 bp, Homo Sapiens
tccggagtcaaggtggcatccatagcagtgattcttatctaggggtagggggtgaatttcacgtggagggaggtctctggacatggacccccaggcagggctatccaatcatctgaggggtgagcagtgttcagctcagtaaaagtatgggaaaaaaaatagcagtctctaaaaggaacatagacaatagcaaaagaagaaaccaagcccaaaagatgcttctgataggctgccttggggtcctgcattctcgggtgagaatcactggtggtggaactgggttttccaatgcctcggtcccagactcaaggtggaggagtgaggcctagagaagggcctagtgacacagaggaagtgggctgtgcgggtgagagcagagagcaggggatctgttctcacccgcaaccactgctccaccagatgcagtcctctctgtgtcacaggtactgcactgaatccacacgctctgctgtccaagctcacgtcaccagtggcccaggctatgagtcctttccaggaccccacaaccctgactcccctaaaccttcatgattcttctctcatactttctttcacactgggtaaaaacacactgggttcagtaagcaggggatcctct

SEQ ID NO: 165643 - DNA, 807 bp, Homo Sapiens
gcggccgccgccatgccgtcgtccccgctgcgggtggcggtggtgtgctcgagcaaccagaaccggagcatggaggcgcacaacatcctcagcaaacggggattcagcgtccgatcctttggaacagggactcacgtgaagcttccaggaccagctcccgacaagcccaatgtttatgatttcaaaaccacatatgaccagatgtacaatgatcttcttaggaaagacaaagaactgtatcccagcgggttgccctttaaaaaccccccgtgtggtcctccctggaaggtgttacgtgtggctcgggcacaggaggcgtgtcaccctgtgcagtgcacacactggctcctctgtctttgcgagagcttggtttctattcctggtgcacgtcggatcgtccacgggttagttccagtgccacccatggcagtaggcgtggtgaggcgcacagacacggtgtggggttcaccctgacgtggttcagcagagggtcgtgacatagcgtagaccagggatgcttaggtgaggaggtggaacccacaaaatcccatggcttttcacactgcagggctgccccgttatttcctttgcaggtaggtgtgcgtgcgtgtgtgcgtgcgtgcctgatacacatggagccgggctgcttcacacatctggtgaggtcgtagaaggtcagataacgaagagggcggagcttgctaaccaagctgttagaagaaataactgggagagaacattccttcattttcaggaggaccacagagcaggctaggtctgcccggaaggactcctatagagagaagc

SEQ ID NO: 165644 - DNA, 568 bp, Homo Sapiens
tctgacagcagcatctgtttattgacaattccaggtcattcctaacacgccgcagcagggctctgtacagtccggcccggtggggaggagggagggaaggcaggcacacgaagacacaggtatgtcgggaagtgcacacaaaccgttgtctttcctttttggttaaagaagaaaaactttgtaatcaatatcccgctcataagtaaaagtggaaaagaagaaacttgattgctttcatctggcgttttggcatctcctctcccatttcatatgcacagtttatttgggtaatgctaccgtcaccagcagaacacctgtaagtaaaaacaaatgtcaggaaggaaaaagtatgaacaacaggaagctccagaggcggctccatgcgggcgctgggctcagtagaagcagacggtgtgcagaaaggtgcggccactcttctcctcgaactcctgcagcagctcgtcgatctcgttctccatgtcttccgtgtgctggatacactggcagagctcacagatgagaaacgcccccagggtggcctcctcgtggttgtcctggatgtccaccc

SEQ ID NO: 165645 - DNA, 797 bp, Homo Sapiens
  misc_feature (761)..(761): n is a, c, g, or t
gggcattttgttcgcgcggaagcgccgcggtagggtgggaacccaagcgggagagccgcgggatttgcggccgccgccatgccgtcgtccccgctgcgggtggcggtggtgtgctcgagcaaccagaaccggagcatggaggcgcacaacatcctcagcaaacggggattcagcgtccgatcctttggaacagggactcacgtgaagcttccaggaccagctcccgacaagcccaatgtttatgatttcaaaaccacatatgaccagatgtacaatgatcttcttaggaaagacaaagaactctatacacagaatgggattttacatatgctggacagaaataagagaatcaagccccggccagaaagattccagaactgcaaagacctgtttgatctgatcctcacttgcgaagagagagtgtatgaccaggtggtggaagatctgaattccagagaacaggagacctgccagcccgtgcacgtggtcaatgtggacatccaggacaaccacgaggaggccaccctgggggcgtttctcatctgtgagctctgccagtgtatccagcacacggaagacatggagaacgagatcgacgagctgctgcaggagttcgaggagaagagtggccgcacctttctgcacaccgtcttgcttctactgaggcccagcgcccgcatgggagccgcctctgggagcttcctgttgtttcatacttttttccttcctggacatttgtttttaatttaacaggtgttctngttggtgacggtaggcattaacccaattaaattgtg

SEQ ID NO: 165646 - DNA, 272 bp, Homo Sapiens
ctctagagatcccgtattgtctacacaaagatgcgcttccccttaccagagagccagaaagaaacctcgaagtagggggaaaactgcagtggaagatgaggacagcatggatgggctggagacaacagaaacagaaacgattgtggaaacagaaatcaaagaacaatctgcagaagaggatgctgaagcagaagtggataacagcaaacagctaattccaactcttcagcgatctgtgtctgaggaatcggcaaactccctggtctctgttg

SEQ ID NO: 165647 - DNA, 1752 bp, Homo Sapiens
  misc_feature (1596)..(1596): n is a, c, g, or t
ggggattccagttcattcctagctcagaaagcaacgttttgagccacaactgtcacaactccagctggtgtgcagagaagccaggttgatgccatctatcaaagttgtctcttagacctcagagccagttgaagggctgagagaggatgtggaagccaatggaacacagccagcgcaggaggcaagattttgaaatctatgggccgcgatgggcctcttggaacattggtgtgttcatctgcattcgatgtgctggaatccacaggaatctgggggtgcacatatccagggtaaagtcagttaacctcgaccagtggactcaagaacagattcagtgcatgcaagagatgggaaatggaaaggcaaaccgactttatgaagcctatcttcctgagacctttcggcgacctcagatagacccagctgttgaaggatttattcgagacaaatatgagaagaagaaatacatggaccgaagtctggacatcaatgcctttaggaaagaaaaagatgacaagtggaaaagagggagcgaaccagttccagaaaaaaaattggaacctgttgtttttgagaaggtgaaaatgccacagaaaaaagaagacccacagctacctcggaaaagctccccgaaatccacagcgcctgtcatggatttgttgggccttgatgctcctgtggcctgctccattgcaaatagtaagaccagcaataccctagagaaggatttagatctgttggcctctgttccatccccttcttcttcgggttccagaaaggttgtaggttccatgccaactgcagggagtgccggctctgttcctgaaaatctgaacctgtttccggagccagggagcaaatcagaagaaataggcaagaaacagctctctaaagactccattctttcactgtatggatccccagacgcctcaaatgcctactcaagcaatgttcatggctcccgctcagatggcatatcccacagcctaccccagcttccccggggttacacctcctaaccagcataatggggagcatgatgcctccaccagtaggcatggttgctcagccaggagcttctgggatggttgcccccatggccatgcctgcaggctatatgggtggcatgcaggcatcaatgatgggtgtgccgaatggaatgatgaccacccagcaggctggctacatggcaggcatggcagctatgccccagactgtgtatggggtccagccagctcagcagctgcaatggaaccttactcagatgacccagcagatggctgggatgaacttctatggagccaatggcatgatgaactatggacagtcaatgagtggcggaaatggacaggcagcaaatcagactctcagtcctcagatgtggaaataaaaacaaaacacctgtatggctgccattctcttcagccctcgctctcccctttccacagcctccacccctgacccccatcctcttttcctacctctctgtttggtgtagaaattgctcaataagtcatttggggtttggcatcctgcccagccacttcccaaacatgaagacctctccggtggctttaggtggacatgccccatagnccatccaacgtcctcccccatccctctcctggcaccagccaccttaaaaattggttggaagaaaggcccttaaactgggggaagaaatggggcccccttttgaagtcccttcccctcaagggttaaggctcctgtcgaactctcaaaaagggtcct

SEQ ID NO: 165648 - DNA, 687 bp, Homo Sapiens
tatgcaattcagctcggtaccccagttacaacagctgtgatatggaaccagaaggctgtctgaacttttgaaaccttgtgtgggattgatggtggtgccgaggcatgaaaggctagtatgagcgagaaaaggagagagcgcgtgcagagacttggtggtgcataatggatattttttaacttggcgagatgtgtctctcaatcctgtggctttggtgagagagtgtgcagagagcaatgatagcaaataatgtacgaatgttttttgcattcaaaggacatccacatctgttggaagacttttaagtgagtttttgttcttagataacccacattagatgaatgtgttaagtgaaatgatacttgtactccccctacccctttgtcaactgctgtgaatgctgtatggtgtgtgttctcttctgttactgatatgtaagtgtggcaatgtgaactgaagctgatgggctgagaacatggactgagcttgtggtgtgctttgcaggaggacttgaagcagagttcaccagtgagctcaggtgtctcaaagaagggtggaagttctaatgtctgttagctacccataagaatgctgtttgctgcagttctgtgtcctgtgcttggatgctttttataagagttgtcattgttggaaattcttaaataaaactgatttaaataaaaaaaa

SEQ ID NO: 165649 - DNA, 1262 bp, Homo Sapiens
  misc_feature (247)..(263): n is a, c, g, or t
  misc_feature (279)..(340): n is a, c, g, or t
  misc_feature (412)..(555): n is a, c, g, or t
  misc_feature (767)..(797): n is a, c, g, or t
  misc_feature (1005)..(1005): n is a, c, g, or t
gggggaagggcagaaagctaggccctctgctctggaaagtcggcctgaggtttccggcaagttaacccttaaaatggacacccctcagcccgccctcccctttggccttcccagaatctccttcagtggttgctctcacacctgtgccataacatcatcttccatgacttggacgggcacttccttgacaattcctattggcatcacacgggctacaaattatgctgttttctaaagaatttgaacnnnnnnnnnnnnnnnnncttgagacacggtctnnnnnnnnnnnnnnnnnnnnnnnnnnnnnnnnnnnnnnnnnnnnnnnnnnnnnnnnnnnnnntgggctcaagcaatcctctcatctccacctccagagtagcctagatgacaggcgcacatcaccacgcccagnnnnnnnnnnnnnnnnnnnnnnnnnnnnnnnnnnnnnnnnnnnnnnnnnnnnnnnnnnnnnnnnnnnnnnnnnnnnnnnnnnnnnnnnnnnnnnnnnnnnnnnnnnnnnnnnnnnnnnnnnnnnnnnnnnnnnnnnnnnnnnnngagctttttaataatctcattccacatagccttatagatcctgtaaataggggggggtcacaaaagtaatatattgtgttatggaagataattttgtactgtgctgtttccctaaatcataccaatatccctaaagtcatgcacttcccagatgatcgtgatcctccaaatgctttgtaagatggggcagggcgtggaaatatatatatatnnnnnnnnnnnnnnnnnnnnnnnnnnnnnnnagtatagtatatattttcctaacctttcttctgggtccttcctcagatctttgagtcacgatagaaaaggagctcgagttctttgtgtaggaaagttaagcttcctgcctgcggtgttcttgcaattgccttagggaattcacaagctctagggagttctgaacggaaggcagacgagaggcactttatccagtcccagaaagaatcntctaaccgtgttgactgaggaagtcatctagaaaaaacttatatttttaatgtaaaaacaaagggggcttaccagacctcacagagtattggacgtctacaagtgcttttatattttgtaactgtaaagaagtttcatatgcacagaagagcagttggaaatctggtcgactgcaataaaacaagatgacctttgcatgtacaaagatgttgcattcagactatgaaaatagcaaataaagctttggtgcaagttgc

SEQ ID NO: 165650 - DNA, 410 bp, Homo Sapiens
  misc_feature (42)..(42): n is a, c, g, or t
  misc_feature (90)..(90): n is a, c, g, or t
ttgggtcccgatagaaaagggagcctcgagatcctttgtgtnggaaagttaagccttccctgcctgcggtgttccttgcaattgcccttnggaattcacaagctcctaggagttcctgaacggaaggcagacgagaggcactttatcccagtcccagaaagaatctctaaccgtgtgactgagaagtcatctagaaaaacttatatttttaatgtaaaaacaaatggggcttaccagacctcacagagtattggacgtctacaagtgcttttatattttgtaactgtaaagaagtttcatatgcacagaagagcagttggaaatctggtcgactgcaataaaacaagatgacctttgcatgtacaaagatgttgcattcagactatgaaaatagcaaataaagctttgga

SEQ ID NO: 165651 - DNA, 479 bp, Homo Sapiens
  misc_feature (75)..(75): n is a, c, g, or t
  misc_feature (96)..(96): n is a, c, g, or t
  misc_feature (125)..(125): n is a, c, g, or t
  misc_feature (190)..(190): n is a, c, g, or t
  misc_feature (214)..(214): n is a, c, g, or t
  misc_feature (277)..(287): n is a, c, g, or t
  misc_feature (392)..(392): n is a, c, g, or t
  misc_feature (426)..(426): n is a, c, g, or t
  misc_feature (448)..(448): n is a, c, g, or t
ctaaattggctcctgcagggggaagggcagaaagctaggccctctgctctggaaagtcggcctgaggtttccggncaagttaacccttaaaatggnacacccctcagcccgccctcccctttggncctttcccagaattcttccttcagtggttgctctcacacctgtgccataacatcatcttccatgnacttgggacggggcacttccttgnacaattcctattgggcatcacacggggctacaaattatggctgttttctaaagaatttgaacnnnnnnnnnnncttttcttgaggacacggtcttgctctgttggccagggtgggaatgcagtgggcacaatcataggctcactccagcctccaactccgggggttcaagcaatcctnttcattttccacctccagagtaggcctaggatgnacagggcgcacattcaccacgnccagctggatctttttaaatctgttttgttt

SEQ ID NO: 165652 - DNA, 461 bp, Homo Sapiens
tgtggatgtaagacagggggtggggaatcctactccatggtatcttcagagctaggataatgctccttatgcaatcccactgcatatgaccatggcagtagaacaagttcaattactacactggatgcgtttagtgtgctttcctagcagaaagcaccaggctggagtcaacagttcacatgctaatacttggaagtatttctagaagggggtgctcaatagagggcagacatgatgcaagttcttcatactagaaaggtgtcctgtgtgtgcatgcacagctggatgggggcacacaggagcaagcgcagaatttggttttctccagtcaagtctaccctgatgttatctgtgcactgccacaatattatgttgctgcctttctagaagatgctgtagcagggtaagaaatccaaagttaatgttttggccagcacactgggttaagtaacagggaccgt

SEQ ID NO: 165653 - DNA, 704 bp, Homo Sapiens
  misc_feature (616)..(625): n is a, c, g, or t
agcattcgtaagctcttttgaatcatatgatttgcatcagctaactgattgattctgacagacttgatgttgtaattcggaaccgataaatgttaaaaggagaagaaataattggacctaggtagtataaaacatgaggctttaatggtactttgctatgaaaagaaaacactgtattccttatgcaaaacacatggatctttcattatttataactggcctctcttagctcagttactcaattcatacgtagtattttttaaaataattttatatctgtgtaccaccccatatagttcatattactgtttcacatgtacagctttctacttctttgtaagaacaccaaccaaccaaggtttaagtgattaataggcttgagcaccgggtggcagatgttctatgcagtgtggttcaagtttctttgaccgcacttatatgcattgctaatatggaatttaagataccatacacagtctctcatggacctatctctattgtagaattatgacttatgtcttacttggccaatttttctgaatgtgacctttttttgctgatttgctgggtttgggattaactagcattattttgccacctttatattgtatttatnnnnnnnnnngtactatcaatcaatcatactactttggattgttgtgctggtgtaatgtggatttaacatcaataaatatttgacaaat

SEQ ID NO: 165654 - DNA, 1050 bp, Homo Sapiens
  misc_feature (39)..(39): n is a, c, g, or t
ggaagagactgtgtaggggtacccttaaaatcccccaantaagcaatggccatataagtgcgggtcaaagaaacttgaaccccacactgccatagaacatctggccacccggtgctcaagccctattaatccacttaaacccttggttgggttggtgttcttacaaagaagtagaaagctgtacatgtgaaacagtaatatgaaatatatggggtggtacacagatataaaattattttaaaaaatactacgtatgaattgagtaactgagctaagagaggccacttataaataatgaaagatacatgtgttttgcataaggaatacagtgttttcttttcatagcaaagtaccattaaagcctcatgttttatactactaggtcaaattattttttctcctttttaaaatttatcggttccgacttaaaaccatcaagtctggtcagaatcaactcagtctagctgatgcaaaatcatatgcattcaaaaagcagtctttaccgagatgcctttacaaaccttggaatccagcaccttcttaaggcaaagtttcatggcagcagggaagtgaactaataattttcatttaccacatcttggtgtctttgaaaaaatactttatggcacaaacctgtttttgtctctccttatgtctccacttccttcaagtagactagatgctacaggcaatttctcatttatgccaccatgcagtctcaatccattttcaacttgctctacatacctaaaatcttccactactacacaaacctcagacacactgcaatctccacagcatgtgtgctccacagcatgtgtgctccacacttccagctggccctgggttccttgacttgtgaatggcagtgtttttttcacctatgtttgaagaaaaccaaagaaaagcctggcctttgctacctctcctgtgccttctacttttatctaaatgaacacactataatcatgctggttgcattttccttcattctcctccctactccttccaaaccctgattcctccaaatactatataggcttgtattta

SEQ ID NO: 165655 - DNA, 789 bp, Homo Sapiens
gggggggcaggaagggaggcggccgccgtgccattcttaaaggcgcccgagtgtaggcgacaggccgctgacggccggaaggaaaatgagtgagtctttggttgtttgtgatgttgccgaagattagtggaaaagctgagaaagtttcgttttcgcaaagaagcgaacaacgctgctattataatgaagattgacaaggataaacgcctggtggtactggatgaggagcttgagggcatttcaccagatgaacttaaagatgaactacctgaacgacaacctcgcttcattgtgtatagttataaatatcaacatgatgatggaagagtttcatatcctctgtgctttattttctccagtcctgttggatgtaagcctgaacaacagatgatgtatgctggaagtaagaataagctagtccagacagctgaactaaccaaggtatttgaaataagaaataccgaagacctaactgaagaatggttacgtgagaaacttggattttttcactaatgtgaacttctgtgtttctaaagtatttatgtattaacctgaccatactggaatcagacataaatacttatttatgcctaaaaatgcactgttacttacagtttgtttcctgcagtaaagaaaaattcttcatttgtgcacaatttgaacaaagaggaaatcatcttcatagtaatgaaactttgtaaagtgtttccataatattggtaattgttagtctaccagaacaactcgctacagttagtctacctgtaagctccggtgagcacctcagca

SEQ ID NO: 165656 - DNA, 869 bp, Homo Sapiens
aatgtgccttttgggttggtagaaacggaagtagaagtaggctggaggatgagttgggacagtcttccttttgttgggaggtgagcacatttacaaatattttgcttcatagtttccatgccctctgcccagctcagtttagacagtaacgttccttgtttcttttctcccatgacactgacaagaggaattaccacctcagcctcttttgcccctcttcttgcctttcacccaggctctcagccctaattaacacactgacccaaaggtgcttgtgttgcaggtcccatctcctttgatgaggttaacaattcccactttggcattttcctaactattcgtgtggctagaattggttggttggtcacttgacaagaaaaaccatacttacctgggccaaggctctgttcctgccttcgcaaattctcaaaagagtaaagtttatgaaaagaaagtggcaggcaaacacaactcttgactgccctcccaccctcctacctgttcagtactcatctgattcagaagcatcacttcttggataactagcactggaaaaatgaaatcatctgtgtaagtgaagggactcatttttctttgctttcagcccatgtaaataaataatacagtattaacattttcgtgctgcttcccattagcttgtagattgagccatactctggctgcctctttgccttcctaggggcattttctttaacttccagaatagtgattttaaaagtaaaaataaaaataaaccttacttacaagcataacagattgtatttaactttatcacatatgatagagatatatatgctgtaaaatgagggaaaggaactttctaataaaccaatgatttgtggaaactt

SEQ ID NO: 165657 - DNA, 927 bp, Homo Sapiens
tcacttctacacggcggactgtcctttcgtggctcactccctttcctctgctgccgctcggtcacgcttgctctttcaccatgcctggatcacttcctttgaatgcagaagcttgctggccaaaagatgtgggaattgttgcccttgagatctattttccttctcaatatgttgatcaagcagagttggaaaaatatgatggtgtagatgctggaaagtataccattggcttgggccaggccaagatgggcttctgcacagatagagaagatattaactctctttgcatgactgtggttcagaatcttatggagagaaataacctttcctatgattgcattgggcggctggaagttggaacagagacaatcatcgacaaatcaaagtccgtgaagactaatttgatgcagctgtttgaagagtctgggaatacagatatagaaggaatcgacacaactaatgcatgctatggaggcacagctgctgtcttcaatgctgttaactggattgagtccagctcttgggatggacggtatgccctggtagttgcaggagatattgctgtatatgccacaggaaatgctagacctacaggtggagttggagcagtagctcctgctaattgggcacaatgctcctttaatttttgaacgagggcttcgtgggacacatatgcaacatgcctatgatttttacaagcctgatatgctattctgaatatcctataggaaaagggaaaactctccatacagtgctacctcagtgcattaaaccgctgctgctctgtctactgcaaaaagatcatgccccgtggcagaagaggggaatgataaagattttaccttgaatgattttggcttcatgatctttccccacccatattgtaaactggttccaaaatctctaacttcggatgttgctgaatga

SEQ ID NO: 165658 - DNA, 830 bp, Homo Sapiens
agattcgcgcagaaaaacctctattttcttctaatccagaactggataacttgatgattcaagccatacaagtattaaggtttcatctattggaattagagaaggtacacgaattatgtgacaatttctgccaccggtatattagctgtttgaaagggaaaatgcctatcgatttggtgatagacgatagagaaggaggatcaaaatcagacagtgaagatataacaagatcagcaaatctaactgaccagccctcttggaacagagatcatgatgacacggcatctactcgttcaggaggaaccccaggcccttccagcggtggccacacgtcacacagtggggacaacagcagtgagcaaggtgatggcttggacaacagtgtagcttcccccagcacaggtgacgatgatgaccctgataaggacaaaaagcgtcacaaaaagcgtggcatctttcccaaagtagccacaaatatcatgagggcgtggctgttccagcatctaacacacccttacccttctgaagaacagaaaaagcagttggcacaagacacgggactcaccatccttcaagtgaacaattggtttattaatgcccggagaagaatagtgcagcccatgatagaccagtccaaccgagcagtaagtcaaggaacaccttataatcctgatggacagcccatgggaggtttcgtaatggacggtcagcaacatatgggaattagagcaccaggacctatgagtggaatgggcatgaatatgggcatggaggggcagtggcactacatgtaaccttcatctagttaaccaaatcgcaaaagcaagggg

SEQ ID NO: 165659 - DNA, 1186 bp, Homo Sapiens
ccagtcttcactaatcatcacagcacttattccattcaacatcacttctcaggatcattctaccctgaagaatcaataagcctgtttagagcttttcccagtcttaaaatgttgtcatcttgactacacaatcccaaggtactacttttctcactttttctggttagccagaatgttccattaagaaacaataaaagttgtatagttctctaagatgaaagattagtatattcaatggctattatattaaccatttagtgaacatacacagaaactatccttatattaattgactgaagttataacataagaaataagttacactactactttgtcattcacttaatgcttacaagattactcaagaaatcaaaatggcttcccattgcttgacgtttgttgtccaaatacttcacatttcaatctcatatacctacaaagaggaaaaaatccaaacatactttccttacctaaaaatattaaagaaggctaaaaggcattaggaatttttttaaaccttgaaaaacagtgttacacttccaacatgtatttaagttgtaattcattttctatcctgtggcatagcttcaatttaagtgcatcatagttatattaaatgggtacgtcttcatcttgtcaagtcagacggtggttcttttgcatcaaggctcttattcaaaatgtcttcttcctttaaattaggtagttctccaagactacatgctattgtggttctcaatctttgttccactggagaaaacttaattagtggtgaaagagaccgttttctttcaccgatggacgtgcgtaaagatggctcttatatgctcagtatgcaaatcacaggtgtccaaaaagttaagcgtatcatctgtttgtacattttggggagtagggctcaattctggtttgtgtctttcgggtgtttgggaattcgagaggtaagattcttcccttttcttggaaagagatttcttcagagcctcgtatctactgcgaagagcctgtaaattaaagtctgattctggagtagtctgtctccctcccacaacatcttctagaagagtgccaccatgcataggactatttggctccagtttaaaattggcctctgaactactggaactattaaaacttagatgaccaacttcttccgggagagtttcgtgtaatatgccaaaatcat

SEQ ID NO: 165660 - DNA, 724 bp, Homo Sapiens
  misc_feature (449)..(558): n is a, c, g, or t
  misc_feature (583)..(671): n is a, c, g, or t
gaggaccccgtcattttctacactttgactagtaaagaaaacctacaggatggtgttgcaaaacgcaaaattgtctatccagttaagtgagctgaacacaaactaatctgaagtcctgaactctctgatggggaaataaaagtattttttttaacgcaggcagaaataaatgttttgaaaaagattcaaaagcacaggaccttatataatctttgaatgtggaataatagttcaaacaatattttgaactgaaaattcaagaatgaactctcaaacaaaaatgtcatgattcagaatgctccatgatgatgacagaaaagcttgtcacctatgctgcatgttaagaagagagaaaaatggcaacagccgtattttaaagattcataatgttcttcccttccatctagttaaaaccagatgtccaggccgggcacggtggctcacaccannnnnnnnnnnnnnnnnnnnnnnnnnnnnnnnnnnnnnnnnnnnnnnnnnnnnnnnnnnnnnnnnnnnnnnnnnnnnnnnnnnnnnnnnnnnnnnnnnnnnnnnnnnnnnttagccgggtgtggttgcgggtgcnnnnnnnnnnnnnnnnnnnnnnnnnnnnnnnnnnnnnnnnnnnnnnnnnnnnnnnnnnnnnnnnnnnnnnnnnnnnnnnnnnnnnnnnnttaccggacgcgtgggtcgacgatatcccaagaattccggaccggtaccagcc

SEQ ID NO: 165661 - DNA, 854 bp, Homo Sapiens
gggatgacattccaatatactatgcatcatctttggccaagaagtgtatggcagtgtaccagacatatgtaaatgccatgaatgacaaaatccgcaaacagatcaacatcaataatccctttgttttcaaacacattagtaacctcaagagcatggatcattttgatgacattggtcccagtgttgtaatggcctccccaggcatgatgcaaagtggcttatccagagaattatttgaaagctggtgtactgataagaggaatggtgtcattatagcgggatactgtgtagaagggacacttgccaagcacatcatgtctgaacctgaagaaatcactactatgtctggacagaagttaccactgaaaatgtctgttgattacatttctttctcagctcacacggattaccagcaaaccagtgaatttattcgtgctttgaaaccgcctcatgtgattttagtccacggagaacagaatgaaatggccagattgaaagcagcactgattcgagaatatgaagataacgatgaagttcacatagaggttcataatcctcggaatacagaagcagtgaccttaaacttcagaggagaaaaactagccaaaggtatggggatttttagcagacaaaaaaacagaacaagggccaggcgggtcttcaggaataccttgttaaaaagaaacttttaaattatcaccttacttttctccttggcggaccggttccaatttctactggacctgggcccatgaaccaccgggtgaaagccagaaccccaggccccattccataatacctggggtccccctttaaattttgggctcccgggtaacccgacttggccaaaaaat

SEQ ID NO: 165662 - DNA, 1706 bp, Homo Sapiens
  misc_feature (847)..(855): n is a, c, g, or t
  misc_feature (1008)..(1023): n is a, c, g, or t
  misc_feature (1048)..(1057): n is a, c, g, or t
  misc_feature (1134)..(1143): n is a, c, g, or t
  misc_feature (1537)..(1549): n is a, c, g, or t
ccacgctgcctcctcccggcttccgccgccgccactccagcctaatcccaaccccagggcgaagcgttttcttatttatttccgttttctcgccactacagcctcctgacaaggtgatccgggcgggccccgcaggaattttatcccctcaccggcctcacactagtatcgcatgtccactatccagaacctccaatctttcgacccctttgctgatgcaactaagggtgacgacttactcccggcagggactgaggattacattcatataagaatccagcaacggaacggcagaaagacactgactactgttcagggcattgcagatgattatgacaaaaagaaacttgtgaaagctttcaaaaagaaatttgcctgtaatggtactgtgattgaacatcctgaatacggagaggttattcagcttcaaggtgaccaaagaaaaaacatctgccagtttctcttggaggttggcattgtaaaggaggaacagcttaaggttcatggattctaaaatgaacctaaatacgtggagaatttcttgaatagttttgttctctaaacccggtttggctgccttgtgaaatgattccctgcagtaaacggacttttcatttatttaatcattcaaacttccattcacatctgcatgattacagaaaacatggggtatgtagactagtaacacataagaaaattgcagtaagatggtaacaaaacctcatattgtctttacatgtttccaatggaaaatgttttgagtgtttattgttcagtttattacgtttcacttgattaaattttttttgttgttgcattaaaccatgtacgttgcagcttaacaatnnnnnnnnntctatgaatctttgtgagcaattatgctcccaaatctaagcaaaagaaaaaacacccgccccgcgccgcgaattaacatatggtaccaaaaaatcccctaacgaaaccaggaacccgaaaaaaagatcccagtaaagaaaaaaaaccgtgcgnnnnnnnnnnnnnnnnaaaaggttttcaaacactttttttnnnnnnnnnnccccagaaggaaagaaaactttcccaagttgttttccaaaaaattccggcacagacacacgggttggatttcccccnnnnnnnnnnccccgggggggcaagcggccggctcagaaaataatccaaggggggtttcggaggcatttttcggggatttattaagcgggggtcccagcgggggcttcaaatctaaaatttcgccccccgcgccctgggcctgcttaacaaaaatcacgcgtggaaccttcccctcaaaatcctccccgccccagatgtggaaaacccctccccaacccggagattattgaaaccgctccatgcggcccgggggccttcatccgccctttggcgccccctgtggggtaaaaatatattggcccacgggagggcacaacagggggggtttagagaagatttgttatttgtatgtgccccgcccgctcagaacatacaaagttggggggcccccgcttactacgtnnnnnnnnnnnnntgaccaccaaacacggctgtcttcctccacgacgcgcccatttgtggggaaacctggggtgcaggtgtctttgtccgcgcgcccgaattctccgctatctctggcgataatataagcgggtgaaaaaaggggcgcgggcaaacacgacccgggggca

SEQ ID NO: 165663 - DNA, 436 bp, Homo Sapiens
  misc_feature (16)..(16): n is a, c, g, or t
  misc_feature (34)..(34): n is a, c, g, or t
  misc_feature (47)..(47): n is a, c, g, or t
  misc_feature (59)..(59): n is a, c, g, or t
  misc_feature (94)..(94): n is a, c, g, or t
gaaaccttaaacggtncccccctttaacaagccnaactcccaaaaanaaacgggcaaangttttttccttgggtccacccttgaaacctgaaantaacctctcccgtaatccaggatgttccaatccacagtacccattaacaggcaaaatttctttttgaaaagctttccacaagtttctttttgtccataatcatctgcaatgccctgaacagtagtcagtgtctttctgccgttccgttgctggattcttatatgaatgtaatcctccaagtctgccgggagtaagtcgtcacccttagttgcatcagcaaaggggtcgaaagattggaggttctggatagtggacatgcgatactagtgtgaggccggtgaggggataaaattcctgcggggcccgcccggatcaccttgtcaggaggctgtagtggcgaga

SEQ ID NO: 165664 - DNA, 988 bp, Homo Sapiens
gggtctcctcttggtgattctgggtgtcatcttcatgaatggcaaccgtgccagtgaggctgtcctctgggaggcactacgcaagatgggactgcgtcctggggtgagacatcccctccttggagatctaaggaaacttctcacctatgagtttgtaaagcagaaatacctggactacagacgagtgcccaacagcaaccccccggagtatgagttcctctggggcctccgttcctaccatgagactagcaagatgaaagtgctgagattcattgcagaggttcagaaaagagaccctcgtgactggactgcacagttcatggaggctgcagatgaggccttggatgctctggatgctgctgcagctgaggccgaagcccgggctgaagcaagaacccgcatgggaattggagatgaggctgtgtctgggccctggagctgggatgacattgagtttgagctgctgacctgggatgaggaaggagattttggagatccctggtccagaattccatttaccttctgggccagataccaccagaatgcccgctccagattccctcagacctttgccggtcccattattggtcctggtggtacagccagtgccaacttcgctgccaactttggtgccattggttttcttctgggttgagtgacatggtggatattgctatcaatcccagaatcctctccccctgtgtgaggctgaagccttagattcccttctaacacaggctatctagaagagccccttcctgtttgaacggaaaggggattgcaagataaactctatttggctgttcccttgccccactgcttttttttacccccttggcggggctgtccaacgcgcttggggtatcaataaaattaaacctcttgcacagtttgtcagagcggtagaccaaaaacaagccacccccactcccggagggtaatttatctggtttcggggtggccgcgaccacagaacgaggtttcttgg

SEQ ID NO: 165665 - DNA, 1473 bp, Homo Sapiens
  misc_feature (748)..(809): n is a, c, g, or t
  misc_feature (819)..(882): n is a, c, g, or t
ggtctcacctatgagtttgtaaagcagaaatacctggactacagacgagtgcccaacagcaaccccccggagtatgagttcctctggggcctccgttcctaccatgagactagcaagatgaaagtgctgagattcattgcagaggttcagaaaagagaccctcgtgactggactgcacagttcatggaggctgcagatgaggccttggatgctctggatgctgctgcagctgaggccgaagcccgggctgaagcaagaacccgcatgggaattggagatgaggctgtgtctgggccctggagctgggatgacattgagtttgagctgctgacctgggatgaggaaggagattttggagatccctggtccagaattccatttaccttctgggccagataccaccagaatgcccgctccagattccctcagacctttgccggtcccattattggtcctggtggtacagccagtgccaacttcgctgccaactttggtgccattggtttcttctgggttgagtgagatgttggatattgctatcaatcgcagtagtctttcccctgtgtgaggctgaagcctcagattccttctaaacacagctatctagagagccacatcctgttgactgaaagtggcatgcaagataaatttatttgctgttccttgtctactgctttttttccccttgtgtgctgtcaagttttggtatcagaaataaacatgtgaaattgccaagagttaattaccnnnnnnnnnnnnnnnnnnnnnnnnnnnnnnnnnnnnnnnnnnnnnnnnnnnnnnnnnnnnnngagagagagnnnnnnnnnnnnnnnnnnnnnnnnnnnnnnnnnnnnnnnnnnnnnnnnnnnnnnnnnnnnnnnnccgcttgttttgggcaacaaaaggagggccccccaaaaataggggggacggctatacattaataaacgcagaaggaggcggcgccgagagtattaaacacaagaccgcagcaagagggggggaaaaaccgcgcgtcacacgcgggcaatcctcgcgggaggagggaggaccacccaatatcagcgcggagggggagaagccaaccaccgggggggagcacacaacagcacccctcaccgaaaggagtaatatgagaagcgccccacgcgcacgggcagacacaatcaacaacagcaacctccagagccgcggctcacaacagggcggtgggacacaacacacagcggaaaataccactcccgcggcctcactaaaaagcaattagtgcgcccacccccgggcgtagaaattagttttggcacagacaaagtatatgtacaaccgggggggccgggagtaagtagatagtaatcgggcgcagccacaaccagacatgaagcccaggccgcaccagcgcgcagcgccaaggactaaacaccaaaacgaacgacgaacgcccgtacggcgcagaccgacgcaccagcaccacac

SEQ ID NO: 165666 - DNA, 635 bp, Homo Sapiens
gtcaatttctacacattaacatcggagcatgggctagcaggctggtccaggatccgcggtagatcttagtcatggactgcatctggggctccatttgaagaacgatgtgttgttttacagctttgattctggaagagacaaacttaacaaggaggttaaagatacagggattgaaatgtatggcctaaagtgcaggggcatatggttgtgggtggtgaaagtggggtctcctttagaaaaacccctatacgatgggacatcaatatttctgggaagccacattctccatagaacctcttggtaagaggagctactggtagtacagcagcatggaggaagtgaagtgagagtgaaagggggtaagagaacagtaaaaagaaaaatgtgacaaaggagggccatggggatccacgattctagttactttcctcatggttgtcgcttgaagagcaggtgcagatcctctagaggttcacaggaatacccagcattgtctcctggattttcgggctcctttggcagtatccagggtttgacttgagcgtgatgtatccaagactccactccagccactttaaccatggttggggtagataaaatgactgggtagggtccttcccaggatgtatcgcttt

SEQ ID NO: 165667 - DNA, 1159 bp, Homo Sapiens
  misc_feature (1005)..(1077): n is a, c, g, or t
ttaaacagacaaaattcctaagagccgggcatgagctactcaagatttgttttgttgggttaaggtttctgacaaaagattctggtttaggcagatgcccctgacagttcaagtagcctcacggtggtagccagagcgctgtctacggcgaccgagaacacatggactggaagacagcctgccctagatcacccgtggcagtacatcttcaagctgccacattcaacatatgaccacagacatctttatagttccatcactggctgccatctagtatagcaggaatgcgtgggcgaaggaatacaaatttgctgggagaggaagagaatagtatctctgctagctgcctggaaagttggccccttaatcacaatgacaactaggacatttcacttggacagtgcattaaatttatagattttttaaaaagtacaaagactaagcagtaagttctgtcactgacgcaaactaggatgtcaaagaaaaatagattaactatttttacctaaagtagtgcaaagaaatctggcaaaaaatgaaagtgaactcaatatctgcacatcagtaatggggcagaattttatttaaaaggctagtggttcaaatactattgcttgaatagctctggtagatataaaatgtagtaacatctgaggtttgtacacatgagcaaaggagctgagggccagctcacaaagggatatttgatcctcagtcaagagagaagctaaaagcgcatgctgcaggagtaacctaatggatttatttggaccatactcccaccttctgacaaacagaaaaagacgtggatagaaaactgtctttccacacacaaaaatctggcttaattcttcttgctatacaactatacctcagctaagaaaaaaatctcttgtgaaaaactcaacctgggctactaaaaataaaaaggaaatttttaatgtcgtaaacaagtttagtaaacaccatgtggattttctgttgttaatgaagacatgatacatnnnnnnnnnnnnnnnnnnnnnnnnnnnnnnnnnnnnnnnnnnnnnnnnnnnnnnnnnnnnnnnnnnnnnnnnntgagcccaaggttcatccctcaatcagaaatcggtcttagcacgcatcagtaagccctcctccaacatacaaaagcactgaa

SEQ ID NO: 165668 - DNA, 1197 bp, Homo Sapiens
gcttaatgtttaaattcagtaacgtacttgaaaggcaaatttcagtgcttttgtctatgtggaggagggcttactgatgcgtgctaagaccgatttctgattgagggatgaacctgggctcatttttttcttgtgaagtctctttctagaaaattttttggttttgttctttttaaaaaatacatacttttttgaatgtatcatgtcttcattaacaacagaaaatccacatggtgtttactaaacttgtttacgacattaaaaatttcctttttatttttagtagcccaggttgagtttttcacaagagatttttttcttagctgaaggtattagttggtatagcaagaagaattaaaggccgaaattttggttgtgtggaagacacagttctctatccacgtctttttctgtgtgtcagaaggtgggagtatggtccaaataaatccattaggttactcctgcagcatgcgcttttagcttctctcttgactgaggatcaaatatccctttgtgagctggccctcagctcctttgctcatgtgtacaaacctcagatgttactacattttatatctaccagagctattcaagcaatagtatttgaaccactagccttttaaataaaattctgccccattactgatgtgcagatatggagttcactttcatttttggccagatttcttggcactactttaggtaaaaatagttaatctatttttctttgacatcctagtttgcgtcagtgacagaacttactgcttagtctttgtactttttaaaaaatctataaatttaatgcactgtccaagtgaaatgtcctagttgtcattgtgattaaggggccaactttccaggcagctagcagagatactattctcttcctctcccagcaaatttgtattccttcgcccacgcattcctgctatactagatggcagccagtgatggaactataaagatgcctggggggcatatgttgaatgtggcaacttgaaaatggactgccacggggtgatctaggggcaggctgtcttccaatcccggtgttcttcggtcgcccgagaacaggcctctgggttaccaccggtgaggctacttggaactggccaggggccatctggccttaaacccaaaatcttttgggagaaaacccttaaacccaaacaaaacaaaattcttgagataactctt

SEQ ID NO: 165669 - DNA, 1200 bp, Homo Sapiens
atgagccaccatgcctggccttattggcttagtttttaaattatcctccaaaaatttgggcctttttctgtggggaaacaagtgaagctgctcttcagcatagacacaacctgtatcccatcatattagtaaaaaccaggtttgtttcacttctgaggtgtcttatcaatgtacttcatctgagaatttgttgatcttaatgttcgagctatataagaactgccattaaaaaaaatgggataatagatgattttatcagtatacctgtggaatatgtacaaactggatctatagatattttgaactggaccaggtgggtattgaagtaacccatcaaaatatgctctgcagtgattccgcttaatgtttaaattcagtaacgtacttgaaaggcaaatttcagtgcttttgttatgttggaggagggcttactgatgcgtgctaagaccgatttctgattgagggatgaaccttgggctcatttttttcttgtgaagtctctttctagaaaatttttgggtttggttctttttaaaaaatacatactttttggaatgtatcatgtcttcattaacaacagaaaatccacatggtgtttactaaactggtttacgacattaaaaatttcctttttatttctagtagcccaggtcgagtttttcacaagagattttttgtcttagctgaggtatagttgtatagcaagaagaattaagccagattttcgtgtgtggaaagacagttttctatccacgtctttgttctggttgtcagaaggtgggagtatggtccaaataaatccattaggttactcctgcagcatgcgcttttagcttctctcttgactgaggatcaaatatccctttgtgagctggcctcagtccttggctcatgtggtacaaacctcagatgtgtactaccgtttataatctaccagaagtattccaagcaatagtttttgagcactagcgctttagtaaaattcttggcccatatgagtgtgcccacaacatggcgaggtcaccgtcaacgtcttgagcacaaattcttgggcacccaccttcgggtacacaccagcctacacccatatcctgtgaagaccaaaatgcggcccaagaacaaaaatcccggcagagccggggcctcaaagaacctcagactaaaaacgcgccaccgcaaaggacacaggagccgtgatac

SEQ ID NO: 165670 - DNA, 463 bp, Homo Sapiens
caaaatacatacattcatttatttctcattgcagcaacaagataaacaagtataattccatggtcaaggagttacaaatagtagcaagcccagtaaccttgagcatatctataaggcaaataaaacaaatatttctttcatagtgtgggcatccaactttagataatctggaaaaaaatcactctagcccctgaataccatgatgcgcatgatgtgcaaaatgaaagtatcacccaaaatattttcaaagcttaaaagaaaatatttaaattcaaatactttaacctaattggatatgcaaacagtacacttagagtcatccttagccagctgttctccaaacaaaagatcgagaaactaaaccaagaacaatgtaaaaaagaaaaggtttatctagagaaactggaagctcatcaaagtcacatttcttcttctgattcttgttgggagcttaggatcctca

SEQ ID NO: 165671 - DNA, 1035 bp, Homo Sapiens
  misc_feature (164)..(164): n is a, c, g, or t
  misc_feature (182)..(182): n is a, c, g, or t
  misc_feature (207)..(207): n is a, c, g, or t
gtctttagctcttgcctgtttagccagcaaaatggggaaatttccccaaactttggtacttccaataccccttcttcctttccaactgctcttcttgattgcccaaccccaaagcaaactttcagggtgtgtgtaaatcactgatggcacaccaattgtagtcnaatgtgcacagcacccanccaggcaattccttcaacacagatnaatgccttcatcctctgctttgtgagccagcattggaccagcaactacatcacccaatggcatagatatttggaattttagtttgaaatctggtattgactggaattctacctctgggatctagttcaattcccagctcttctagtcccaaattcttagtaaagggtcgtcggccaatgcaaaccaagagtacatcacaagtgataacttcagctttaccaccagaagcagcttcaatagaaacatcaattgtttccatctgacttcttggtagcaccagtaacctttgtattcaatttaaatttaaacccctgtttttgaaggatgcgttgaaagtttttagatatctccatatcaattccaactccacctacatgacctaaaaattcaactgctgtcacatctgcaccaagtctttgccaaactgaacccaattctacacctattactcctgcaccaataacaaccatcttttctggaactttttttaaagataaagcacctgtagatgacactattgtatcttcatctatcgtgattccaggaaaaggagtaacttctgaacccgtggctataagaatgttctttgtatcaataacctgagtgccgccatcagctttcgtagcagtgacttgatttttgccagttatctttccatatccattgacatgaacaaccttattctgtttgaataagtgggcaattccacctgttaaagcttttactgcagtactcttctgctccatcatcttgtctaaattcaagcgaacttcggacatttcaattcctctagatgcaaaatcttttccatgggccgactagttctag

SEQ ID NO: 165672 - DNA, 1060 bp, Homo Sapiens
ctggagttgctggtgttgaagatatcaaatctcatccatgtttgacccctgtggattgggcagaactgatgagatgaacgtaatgcagggttatcttcacacattctgatcttctctgtgacaggcatctccagcactgaggcacctctgactcacagttacttatggagcaccaaagcatttggataaagaccgttataggaaatgggggggaaatggctaaaagagaacaattcgtttacaattacaagatattagctaattgtgccaggggctgttatatacatatatacacaaccaaggtgtgatctgaatttaatccacatttggtgttgcagatgagttgtaaagccaactgaaagagttccttcaagaagttcctctgataggaagctagaagtgtagaatgaagttttacttgacagaaggacctttacatggcagctaacagtgctttttgctgaccaggattggtttatatgattaaattaatatttgcttaataatacactaaaagtatatgaacaatgtcatcaatgaaacttaaaagcgagaaaaaagaatatacacataatttctgacggaaaacctgtaccctgatgctgtataatgtatgttgaatgtggtccccagattatttctgtaagaagacactccatgttgtcagctttgtactctttgttgatactgcttatttagagaagggttcatataaacactcactctgtgtcttcaacagcatctttctttccccatctttctattttctgcaccctctgcttgttccctcatattctgttcttccgactcctgctaacacacatgcaacaaaaaagggaagggagtgcttatttccctttgtgtaaggactaagaaatcatgatatccaaaactaaaacatgggtgaaaaccagtttaagaaacagaagaacaaaaccacacagagagaagcacgagacaacgagcacaaacacaaagaagaggcggggcgcgcgaagaaaaagtccccaggagggggcccagcagaaaagggaaccgcactatgggacacggggcccct

SEQ ID NO: 165673 - DNA, 807 bp, Homo Sapiens
cactttcctaaagaaacacttgagttttggctgagacatgtggaggatgaatctgctatgttacaaaggccaaaatcagacaagttatggagcataattatattggatgtcattgagccatctgggctcattcagcaggaaataatggaaaaagctgcaatatccaggtgtttactacaatctggaggcaagatctttcctcagtatgtgctgatgtttggcttgcttgtggaatcacagacactcctagaggagaatgctgttcaaggaacagaacgtactcttggattaaatatagcaccttttattaaccagtttcaggtacctatacgtgtatttttggacctatcctcattgccctgtatacctttaagcaagccagtggaactcttaagactagattcaatgactccgtatttgaacacctctaacagagaagttaaggtatacgtttgtaaatctggaagactgactgctattccattttggtatcatatgtaccttgatgaagagattaggttggatacttcaagtgaagcctcccactggaaacaagctgcagttgttttagataatcccatccaggttgaaatgggagaggaacttgtactcagcattcagcatcacaaaagcaatgtcagcatcacagtaaagcaatgaagagcagttttccaatgaaaactgtgtaaatagagcatcaacacagtacaaaattcttgtcttaattagtgggggtatataaaaattccttgtaatggtcaaatattttttaaaattgacattaataaagcatattttaaaagattc

SEQ ID NO: 165674 - DNA, 315 bp, Homo Sapiens
attacaaaaaagaaatgtcaattaaatacactgttaatgttactatattaaatctgctctctgcttcagcactctgctccttttaccaccacttctcacctccttgtgcccactgccaataaaaccaacggcatgttcatcgtcgccactgtcagacacccacaagacagagtcattcagagacaaggaattctggagctggaggaaaggtgtttgctttccagtatgatgctcaatcccaaacacttatagcacctgatggtagaatctgaacagcaccagctgcattgcagccttgatttattttggagtaag

SEQ ID NO: 165675 - DNA, 363 bp, Homo Sapiens
tcaatttctaacgacatagcattatgtacatagatgagtgtaacatttatatctcacatagagacatgcttatatggttttatttaaaatgaaatgccagtccattacactgaataaatagaactcaactattgcttttcagggaaatcatggatagggttgaagaaggttactattaattgtttaaaaacagcttagggattaatgtcctccatttataatgaagattaaaatgaaggctttaatcagcattgtaaaggaaattgaatggctttctgatatgctgttttttagcctaggagttagaaatcctaacttctttatcctcttctcccagaggcttttttgttcttgtgtagcaag

SEQ ID NO: 165676 - DNA, 170 bp, Homo Sapiens
tcaatttctaacggcaggaccatattctgtctcccgcttggactcggaggagaagtctgggtatatgtgctctgagactcgtagtcaactttgtagcgctggctgtctttagcatgccctttcttgatgatgattatctttgaatgtagatatagaagagtgcacttttg

SEQ ID NO: 165677 - DNA, 586 bp, Homo Sapiens
aagtgggtcctgcccgggtctcaccctgggtctcagagtggtccgggaacgcttcaagtgagatcatcatccaagtctgaaggctctccatctcagcgcctggaaaatgcagtgaaaaaacctgaagataaaaaggaagttttcagacccctcaagcctgctgatctgaccgcactgaccaaagagcttcgagcagtggaagatgtacggccacctcacaaagtaacggactactcctcatccagtgaggagtcggggacgacggatgaggaggacgacgatgtggagcaggaaggggctgacgagtccacctcaggaccagaggacaccagagcagcgtcatctctgaatttgagcaatggtgaaacggaatctgtgaaaaccatgattgtccatgatgatgtagaaagtgagccggccatgaccccatccaaggagggcactctaatcgtccgccagactcagtccgctagtagcacactccagaaacacaaatcttcctcctcctttacaccttttatagaccccagattactacagatttctccatctagcgggacaacagtgacatctgtggtgggatttt

SEQ ID NO: 165678 - DNA, 268 bp, Homo Sapiens
ttcattctacaccaatcaacaaattttagagctattataatgcagatttagaaaagcagacataaatactctatgatcccccaagcatcaaaaccaatttggtcagttcttcatgctgctcaggagcaacatgcccctttggattgttggagtgtgtcaaattctggtttccttgacttattagatagaattcattacccacatttctaaaaaagattaaataaggggaactgggtttgggaaaaaatctatttcctttcagtttcct

SEQ ID NO: 165679 - DNA, 887 bp, Homo Sapiens
ggcggcgcgcttaggcaggcggtggcgcggctggagtgccgcggggagggctgtgccggttgctttctgcagccgcatctcggccagctctcctcgccgtccccggggcgctgtgcgtctccagtccgggaccgaagccgcctgccgtagcgggcggccagatccgcgtcccgcctcagcggccggaggacatgcgggagagagaatgagccagagggacacgctggtgcatctgtttgccggaggatgtggtggtacagtgggagctattctgacatgtccactggaagttgtaaaaacacgactgcagtcatcttctgtgacgctttatatttctgaagttcagctgaacaccatggctggagccagtgtcaaccgagtagtgtctcccggacctcttcattgcctaaaggtgatcttggaaaaagaagggcctcgttccttgtttagaggactaggccccaatttagtgggggtagccccttccagagcaatatactttgctgcttattcaaactgcaaggaaaagttgaatgatgtatttgatcctgattctacccaagtacatatgatttcagctgcaatggcaggttttactgcaatcacagcaaccaaccccatttggcttataaagactcggttacagcttgatgcaaggaaccgcggggaaaggcgaatgggtgcttttgaatgtgttcgctaagtgtatcagacagatggactaaaaggattttataggggcatgtctgcttcatatgctgggcatatcagagacctgtaatccattcttgttatttatggaaagtataacaccaaaaactaactgggaatataaagactgccttcttaccaatggaaaaatggatgaaaaagccctcgtggaaact

SEQ ID NO: 165680 - DNA, 419 bp, Homo Sapiens
cttcacgtagtccttgtccttacaacttcatgtggatatgctatagttgtggcacaagtttttgaggtggcagcagctagcatcattcccacaaaatctgatgcttctttcacagactcttcatcattttccattgtagaagcagtcttatattccagtagtttttgttttatactttcataaataacaaaatggataacagtctctgatataccagcatatgaagcagacatgcccctataaaatccttttagtccatctgtctgatacactttacgaacacattcaaaagcacccattcgcctttccccgcggttccttgcatcaagctgtaaccgagtctttataagccaaatggggttggttgctgtgattgcagtaaaacctttcaccttttgcactatggccagtaatattgc

SEQ ID NO: 165681 - DNA, 218 bp, Homo Sapiens
ggtcacttgtctacagcatgttaaattattttaatttgacattttatttttgcaatgaaaatttatggtctaccacattcatgcatttcctaatctgatcaagaagttaagttccaactattaactcatggaataattaacttggaaaaagctcatcaaactgtaagcaatggttgattctaattctttcttcactttcaaaagcactggcatgtcag

SEQ ID NO: 165682 - DNA, 187 bp, Homo Sapiens
ttcaatttctacactgaaagctacaacattataaagagaattagagagaaatctaagtaaaagagatatacaccatgttcacggattgaaggacccactattgttaagatagcaattctccacaattttatctacagcttcttatcaaaattccatcagacccttttttgtgtgtgtagaaattgaa

SEQ ID NO: 165683 - DNA, 922 bp, Homo Sapiens
  misc_feature (709)..(716): n is a, c, g, or t
  misc_feature (718)..(718): n is a, c, g, or t
  misc_feature (724)..(727): n is a, c, g, or t
  misc_feature (735)..(737): n is a, c, g, or t
  misc_feature (777)..(777): n is a, c, g, or t
  misc_feature (838)..(838): n is a, c, g, or t
  misc_feature (876)..(877): n is a, c, g, or t
gggatggaaagtaaatggtagctcggaagggtcaaaagagtccgcggtttcgccgcgtgacttgctttttgcggctggggaggtctacgcttctagagcttgagccagcggggcgaccctgcagtggcaggactcggcaccgcgccctccaccgccggttggtggcctgcgtgacagtttcctcccgtcgacatcgaaaggaagccggacgtgggcgggcagagagcttcatcgcagtaggaatggcagccccatctatgaaggaaagacaggtctgctggggggcccgggatgagtactggaagtgtttagatgagaacttagaggatgcttctcaatgcaagaagttaagaagctctttcgaatcaagttgtccccaacagtggataaaatattttgataaaagaagagactacttaaaattcaaagaaaaatttgaagcaggacaatttgagccttcagaaacaactgcaaaatcctaggctgttcataaagattgaaagtattctttctggacattgaaaaagctccactgactatggaacagtaatagtttgaatcatagtgaacatcaatacttgttccctatatacgacacttgataattaagatgatcaagaaccagaagatctgtgaagaaatgaaataaaatggtatttagtaagaaatctctattttaagaaaaaaagtaaaacctgttataaacacnnnnnnnnanaaaaannnngaaaaaannnaaccctgtccggcccgccctcggcccctcgagaaagcttntcatagacccattcgttttggccgcggcgggccccagttagggtaaaagtgaaacatgggntccatagcctgtttttccctagggaagaatcccttggnnccactggacctaagtgggctttgggaatttcctccacccaaatat

SEQ ID NO: 165684 - DNA, 323 bp, Homo Sapiens
  misc_feature (67)..(76): n is a, c, g, or t
tggataggaaatgcttccatctaacacatggaatacgaatatatacaacacaaatttggctttaatnnnnnnnnnntacagttcaaaaggacaataacacgggggctgaaaacaataattttgtgcagtttcctgatcataatcacatgtctcctgccttttacagggaatgacacaagtattgatggattttgtaaaccagttaaaacattttcctgcctgtaatagcccactatgaagatatcaccttgttcatacagtcttatagaagtttctccttcttaactgtaattctaaataaccggggtggtgtagaaaatgaa

SEQ ID NO: 165685 - DNA, 408 bp, Homo Sapiens
agaggatccgctgatcgcttagcaatgtgtggagcataactaaaaccacaattccattcttaaaatcaagcacaaaatctgacaatgaaacatatccaggggttgtgtgtccccatctgatctggaggtggcgctctgaaggcagccacaaggtgtgagtcacacactagggagacagacatctgttcaacacagaattcccggctttgctgaaccgcaatgcatattccctcttctcactagtacagaaatgttctgcaggcaggaacatgagccccccggctcattcacctgtacaacctcccctgacagatagtgagagccgcggcggggtcaggggctctgtgtgctttggaggctactgcctctggaatgtttcgcattctcaaggtttggttgagctgtggg

SEQ ID NO: 165686 - DNA, 548 bp, Homo Sapiens
  misc_feature (127)..(135): n is a, c, g, or t
ggctcacaccttgtggctgccttcagagcgccacctccagatcagatggggacacacaacccctggatatgtttcattgtcagattttgtgcttgattttaagaatggaattgtgggtatctttccnnnnnnnnnaatgtatcttaactgttgcctgtcagtgtttacaaactagtgcgttgacggcaccgtgtccaagtttttagaacccttgttagccagaccgaggtgtcctggtcaccgtttcaccatcatgctttgatgttcccctgtctttccctcttctgctctcaagagcaaaggttaatttaaggacaaagatgaagtcactgtaaactaatctgtcattgtttttaccttccttttctttttcagtgcagaaattaaaagtaagtataaagcaccgtgattgggagtgtttttgcgtgtgtcggaatcactggtaaatgttggctgagaacaatccctccccttgcacttgtgaaaacactttgagcgctttaagagattagcctgagaaataattaaatatcttttctcttcaaaaa

SEQ ID NO: 165687 - DNA, 289 bp, Homo Sapiens
cttcagagacaaccaaggctccaaagagcggatttgagggaatgttcactaagaaggaaggacagtgggattgcagtgtgtgcttagtaagaaatgaagccagtgctaccaaatgtattgcttgtcagtgtccaagtaaacaaaatcaaacaactgcaattgcaacaccggcctcttcggagataagcaaggctccaaagagtggatttgaaggaatgttcatcaggaaaggacagtggggattgtagtgtttgctgtgtagaaatggaacggtgaagagacatgagag

SEQ ID NO: 165688 - DNA, 445 bp, Homo Sapiens
attttacaagacataccctatacagacctatttgaattctactgtgggtttattgaaccagtgttggaacaacttcgcaaaacagaccaggccagttaggtacagcctcatgagttggcaggtagcagcagcccgtgtcctccctaagatgacattccctgcccaaaacacttctgtgaaaagtacagaataaacagctcagagaatacagtgtaagttacccgcagaaatatagtacttctttctagaagtttacaaactgtccatgtttatcccttgccatataacaatcactactattaatgctgtacttaattatttatttatctgatttctaattgttaatgcttcccccaaatattgtatgacatttataattaataaaaatcacttaacaataaattaataagcagttcatatttatatttttacttaattactaaaa

SEQ ID NO: 165689 - DNA, 838 bp, Homo Sapiens
  misc_feature (618)..(618): n is a, c, g, or t
cactttctacacgctgagttgtcgggggtgactggagagctcattgcagaccacgtggtcctccagggtggctctccaccttcgggtcctggtatttccagtcaagtgggtttcaattcttgggctttgccgcccttatgatgaagtgtgtgtttgatgccagtgagaaactcagtctggcaggctacaaaattctactccaagaaatacccagcaaccttctgtttgttccaaagcaactagcttatcatgcaagcaaattttgctgactccaggctttatctttaggaaaacaaaaaaaccaaagtattatcagcaggtgggaaagatttttctattgaaaatttatccctgacaactcagcgtttagaaaagaaataaaatgtgccacttccagaggtgctgcattgcagttgttcagggctagggccaggcaggacaagtgaatgggtgggacaggtggctgcctaaggaccacctcaggccactaaccccttgtggacaactgtgagtagctgggtttttccccccacctgctgtgcaacttcctgtgctttgaggttggactaacttgtcttcaggagctaatttaatgtacaggccctccccacgccccanccatacggtcactgcatttgggccagcctgctttcttaagtcgatgccctcctttctgataatccatctcccttcaggggaggttggggcccccactggactgggtggccaaaattgaaaactttaatgggagcttttaaggagacttcatgggtgggttccatggcaggggggttctgcccctcccgtgcttgatttacctgggggcctcgcgtggcga

SEQ ID NO: 165690 - DNA, 940 bp, Homo Sapiens
ggggtctcgacgtgtcaccggcggcgccgctgctgtggcaaaggaaggagctgactgggggagttcgaggcggcgggcggcggtgaccccggcctggaactgccccggtacggaagtgttccggggtccgtggggagcaggagagggaggcggcggaccgtcccgcgcggggcacgatgttgaacatgtggaaggtgcgcgagctggtggacaaagccaccaatgttgttatgaattaatcagagatcgagtctaaggttcgagaggcaaccaaacaatgatcctttggggaccttctgggcaactcatgggagagattgccaaggctacatttatgtatgaacaatttccagaacttatgaacatgctttggtcacgaatgttaaaagacaacaaaaagaattggagaagagtttataagtcgttgctgctcctagcttacctcataaggaatggatcagagcgtgttgttacaagtgccagagaacacatttatgatttacgatccctggaaaattaccactttgtagatgagcatggtaaggatcaaggtataaatattcgacagaaggtgaaggaattggttgaatttgcccaggatgacgacaggcttcgtgaagagcgaaagaaagcaaagaagaacaaagacaagtatgttggggcttcctcagaaagggttggaggattcagatacagtggaaagatttattcctgaagccccaatctaaaatggggatgagggagtgggattaaaaacaagaagtgcttttttcctttccacgggataaatttacggtgaagctggagtggttaaaaattgggaagtctccaattgaatgaacacccttccagtaaaaggtctcctgggagggaaaggattagcaagaacgacttcttcccagtaaaaagattggcaaccgtacccggtggtatgtaaggg

SEQ ID NO: 165691 - DNA, 585 bp, Homo Sapiens
cacgggtggaagctgcctcagttcagggttgctattcagctggcttagagacaatctgatgctgttgcaggtttcacttgatggatgcaccaagcacagagggtcattgagagatgaccgcaggctagttttcacgctggtcagactgctgctaagctgtgtactttgttggtgcaagctcttcaaggtgctgttcatgttctccaacgcctctttggtctccttgatcgctgttgccatggacttaatctcatcaagaacagggatgatgttgggtctcagtcggtcaagaattccgcctcctagcactgaattgatactgttcagatctgtgaacgccttgtccttggtagtgttgtactgggccaatatatatttgatttgctctggagtttcattcaagagagttcgcaagtccttgaaattgctatctgccagtttccgactccttttgatccgggttcttacctggtgatttgccacaaaaccatagaagatgccaatgcttattattatacaaatcaccaacagggagattgcaaagcatttcctcaggaagggcccattttccttctgtcgctggtg

SEQ ID NO: 165692 - DNA, 267 bp, Homo Sapiens
tagagggtagctgatcgcttaggggcggacagtatggtaggtttaaatctggatacattatctaaatctcccattatccccaatgaattatagatgaaagctgattttgtctggtcccaaatagctattactaatagtttttgttgccaaaagaattaagagaataagattgtttaaattatttttccacactggaatgttgaccagacaagcttaacctgcaacttcagatctaaagaagcgttaatgcctgtttatagcttaagc

SEQ ID NO: 165693 - DNA, 1244 bp, Homo Sapiens
tttttttcaccccaaaccccccaatccccaattttgaatttaaaacattccgtgcaaaagaggcaacaggttttcgggataaagatgtagcccttttttaagtttttagtgctctgcagttttgcggcaattttatttccctcccccccaagtttattcaaagtatttaaacagaatcttccatttcagccaaaagattgtgattcaaagatttactaaggtactctatgcattctatctatacagaaacacctatttattattacagttgatttatgcaggattaacatttttggtgttaaaattgttaaacatcatgcttactgcacatcaactctccataatgaatctgaacttcacaatgatttaccaaacactttacttaaattactaattaaataaatgaaaaatgcaccgagccaaacaaaacttaactgggctataaagaaaaaaacccttcaaaacagtccatatacacatctatttcaaaactacctttgctagctagcccctttcccaaagttttagcctgaaaaaacagtaaaatctacacaaaattttattgcaatcatacaagggttacattaggtcaacaaatactatgatgcaattttacatttattaaactacagttcaaagcacaaatttacacattctaaatacactaaacgttatctaatgaagtcacactggtcttctaacatttgatatatctgggtgaaagacatgaactttacaagactttaaacacaaatccttagtataaaaactgtgttcttgtatgtaaacgatttaatggggaacccaattaatgggcttccatctccactaagtcatccattttgttgcatattttattttaaacgcttaaggggtaggacaaactggtaggtttaaatctggatacattatctaaatctcccattatccccaatgaattatagatgaaagctgattttgtctggtcccaaatagctattactaatagtttttgttgccaaaagaattaagagaataagattgtttaaattatttttccacactggaatgttgaccagacaagcttaacctgcaacttcagatctaaagaagcgttaatgcctgtttaagcttaagcggaaaagctgtcttcttggctcagctgaatgcaagaaggcacaagaagaagttcttcatcattgagtctgaagtaattccagcatcttgcatctcataccatcactgaatgacatcatgtaataaat

SEQ ID NO: 165694 - DNA, 996 bp, Homo Sapiens
  misc_feature (895)..(931): n is a, c, g, or t
gatccctggtcatcttgtctacacaccgacctttacagattgtggccagtgaggatattataatcctatgtaaacagaaaagtcccacttaccgattcattctttcactgtttgtatctgcgcccagaattctcagtgacgtgggggtgagggtgggtggcgattgccttagagggaacccctaaattggttttggataagtttgagcccttgaccttaatttcattgctaccactctgatctcttagcacatttcttaggattaagggtccaaaaatgctgatctaaggggttgccatggtgttgaacaatgcaactttttatttaaaaaagctctgcactgccatgtatgaaagtctctttatgatgtttgtttttttgtcatttttgttctttacatcaagaaattttatgtttaaatatgcggagaatgtatattgcctctgctcctatcagggttgctaaaccctggtacatcgtatataaaatgtattaaaactggggtttgttaccagttgctgtactttgtatatagaatttttataaattgtatgcttcagaaataatttatttttaaaaagaaattaaaagttttaaactcacatccatattacacctttcccccctgaaatgtatagaatccatttgtcatcaggaatcaaaaccccccgtccattgtgaagtgtgctatatttagaacagtcttaaaatgtacagtggtattttatagaactcgaaggttaaccttctttattttcaaaagaatttcatggacggttgtacaaaatgtaccaactggcattttcccaaactggcccttaaaccggttgtatttttttaatagaccatggttttttcttaaaaaatccctcaaagtcttctttaaataacctannnnnnnnnnnnnnnnnnnnnnnnnnnnnnnnnnnnntatcttcggggttttaattttaaaaaacctttggttacctttccccccttaaaaagaaaagttca

SEQ ID NO: 165695 - DNA, 766 bp, Homo Sapiens
gatcatcaccactggattgcttatcaagatgtcccacaaatgaaaaaaatttctacatcttacgaggaatagacggaagcaagctaccgctattgtttcacttggagtaataggagctgaattgggtgctgaacctcctaaactatagaccagacctcgaagctctagccaaatacctgagggattcgggttgactagtggtggatccaactactcgctggccagacatacttgcaaggcactgacgtttcttctgctacagcctccaagccccaaacttcctccacacagcactatccgaagaacagccattgatctgattggacgtgggttcactgtatgggagccttacatggatgtgtccgctgttctgatggggcttctcgaactttgtgccgatgccgagaaacaacttgccaacatcacaatggggttgcctctgagcccagcagctgactcggcccgctctgcgaggcatgccctctcgctcattgccaccgccagaccacccggcttcatcaccaccatagccaaagaggtacacagacatacggctcttgcagcaaatacccaatcacagcagaatatgcacacaacaactcttgcacgagctaaaaggggacaattctgagagtcattgaaattcttattgacaaagatgcccacagatgttgtgggatcttctcgtggaagatatggacatcattatgtactgccttgaaaggaatcttagttaaaacagaaaggtcttcaaagaatgtttccc

SEQ ID NO: 165696 - DNA, 2137 bp, Homo Sapiens
  misc_feature (667)..(680): n is a, c, g, or t
gggacttcgctgtgaagatggcgtcgggcagcgggacaaaaaacttggactttcgccgaaagtgggacaaagatgaatatgagaaactcgccgagaagaggctcacggaagagagagaaaagaaagatggaaaaccagtgcagcctgtcaagcgagagcttttacggcatagggactacaaggtggacttggaatccaagcttgggaagacaattgtcattaccaagacaacccctcaatctgagatgggaggatattactgcaatgtctgtgactgtgtggtgaaggactccatcaactttctggatcacattaatggaaagaaacatcagagaaacctgggcatgtctatgcgtgtggaacgttccaccctggatcaggtgaagaaacgttttgaggtcaacaagaagaagatggaagagaagcagaaggattatgattttgaggaaaggatgaaggagctcagagaagaggaggaaaaggccaaagcgtacaagaaagagaaacagaaggagaagaaaaggagggctgaggaggacttgacatttgaggaggacgatgagatggcagctgtgatgggcttctctggctttggttccaccaagaagagttactgaggctttctgtgcttggcctgactttggcctatgctggacctaactttgcnnnnnnnnnnnnnnagtagggggtcatttcttttgggtaatgggaaagttcttaagagtgtcaatggggagggatagagggtgggggctcatggtttccctctacttgggagagggcacagattgcagaggtaatgctgtggcatatgcttctgcctcagtgtatcactggagtcacaggaccctgcccacctgagttcccaataaagaaaaacctccccttctgaggctgctttcccaaaactccccctgcatctttatctcttcatctatcccacctcttgtctgaacatcccacctttatcctgtgttctgcctttggtttaattttaactcatgttcatcctgcaacagaagcattctctaggtcccagtttccagttgattgcatatccttgatcagccctttttcccatcctgccctatggttctctagccacctgtgcatggatgtgtatttctggctggttctatggggtgtggatgtgtgtgcatgaatctgtcatatagagggggcccgagctggaatcctagagcattgctgcccctggggcctgatggttcttggcttcctcagagcatgtaacaggaaattaaatgggatgagtgttacaaaaaataacaacaatacacacacagaaacaaatcctaaactgagagcaccagacgaacgccgcaattagggaagccatgccaccagggacgcccccaagccgaagaatcacaatcgcagcattacacaatagcagatattttaagatgactgtgtgggggcgccccccctcccctccaaaaaattttttccagaccctttctgggtgcgccgccgcccccgcacggaagagaagcagcccgcgtgttctctttccacacaaaacctccggcatgattcacaggcgcttcctcctccacccacaaaaaaccaccgtgcgcggggaaaccgaggctttttttccacacccctgcggtggggtcctttgcgacgccttctggggcttaagaacgaccggggtcccccgcgccccgtcttgaatactgaatattcccacggcgcgggcggcggaccctgtttcacccccgcgcgggggggaccaccataaaatatggtgctcccccgccgcttggcgagccttcaacccgaggacttcgaagcagctcggcaccacccgcctgggggaggttcccaacaccctgatttgctcgtgacgcacaaaaggaattaccgccgcgtgtggcaaaaatgcgagggacgccaatcaccaacgtctccaacttccggcgacccgtacttgttatccacacggatgtgcgaccggcgtgacctctccctcctatcataggcctttcgctaactctacgccttccatcgctcgtctgaagtgcgccacaccagtgctccttacagaggccgcggcgccacctggtcatcgggtacccagctcgcacatccgccactctatgtctctcattat

SEQ ID NO: 165697 - DNA, 1085 bp, Homo Sapiens
ggtaaacagaagcaacagaagggacaagaggctggcctctacatcactctcgccttccaaatcttgtggaagtgcatctacttgccagaaccaaattaaccttacttccaagttctggctgcttgcaggtggaactccagctgcaagggagttagggaaatgaaggtctttttttaaaagcttctcagccttcctagggaacagaaattgggtgagccaatctgcaatttctactacaggcattgagaccagttagattattgagatattatagagagttatgaacacttaaattatgatagtggtatgacattggatagaacatgggatactttagaagtagaattgacagggcatattagttgatgaaatggagtcatttgagtctcttaatagccatgtatcataattaccaagtgaagctggtggaacatatggtctccattttacagttaaggaatataatggacagattaatattgttctctgtcatgcccacaatccctttctaaggaagactgccctactatagcagtttttatatttgtcaatttatgaatataatgaatgagagttctggtacctcctgtctttacaaatattggtgttgtcagtatttttcctttttaaccattccaatcggtgtgtagtggaggtttcattttgggttttaatttgtatatccctgatagctataattgggtcatagaaattctttatacattctagatgcaagtctcttgtccgatatatgtattgagatattacacctagtctgtggcttgactgttttctttatgtcttttgatgaatagaagttttaaattttgacaacgccaaatttatttctttcttttggttgatattttttctctccaatttaaccccaagatttcagatattctgcctctattatataaactttatatttttatatttgagatctacccttgaattgatatgaatgttgtgaattaatggatcagggttctttttttcccccatacaagtatccagtcattgtaacactgtttattgaaagaattatcctttcctcattaaattaccttgccaattagtaaaaa

SEQ ID NO: 165698 - DNA, 932 bp, Homo Sapiens
  misc_feature (646)..(646): n is a, c, g, or t
  misc_feature (667)..(667): n is a, c, g, or t
  misc_feature (679)..(713): n is a, c, g, or t
ttactgtgcctagctcatgaagaagagtcaggtggccgaagtgttcccactactccactacaagtagcagccccagtgactgtatttactgagagcaccacctctgatgcttcggaacatgcctctcaatctgttccaatggtgactacatccactggcactttatctacaacaaatgaaacagcaacaggtgatgatggagatgaagtatttgtggaggcagaatctgaaggtattagttcagaagcaggcctagaaattgatagccagcaggaagaagagccggttcaagcatctgatgagtcagatctcccctccaccagccaggatcctccttctagctcatctgtagatactagtagtagtcaaccaaagcctttcagacgagtaagacttcagacaacattgagacaaggtgtccgtggtcgtcagtttaacagacagagaggtgtgagccatgcaatgggagggagaggaggaataaacagaggaaatattaattaaatggtctgtaaacaataacaactgtgaataagattatcaaatctgttttagtgtaatgattgtcaagtttaaaaacatttttatatataaactggtatactcatgtcaatattctttattaataaaatgtttttcagtgtcnttctcccaaaaaagcacctgntactaaggcctnnnnnnnnnnnnnnnnnnnnnnnnnnnnnnnnnnnaaagttcccgcaaaaaagatcccgccgcgagtaaaaaagctccacccccgaacgttcctgccccgaaagcctttggccagaaaacagggcctggttcctaaggttgggggggcctcccccctcaagaaattaagaacctgttctagggggggccgggccccaaagattaaggggcaatggttccaagttttttccgcgaaaatccgcgctgtgggaaaa

SEQ ID NO: 165699 - DNA, 549 bp, Homo Sapiens
agccttctctgtagtcttgacctgtgtggggacagggtctacttttggaagcattttcaaaggcagaataaaactttacttgaggttttctccatagaaggacaccagagttgtgcccatatgatgagtcccttgttggtgttgaataaattgtcttttctccaggaaataacctttgttctttcatatttacaggtttcttttgatggacagatggagtaatctccaaaacaagaaatggggcagaagcagtttcttttctgatcatgtctctgatgaaatgataggtcctagacttttctgataccttgtatggtgtggggaggggctgggctgtgtcctgggatggatgtacaggctgctgtctggaccggggctgttcagagccccgtggccttttcctgatgttccctgcgcatccagcgcatccacactcctcaggaataatcatcttgaggaatttcatccccagctgtttaaatcagagttccattgcgtcccgtttcccttccagttgctctcagccatgcttccgaagacgtgccaggt

SEQ ID NO: 165700 - DNA, 765 bp, Homo Sapiens
gccgctgctgctgcggtcgactctagacggactccccttatctgcctcgcctcccaaagtgctgggatcacaggcatagccaccgtgtccggctgtatttcattttttattgctattacaaatgcactatatgtatttctgtttctgattgtttagtgctgtatagaaatacaattgaattttgtgtattgatcttatatgctcttgtaaactcccatctagtaggttttttaagatatcagatttgctacatatgtgatcatataatgctaactattacagacaattttactttatcccttccattttgaattactagatttctattctatccccgatcatccttttgaaaaggttctagtgataaactcagagaaattcaatatattgattgaattttactttttcgctttgtatctacaacagaaattgatttgttcatttttatttcaaatctcttcatggcaagttgggctaatggactttgcactcaagaaaggtttgtttaccagttttgtagccatgtttggcaaatcttagcaactagaaaccccgtcctttcttttccttctttatatgttcttgcagttactcttgtattgcaagattttctgactttaagctttgagactactgcatcttaaaagaagaactaggctgactggcaaaaagtcttgccagtggccctgtcactcccatgatgctttggttttgagagttgggaaaactctgagaacttaagggaaccaaactcaggaatcccaa

SEQ ID NO: 165701 - DNA, 1014 bp, Homo Sapiens
  misc_feature (901)..(901): n is a, c, g, or t
aggaaaactcgacaggatattgaggggaggctccagccctcgggagtaaatatcttcccttccaacctggtgtcagcagcctttcgctcatactctaccacctatgaagagaggaatatcaccggaaccagggtgaaggcgcccgtggggcaggaggtggaggggatgaacatcctgggcttggtagtgtttgccatcgtctttggtgtggcgctgcggaagctggggcctgaaggggagctgcttatccgcttcttcaactccttcaatgaggccaccatggttctggtctcctggatcatgtggtacgcccctgtgggcatcatgttcctggtggctggcaagatcgtggagatggaggatgtgggtttactctttgcccgccttggcaagtacattctgtgctgcctgctgggtcacgccatccatgggctcctggtactgcccctcatctacttcctcttcacccgcaaaaacccctaccgcttcctgtggggcatcgtgacgccgctggccactgcctttgggacctcttccagttccgccacgctgccgctgatgatgaagtgcgtggaggagaataatggcgtggccaagcacatcagccgtttcatcctgcccatcggcgccaccgtcaacatggacggtgccgcgctcttccagtgcgtggcccgcagtgttcattgcacagctcagccagcagtccttggacttcgtaaaagatcattcaccatcctggtcacggccacagcgtccagcgtgggggcagcgggcatcccttgctggaggtgtcctcactctggccatcatcctcgaagcagtcaacctcccggtcgaccatatctccttgatcctggcttgtggactggctaagtcgaaccggtcctgtaccgtccctcantggtagaaggggtacgcctctgggggggcagggacctccctcccaaaaattaccgtgggaaccgctaaccggaggctcgagaaaaccaccaaaagccccctaaagtcttgaat

SEQ ID NO: 165702 - DNA, 1120 bp, Homo Sapiens
aaaaattacaagcccgcccaaaaaataacccacccactgggggtttggaaacattccccccccaattggggggtttagaaattccccccttgggggaccctgtggaccttgctcccctgagaccaggggagggccaaggcaggtcaagggtggggaggcagccagaccattattttctccatcttgctgttttctagccttgagttgggggacatgagtgagaactgggggttttgaggagtaacccttgtgaaccacatgtactccagcagcccaggcatccccagatctcctgtcccggaggggtgctggggcccctgggctccccagagtgtgcaggcagacccccagagccctagctcatccatttatccattcctcataatccagtgtccaaagagcacccccagcagggcagggaaggtccctcccggggtttacatgactgattccttctcagaggcgaccgtggcatcccctgcgggcccccgatagtgtttgaggagggggtttccttcctcagtggggactggcagcggatccaggggcagctcactcttcacttgtatcaactcaggctctgtgcttctcgactccgtacggtccacgtaattttggaggagtcctgcccccagagcgtcaccttctacattgaggacggtacaggaccggtcgactagccagtccacagccaggatcaaggagatatggtcgaccgggaggttgactgcttcgaggatgatggccagagtgaggacacctccagcagggatgcccgctgcccccacgctggacgctgtggccgtgaccaggatggtgatgatctttacgaagtccaaggactgctggctgagctgtgcaatgaacactgcggccacgcactggaagagcgcggcaccgtccatgttgacggtggcgccgatgggcaggatgaaacggctgatgtgcttggccacgccattattctcctccacgcacttcatcatcagcggcagcgtggcggaactggaagaggtcccaaaggcagtggccagcggcgtcacgatgccccacaggaagcggtaggggtttttgcgggtgaagaggaagtagatgaggggcagtaccaggagcccatgga

SEQ ID NO: 165703 - DNA, 948 bp, Homo Sapiens
  misc_feature (805)..(845): n is a, c, g, or t
aggaagcgaggcctgggtggccccagcgtccagcgtgggggcagcgggcatccctgctggaggtgtcctcactctggccatcatcctcgaagcagtcaacctcccggtcgaccatatcgccttgatactggctgtggactggctagtcgaccggtcctgtaccgtcctcaatgtagaaggtgacgctctgggggcaggactcctccagaaattacgtggaccgtacgggagtcggagaagcacagagccctgagttgaatacaagtgaagagtgtagctgccccctggattccagctgcccagtccccaactgaggaaaggaaaccccctcctccaaacactatcgggggcccgcaggggatgccacggtcgcctctgagaaggaatcagtcatgtaaaccccgggagggaccttccctgccctgctgggggtgctctttggacactggattatgaggaatggataaatggatgagctagggctctgggggtctgcctgcacactctggggagccaggggccccagcaccctccaggacaggagatctgggatgcctggctgctggagtacatgtgttcacaagggttactcctcaaaacccccagttctcactcatgtccccaactcaaggctagaaaacagcaagatggagaaataatgttctgctgcgtccccaccgtgacctgcctggcctcccctgtctcagggagcaggtcacaggtcaccaaggggaattctagcccccactggggggatgttacaacaccatgctggttattttggcggctgtagttgtggggggannnnnnnnnnnnnnnnnnnnnnnnnnnnnnnnnnnnnnnnntctgtgacctcctgtcccatggtacgtcccaccctgtccccagatcccctattcccttcaccataccagaaacactcccagggactcgtggggaaaaggctga

SEQ ID NO: 165704 - DNA, 1117 bp, Homo Sapiens
  misc_feature (920)..(920): n is a, c, g, or t
  misc_feature (947)..(947): n is a, c, g, or t
  misc_feature (1017)..(1017): n is a, c, g, or t
  misc_feature (1030)..(1030): n is a, c, g, or t
gggaaggggagctgcttatccgcttcttcaactccttcaatgaggccaccatggttctggtctcctggatcatgtggtatgcccctgtgggcatcatgttcctggtggctggcaagatcgtggagatggaggatgtgggtttactctttgcccgccttggcaagtacattctgtgctgcctgctgggtcacgccatccatgggctcctggtactgcccctcatctacttcctcttcacccgcaaaaacccctaccgcttcctgtggggcatcgtgacgccgctggccactgcctttgggacctcttccagttccgccacgctgccgctgatgatgaagtgcgtggaggagaataatggcgtggccaagcacatcagccgtttcatcctgcccatcggcgccaccgtcaacatggacggtgccgcgctcttccagtgcgtggccgcagtgttcattgcacagctcagccagcagtccttggacttcgtaaagatcatcaccatcctggtcacggccacagcgtccagcgtgggggcagcgggcatccctgctggaggtgtcctcactctggccatcatcctcgaagcagtcaacctcccggtcgaccatatctccttgatcctggctgtggactggctagtcgaccggtcctgtaccgtcctcaatgtagaaggtgacgctctgggggcaggactcctccaaaattacgtggaccgtacggagtcgagaagcacagagcctgagttgatacaagtgaagagtgagctgcccctggatccgctgccaatccccactgaggaaggaaacccccctcctcaaaacaaccgggggcccgcagggaaagcccacggtcgcctctggagaaggaatcagtcatggaaaacccgggagggaccttccctgccctgctgggggtgctcntttggacactggattatgaggaatggnataatggatgagctaggggctcctggggggtctgccctgcacaactctgggggagccaaggggcccccangcaccctcccggnacaaggagaatcctgggaatggcctgggctgcttggaagttacatgtgggtttcaccaaggggtttacctcccctccaaaaaacccc

SEQ ID NO: 165705 - DNA, 924 bp, Homo Sapiens
cagtgccgaaaatgcccccagcaaggaggtgctcgattcgttcctggatcttgcgagaaatatcttcccttccaacctggtgtcagcagcctttcgctcatactctaccacctatgaagagaggaatatcaccggaaccagggtgaaggtgcccgtggggcaggaggtggaggggatgaacatcctgggcttggtagtgtttgccatcgtctttggtgtggcgctgcggaagctggggcctgaaggggagctgcttatccgcttcttcaactccttcaatgaggccaccatggttctggtctcctggatcatgtggtatgcccctgtgggcatcatgttcctggtggctggcaagatcgtggagatggaggatgtgggtttactctttgcccgccttggcaagtacattctgtgctgcctgctgggtcacgccatccatgggctcctggtactgcccctcatctacttcctcttcacccgcaaaaacccctaccgcttcctgtggggcatcgtgacgccgctggccactgcctttgggacctcttccagttccgccacgctgccgctgatgatgaagtgcgtgaaggagaataatggcgtggccaagcacatcagccgtttcatcctgcccatcggcgccaccgtcaacatggacggtgccgcgctcttcccgtgcgtggccgcagtgttcattgcacagctcagccagcagtcccttggacttcgtaaagatcatcaccatcctgggtcacggccacagcggtccagcgttggggggcaaccggccatcccctggctggaggggtccctcactctgggccatccatccttcgaaacaagtcaaacctcccgggccgaccattatctccttggatccctggcctgggggaattgggcttaatcgaaccggtccccggtacccct

SEQ ID NO: 165706 - DNA, 1625 bp, Homo Sapiens
  misc_feature (792)..(832): n is a, c, g, or t
  misc_feature (1002)..(1087): n is a, c, g, or t
  misc_feature (1199)..(1262): n is a, c, g, or t
  misc_feature (1335)..(1343): n is a, c, g, or t
aggaagcgaggcctgggtggccccagcgtccagcgtgggggcagcgggcatccctgctggaggtgtcctcactctggccatcatcctcgaagcagtcaacctcccggtcgaccatatctccttgatcctggctgtggactggctagtcgaccggtcctgtaccgtcctcaatgtagaaggtgacgctctgggggcaggactcctccaaaattacgtggaccgtacggagtcgagaagcacagagcctgagttgatacaagtgaagagtgagctgcccctggatccgctgccagtccccactgaggaaggaaaccccctcctcaaacactatcgggggcccgcaggggatgccacggtcgcctctgagaaggaatcagtcatgtaaaccccgggagggaccttccctgccctgctgggggtgctctttggacactggattatgaggaatggataaatggatgagctagggctctgggggtctgcctgcacactctggggagccaggggccccagcaccctccaggacaggagatctgggatgcctggctgctggagtacatgtgttcacaagggttactcctcaaaacccccagttctcactcatgtccccaactcaaggctagaaaacagcaagatggagaaataatgttctgctgcgtccccaccgtgacctgcctggcctcccctgtctcagggagcaggtcacaggtcaccatggggaattctagcccccactggggggatgttacaacaccatgctggttattttggcggctgtagttgtggggggannnnnnnnnnnnnnnnnnnnnnnnnnnnnnnnnnnnnnnnntctgtgacctcctgtccccatggtacgtcccaccctgtccccagatcccctattccctccacaataacagaaacactcccagggactctggggagaggctgaggacaaataccctgctgtcactccagaggacattttttttagcaataaaattgagtgtcaactatttnnnnnnnnnnnnnnnnnnnnnnnnnnnnnnnnnnnnnnnnnnnnnnnnnnnnnnnnnnnnnnnnnnnnnnnnnnnnnnnnnnnnnnccctttggggccgcttcggccctcaaaaatttttctaaaccttttttttggcccccgggccccttagggaagggaacctggccatacttgtttcccaagaaatcctggccannnnnnnnnnnnnnnnnnnnnnnnnnnnnnnnnnnnnnnnnnnnnnnnnnnnnnnnnnnnnnnnccccaaggggcttccgagggctttaccgggatcttcccacccggatcccccggcagccccaattcaaattaannnnnnnnngctgcaattttttcgaaaaaatggttggaaattccttaacacctttctccccccaatttgaaaccccttttcacaacccggattttataaaccctgaaaatcccccggggggatatcagacccctttgcccccctttgcgaacttatttttctccccctggggaaaaaccgggggccgccaaaaaaacttctcccatatttcggcccacccttttaaacccaccccttggggttaacactccccctcctggggtcttttggcttagcaacacaacattattt

SEQ ID NO: 165707 - DNA, 773 bp, Homo Sapiens
  misc_feature (592)..(636): n is a, c, g, or t
  misc_feature (640)..(641): n is a, c, g, or t
cctccaaaattacgtggaccgtacggagtcgagaagcacagagcctgagttgatacaagtgaagagtgagctgcccctggatccgctgccagtccccactgaggaaggaaaccccctcctcaaacactatcgggggcccgcaggggatgccacggtcgcctctgagaaggaatcagtcatgtaaaccccgggagggaccttccctgccctgctgggggtgctctttggacactggattatgaggaatggataaatggatgagctagggctctgggggtctgcctgcacactctggggagccaggggccccagcaccctccaggacaggagatctgggatgcccggctgcctggagtacatgtgttcacaagggttactcctcaaaacccccagttctcactcatgtccccaactcaaggctagaaaacagcaagatggagaaataatgttctgctgcgtccccaccgtgacctgcctggcctcccctgtctcagggagcaggtcacaggtcaccatggggaattctagcccccactggggggatgttacaacaccatgctggttattttggcggctgtagttgtggggggannnnnnnnnnnnnnnnnnnnnnnnnnnnnnnnnnnnnnnnnnnnntctnnaacctcctgtccccatggtacgtcccaccctgtcccccaatcccctattcccttcccaataacagaaacactcccagggactcttggggaaaagctggaggacaaattacttgctgtcactcccaaagggac

SEQ ID NO: 165708 - DNA, 1403 bp, Homo Sapiens
caagctcatcatccgacacttagcttctgatgccatcattaatgagaactatgactacctgaaggggttcttggaagacctggcacctccagagcgcagcagcctaattcaggattgggaaacatctgggcttgtttacctggactatattagagtcattgaaatgctccgccatatacagcaggtggattgctcaggtaatgacctggagcagttacacatcaaagtgacttcactgtgcagtcggatagagcagattcagtgttacagtgctaaagatcgcctggctcagtcagacatggccaaacgtgtagccaacctgctgcgcgtggtgctgagtctgcatcatcctcctgatagaacctccgactcaacaccagaccctcagcgagtccctttgcgcctcttggctccccacattggccggcttcccatgcctgaggactatgccatggacgaactgcgcagccttacccagtcctatctgcgagaactggctgttgggagcctgtgagccccaggcactttgcatcacagtcacatgcccattcacaccacacagaggttccctgccttgtttggattggcactgtttgccattctctgggttggctgtggcatctaccctccctccctgctgccagaagcagcatcctccacttgttcagggcttttcttaatactgaacgtagcataagggcttctggaacccagaagaagagacagtttaccatcctcaagatcattcagtgtttttcctttaaaaaaatggtcaataaagctccctttggcagaatcccccaaagaaccagggtattctttttccatccctagccattctggatcttgtgaccctccatgccaaccagcttccctactcctaccctggcccttttatactaggactccttaggaggagtgagacaggtgataatggatccttaacagatgaactatccacagaaggaagagggatccgtctcttaagtaattggttagttaacactgaattttggaggcaaaggagggttggcctgagttaagaaacaaaatgggatctttctgacacacttagggccaaaagtgaatgcctgtcacggaaggggattgatcttccaggggctgtttttttgttccctgcccctttaagagttcccatggaacccccataaccttttggctacctacttattgtgccagggaaaccccttggggtcaacaatggtggaccagtggtcctggtgggggaaaagcctcccccacaaaaattatggggactttggggtgcgccttgtggggaagttcccaaagtcagttagggctgaaaaaaacacccagccccccccaggagaatatatagacaactcccgcacagaaggttcaatcaaaaaaacctaagaact

SEQ ID NO: 165709 - DNA, 846 bp, Homo Sapiens
  misc_feature (303)..(303): n is a, c, g, or t
  misc_feature (327)..(327): n is a, c, g, or t
  misc_feature (466)..(470): n is a, c, g, or t
  misc_feature (472)..(473): n is a, c, g, or t
  misc_feature (475)..(497): n is a, c, g, or t
  misc_feature (526)..(534): n is a, c, g, or t
  misc_feature (788)..(800): n is a, c, g, or t
cagaggcagcgtgcgggtgcgctctttgtgaattccaccatggcgtaccgtggccagggtcagaaagtgcagaaggttatggtgcagcccatcaacctcatcttcagatacttacaaaatagatcgcggattcaggtgtggctctatgagcaagtgaatatgcggatagaaggctgtatcattggttttgatgagtatatgaaccttgtattagatgatgcagaagagattcattctaaaacaaagtcaagaaaacaactgggtcggatcatgctaaaaggagataatattactctgctacanaagtgtctccaactagaaatgatncatgaagtgagaaattgttgagaaagatacagtttgtttttagatgtcttttgtccaatgtgaacatttattcatattggtttgaataccctcgtgttactacaagatggcaataaatactatgggattgtttggattnnnnnannannnnnnnnnnnnnnnnnnnnnnncctcgagccatcttatgtccgggtggcgnnnnnnnnnggtaatggaaatgggcacctggggccttaaactggtttcccgggaacccaacttttttctttggtaacaaaaggggggaaaaaaaattgtgccgcgggcctccccctcataagggggaggcgcggaatttaaaatttcccaaaaaacaccccaaggtttaaccccgcggcaattttaaagaaaaaaccggcgggtgcgaaaaaccccccggggaaattatttaacccccgcccctaataaggggaggggcgccnnnnnnnnnnnnngggggaaccacccagagggaggaccttctctttgagagaaaacctc

SEQ ID NO: 165710 - DNA, 852 bp, Homo Sapiens; identical to SEQ ID NO: 2977
  misc_feature (712)..(712): n is a, c, g, or t
  misc_feature (735)..(735): n is a, c, g, or t
  misc_feature (739)..(752): n is a, c, g, or t
  misc_feature (754)..(763): n is a, c, g, or t

SEQ ID NO: 165711 - DNA, 997 bp, Homo Sapiens
  misc_feature (669)..(669): n is a, c, g, or t
  misc_feature (843)..(843): n is a, c, g, or t
cagtaccctctgaacactacatcccagtttaatgctgaataaccccagaagtgagaatactcttgaaaccttgaaatatctccatgaatggaccagtattctagaaactcaccactagaggtcaatgggcaacagctattgggatggtatcagcatgcctacggtgcaagtggaatttctaggcgcctctatgctactgcagccacactgtctttaactctcagcccacccacactgaggagggtgcctagaggttctatttccaaacctttgcatgtatcttaaaaatctcaataaaatgagaccttccaccatccaaacagagctgatattctcactaccagtccctctctaatattcctatttggctgaaaataagtagcttcaaaaagttttaaaaaagagattacttgcagcattaacacttctttgttgattaacaagtttcctatggagttttaaagctcatactttgttcttgtccttgtggacacaaattttctaactgcaaatgggacctttgtgtcccacattcaaatcccctctagtaatttctgcaaaggttgagaaggctggcatgatggagagaacggtaaccatgaggaaagcttcttggagtaaagcactcctctctccaatgcagagggtaaaactattaacatataagcnaaaagaaacttcgggctaactgagacccttaaaggagttcccctttagtccaataaaaggccaacttcaaatcttaacaccagataaggtagtcaaaatcatattatatacccagagaatgactgcttgaatggacatttcttacaagggaccttggttaggtgcagatttaantcctagactggggtccaggtaggcagtggaaagagctaatgtttacagtgagaagtgaggcagctttgtaagtgtctccacaccttcacattttgtgaacgtggactggagataactgaaaaccatctgctatccttacctggggatccagatt

SEQ ID NO: 165712 - DNA, 384 bp, Homo Sapiens
  misc_feature (11)..(11): n is a, c, g, or t
  misc_feature (35)..(35): n is a, c, g, or t
  misc_feature (58)..(58): n is a, c, g, or t
caacccacaancttcagcccacagggaagctggangaattggaccgttttcggatganggaagaactttggctcctgttcaaatgcggcactgcagcccccggaattgcttctctttgctcccaatcattaaaggcagtcactaacaccacgatgatcactgagaaaaggatggctgccccctcaatcccagccagcttgtgcctcattttcatcttctggggtagttgcgacttgaccacacagttcattttcttcaccagcagggcgataaaaggacaggaccagggagatgatggctgcaatctccaggatgatgagcgtgacatcttgaagagcttcccacactaattctaagaaagtcttgggctttttgggggggatc

SEQ ID NO: 165713 - DNA, 645 bp, Homo Sapiens
  misc_feature (162)..(162): n is a, c, g, or t
  misc_feature (249)..(249): n is a, c, g, or t
  misc_feature (511)..(519): n is a, c, g, or t
atacacaaggatcattggattggaattggcatagctccactcagttccttccaggagaaaatgcagattccttgggcctctccggtagagaaacatttcttttaacatttcctgaagaactgtctcctggaattacattgaatatacagacaagcactgganaagtattcagcgtgattgcttcgtttgaagatgatgtggaaataacattatacaaacatggaggattattaaactttgtggcacganaattctcatagtatctacttaccatagatacctttcataactggtaactgcaaagccttttgtgctggacccaggaatccttaccatggagcagcagatagtcccagtatactcacttatctcatccatggatgtaaatgatgatgaatcaacatagtaactgaaatgaaatcttcttgattttaaataatatacgaatggtgctattaatattgctaaaatcaacgtgtgaagtgtgttgtggaagagacctgtaagtatnnnnnnnnncgatattttatcagaccattttgtaaataaaggcagaatttgtgttgaagattcttatatgaataaccttcctggatttgtttagttttgcaccaataaaactgtgtactactgtttgttggttaa

SEQ ID NO: 165714 - DNA, 250 bp, Homo Sapiens
acgtacggccatctgcagagattgagaaaccctgctggcagacacaatggaaagaaccctctgtgtttaggcactccccttgtggaccacagagccctggatgttcacattcattaatatcttgacatgttttattgtcatctagctgaaatccatccggacaagtacaatcataggaccctgcagtattaatgcagtctcctctctggcaaacactcttgtcctccaagcattcagtgtagaaaatgaa

SEQ ID NO: 165715 - DNA, 378 bp, Homo Sapiens
ggagcggcactgcccagtcatggggctgtactcttggttttcatcagcacacacgcacaggaaggacccttccacgttttcacagaaggcttcaccacacaccccactgagcagttcacattcattcacatccacacacccttgcccatcctgtggggcttgaaagccctgataacagaggcagcggaaggagccagctgtattgtcacaaaacccgtgactgtcacaaacagtgttgtttacacattcatcaatatcttcacacgtacggccatctgcagagattgagaaaccctgctggcagacacaataaaaagaaccctctgtgtttaggcactccccttgcggccctacatgagaggggatcctcaagagtcg

SEQ ID NO: 165716 - DNA, 387 bp, Homo Sapiens
gccagacatactagtgagccaggcacatctggccttgggaaactcatcctacaggggaaggccagtttttttcccttcaattcctcaagtctgggtggtgacaaggtaggggctaggtactggactaccacaggtttttaggaactaaggtgtttctcataaacacaaaatgttgggtgaaactgggaacaactactcagaagctaatttatttgcttaaatggaaagtgtgggagccactaccctctcttttgatctgccaaggatttcctctcagagctgtagacacagacagagattgtacttggtaagataccaaacaagacagatatggatctaaatttctaatgtgttctatgggtttcaattctgaaaaaagaaaatgac

SEQ ID NO: 165717 - DNA, 184 bp, Homo Sapiens
ttgactcttgtggatcccggtcaattgctacaccacttctgatcagttcacacaacctaggaactagctcgcccagcactgacacatcaaggtattgcaggcacatgttgattgtttcgatcattggagaagatttggcagcactaagccgagcactatcgtgtagaaattgaccggggatcct

SEQ ID NO: 165718 - DNA, 217 bp, Homo Sapiens
atcaacttctacacgaatagctaaaaataaattgtcttatatggaaaccactgctgagatttttctaaaacataactctagtctttgggtaatattagcttaacattttgtagattttgaaatgtatttactatactaaatgcagaatatctattattaagctttttcccttatacagtttaaccagggtatacatgttattcatatttagttcatc

SEQ ID NO: 165719 - DNA, 269 bp, Homo Sapiens
tcattttctacactttgttggaaatatccatggtataaacatttggcaaagctattttgctgtatatacctctatagcttttgcctcaatgattcattctgtgagaaagaaagcacgcctttttctaagcactcttcaggatggggaagcatgtgtccaaccagcctccatttcttcccaggacatgaaactcaatctactcagtacagttcagtctaatagttcctttccctccagatatataccttgctgtctttttaaaatggttt

SEQ ID NO: 165720 - DNA, 541 bp, Homo Sapiens
  misc_feature (142)..(159): n is a, c, g, or t
tatctagaggatcccgttcaccttctacacttagctaagtgcttcccatgccgaactgaacggtgatttaatctacatttttatgcactgtgagcagtggacacaggaaaagccaaatggtgtctttcgtgccatctagtgnnnnnnnnnnnnnnnnnnccaattggcaggagtcataattctttataaatgcctaggatcccaagttaataattttcaggtttaaggaatatctttctaatattccggtgatgggatagtgggggtagaattggaacgtccaatttctacactaggttccaaccatgagtgaggcgcactcgggaaaagaatccgcatccaagcctgcatgcttgtagaattggaccccacttggcaggcgctcctaatgtatccctgggcagacttgcctaaatcttgagaggggcggggtaatacagaaggccctcccccaaatagggtatctgaaataattactacactatggataggggagatatataaattttcaaacttggtaagtacatgtggccccaaggta

SEQ ID NO: 165721 - DNA, 237 bp, Homo Sapiens
catcaagaaagaaagtctaagacactataatgggcgtacctgttgctaaatttgtaaggtttcatttctaaatcaaattagagcattaaaaagcaacttaattggagtacttttctttaactctcccacaaatggctttgctcagctatatttcattattgtgcttatagctttcactaaggccatacaaaaacatcacaccttctggtaacacatgcacacacaaatatagataca

SEQ ID NO: 165722 - DNA, 884 bp, Homo Sapiens
cgggcgatctagaggatcccggtgagaataacgtggcctccagcactggcacactctgaggaaccgggatgtcattctgagagatcaaaacaaatgctgaagggtaaaccatccgaacaccaccaacaattacttcaactgccacagggaaatcatcatcatatcccgactcgtcttcctctttcgattcttctttctttttttagcaccatcgggtagaaatactgccattcctcaatcaacttacgagtggctgggtctgacatcttgtatgcttggcctgttagcgtcccatttaagccataaggacttaccagtacttgaaatggtgcaggtgaagactgagccatgtgtatatgctcctcattgatcaaataaattggctggtgctgggcaatctccacacttgtgcatacattactttctccatgcagaaagaatgtgaaagcacaggacaaatgctcacttttgttgactggcttttcatccttttcgtagggtcggacaaaccatttcccaatcctaacgaagttcttatccattaggcacctttctaacagattgtggatcgctttgaagagcagcgtcctacattcataggaaaggccattttcccagagtccttcttccacaacctgcagttcatgatgtattacacccactaggttgggttcatctccccaccagaatatccataactctttgcaatctggtttgacatcacgacgccatacacaaagcaggttagcttgcagacagcggatgaaacttaacagaattggatcatcttgggctggggctgaaattatgggtccacagtccccatgccctccaaaattgtacctacgccatttgattcccgtgagttcagccagcgaaaagag

SEQ ID NO: 165723 - DNA, 387 bp, Homo Sapiens
  misc_feature (276)..(276): n is a, c, g, or t
  misc_feature (298)..(298): n is a, c, g, or t
  misc_feature (308)..(308): n is a, c, g, or t
  misc_feature (324)..(324): n is a, c, g, or t
aactcgagctttgaggcttcctccaactaccacttgccagcaacaaaaggaagagctgctccctgcacaggatatcaaagctctgtttgtgtctgaggaggagaaaaagctgactcggaaggaggtctacatcaagaatggggataagaaaggcagctgtgagagagatgctcaatatgccccaggctatgacaaagtcaaggacatctcagaaggtggtcacaccctcggttcctttagtactgagaggagtagagtccctaatgctagaccccnacatacttgcagaggtgattcntggcggcccncttgatagttcacaangagaagtcgtttcattcaagttggtgtaatcagctggggagtagtggatgtctgcaaaaacca

SEQ ID NO: 165724 - DNA, 123 bp, Homo Sapiens
aaactacacgagcagaacatgcagctatgtgtgtgcgctgatattgtttaaaggtaatacttattctcggaaggcaaggcacatcttgtggtagaaaatttcgtgccaattaggaaacatgga

SEQ ID NO: 165725 - DNA, 340 bp, Homo Sapiens
aggcgttctagaggatcccgttcactttctacacaacgaagtgagagcaacaggtttccactaccttttcctttcccatctaagttatatatcatgtgcatggcgaatttggaggagctccagagcaccgattccttggaatgccttgaacgtctcatagatttaaacaatggtgaagggcagatttttactattgatggccccctgtgcttgaagaatgtacagtctatgtttggaaaactgatagatttggcatatacgcctttccatgctgttctcaagtgtggccacctaactgctgatgtacaagtcttccccaggccagaaccttttgttgtag

SEQ ID NO: 165726 - DNA, 773 bp, Homo Sapiens
  misc_feature (58)..(68): n is a, c, g, or t
agctcatgcataccataacttatacagaggacagtttagcagtctgcttaaaatgttnnnnnnnnnnntcataaaaagccattgttctgttacacataatctgtactgaagtcataagcatcatcctcttcaatgattttatccaagataaaagaccttgtagactgttcacctgctgtagtctcctcagacagtgcctcccctgtctcttctgcagcaaacatgcctgagctgttttcatcaacttcttcatcaacagtttcctggtcactgtctttgtcatcctccctctcctcctgcttcctttctttccgttttggcaattcttcatgtatgtccttttcttctattattccatttgtcagaccggaagactggaaaaggatgctattggccaaatgagggcccttgatggctcttatgctctgtgcattgttcttttccagttcttccagattgaagccgcttttcatgtctaccacaatactctcattaaaatatggaggaggagtccaagatgtagggggatggcaatagtaagctaatgaggcacctgtccactcagaccacagcagtttggcagcaccttcaacatttgggattccacctttttggtgcatacctcttctctgagcaagcacagtaaaaaattccagagaattcctgtagcctgggacagtatatttcagtactacctgtcgagcatcagcctgggaaaggatggcactggcagcctccatcggttttactacttcatacttgctggacttcgc

SEQ ID NO: 165727 - DNA, 1635 bp, Homo Sapiens
ggggcttcagttcacacgtggcgccagcggaggcaggttgctgtgtttgtgcttccttctacagccaatatgaaaaggcctaagttaaagaaagcaagtaaacgcatgacctgccataagcggtataaaatccaaaaaaaggttcgagaacatcatcgaaaattaagaaaggaggctaaaaagcggggtcacaagaagcctaggaaagacccaggagttccaaacagtgctccctttaaggaggctcttcttagggaagctgagctaaggaaacagaggcttgaagaactaaaacagcagcagaaacttgacaggcagaaggaactagaaaagaaaagaaaacttgaaactaatcctgatattaagccatcaaatgtggaacctatggaaaaggagtttgggctttgcaaaactgagaacaaagccaagtcgggcaaacagaattcaaagaagctgtactgccaagaacttaaaaaggtgattgaagcctccgatgttgtcctagaggtgttggatgccagagatcctcttggttgcagatgtcctcaggtagaagaggccattgtccagagtggacagaaaaagctggtacttatattaaataaatcagatctggtaccaaaggagaatttggagagctggctaaattatttgaagaaagaattgccaacagtgggtgttccagagcctccacaaaaacccaaaggataaagggggaagataaccaagcgtgtgaaggcaaagaagaatgctgctccattcagaagtgaagtctgctttgggaaagagggcctttggaaacttcttggaggttttcaggaaacttgcagcaaagccattcgggttggagtaattggtttcccaaatgtggggaaaagcagcattatcaatagcttaaaacaagaacagatgtggaatgttggtgtatccatggggcttacaaggagcatgcaagttgtcccccttggacaaacagatcacaatcatagatagtccgaagcttcatcgtatctccacttaattccctcctctgcgcttggctctgcgaagtccagcaagtattgaagtagtaaaaccgatggaggctgccagtgccatcctttcccaggctgatgctcgacaggtagtactgaaatatactgtcccaggctacaggaattctctggaattttttactgtgcttgctcagagaagaggtatgcaccaaaaaggtggaatcccaaatgttgaaggtgctgccaaactgctgtggtctgagtggacaggtgcctcattagcttactattgccatccccctacatcttggactcctcctccatatgttactgagagtatggtggtaagacatgaaaagcggcttcaatctggaagaacttggaaaagaacaatgcacagagcataggagccatcaagggccctcattgggcaatagcatccttttccagtcttccggtctggacaaattggcatactcagacagaaacaaggacatacatggaacgaatggccaaaacgggaaagcacaggaagccaggaaggacgagcggaaggatgacaaagaccagtgaccaggaaactggtgatgcaagaagttgatggaaaacaagcccaggcctgttgcgcggagaagaaacg

SEQ ID NO: 165728 - DNA, 269 bp, Homo Sapiens
  misc_feature (70)..(78): n is a, c, g, or t
ccaatatataaaacaacaaatatagattcacagcatttaaaaaaatcattcaaataacattgtaaataannnnnnnnnacaaaaaacttcaacaaaaatacatatcaagttacatcaatcttgtacactatactttggctgtcaacagcaaattcctcagttcagaagtcccattctttgacctatacagatgacacatcatcttgaagttaatgagctaaaatgttgcccaaagccttgcaaagtagggttaggcgaggtcatacaga

SEQ ID NO: 165729 - DNA, 821 bp, Homo Sapiens
ggggagagtgccgggcggtcggcgggtcagggcagcccggggcctgacgccatgtcccggaacctgcgcaccgcgctcattttcggcggcttcatctccctgatcggcgccgccttctatcccatctacttccggcccctaatgagattggaggagtacaagaaggaacaagctataaatcgggctggaattgttcaagaggatgtgcagccaccaggattaaaagtgtggtctgatccatttggcaggaaatgagagggctgtcatcagctctgattaagaaaggagatttcttcatgctttcgattctgcatggggtacagccagtcacctcaccagagaatgacggctggagaagaaaactctgtaataccataaataagagtgcttgtaataaaagactgtgcacaaggattaatatttcccttcttaagtatcaaaagaactctggaacaaattataccattaggaaggttttcatgattcagttgattttccaaaaatgaagctatctcacccagctgggtttggaggagcaatctgcttattattctgtcgttaccacttactcaagcgagctgtgatatgaatacaagcaaccagtgggctcgggaaggtccgggtctcttctgccatcttccagataagagatttcagtaaaaaactgccatgctgagctgccttatagagctcttcgaaaatgttcgagttgataaagctctttgaggacaaggtacttcgtgcacctcatgctgaagatttgcaccatggtggaaaataaatatggaagcaagtcaaactagatgcataccacttgtggc

SEQ ID NO: 165730 - DNA, 1153 bp, Homo Sapiens
  misc_feature (412)..(421): n is a, c, g, or t
  misc_feature (529)..(566): n is a, c, g, or t
  misc_feature (570)..(575): n is a, c, g, or t
  misc_feature (583)..(584): n is a, c, g, or t
  misc_feature (620)..(620): n is a, c, g, or t
  misc_feature (625)..(625): n is a, c, g, or t
  misc_feature (728)..(748): n is a, c, g, or t
  misc_feature (871)..(892): n is a, c, g, or t
gtccccgttcgccccaaaaagaatgttttgggagggtggagaatccggacccttctggggccaatccaggcccttgcccttcatttttaccgaggttggcccattggtttccaacacaaaactccttccccgtttaaaaaggatttcggttctaaggccatagatcaaaggcctcagaaaccattgggtgtttcccctttgaagcaatgacaagcactttactttcacggtggtttttgttttatcctattgctgtggaacctcttttggaggacgttaaaggcgtgttttacttgtttttttaagagtgtgtgatgtgtgttttgtagatttcttgacagtgctgtaatacagacggcaatgcaatagcctatttaaagacactacgtgatctgattgagatgtacatagnnnnnnnnnnaccataactgaattattttatctcttatgttaacatgagaaatgtatgccaaatgattagttgatgtatgttttttaatttaatatttaaataaaatatttggaaggnnnnnnnnnnnnnnnnnnnnnnnnnnnnnnnnnnnnnncaannnnnnaagccttnnaccccaaaaaacctctcaaaaaaatttcattaaccntttcnttcccactctcgttaccccaccttggcccccaaactgtgttctcataaaagatccccggtaaagggaccctgggccctgagattctcgccctgaaataccggnnnnnnnnnnnnnnnnnnnnngggaggtccctgcaggaatgtcccccagagggaaggttctgtgagggccattttaatgggagtgcctctttgaggaggacaccctctccggggcggttgcctcccaaaggtcaaagttagtgnnnnnnnnnnnnnnnnnnnnnnggggggggcgccaactcggcggggaaatcttcgttggggaccttcctgtttgcggatttgaacgcccctcatcggacacccctcttccgcgaaatttgtttatagcacccattgagaaaacatcccgccggtgacaacgcgggcgtagatatacctttggccccaattgtctccatccggtggtcccaccggggtccctccaaaacttggcccccctaacgagaaaaaattcgtggcccaacgcaaaaacagcgcgattcg

SEQ ID NO: 165731 - DNA, 728 bp, Homo Sapiens
ggctggtaccggtccggaatgctctcgggatatcgtcgacccacgcgtccgctctgacagtggagaaaataaagaagaaataggttctttatcaaaaactgaaactattctgccaccagaatctgagaatccaaaggaaaatgataatgattcaggcactggttccactgctgatactagcagtattgacttgaatttatccatctctagctttctaagtaaaactaaagacagtggatcgatatctttacaagaaacaagaagacaaaagaaaacattgaagaaaacacgcaaatttattgttgatggtgtagaagtgagtgtaacaacatcaaagatagttacagatagtgattccaaaactgaagaattgcggtttcttagacgtcaggaacttcgggaattaagatttcttcagaaagaagagcaaagagcccaacaacagctcaatagcaaactgcagcaacaacgagaacaaattttccggcgctttgagcaggaaatgatgagtaaaaagcgacaatatgaccaggaaattgagaatctagaaaaacagcagaaacagactatcgaacgcctggaacaagagcacacaaatcgcttgcgagatgaagccaaacgcatcaaaggagaacaagagaaagagttgtccaaatttcagaatatgctgaagaaccgaaagaaggaggaacaagagttgttcagaaacaacagcagaattagatggc

SEQ ID NO: 165732 - DNA, 1599 bp, Homo Sapiens
  misc_feature (1293)..(1322): n is a, c, g, or t
  misc_feature (1542)..(1542): n is a, c, g, or t
agggggctagctagctgtctctgcggaccaggagacccccgcgcccccccggtgtgaggcggcctcacagggccgggtgggctggcgagccgacgcggcggcggaggaggctgtgaggagtgtgtggaacaggacccgggacagaggaaccatggctccgcagaacctgagcaccttttgcctgttgctgctatacctcatcggggcggtgattgccggacgagatttctataagatcttgggggtgcctcgaagtgcctctataaaggatattaaaaaggcctataggaaactagccctgcagcttcatcccgaccggaaccctgtatgatccacaagcccaggagaaattccacgatctgggtgctgcttatgaggttctgtcagatagtgagaaacggaaacagtacgatacttatggtgaagaaggattaaaagatggtcatcagagctcccatggagacattttttcacacttctttggggattttggtttcatgtttggaggaacccctcgtcagcaagacagaaatattccaagaggaagtgatattattgtagatctagaagtcactttggaagaagtatatgcaggaaatttttgtggaagtagttagaaacaaacctgtggcaaggcaggctcctggcaaacggaagtgcaattgtcggcaagagatgcggaccacccagctgggccctgggcgcttccaaatgacccaggaggtggtctgcgacgaatgccctaatgtcaaactagtgaatgaagaacgaacgctggaagtagaaatagagcctggggtgagagacggcatggagtacccctttattggagaaggtgagcctcacgtggatggggagcctggagatttacggttccgaatcaaagttgtcaagcacccaatatttgaaaggagaggagatgatttgtacacaaatgtgacagtctcattagttgagtcactggttggctttgagatggatattactcacttggatggtcacaaggtacatatttcccgggataagatcaccaggccaggagcgaagctatggaagaaaggggaagggctccccaactttgacaacaacaatatcaagggctctttgataatcacttttgatgtggattttccaaaagaacagttaacagaggaagcgagagaaggtatcaaacagctactgaaacaagggtcagtgcagaaggtatacaatggactgcaaggatattgagagtgaataaaattggactttgtttaaaataagtgaataagcgatatttattatctgcaaggnnnnnnnnnnnnnnnnnnnnnnnnnnnnnncaatatgcaagttaggcttaatttttttatctaatgatcatcatgaaatgaataagagggcttaagaatttgtccatttgcattcggaaaagaatgaccagcaaaaggtttactaatacctctccctttggggatttaatgtctggtgctgccgcctgagtttcaagaattaaagctgcaagaggactccaggagcaaaagaaacacaatatagagggtnggagttgttagcaatttcattcaaaatgccaactggagaagtctgtttttaaataca

SEQ ID NO: 165733 - DNA, 631 bp, Homo Sapiens
  misc_feature (466)..(488): n is a, c, g, or t
aatgatgtaactcatgcttacaagttgtcaaaccgtgcattattataaagctcaaccgagttctagccttcaaacctaagcctcccaagaatgagtccttggagacttacccagtgatgaagtataacccaaatgtccttcccgttcagtgcactggcaagcgagatgaagataaggataaagttgcaaatgtggagtattttggactgggcaactcccctggttttcctctgcagtattatccgtactatggcaaactcctgcagcccaaatacctgcagcccctgctggccgtacagttcaccaatcttaccatggacactgaaattcgcatagagtgtaaggcgtacggtgagaacattgggtacagtgagaaagaccgttttcagggacgttttgatgtaaaaattgaagttaagagctgatcacaagcacaaatctttcccactagccatttaataagttnnnnnnnnnnnnnnnnnnnnnnncctactagtcttgaacaaactgtcatacgtatgggacctacacttaatctatatgctttacactagctttctgcatttaataggttagaatgtaaattaaagtgtagcaatagcaacaaaatatttattctactgtaaatgac

SEQ ID NO: 165734 - DNA, 781 bp, Homo Sapiens
cgaatataagtataccaaagcgctggggactagccaccgtgtggcccaatcactgggaaggagccccacagagccggatgtctgacatgatggctcagggtggtcatccaggttgaaaactgaccgtgtgatgtttgatttgggcttcatttcgtgtgtaggagcacggttagactcactgttaaggaagctggatgcacttctctaaaaggctgcactttccgtgagcacttttcgtggtacaatccacatgacccactttctcccctgggggacgttggttcagaggttggtagcacttggggagagtatcttaacacagtttcttgacagcagctctggaacttagtatttctgccccgagttttgccacactgagactttgagtagctcctggtggactcaaccctgttcaactcagagacgggcctcctctcactgatgcaaagctataaggcttctcggactgttctgaaactctccgtattcttgccaagtctaaagagactgaagaaaagatttaaatcctaataaaaatcagtcgataattcctgtaggttctgctggaggaatacatacttgtttggtgatttaaaattaagtgtatataatgttgatatgtgtgatacagtacaaattcttactggctttttgtttcactttgtcatttagtccataccacccatgatgttttcaaaatgtttcacaggcatattccgctggatccatttttccttgtcactgtgagatgggcagtccctgttactatgcattccactcc

SEQ ID NO: 165735 - DNA, 868 bp, Homo Sapiens
aatctctactccagacaagttgacgtgtgatgtttgatttggagcttcatttcgtgtgtaggagcacggttagactcactgttaaagaagctggatgcacttctctaaaaggctgcactttccgtgagcacttttcgtggtacaatccacatgacccactttctcccctgggggacgttggttcagaggttggtagcacttggggagagtgtcttaacacagtttcttgacagcagctctggaacttagtatttctgccccgagttttgccacactgagactttgagtagctcctggtggactcaaccctgttcaactcagagacgggcctcctctcactgatgcaaagctttaaggcttctctgactgttctgaaactcttcgtattcttgtcaagtctaaagagactgaagaaaagatttaaatactaataaaaatcagtagataatttctgtaggttctgctggaggaatacaaactgtttggtgttttaaatttaagtgtagaaattgtagaatgtggaattagcacagatccttcctggctttctgtttcacttgatcatttagcccagaccacccaggatgttttccaaaatgttccacaggcgtgtcccgctggatccatttgtccttgtcacttggagaaaggccagtccctgtgacggggcagccctctctgtccctcggtcagctcgtgtgaatcctgggacctcttccggtcggctctgcccgctgttctggggtcgactgccacgacttttgattcaagaagcttcctccaggcgggagcggctatttttcctaaatgagaattgttacattgcaaattgttgaataaaatagccgctcccttctgtcgtcttctc

SEQ ID NO: 165736 - DNA, 735 bp, Homo Sapiens
  misc_feature (116)..(153): n is a, c, g, or t
aattttctgccttttattgttatttcagaaaatatttgatcatttgttccaaaatgtacatttaaaaaatccatacaaaactgtaatttgttttaaaaccagacagaaacagtggnnnnnnnnnnnnnnnnnnnnnnnnnnnnnnnnnnnnnngacacccctccccccaacccttttttacatgaaagcataaatacggcaggtacaaattttccttgagttccttgttgaaatttggtccatatgaacaggctagagtagaaaacagacactttgtccacatttgcattatcagttgctcagggcaccagcagccttagttcatccttcagatgtttttttaaacagaggaaccgaaaaatgaggtttacagtctcatcacatgaacactcaaatctgtacccaaggaaacagcggtattatatttactgtcacagctagaccctatcaggtgaacagggctctccacctgcggctgttgcttcgcaaaatatccttcctctccacgtgaacaagtagctctagagtgcttttaggcagagtgacggtgatgtcatgggcaccacgccaatcttattcctggacaatgacttaagccccatcgtgagaatggttttttcctcttcaacacattttttaaaaatagacctctaagatgatgctacatgttctaaaagagtgccacagaaacccacccaggatcacaagaatgacaacaaaaggaaagtggctacc

SEQ ID NO: 165737 - DNA, 482 bp, Homo Sapiens
  misc_feature (17)..(17): n is a, c, g, or t
  misc_feature (29)..(29): n is a, c, g, or t
  misc_feature (84)..(120): n is a, c, g, or t
aacagtgctactctggnatgtgacaaatnctgtatgtgggtgttactctttcccaaaaagattgtcagaagccgtgagtgctgnnnnnnnnnnnnnnnnnnnnnnnnnnnnnnnnnnnnntgtgtcttacagtttgtaagcaagatgacactgcccaacacaaagaggggtctggagttcagttcacgcccgaagcctgccccctcggcctcccagggggtcattcagagtgttctcaaatccaattccgacacacgacttgtcactactcctctccccttgaaaaaagcatgttagaagctgccctacaggtctcagcagtgggacaatctaattgaatcaccgcagccttctaatacagaagaaacggacgtgactgtcaccctcagcccgccagcaagggcgctgaggaagtcattaatccttcgaaactctgaaaagaaacccagtgttgaagtctggacagaaagccttaaaaaagc

SEQ ID NO: 165738 - DNA, 188 bp, Homo Sapiens
tacattgcccaccctcccccatctttaatattctactggaggaaaaagcaaccccatacttcctatagttagttctatactaacttggaagaaaatatgaaacttgctagaattctctggaaaactaaacacatactgttttactcatctagctggagattatcagttgagtatgccttgctactgta

SEQ ID NO: 165739 - DNA, 421 bp, Homo Sapiens
cccgtccagatgctccagctcacagtcttgggagagaggaatatgaccacaaaagatagcagcagtcaccacaactggattgacagaagacagactatgatgtctcctctcaatccacctttttagaatacatgcatctggagttcctgggagaggtccaggctgaagatacaaatttggaagctgccagcctgtaaatggtgtgtaatggcatgggaatgaatgagatcatctagggagcaagtgtgggtaaacaaaggaagagtactaaagacaagcctggaaagctcccagcttttagagatttggttaaaagcaagaggcgctagcaaagaaaatgagcaatgagtgaggctggagtgaaatcagaggagtgtgggtccttgaaatgtagaagtggagaaagaacttaatttggtga

SEQ ID NO: 165740 - DNA, 259 bp, Homo Sapiens
ttcactttctacaccatttgtaatattggaatgtaaaatgttcttactaagaatctttatgtcagctattcaacatttccctactttataatttctagctgctttaccatttagcaactttaaatttttatgcagttaatatgtttctttggtttttatgttttctgaatgtctttaatgcacattaatgtatacttagtagatacacatttacacattgagaagtgaagataggttagtgttctgtgtagaaattgaa

SEQ ID NO: 165741 - DNA, 798 bp, Homo Sapiens
  misc_feature (340)..(348): n is a, c, g, or t
aaatgaaaaaacaaaatgtgcctgtttaaagcactcaggtagagggctgatgaaactaattttttttcctttaagacatgcactcttgagtcctacagtaactgagtgttgtttagacagcacaagaaggggtgagagtgcgtctcctagccttaatgtgggagggtagtttcagtcactcatcggctttcattattgtgcggaaatattagaaaacctcattgatcaattttatgtatttgaatatcagcaaattgaaattttccataattatcattaatttgtaaccacatccagtgtcatgcttactccttagagttcagatgaattcttaaaattnnnnnnnnnctccatagtactaatttgtttctttatatagttgcgtttgatattattgcttgcaattgtattaaagtcaaaagctgatttttatggcatacacaagaatgccactttttcttttatttcataccaataatttaaagattgatatgctaaaaacaatttgcacagcactaaagcatgagctactttcatctaaacctgtaaaaatatgaaagatttttatattttttcactgggaagaaattcttcctggatgaaattacaaatatgtgtagaatatatttaataaaaagacttataaaatacctaactacaggacttaaaatatagatggcgcgtagtatatagaacaagtattccattataaataagtttagcctttataaaaaatgaagttgcaggctgacattacattctgttacttactaagtgttcaacaggcctttacaaaac

SEQ ID NO: 165742 - DNA, 875 bp, Homo Sapiens
gtcagtttctacacaaatttaaaaagaaagaaaacagtcttccatagatttttaaggaagaaagggcccaagcccaggagatcgcttggttttcttccagaagttaaatggggggatctgaagatttgaatgtttggtctgctttgaaatgtatgtcttttgggatgtattatatgcctagctttataatcagtataaattttaattattccaggaatatgcataatattgaaatatttcatgtcctattttaatagaaaacctcagggcccaagtaacagtgatagaagttagaaaaacctttacttagaattgtccacctagtcagagcccaagaaagaattttcagtggaaaaatcaatatataacttagtgctagctagcgccacagactctagtagataatattatcatcataatggctggtgaaaccatataatcacagaaaaacattgccttcagcatgttcagttcgcagcactgagggcactcttgagggtgttgttaatgaagatttaatttttaaatacaggtggttccaagctttcaaataggttatgctccaaaagtgttatttgtaagttaatttttttacaagtcaaacaatgttggaagtggtatttaggttctagatcggtccacgaaagttagcccatatgtatatcttgaataggataggggagggtattcataaagtcccttatgtggttttaactaggtgaaataatggacaacagaaataattgggaaatcctctttaagggcaaatttaattttttactcctggtttatggggactttccgttctattaactggcaaaacacaatttccggttttcccccggaaacccgtttttcccttaattttcaacatc

SEQ ID NO: 165743 - DNA, 2156 bp, Homo Sapiens
  misc_feature (1500)..(1567): n is a, c, g, or t
  misc_feature (1588)..(1666): n is a, c, g, or t
caggctggtaccggtccggaattctcgggatatcgtcgaccacgcgtcggttccagaccatgactcttcctggttgtgggtttgttacaggagcaggagaagcagaggttatgacagttatgcagactttccccctcctttttctcttttctcttccccttgcttttccactgtttcttcctgctgccacctgggccttgaattcctgggctgtgaagacatgtagcagctgcagggtttaccacacgtgggagggcagcccagtactgtccctctgccttccccactttgagaatatggcagcccctttcattcctggcttggggtaggggagaccattgaagtagaagcctcaaagcagacttttccctttactgtgtgtactccaggacgaagaaggaagatcatgcttgatacttagattggttttcccagggaagagggcggagcagagcaaagtcactgtgaaccctgggccaggccctggctgggccagctcctgagagcgtctcgtgttgcagacccttgcccacttcacccacctgcaccttctccccctctcacagtgtcactgctgctaatggtcaaagtcaaatgtgtggccacatgggatgggccaggtcctctcaggctactttctggatgtcatttttaaaatatggaaacatgcaggtgccttcccaaagaggcttggactggtatatccaacgagaaacaaataagctaaagaaagtttaaactcaagaagaaagatgttgacagtctatgtaacagctggaaagtttataggcacccacctttgggacaacccagtgattatgaacatgtgatatctactatttaaaagaaatgttctcaccttgggttgattgtggtataccatgtgttatgaaaattgttgagctgaagctttgaatcgatttagttgagtctgactcacttgctttggttcctgtgtattttactacccctcttgtcagtgaccttccttccccaccccacccagagtgaatttgtagcatgattgtataaacctctatgtagaaaatggagatttcttgctctgaaatgttaagctctaactgatccatttctgtgtcctttagcctagtatgtctgaacttccattcttgttatatatttaaactttccctctatattataggttttgtggcatccacggtcaggtgtagaggaagctgccccttgcagaactgtactgtaatatttttcttttataaatattttcacaggactgattgtacacagggcttgtaataaaattttaacactgtgctgtgaaacaactatggggaatctccattgaaggctacttcatgggcacctgaaagtggagtgttatagctatgactttctatttcttgtttcctaagtaaattaaacctaattttcaccctttcattctgtttcagcctcctgtataagaagtaccgtattttctgcccatcatactttgtaataaaacttgaacatgtaacnnnnnnnnnnnnnnnnnnnnnnnnnnnnnnnnnnnnnnnnnnnnnnnnnnnnnnnnnnnnnnnnnnnnccccaccaacttctctatcannnnnnnnnnnnnnnnnnnnnnnnnnnnnnnnnnnnnnnnnnnnnnnnnnnnnnnnnnnnnnnnnnnnnnnnnnnnnnngggggcgccggggcccccccaaggggaaaagaggaaacggggcctatatcgggtttttcccaaagaaaaacccggggcccaagaaaaaagggggtgggatttcccccccaataaataaaaacccccccgcgggggcaaaccccagcggttcttctgaaaaaaactccccaaagggggggtttccggaggggccctctaccggggtcctttcacaagagagggggccccaaacgcgaggcctcatttaaataaatatattacgccctcgcccccccgggaacattactttgcgcaaaaaaagtgttgtggaaacttctattataaaaaaatttgcgcgcggcgacgttggaaaacgctctctccccaaactgcgcggttggagaaaccccgtgtacatcccaccgccccgtaatataccccctttttttcgcccgcttgtcgcgaaaaattattttctccccccagggtgggagaaaagcggcggggcgca

SEQ ID NO: 165744 - DNA, 1063 bp, Homo Sapiens
tctcgtggggatatacccatcccaaagctttttgggaagggcaacctgcatgtttccatatttttaaaaatggccatccagaaagtagcctgagaggacctgggcccattcccatgtgcccacccatttgactttgaccatttagcagcagtgacactgtgagagggggagaagttgcaggtgggtgaagtgggcaagggtctgcaacacgagacgctctcaggagctggcccagccagggcctggcccagggttcacagtgactttgctctgctccgccctcttccctgggaaaaccaatctaagtatcaagcatgatcttccttcttcgtcctggagtacacacagtaaagggaaaagtctgctttgaggcttctacttcaatggtctcccctaccccaagccaggaatgaaaggggctgccatattctcaaagtggggaaggcagagggacagtactgggctgccctcccacgtgtggtaaaccctgcagctgctacatgtcttcacagcccaggaattcaaggcccaggtggcagcaggaagaaacagtggaaaagcaaggggaagagaaaagagaaaaaggagggggaaagtctgcataactgtcataacctctgcttctcctgctctgtaacaaacccacaaccaggaagagtcatggtctggaacaatcatgggaccccaaacgcctgtaggttttttaccaccaaacatcacccatggctgctctaagctgtcattttgttcccacagttacctagcatcacggatgcccaatttatggcccaggaaggctgacccaggctaagggcagtctcactccacagccatgcaatggacagtctgaatgtttccctaccccagaccttcactgacctctactatttcctcctctgatataaagaaaacactttaattttctcctgcatcctacatctcctcctaaaatctttggccctaattgtcatcaaaaccttgtaggattctgaattttttgtttcttcctgaatcttagccagttctctcagagccaatccatggatttataaggaattttcac

SEQ ID NO: 165745 - DNA, 615 bp, Homo Sapiens
gggacgtcactgcaaggcgccgggggacacgttggctgcgttttcggcgggcttcccgggtacaaaaatggctgtggctagcgatttctacctgcgctactacgtagggcacaagggcaagtttgggcacgagtttctggagttcgaatttcggccggacggaaagcttagatatgccaacaacagcaattacaaaaatgatgtgatgatcagaaaagaggcttatgtgcacaagagtgtaatggaagaactgaagagaattattgatgacagtgaaattacaaaagaagatgatgctttgtggcctccccctgatagggttggccgacaggagcttgaaattgtaattggagatgagcacatatcttttaccacatcaaaaataggttctcttattgatgtaaatcagtcaaaggatcctgaaggccttcgagtattttactatttggtacaagacttgaaatgtttagttttcagtcttattggattacacttcaagattaaaccaatttaaattgtatgttttcaggctgtttgtatatttaattaagggatgggaggggttatttgtcatttacagtattggggtttttatgaatgtgagaacgttgggcc

SEQ ID NO: 165746 - DNA, 685 bp, Homo Sapiens
ggggcgccgccgcaaacgtcagtgtcgggcgcagacggcggcagtgcggcttgctcttggaagttcaggctcggttgtcttttgggagccatggagagtgacttttatctgcgttactacgtggggcacaagggcaagttcggccacgagttcctggagtttgagtttcgaccggacgggaagttaagatatgccaacaacagcaattacaagaatgatgtcatgatcagaaaagaggcttatgtacataaaagcgtgatggaggaactgaagagaataattgacgacagtgaaattaccaaagaggatgatgcattgtggcctcctcctgaccgagtgggccggcaggagcttgaaatcgtcattggagatgaacacatttcttttacaacatcaaaaattggttcccttattgatgtcaatcaatccaaggatccagaaggcttacgagtattttattatcttgtccaggacctgaagtgtttggtcttcagtcttattggattacacttcaagattaaaccaatctagactgaatattggtgtggacatggggggtgggtgggagtagaaaattttgtgtatatcagggcagtatttttttatgaactataaatgattgtctttaataaatatgtgataaaatccaattttttattatttttataaagaacctgaaacattt

SEQ ID NO: 165747 - DNA, 310 bp, Homo Sapiens
gtactagaggatccccgtcaatttctacaccgtacacttcaaattatacgtatcatggaaaatatctggcaaaatcaaggtcctgatcttcgaatgttaccttatggttgtctgtcaatcggtgactgtgtgggacttattgaggtggtgcgaaattctcacactattatgcaaattcagtgcaaaggcggcttgaaaggtgcactgcagttcaacagccacacactacatcagtggctcaaagacaagaacaaaggagaaatatatgatgcagccattgacctgtttacacgttcatgtgctggatact

SEQ ID NO: 165748 - DNA, 329 bp, Homo Sapiens
  misc_feature (173)..(187): n is a, c, g, or t
tcaatttctacacctagtatcctgggtcagtggcggtacaaactggtttcctcagctgcctgtccttctgtgtgcttatgtctcttgtgacaattgttttcctccctgcccctggaggttgtcttcaagctgtggacttctgggatttgcagattttgcaacgtggtactacnnnnnnnnnnnnnnngtctgttagttatttctccaggggaaaaggcaataattttctaagacccgtgtgaatgtgaagaaaagcagtatgttactggttgttgttgttgtccttgttttttatagtattaagtcttctgtttccttgttggtctttt

SEQ ID NO: 165749 - DNA, 379 bp, Homo Sapiens
agtgattggcaactttggcctcagctggaatcagcaagtaactcagatggccctctgggctatcatggctgctcctttattcatgtctaatgacctccgacacatcagccctcaagccaaagctctccttcaggataaggacgtaattgccatcaatcaggaccccttgggcaagcaagggtaccagcttagacagggagacaactttgaagtgtgggaacgacctctctcaggcttagcctgggctgtagctatgataaaccggcaggagattggtggacctcgctcttataccatcgcagttgcttctctgggtaaaggagtggcctgtaatcctgcctgcttcatcactatcagtcctcactagtcaatccgtatc

SEQ ID NO: 165750 - DNA, 772 bp, Homo Sapiens
ccccccacaaattgtgggaaaatgggatttggggggggcttacactttccggggtccggcttacatttccccgaaggggggttaggttttaatcccttaatcccaagcatattaaaaggccatttggagtcagtccggcatttaatgtcctgaacattttaaattacttctattaccatgttgttttttagtagaattgtttcctaaagaaaaccactctttgatcatggctctctctgccagaattgtgtgcactctgtaacatctttgtggtagtcctgttttcctaataactttgttactgtgctgtgaaagattacagatttgaacatgtagtgtacgtgctgttgagttgtgaactggtgggccgtatgtaacagctgaccaacgtgaagatactggtacttgatagcctcttaaggaaaatttgcttccaaattttaagctggaaagtcactggaataactttaaaaaagaattacaatacatggccttttttagaaatttcgttacgtatgttaaaattttgtgtacaaattgaaatggtctgtactgatcctcaacccaataaaaatctcagtttatgacacggcacggcattccgacgcacgtagggccttggtcggccgccctcggccccctcagaagcttttctagaaccctttcgtttggcgccccgggcccccaataggtaaatggaccttggcccaaagcctggttccctaggaaaatcctgggtcattggaactagggggcttgggaatcttccccc

SEQ ID NO: 165751 - DNA, 2004 bp, Homo Sapiens
  misc_feature (1299)..(1460): n is a, c, g, or t
  misc_feature (1505)..(1558): n is a, c, g, or t
  misc_feature (1646)..(1658): n is a, c, g, or t
  misc_feature (1686)..(1697): n is a, c, g, or t
  misc_feature (1859)..(1859): n is a, c, g, or t
aggaggaggcgggctcccaatccggttccatccggttctcccaccgcccccgctgtgggtctcagcagctcgggcggcgggaggagtggcagcggcaaggcagcccagtttcgcgaaggctgtcggcgcgccgcggcccgcaggcacccggcacgcgccttccccgcaggcacccggcacgcgccttccccgccgccacgatgcccaagaggaaggtcagctccgccgaaggcgccgccaaggaagagcccaagaggagatcggcgcggttgtcagctaaacctcctgcaaaagtggaagcgaagccgaaaaaggcagcagcgaaggataaatcttcagacaaaaaagtgcaaacaaaagggaaaaggggagcaaagggaaaacaggccgaagtggctaaccaagaaactaaagaagacttacctgcggaaaacggggaaacgaagactgaggagagtccagcctctgatgaagcaggagagaaagaagccaagtctgattaataaccatataccatgtcttatcagtggtccctgtctcccttcttgtacaatccagaggaatatttttatcaactattttgtaaatgcaagttttttagtagctctagaaacatttttaagaaggagggaatcccacctcatcccattttttaagtgtaaatgcttttttttaagaggtgaaatcatttgctggttgtttattttttggtacaaccagaaaatagtgtgggatattgaattatgggaggctctgactgtctcgggtgtcagcttaacattccacagatggggggttagtttttatatcctataatacaaagcatattaaatggcaatatggagtcagtcctgcatttaatgtcttgaacattttaaattacttctattaccatgttgttttttagtagaattgtttcctaaagaaaaccactctttgatcatggctctctctgccagaattgtgtgcactctgtaacatctttggttgtggtagtcctgttttcctaataactttgttactgtgctgtgaaagattacagatttgaacatgtagtgtacgtgctattgagttgtgaactggtgggccgtatgtaacagctgaccaacgtgaagatactggtacttgatagcctcttaaggaaaatttgcttccaaattttaagctggaaagtcactggaataactttaaaaaagaattacaatacatggctttttagaatttcgttacgtatgttaagatttgtgtacaaattgaaatgtctgtactgatcctcaaccaataaaatctcagttatgnnnnnnnnnnnnnnnnnnnnnnnnnnnnnnnnnnnnnnnnnnnnnnnnnnnnnnnnnnnnnnnnnnnnnnnnnnnnnnnnnnnnnnnnnnnnnnnnnnnnnnnnnnnnnnnnnnnnnnnnnnnnnnnnnnnnnnnnnnnnnnnnnnnnnnnnnnnnnnnnnncaaatacaaaagaccggggcccccacaaaggaaaagaaaaagggnnnnnnnnnnnnnnnnnnnnnnnnnnnnnnnnnnnnnnnnnnnnnnnnnnnnnnttaagggacggcccggcccaaaggggggggccaaaacactcccgggtggtttcgggagggcttgggggaactattcggcgggagcccnnnnnnnnnnnnnccgcgggggggcccccgccggggcaacnnnnnnnnnnnnggggggaatttggtcaatactttggccccacacgggagggccccccccaaccggcgtttataaaactttggcgccccccgggcggacacaaaaatattggggagggttgggaaaaatataaatacacccccgtggggaaaaaggggggccccaacaaaaaancgcgcccaatatggacacctgttcttcacaccagaaaccgggggagacaacctctccccgccgggggtttgtgtattatttccccgcacaacagggaatctacccgggggggactacattttggcggcaatatcaggcggcgggc

SEQ ID NO: 165752 - DNA, 267 bp, Homo Sapiens
  misc_feature (131)..(131): n is a, c, g, or t
  misc_feature (148)..(148): n is a, c, g, or t
ccgtcaattcctacactagagatctaaaagtctgttaacaagaagcaggacttttgacttctcctccaatactcatctcacaccttcctatctgcaatgattgaaaccctatgcatttatcgtgggcccangcagaaatcctgtcccncttgaaaatctttctactcccactgaattcctcaacagaatataactcttctctattaactcttaaagcacttttggcctttatcatagcagtttattgatcatgctctgccctaaatt

SEQ ID NO: 165753 - DNA, 179 bp, Homo Sapiens
taacagacaatagtaggaaaaccatgtaatcatggcaataaatgctagagaatgtttaacaaaattcaacattcattaatgacaacaattgtcaggaaataaaagggaatttccgcaaccagatagagggcatctatgacaacctacagctaacatcacactgtgtagaaaatgaccgg

SEQ ID NO: 165754 - DNA, 267 bp, Homo Sapiens
  misc_feature (149)..(149): n is a, c, g, or t
tcaacttctaaacagtcatgggtgtaccaaaagaaacagcagagagggtgggccctgagagagggccattggagagagaaactgagaaactgctaccagaaagacagacagatgtgacaggagaggaagaatgaaccaagagggaaacnaggacagagaacaaaaacagttgttagctagagacacccagaggacaagaatctgacaaaaatggggaaagtgcaagtcctgaaagagatagggagagtttgaagcgtagaaaatgaa

SEQ ID NO: 165755 - DNA, 1776 bp, Homo Sapiens
cgccgggaacccgcgggggacactgcagccggagcccgggaggggccgcgccgccaccgtctgaactaggatgtcccgacatgaaggtgtcagctgtgatgcatgtttaaaaggaaattttcgaggtcgcagatataagtgtttaacttgctacgattacgatctttgtgcatcttgttatgaaagtggtgcaacaacaacaaggcatacaactgaccacccaatgcagtgcatattaaacaagggtagattttgatttatactatggtggggaagctttctctgtagagcagccacagtctttaacttgtccctattgtggaaaaatgggctatacgaagacatctcttcaagaacatgttacttctgaacatgcagaaacatcaacagaagtgatttgtccaatatgtgcagcgttacctggaggcgatcctaatcatgtcacggatgactttgcagctcatcttacacttgaacacagagcccctagagatttagatgaatcgagtggtgttcgacatgtacgtagaatgtttcaccctgggccggggattaggaggtcctcgtgcctcgtagatcaaacatgcactttactagcagttctactggtggactttcttcttctcagagttcatattctccaagcaatagggaagccatggatcctatagctgagcttttatctcagttatcaggagtgagacgttctgcaggaggacagcttaattcctctggcccttccgcttctcagttacaacaactgcagatggagctgcagctagaacggcagcatgcccaggcagcacggcaacaactggagaccgcacgcaacgaaacccggcgtactaacacaagcagtgtcaccactacaatcacacaatccacagcaacaaccaacatagctaatacagaaagcagtcagcagactctacagaattcccagtttcttttaacaaggttgaatgatcctaaaatgtctgaaacggagcgccagtccatggaaagcgagcgtgcagaccgcagcctgtttgtccaagagctccttctgtccactttagtgcgtgaagagagctcatcctcagatgaggatgatcggggggagatggcagattttggtgctatggactgtgtagatattatgcctttagatgttgctttagaaaacctaaatttaaaagagagtaataaaggaaatgagcctccaccacctcctctttgatgacctccccactcgaagacaatgtcctctgtgctgtatttgccaatgaaagtggacaacagctatcctgggtttgtgtggtgattgtaatttcaggtctgtcactcttgttacattgtgtacattcaaaaggaagagagaaatatatatgataatcatttccacttaactaatttttacttctagcaggtaaatgtaggtagcagtgcagggtgatctctgcttcctgtaccttgacatgcaaaaggctctcctaatactccacattccacctgaagaggaaaattgaaatctctaatgaagcctgctgggggtatttatggaatataaatgaataaaaactgcctgggatggttttacctaaaaaggccaccctgtcccttattttacctttatttccccctgttcggccgccctcggccccccgaaaaagcttttttatcaccctttctttttgggcgccggcggccccagttagggtaagtggaccctggggtcctaaattggttttccccaggagaaactccgttcccatggcccttgcgggttgggggatt

SEQ ID NO: 165756 - DNA, 743 bp, Homo Sapiens
aaaaaaaagcatgaaataatcgattcaaaagccaactaacagcgcataaataaaatatttactttctaagaaaaactgtagcttatcatcaaattgtttacttgtcctttacgtttattcaggcaaacaaaactgcccctcaatgcacttgatcttggtaagcataagcatgtcatattctccttagagaaaaatctgtacagaatttcactgtatctaccacactttaaaattgcctcttccacttagaaaatgacttcaccacagatttaattgtgtactggtattaaaacattgacactccaagaactgattcatccataattgaagctggatcaaagaaatcaggctacagttctgttctctctcgtctgttctttgatggtggcaaatctatatccatggtgtcaaaatccattccctcattaagatcctcaatcctcccttctgaggacatcataacatcttccacaatgggctcttcatcatcttccattaggcttgtggtgtcagaaattgaacgtgcaatttctacaccaaggatcgcctgcatatgttgctgacttagtcttagccaaccaacaaattatgagccagattttgtctgctctgggcctgtgtaatagcagtgccatggcaatgataattggtatgtattgagaatattaatcttaccattgtctctgatactataactggtattgtttaagcaatatatggattcattttctttttactttata

SEQ ID NO: 165757 - DNA, 564 bp, Homo Sapiens
  misc_feature (438)..(494): n is a, c, g, or t
tcaacaattatcttaaattgggttaagaagggaagtatcgcgtctaccacaatcaatactccactaattcatttgctttgaataagcaccagcacagagaagaccatgataagagaaggcatcttgcacataagttctgtctgactccagcaggagagttcaaatggaacggttctgtccatgggtccaaagttcttaccatatctactctgagactgactatcacccaattagaaaacaacatcccttcatcctttcttcatcccaactgggcatcacatagggcaaattggatcaaggcagttcagatgtgtagcaaacccagagaatttgcattggctttagccattttggagtgtgcagttaaaccagttgtgatgctaccaatatggcgagaatctttaggacataccaggttacaccggatgacatcaattnnnnnnnnnnnnnnnnnnnnnnnnnnnnnnnnnnnnnnnnnnnnnnnnnnnnnnnnncgatgcacaagcgacatgggtaaaatacacatttccagttaagcatcaggtttggaaacaaaaggtgagc

SEQ ID NO: 165758 - DNA, 1557 bp, Homo Sapiens
  misc_feature (853)..(869): n is a, c, g, or t
acctggtcatcctgctacacaagatcacaaagcaagtaatccgctggagaaagaacgaattcagaatgcaggtggctctgtaatgattcagcgtgtgaatggctctctggctgtatcgagggcccttggggattttgattacaaatgtgtccatggaaaaggtcctactgagcagcttgtctcaccagagcctgaagtccatgatattgaaagatctgaagaagatgatcagttcattatccttgcatgtgatggtatctgggatgttatgggaaatgaagagctctgtgattttgtaagatccagacttgaagtcactgatgaccttgagaaagtttgcaatgaagtagtcgacacctgtttgtataagggaagtcgagacaacatgagtgtgattttgatctgttttccaaatgcacccaaagtatcgccagaagcagtgaagaaggaggcagagttggacaagtacctggaatgcagagtagaagaaatcataaagaagcagggggaaggcgtccccgacttagtccatgtgatgcgcacattagcgagtgagaacatccccagcctcccaccagggggtgaattggcaagcaagaggaatgttattgaagccgtttacaatagactgaatccttacaaaaatgacgacactgactctacatcaacagatgatatgtggtaaaactgctcatctagccatggagtttaccttcacctccaaaggagagtacagctcaactttgttgaaacttttaacatccatcctcaactttaaggaaggggatatgacatgggtgagaatgattacatcagagaacttcagcagtacaacagctagcccagaactgannnnnnnnnnnnnnnnngtaaatttgagacttatgtaagcgtgatttcaaaccataattcgtgttgtaaatcagactccagcaatttttgttgtatgatttggtttttttgtaaagtgtaatgctccttgtaccaaaatgctcatatttaattatgaactgctttacatcactatcaaagttacaagaaatgtttggccttattgtgtgatgcaacagatatatagccctttcaagtcatgttgtgtttggacttggggttggaaccagggagagcagcagccatgtcagctacacgctcaaatgtgcagatgattatggaaaataacctcaaaatcttacaaagctgaacatccaaggagttattgaaaactatcttaaatgttcttggtaggggagttggcattgttgataaagccagtcccttcatttaactgtctttcaggatgttccttcgttgtttccatgagtattgcaggtaataatacagtgtattcataagaatctcaatcttggggctaaatgccttgtttctttgcacctcttttcaagtccttacatttaattactaattgataagcagcagcttcctacatatagtaggaaactgccacatttttgctatcatgattggctgggcctgctgctgttcctagtaagatattctgaattccattttatcaataaagcttgatttaacaaacaa

SEQ ID NO: 165759 - DNA, 574 bp, Homo Sapiens
tcaatttctacacgagtcttcggctgctttttaacacgaggtttgggcactgttcttctggggacaggtcttctggcttttacttttttttgttctggctcactctctgcactggtgccttgttcctgttcatcttctgagggttcctgtttccatttttcttgtttgttcagctgcctctggcctcttctttttgggctcccactctcagacccgctacttgcctcttccttaatattaaatcgcgatggttcttgtctgcttcggtttgaccgcctgaccccataaacatcaggatattcttcccacatcttcttcacatcagctatccgttccttcttagaggctggcttctctttggcttctgggaggactggctgggatttggaacctgctgattcgctctcagattccgactgactctcagaagattcagagctgctgttcgactcgctgccatgtccacttcctggatcacttccctgctcactttccgactgactgcctgagtctgaacccgaagcttcttcagaggctgagtgacttcaggaaagaagatacccaaatccccccc

SEQ ID NO: 165760 - DNA, 476 bp, Homo Sapiens
  misc_feature (380)..(397): n is a, c, g, or t
  misc_feature (404)..(404): n is a, c, g, or t
  misc_feature (454)..(454): n is a, c, g, or t
gatttcccctttagatcaaactgccccttccatggaaaagctggaaaaaaactctggaacccatatccaggcttggtgaggttgctgccaacagtcctggcctcccccatccctaggctaaagagccatgagtcctggaggaggagaggacccctcccaaaggactggagacaaaaccctctgcttcctttgggtccctccaagactccctggggcccaactgtgttgctccacccggacccatctctcccttctagacctgagcttgcccctccagctagcactaagcaacatctcgctgtggacgcctgtaaattactgagaaatgtgaaacgtgcaatcttgaaaactgaggtgttagaaaacttgatctgtggtgnnnnnnnnnnnnnnnnnncttaaancaacagcaacgtgatcttggctgtctgtcatgtgttgaagtccatggttnggtcttgtgaagtctgaggttt

SEQ ID NO: 165761 - DNA, 455 bp, Homo Sapiens
tttctctgaatcatttaggtttaagatgtaagtgaacaattctttctttctgccaagaaacaaagttttggatgagcttttatatatggaacttactccaacaggactgagggaccaaggaaacatgatgggggaggcagagagggcaagagtaaaactgtagcataagcttttgtcacggtcactagctgatccctcaggtctgctgcaaacacagcatggaggacacagatgactctttggtgttggtctttttgtctgcagtgaatgttcaacagtttgcccaggaactgggggatcatatatgtcttagtggacaggggtctgaagtacactggaatttactgagaaacttgtttgtaaaaactatagttaataattattgcattttcttacaaaaatatattttggaaaattgtatactgtcaattaaagtgtttttgtgtaaactgagt

SEQ ID NO: 165762 - DNA, 194 bp, Homo Sapiens
gatctagaggaccccggtcactttctacacctagtacatacagagccgttcaaatacaaaaagtttcgtcttctatctgaaatctcaagaatgaattatttcaagaaagaaaacaaattctagattccagtctccagccttttcaacaaagcttttagtcaacaaactacatgtttcattacagtgcctacaga

SEQ ID NO: 165763 - DNA, 265 bp, Homo Sapiens
  misc_feature (14)..(14): n is a, c, g, or t
  misc_feature (153)..(224): n is a, c, g, or t
ccgttcaatttctnacacagagactgcagcttctaaatagtatactccattaaaataaattacatttttctgagtctagggctggagacaaatgtaccatgaacaaactgttgcccagaaaataattatatacccatgaaataaggagaatannnnnnnnnnnnnnnnnnnnnnnnnnnnnnnnnnnnnnnnnnnnnnnnnnnnnnnnnnnnnnnnnnnnnnnntttacagtagctaactacaccccataggtgtggaaatggaa

SEQ ID NO: 165764 - DNA, 444 bp, Homo Sapiens
aggaagcgaggcctgggtggcgattctcccgaggagagaacctggtgtattaccggttccaccgggctcgctggggcctggaagaggaggacttccagccccgggaggaggccatgctctaccacaaccagaccgccgagctgcgggagctgctggagttcacccacatgtacctgcagtcagatgatgagatggagctggaggagacagaaccgcccctggagcctgaggatgccctatctgacgccgagtttgagggggagggtgactacgaggagggcatgtatgctgactggtggcaggagccggatgccaagggtgacgaggccgaggctgagccagagcctgaactcgcatgagaaggggacaccccacacccctcaagcttgggaagcctggtgccgatggccccaccctcaccagcctgggcagcagcaagaacta

SEQ ID NO: 165765 - DNA, 885 bp, Homo Sapiens
  misc_feature (842)..(843): n is a, c, g, or t
gcgctgttcaaggctaaccggctggagaaggcggtggcggcggcctacaccttcctccagaggaacccgaagcacgagctgaccgccaagtatctcaactactatcaggggatgctggacgtcgccgacgagtccctcacggacctagaggcccagccctacgaggccgtgttcctccgggctgtgaagctctacaacagcggggatttccgcagcagcacggaggacatggagcgggccttgtcagagtacctggcagtctttgcccggatcctggccggctgtgaaggggcccatgagcaggtggacttcaaggacttctacccggccatagcagatctctttgcagagtccctgcagtgcaaggtggactgtgaggccaatttgacccccaatgtgggtggctacttcgtggacaagttcgtggccaccatgtaccactacctgcagtttgcctactataagttgaatgatgtgcgccaggctgcccgcagcgccgccagctacatgctcttcgaccccaaggacagcgtcatgcagcagaacctggtgtattaccggttccaccgggctcgctggggcctggaagaggaggacttccagccccgggaggaggccatgctctaccacaaccagaccgccgagctgcgggagctgctggagttcacccacatgtacctgcagtcagatgatgagatggagctggaggagacagaaccgcccctggagcctgaggatgccctatctgacgccgagttttgaggggggagggtgactaccgaggagggcatgggtatggctgactgggtggcagggagcccgggatgccccaggggtgaacnnaagggccaagggctgaaccccaaaaccctggaacttccccat

SEQ ID NO: 165766 - DNA, 541 bp, Homo Sapiens
ggtcaattgtctacacaaagaggaatgggtttgggtttcacatcttcaatgcgaggaatggatgcagtttgaaaatgatcacacttgtaaagttggggacttatagacttcttgttctgatgtcacgtccttgtccaccaaacagctagcactctagcttgcatgggtgttgcattgactttaatttattgaaaaatacaaatttttgtaaatatcagatcagtgatactggtgttagtgttgtaatcaggttaaacccacttccattaaacttgacaggactatagaaggataatattttttagttcatgaattctacttttcaaatatataaaagctgcaggtggggataaaatctcatacatggattttttcgtgtccgctgtcttgtgtacttttgtacttaaccttgtacagttattttcatctcttgaaacatgaaagaaatgttatgtagatgttctttagaagatctggccatttggtacataatccagcacagataagctgggtggtaatgataataaaaatggtttgtctc

SEQ ID NO: 165767 - DNA, 1193 bp, Homo Sapiens
  misc_feature (538)..(565): n is a, c, g, or t
  misc_feature (902)..(902): n is a, c, g, or t
  misc_feature (1038)..(1038): n is a, c, g, or t
tttgctacacatggatcaaaacttagatgtgtgtttgaattgccagcagagaatgataaaccacatgatgtagaaataaataaaattatatccacaactgcatcaaagacagaaacaccaatagtgtctaagtctctgagttcttctttggatgacaccgaagttaagaaggttatggaagaatgtaagaggctgcaaggtgaagttcagaggctacgggaggagaacaagcagttcaaggaagaagatggactgcggatgaggaagacagtgcagagcaacagccccatttcagcattagccccaactgggaaggaagaaggccttagcacccggctcttggctctggtggttttgttctttatcgttggtgtaattattgggaagattgccttgtagaggtagcatgcacaggatggtaaattggattggtggatccaccatatcatgggatttaaatttatcataaccatgtgtaaaaagaaattaatgtatgatgacatctcacaggtcttgcctttaaattacccctccctgnnnnnnnnnnnnnnnnnnnnnnnnnnnnaatataatgtaacgatcttttagaaagttaaaaatgtatagtaactgattgagggggaaaagaatgatctttattaatgacaagggaaaccatgagtaatgccacaatggcatattgtaaatgtcattttaaacattggtaggccttggtacatgatgctggattacctctcttaaaatgacacccttcctcgcctgttggtgctggcccttggggagctggagcccagcatgctggggagtgcggtcagctccacacagtagtccccacgtggcccactcccggcccaggctgctttccgtgtcttcagttctgtccaagccatcagctccttggngactgatgaacagagtcagaagcccaaaggaattgcactgtggcagcatcagacgtactcgtcataagtgagaagcgtgtggtgactgaatgacccagcgctttggaaaaataatggcagtgctttgttcacttanagggaccaagctaaatttgtattggttcatgtagtgaagtcaaactggttattcagagatgtttaatgcatattttaacttattttaatgtattttcatctcatggtttttcttattggtcacaaggagtacaggtttaatggctggccttgctt

SEQ ID NO: 165768 - DNA, 891 bp, Homo Sapiens
ggtagaggacccccgcccgtgccccgaccggtccccgcctttttgtaaaacttaaagcgggcgcagcattaacgcttcccgccccggtgacctctcaggggtctccccgccaaaggtgctccgccgctaaggaacatggcgaaggtggagcaggtcctgagcctcgagccgcagcacgagctcaaattccgaggtcccttcaccgatgttgtcaccaccaacctaaagcttggcaacccgacagaccgaaatgtgtgttttaaggtgaagactacagcaccacgtaggtactgtgtgaggcccaacagcggaatcatcgatgcaggggcctcaattaatgtatctgtgatgttacagcctttcgattatgatcccaactgcagaaaagtaacacacaagtttatggttcagtctatgtttgctccaactgacacttcagatatggaagcagtatggaaggaggcaaaaccggaagaccttatggattcaaaacttagatgtgtgtttgaattgccagcagagaatgataaaccacatgatgtagaaataaataaaattatatccacaactgcatcaaagacagaaacaccaatagtgtctaagtctctgagttcttctttggatgacaccgaagttaagaaggttatggaagaatgtaagaggctgcaaggtgaagttcacaagctacgggagggaaacaagcagtttacaggaaaaagatggacttgcggatgaaggaagacagttgcaaaagatacagcccccattttcaagcatttaaaccccaaaactggggaaaggtaaagaaagggttttttagccaccccccggtttcttttgggccttctggagcgggttttttggcttcccctttaaaccccgcctacgggg

SEQ ID NO: 165769 - DNA, 904 bp, Homo Sapiens
  misc_feature (63)..(122): n is a, c, g, or t
ctcgccgggcaccgcggcctcgccctcgccctccgcccctgcgcctgcaccgcgtagaccgannnnnnnnnnnnnnnnnnnnnnnnnnnnnnnnnnnnnnnnnnnnnnnnnnnnnnnnnnnnctttttgtaaaacttaaagcgggcgcagcattaacgcttcccgccccggtgacctctcaggggtctccccgccaaaggtgctccgccgctaaggaacatggcgaaggtggagcaggtcctgagcctcgagccgcagcacgagctcaaattccgaggtcccttcaccgatgttgtcaccaccaacctaaagcttggcaacccgacagaccgaaatgtgtgttttaaggtgaagactacagcaccacgtaggtactgtgtgaggcccaacagcggaatcatcgatgcaggggcctcaattaatgtatctgtgatgttacagcctttcgattatgatcccaatgagaaaagtaaacacaagtttatggttcagtctatgtttgctccaactgacacttcagatatggaagcagtatggaaggaggcaaaaccggaagaccttatggattcaaaacttagatgtgtgtttgaattgccagcagagaatgataaaccacatgatgtagaaataaataaaattatatccacaactgcatcaaagacagaaacaccaatagtgtctaagtctctgagttcttctttggatgacaccgaaggtaagaaggttatggaagaatgtaagaggctgcaaggtgaagttcaaaggctacggggagggagaacaagcaggttcaggaaagaagaatggactgccggatgaaggaaaacagtggaagagcaaccggcccccattttcaagcatttaaccccccaaatgggggaaagggaaataaaaggccctctag

SEQ ID NO: 165770 - DNA, 411 bp, Homo Sapiens
  misc_feature (135)..(144): n is a, c, g, or t
ggtatcttgttctgtaaaatattagaacgctttgttttacaaaaaatgatgagagaattcttccacatgtacttctgtgcttagaacatttttacggacctaagcgctggagacgttgctgcatgtcggctgggnnnnnnnnnncatacacccgagcacggaaaaactaacgcaaaattgtattttcttacctagtggaaatctgaaatgactgcaaattcctagtgaatgtacaggtttgctttcgtgtccctcttctggttgctttagaagtgacgtgtaatttctgaacccatgtttcatctgtataaaagaacatctgcaccagtttttctcctgcccctcagaagagccaaactttgagttttatgtctgtttgtcattgataaatttcaataaatctttttatac

SEQ ID NO: 165771 - DNA, 1117 bp, Homo Sapiens
tacaacacgccccagttacaacagctccagttacaacagcgccagttacaacagttccagttacaacagctcagctggggtaggaggtaggctgctggtgtccctgcaggcaggtggcttttcctactcggaatgacgatgtcttttcttgttatggttctcaattgcccttctaagtgcttcatcctggataagatctgactttcttatatccgtgtggctacagccaatttgagggcaataggcctttttcttccgcttttgcctggactcaatcatgcgaacaatggcgtcctcttcataggtgtggccacacactttatttttcactggcttctccatttcctccctttgtaatggggcaggtgaagttggtctgactttgggtcacaattatatcttcatccactccttctgttccgtcagcttctctgtcagcttgaagaccacattgcttctttagttctttcagctgttgtttaaactgtacaaatttttcattattttgaaagtctgcatcagaattcttgctctgtaaagccaaaaatttcttctctaccaataattttaaatctggtattttttctggacgttcttctttcacatgatttattgtagattgaacagcctttacataatggtttagttgccgatccaatgtagcaaattcaaccattgccttgtccatactatattcactactcacttcagtctgactttccacaagatccaaagcaacactagaagctgtgtccataccagagttgatacaggcttggaagtttttcaaggaggagagagcagactctacaccactgaaggagatgaaaccagttgaacctgaatttgaactggaacgtcctggcatcttgaaattagtacctgggccaccaaacacagctggactcaatatatggggaaggtaagtgtcctcagtttttggagagagattaccctcttccaaaagagtgcttgattctgtgaagaagtcaacaatagcacagtctcctaaaagcctggtagtccaaagcagtctccgtctggtggcaccccaagttcccctggcctagacccacatcctttcctcagcccccttcgcctgccgctgaaaagtccc

SEQ ID NO: 165772 - DNA, 464 bp, Homo Sapiens
gggaaatgaagaagccagtgaaaaataaagtgtgtggccacacctatgaagaggacgccattgttcgcatgattgagtccaggcaaaagcggaagaaaaaggcctattgccctcaaattggctgtagccacacggatataagaaagtcagatcttatccaggatgaagcacttagaagggcaattgagaaccataacaagaaaagacatcgtcattccgagtaggaaaagccacctgcctgcagggacaccagcagcctacctcctaccccagctgtctgttgagagcagtgctgaccccagcagttagggactggctgcatagcatacttgttgggggtaaaacttgttgcttttatgtgtgcttgaaaacatttttcaaagttacacaacagaaatgcaatcatattgtttatttttaagtgttctataatgttaaataaaactttgatcatctgaaaaaaa

SEQ ID NO: 165773 - DNA, 1008 bp, Homo Sapiens
  misc_feature (957)..(967): n is a, c, g, or t
aagcaggctggttacggtccggaattcccgggatatcggggcgcggaggtgattccacactgaggcgagcgcggcggcggggtggtagtggcagtgttcgtgtgctcaggtctgaatcgccgagggaggaggcggtggaggaagaggtggcggcggtggcggtggtcgtagcggtggcggaggaggcgggtacgaatcagctgcgggcggagacatggccaacatcgcggtgcagcgaatcaagcgggagttcaaggaggtgctgaagagcgaggagacgagcaaaaatcaaattaaagtagatcttgtagatgagaattttacagaattaagaggagaaatagcaggacctccagacacaccatatgaaggaggaagataccaactagagataaaaataccagaaacatacccatttaatccccctaaggtccggtttatcactaaaatatggcatcctaatattagttccgtcacaggggctatttgtttggatatcctgaaagatcaatgggcagctgcaatgactctccgcacggtattattgtcattgcaagcactattggcagctgcagagccagatgatccacaggatgctgtagtagcaaatcagtacaaacaaaatcccgaaatgttcaaacagacagctcgactttgggcacatgtgtatgctggagcaccagtttctagtccagaatacacccaaaaaatagaaaacctatgtgctatgggctttgataggaatgcagtaatagtggccttgtcttcaaaatcatgggatgtagagactgcaacagaattgcttctgagtaactgaggcatagagagctgctgatatagtcaagcttgcctcttcttgaggagcaccaacatctgttatttttaggattctgcatagatttcttttaaactggcattcttgcctaatgatgttatctaggcaccattggagactgnnnnnnnnnnntcctgctctgtaaataaagctaattcacgtctgtgtagcaa

SEQ ID NO: 165774 - DNA, 278 bp, Homo Sapiens
catgcccaagccaaaagtaaacagaataattttgaaccaagaattgcagggaccaaaagttaaccaaaaagaacctgacccccacccgctgcctgcggttttgtttctgttaaaacgtcacctgatgaaatagaatgaactcctgaaatgcacctctgggatcgggaatggtctgtgtgttatcagctgcgactggttcactgcgtctggacaagcctcatggggactggggattctggccagtgtaatttctgtcaaccacggacgtttgccttcat

SEQ ID NO: 165775 - DNA, 824 bp, Homo Sapiens
tcgacccacgcgtccggcttcatggtccccgttgatgctccaaatccatataggtctgaaaattgtctgtgtgtacaaaatatactgaaattgatgcaagaaaaagaaactggacttaatgtgttcttattggatatgtgtaggaaaagaaatgactacgatgataccattccaatcttggatgcactaaaagtcaccgccaatattgtgtttggatatgccacgtgtcaaggagcagaagcttttgaaatccagcattctggagtggcaaatggaatctttatgaaatttttaaaagacagattattagaagataagaaaatcactgtgttactggatgaagttgcagaagatatgggtaagtgtcaccttaccaaaggcaaacaggctctagagattcgaagtagtttatctgagaagagaagcacttactgatccaatacagggaacagaatattctgctgaatctcttgtgcggaatctacagtgggccaaggctcatgaacttccagaaaagtatgtgtcttaagttttgactgtggtgttcagattcaattacgattttgcagctgagtttttccaatggtcatgatcatctatacaagtatagtttacaaaaccaccggaagataataatgtgtgatgcctacgttactgattttccacttgatctagatatggatccaaaagatgcagataaaggcacacctgaagaaactggcagctacttggtatcaaaggatcttcccaagcatgcctctataccagactcagttcactgcaaaaattacagtaacatctagtcttcacagtatggttatcag

SEQ ID NO: 165776 - DNA, 969 bp, Homo Sapiens
cgccaaatgtgaaaagagtttaatgaagcctcaagggtttaagggaaattaaatggaaacttttaatcctaattgcttttcatctgacatgcttaaaggaatccttttaaactgataagaaacaatgaataggaaagaaaacctgctaaaatctcttagaatttacacgattcttattctactacaagaaagcattatttggtacaaggtgtatttgtggatgtacatgaacagtatatatattatccggatcatgttgtgctatgtacaggtctttacaattcttcctgaaggttaaaacagttcattagaattcaaaatgcgtaatcatctgtaagttggcacttgttaggctcttgtcagcattgataactggcatgttttattgcagcccagttccagccagtgtttgccaacttgtacaacagaagtccagcaataggtgggtagagtgcaggaaaaacagtgccatgtttctcaattggagaccctgaaataagtgaagttactagctgctaaataaatgtcactcaaaagcagtctcttggctttttcttacacagcgggcaacttttcttttaaattctccatttctatcttccctccattctttcgcagcatcaacattagcaggtgagtctccattagggtctgccagcatagaaatgacactaatcatgatggtttccacagtgtggatagggagccagcgttcctctggcttttcataaccatacttatcttccccaggctcatgaagaatagaaatgcacacatcaccatttttatcaacatttgggtgccagatttctgtaatgaatttcattttaggaggtcggaggggataatcttttgggaaagtaagatgagccttaaaaacaccaccttcataaagtgtatctggagggccaataataaggacttcccatcggtagagatcattgtcatctattaaacctgcagaaaagc

SEQ ID NO: 165777 - DNA, 1335 bp, Homo Sapiens
  misc_feature (785)..(785): n is a, c, g, or t
gggggcagcgaggcgccgctcccgccgcctcagcccggccttcctcggctccggcgctccggtcgcggggcccgggttcctcggcacaccccgctccagccgcccccagagcctgtccccagcccttcggaagccccggcgccagcccgggccctcggcagggaggatgacggagctgcagtcggcactgctactgcgaagacagctggcagaactcaacaaaaatccagtggaaggcttttctgcaggtttaatagatgacaatgatctctaccgatgggaagtccttattattggccctccagatacactttatgaaggtggtgtttttaaggctcatcttactttcccaaaagattatcccctccgacctcctaaaatgaaattcattacagaaatctggcacccaaatgttgataaaaatggtgatgtgtgcatttctattcttcatgagcctggggaagataagtatggttatgaaaagccagaggaacgctggctccctatccacactgtggaaaccatcatgattagtgtcattttctatgctggcagaccctaatggagactcacctgctaatgttgatgctgcgaaagaatggagggaagatagaaatggagaatttaaaagaaaagttgcccgcctgtgtaaagaaaaagccaagagactgcttttgagtgacatttatttagcagctagtaacttcacttatttcagggtctccaattgagaaacatggcactgtttttcctgcactctacccacctattgctggacttctgtngtacaagttggcaaacactggctggaactgggctgcaataaaacatgccagttatcaatgctgacaagagcctaacaagtgccaacttacagatgattacgcatttggaattctaatgaaccggttttaaccttcaggaagaatggaacagactgtacattagcacaaacatggatcccgggataactattactataccgggtccatgttcacatccccacaaattacccttgtgtccaagtaaaggcgtcatgtgaaatacaataacgaaaccggggttacatcctacagacgaactttagacagagtatcataccgtaatttcacaggggacccatgatcaagagttaaaaagggggattcccattttaaacaacattgtctctatgtacacagccaattagcggtacaagaggtacccatttacaattatccccttaaaacccctggagagtagccgtaaaaacgatgtcgaatagtaataaaagagatgggagtactcactcgtgttgtagaacacagcaccactgagtaaaaactaaccggcaga

SEQ ID NO: 165778 - DNA, 722 bp, Homo Sapiens
tacccaggcatttagagaaaatcattttcatcattggagtgggaagaggacaagagaggacagcaatcagaggccaacgctaagtgcttctgaccctctccctcacagccggttactagctgtttggacagatttgcccattcagccccaggacaactgggaggggatggcaagaggtcagctggacaacatcaccaggttcctctcggaaacatggtctggctgctccaagagccctaaaggacaccatcatcacagatgatgattctggaacctcttctaccctcaataaaataatccctcaatgccaaatttccataattaacgaaatcatgaaacaaaacagcatgtttcttaccgaaacttaaagctggactaggaacagtagctttgaaatagtctccctttaccctccctagcacataacaggacccagagcgtcctttccactgctgtctgtgctgactacgcggactccaactaaaggaatccatcgaattctgtcccgactgtgcttccatccccaccttggaaaggttcctctgctgtgagaaaaacagtttagtgcaaactcctttcctacatggggtaactggtcccagagctgctttctatacccagcacgctatcacttgcttgacgctactaaggctgtgtgaactgggaaattcacgattgcccactgcccatctctaaatgaaagcgcgtgaaggaccatcaag

SEQ ID NO: 165779 - DNA, 828 bp, Homo Sapiens
  misc_feature (728)..(728): n is a, c, g, or t
  misc_feature (760)..(760): n is a, c, g, or t
agacgcagcaagctaccaccagaaacaaagtcaatacaaatacactcaggcgctgaacaatctcagtagtgggtggtgtagaaatagaacttggtgaattctgcttcacaatgaaaggagagccgaaagacaaagtagaaaaaataggattagttgaagatctaaataaaggagctaagcctgtagttgtgctacaaaaactgtctttggatgatgttcagaaacttattaaagatagagaggacaaatcaagaagttcccttaaacctatcaagaataaaccatcaaagtcaaataaaggtagtatagatcaatcagtgttaaaagaattaccccctgaactcctggcagaaattgagtccaccatgccactttgtgaacgtgtgaaaatgaacaaacgcaagcgtagcacagttaatgaaaagccaaaatatgctgaaatcagttcagatgaagataatgatagtgatgaagcttttgaatcctctaggaaacgacataaaaaagatgatgataaaggcttgggaatattgaagaacgtgacagaaagaagctctgggggggatcataggagaaaggggccactctcatgaaaggaagaacgagttccggggggtgggtcctttatcgaaaacccgaagtcccgtcacattctgaccttgggaaagattatttctcctccctccccagcctttaaggggaggttggctaagggaaaatggaaccancaaccaaccatcgcccttctcgaatatgtttnccttggtccgggccggccttgggcccctcaaaaaaggttttttttaaaacctatttccgttttggggg

SEQ ID NO: 165780 - DNA, 1071 bp, Homo Sapiens
gggggacttctctcatgatgacactttggatgttccaacgcaagttgagctgctcatcaaacaagcgacatcccatgaaaacctctgccagtgctatattggctggtgccctttctggtaactggaggcccagatgtgcccatcacgttttttctgaggcttttgtactttagtaaatgcttccactaaactgaaaccatggtgagaaagtttgactttgttaaatattttgaaatgtaaatgaaaagaactactgtatattaaaagttggtttgaaccaactttctagctgctgttgaagaatatattgtcagaaacacaaggcttgatttggttcccaggacagtgaaacatagtaataccacgtaaatcaagccattcattttggggaacagaagatccataactttagaaatacgggttttgacttaactcacaagagaactcatcataagtacttgctgatggaagaatgacctagttgctcctctcaacatgggtacagcaaactcagcacagccaagaagcctcaggtcgtggagaacatggattaggatcctagactgtaaagacacagaagatgctgacctcacccctgccacctatcccaagacctcactggtctgtggacagcagcagaaatgtttgcaagataggccaaaatgagtacaaaaggtctgtcttccatcagacccagtgatgctgcgactcacacgcttcaattcaagacctgaccgctagtagggaggtttattcagatcgctggcagcctcggctgagcagatgcacagaggggatcactgtgcagtgggaccaccctcactggccttctgcagcagggttctgggatgttttcagtggtcaaaatactctgtttagagcaagggctcagaaaacagaaatactgtcatggaggtgctgaacacagggaaggtctggtacatattggaaattatgagcagaacaaatactcaactaaatgcacaaagtataaagtgtagccatgtctagacaccatgttgtatcagaataatttttgtgccaataaatgacatcagaattttaaacata

SEQ ID NO: 165781 - DNA, 1407 bp, Homo Sapiens
  misc_feature (1331)..(1331): n is a, c, g, or t
  misc_feature (1338)..(1338): n is a, c, g, or t
gtggagctgccagagtaaagcaaagagaaaggaagcaggcccgttggaagtggttgtgacaaccccagcaatgtggagaagcctggggcttgccctggctctctgtctcctcccatcgggaggaacagagagccaggaccaaagctccttatgtaagcaacccccagcctggagcataagagatcaagatccaatgctaaactccaatggttcagtgactgtggttgctcttcttcaagccagctgatacctgtgcatactgcaggcatctaaattagaagacctgcgagtaaaactgaagaaagaaggatattctaatatttcttatattgttgttaatcatcaaggaatctcttctcgattaaaatacacacatcttaagaataaggtttcagagcatattcctgtttatcaacaagaagaaaaccaaacagatgtctggactcttttaaatggaagcaaagatgacttcctcatatatgatagatgtggccgtcttgtatatcatcttggtttgcctttttccttcctaactttcccatatgtagaagaagccattaagattgcttactgtgaaaagaaatgtggaaactgctctctcacgactctcaaagatgaagacttttgtaaacgtgtatctttggctactgtggataaaacagttgaaactccatcgcctcattaccatcatgagcatcatcacaatcatggacatcagcaccttggcagcagtgagctttcagagaatcagcaaccaggagcaccaaatgctcctactcatcctgctcctccaggccttcatcaccaccataagcacaagggtcagcataggcagggtcacccagagaaccgagatatgccagcaagtgaagatttacaagatttacaaaagaagctctgtcgaaagagatgtataaatcaattactctgtaaattgcccacagattcagagttggctcctaggagctgatgctgccattgtcgacatctgatatttgaaaaaacagggtctgcaatcacctgacagtgtaaagaaaacctcccatctttatgtagctgacagggacttcgggcagaggagaacataactgaatcttgtcagtgacgtttgcctccagctgcctgacaaataagtcagcagcttatacccacagaagccagtgccagttgacgctgaaagaatcaggcaaaaaagtgagaatgaccttcaaactaaatatttaaaataggacatactccccaatttagtctagacacaatttcatttccagcatttttataaactaccaaattagtgaacccaaaaataggagattaggttttgtgccaancatgggngaaatctactggaatttggctttccaggtttttaaaatttttatggtccataggaaattttggaccttc

SEQ ID NO: 165782 - DNA, 701 bp, Homo Sapiens
  misc_feature (385)..(442): n is a, c, g, or t
ggggtggagctgccagagtaaagcaaagagaaaggaagcaggcccgttggaagtggttgtgacaaccccagcaatgtggagaagcctggggcttgccctggctctctgtctcctcccatcgggaggaacagagagccaggaccaaagctccttatgtaagcaacccccagcctggagcataagagatcaagatccaatgctaaactccaatggttcagtgactgtggttgctcttcttcaagccagctgatacctgtgcatactgcaggcatctaaattagaagacctgcgagtaaaactgaagaaagaaggatattctaatatttcttatattgttgctaatcatcaaggaatctcttctcgattaaaatacacacatcttaannnnnnnnnnnnnnnnnnnnnnnnnnnnnnnnnnnnnnnnnnnnnnnnnnnnnnnnnngaagccaagaagaaaagacggccccccgcccactatctcgccgtacccacagttcacctcctttgcggcgggcgccattgaggcccatacaaaaaaaatttatacaaaaaccatcttttttttggggcccgccaggggcccccacagtagggggaagtatggacagctggggggaccacagaagggcggtgtccacaaagaggaaagacaccgagagggtagaagcaaaaaagaggggggtgggggcttgtgccccccc

SEQ ID NO: 165783 - DNA, 1035 bp, Homo Sapiens
agggcattagcataacaactagtacaaaaagcaggctgatacgggtccggaatcccgggatatcgtcgacccacgcgtccggtttagtaactacttgaaagattctaaggatgtatacttgctaatcaaaaagttataacttaaacagtttcgcgttgggtactcatatatagcctaaattagggacatatttgaatcagccaaatcatcatttagatttgaaaataggcagatgaatgaacaaatatggtcatagctctaaacacaacttcgagtctagtattccttaaggttagataaccagtcttgattaaaaatataaaatttttcttcatgtctaatcccattgcatccacaatgctgtgatttatagtacatgatcaacacttaaaagtactttacatatgtgtgtaactgaagcaagttttcatgacctctgttagattctcaaaagaattcagaacttcaatttaagaatcaccattttaagaatacatgtgtacatatacacattaagcagtataaagcagctaaaattggcattggttttacactggtgcagtgtgcttaggtaaagtaacttcttccatgtttcaaggtcaggttcagagttgaatgaagtgtagatttaaatttaggattaggctttggaatatatcttgttgttattgtctcacatttctgatattgactacttatcccatattctgtttcaaattctttatcatatttcaagttctattctcataacttcttggatcttggggcttaactaaggcaggtttagtatcccaaaattaagttggatctggaaccccaggatagagagttttgcactggacagagacctcttaggtttggttccacgaatcgaaaagtccatccctaagagaactcagggaggaaggaagaggccaaaagaaggcctatagtcgcggcacttcaacgctaacaggggagggagaggccagaactagcgggagaacagaatacgaaacaagcgagatgaagaacgaggcacaaagcaaaggaaaa

SEQ ID NO: 165784 - DNA, 397 bp, Homo Sapiens
tgtaacattgcacaagtgacatagtattgccaagcctcattttcctaccaagaatgggagagattacctctaatccatagagttgtgatgagaataagaaggaaataatttactcttactgcttagtatagtttttggtacattatttgttctcaaaaaaataccagctgttatgattcaatttaatacttttatttatgctctggttttgtgaggtgtattgggacagcatcctgacaaggctttataatgtgcagtgaacatttcaaattcagaagtggaaaattgagatgggatttatcaggttgcctatgcagttggggacaatgttttaaattgtatattaggacagagttagtgactttctgaatgggagaattagggggcttatgtaaga

SEQ ID NO: 165785 - DNA, 772 bp, Homo Sapiens
  misc_feature (459)..(480): n is a, c, g, or t
  misc_feature (502)..(598): n is a, c, g, or t
  misc_feature (634)..(647): n is a, c, g, or t
  misc_feature (720)..(722): n is a, c, g, or t
  misc_feature (730)..(730): n is a, c, g, or t
ccaggtacagttgtacaggttgtacactgcaggagagtgcctggcaaaaagatcaaatggggctgggacttctcattggccaacctgcctttccccagaaggagtgatttttctatcggcacaaaagcactatatggactggtaatggttacaggttcagagattacccagtgaggccttattcctcccttccccccaaaactgacacctttgttagccacctccccacccacatacatttctgccagtgttcacaatgacactcagcggtcatgtctggacatgagtgcccagggaatatgcccaagctatgccttgtcctcttgtcctgtttgcatttcactgggagcttgcactatgcagctccagtttcctgcagtgatcagggtcctgcaagcagtggggaagggggccaaggtattggaggactccctcccagctttggaagcctcatccgcnnnnnnnnnnnnnnnnnnnnnnagacaagctctcgctctgtcannnnnnnnnnnnnnnnnnnnnnnnnnnnnnnnnnnnnnnnnnnnnnnnnnnnnnnnnnnnnnnnnnnnnnnnnnnnnnnnnnnnnnnnnnnnnnnnnccataggctcacaacaccacacctggcaaatttgannnnnnnnnnnnnnccagagacggggtctcgcaacattgcccagacttcctttgtgttagttaataaagctttctcaactgcaaaannnaaaaaaanaacggaaaaacagaccaacaacaagacaagaaaaccctgtcg

SEQ ID NO: 165786 - DNA, 494 bp, Homo Sapiens
tctagagtaccccgtcaattgctacaccaatgctatctgtgagggtatccgattttgtatgttccattttaaaacaagcttattctctcttcaaggctgaatctcctccatgtactgtaccaaaattaccctaccttagtaggtccctggtcatgtaattgttcctgacactccaaggttaaagcatttgtatttctcctgcgacttaagcatttatggatatactcagcattatattcataatgtaaccagcatgtttatgtttgttactatggtttgtgcttaagttacaagcttgtcttatctcccttgtttgattcagcagatgattttggaatgcatattatgtgaatgtcactgtgctcaaggcctgtggaggctacaaaaatgtaaagccattcttgtagctgtcaaggaacttaaaatccagaatggagataagacagaaataaataacaccaccatatagaatataaaatctgtaacagacagcc

SEQ ID NO: 165787 - DNA, 678 bp, Homo Sapiens
tcaggtcccaggtagtctttaaaagaacaaaaatttacagtaaacattttaactctggaatgcaagtattgtacaattaccagtacatttacaaaactgcttagacagtaggttgctccagagtaagaatttaaaaatgtacaagccagttcatgatgactttagatatgttattaaaatacattgttaatcaaaaatactttactatgtacatgtacactgtataaactctagatttacctaccaaagaaagccttaatcaatttctggctcactggcccagaaaacagtacagttctatcatttggtcttcatattatacacacgggctgagaggcatggtactgtagccagtacgtcaataatgcatgtttctttctgtagaatgtctagttggatgagtcagttttacttccactatatttgactttcctaaatgctgatccaagtaactctgggcattcacataattcatttgcaatttggttacacttcaaaataaggctataattcatttcatcagttatgacactgtcttgcttgtagtcaggatggtttgcgataaactccctcatccatctggcaactgtcattagtactccagatgctctcttcctaattaggcttagggtagttccgaataacacatctggtggtcaaatccacttccaggttttc

SEQ ID NO: 165788 - DNA, 581 bp, Homo Sapiens
tcaatgggctgagacactttcctatctacagaatatagctgcatagctcccaccacacgattttgctgtgcagatataccagtcagaagtaaccacttttgttttgcatctgtacggtaattgataatctggcaccctgcaaggctagaatggcgatcaaacattttcactggctgagactctccttccatactccagtgataaactgcattatccgtaacaagagcaaccgtattcaaagagatccatttccaaaaggtgacatcatcagtcatggtatgagccttcattttacttttcatttcaatgttaaaaatctgaagagtttgcccagcttttagtggcaattactttgctagctggattcatgatggcgctgtctgctgaaattggtcttcgaattggattacttgggtcattcatatcaatgaataccacctggggctgctctcctactttttctctaatgcagatgaatttggcagacccaaagtccagcacagtgagggacctctaaagtcgaccgcagctgccagtggcctggcgcgttcaagctagaaccgcggcggcggggggagggg

SEQ ID NO: 165789 - DNA, 771 bp, Homo Sapiens
gagagacttgtgaaacttagtcgggatataactgttgaaagtaaaaggacaatttttctcctccataggattacaagtgctcctgatatggaagatatattgactgaatcagaaattaaattggatggtgtcagacaaaagatattccaggtagcccaagagctatcaggggaagatatgcatcagttccatcgagccattactacaggactacaggaatatgtggaagctgtctcttttcaacacttcatcaaaacacgatcattaattagtatggatgaaattaataaacaattgatatttacgactgaagacaatgggaaagaaaataaaactccctcctctgatgcacaggataagcatgtttggtacttggagaactgagagtcacacctgtcgattaccttctgggagtggctgacttaactggagaattgatgcggatgtgtattaacagtgtggggaatggggacattgataccccctttgaagtgagccagtttttacgtcaggtttatgatgggttttcattcattggcaacactggaccttacgaggtttctaagaagctgtataccttgaaacaaagtttggccaaagtggagaatgcttgttatgccttgaaagtcagagggtcagaaattccaaaacatatgttggcagatgtgtttacagttaaaacagacactgatagactcaagaagagggcattttcttagaattctaacgttactcagtgtactaattcttttgagaactcctaagagacca

SEQ ID NO: 165790 - DNA, 747 bp, Homo Sapiens
tttactatatagtctagattaaaaatacctctctatgtattagtgtcaactatattaacttttgcgcgtaggaccacatgtagttttgtatacagagaagaaaacctcaagtaataggcattttaagtaaaagtctacctgtgtttttttctaaaaaggctgctcacaagttctatttcttgaagaataaattctacctccttgtgttgcactgaacaggtgctcttcctggcatcataaggagtaggtgtatatcagttttaaattccactgaaaatggaacagtatccccttctcatcgaagggattgtgtatctgtgcttctaatattagttggctttcataaatcatgttgttgtgtgtatatgtatttaagatgtacatttaataatatcaaagagaagatgcctgttaatttataatgtatttgaaaattacatgttttttcatttgtaaaaatgagtcatttgtttaaacaatctttcatgtcttgtcatacaaatttataaaggtctgcactcctttatctgtaattgtaattccaaaatccaaaaagctctgaaaacaaggtttccataagcttggtgacaaaattcatttgcttgcaatctaatctgaactgaccttgaatctttatatcccatttagtgtgaatattcctttattttgctgcttgatgatgagagggagggctgctgccacagactgtggtgagggctggttatgtagtatggttggactagtcgg

SEQ ID NO: 165791 - DNA, 312 bp, Homo Sapiens
attgaaaggcgctgcaagctggatgtagatgcacccagactgctgaagaagattgcaggagttgattatgtttattttgtccagaagaactcactgaattctcgggaacgtactttgcacattgaggcttataatgaaacgttttccaatcgggtcatcattaatgagcattgctgctacaccgttcaccctgaaaatgaagattggacctgttttgaacagtctgcaagtttagatattaaatctttctttggttttgaaagtacagtggaaaaaattgcaatgaaacaatataccagcaacattaaaaaa

SEQ ID NO: 165792 - DNA, 188 bp, Homo Sapiens
tctagagtatcccggtcatcctgctacaccaaacaaactcagagtaatagaaaagaaatatttaacacaaacataataattaaaacacaaatttcacctattgttcaggatatctttttgacgaaaggttattgttacagaaaatttcagatacaaacataaagaacattaaacagtcggattcccct

SEQ ID NO: 165793 - DNA, 751 bp, Homo Sapiens
atgctgtctcaggatggtgataatggctggacttttgtaattcacctcaaagactgtgggagagccaactcaactcactgtatagtctgtgcatatggtggcttgtagcatgtaggttttttccaaaagaaggaaatataaaatgtttagattaagaactataaaactacagggtgcctataaaaggtggcttactccttattgttattatactatccaatttttaaaatgcagtttaaaaaataagcactgagtcttgttattacaaggcaggcaaatgtttctccctcattttgaaaagactgaactggcaacgcttttcctgaacatttagaaaagaggcagtaagagtactctggtttgggttcaagtgagaggcttttcatgaaaatcttaggattgaagagctctaagttcaggatatctcaatgttcagaaagcctgactaaaagaagccaaaccaaaaccatttaatgtgaacacaaacctcttttcttttagtaagttttacttttaatacagagtgaaagaaaataaaaatttaataggctaaaacaagtcaaacacccattctacacagataaaaaccttcacaaaggtcaactgaagtaatccagagctgaaactgaattgtgcagattttcaatgaagtcacagaagtcatgtaacacaacaaaagtcgattatatttacacactcagcaagccctctaagaaatgtgccccaagaagcattaacctttgttttgtgc

SEQ ID NO: 165794 - DNA, 830 bp, Homo Sapiens
  misc_feature (569)..(569): n is a, c, g, or t
gggattaccgcatggtagagaacacactcgattaaaaatgttaagctatctgaaaaataaaaggtgcaagtctacaggatggcacaaaacaaaggttaatgcttcttggggcacatttcttagagggcttgctgagtgtgtaaatataatcgacttttgtttgtgttacatgacttctgtgacttcattgaaaatctgcacaattcagtttcagctctggattacttcagttgacctttgtgaaggtttttatctgtgtagaatgggtgtttgacttgttttagcctattaaatttttattttctttcactctgtattaaaagtaaaacttactaaaagaaaagaggtttgtgttcacattaaatggttttggtttggcttcttttagtcaggctttctgaacattcatgaaaagcctctcacttgaacccaaaccagagtactcttactgcctcttttctaaatgttcaggaaaagcattgccagttcagtcttttcaaaatgagggagaaacatttgcctgccttgtaataacaagactcagtgcttattttttaaactgcattttnaaaattggatagtataataacaataaggagtaagccaccttttataagcaccctgtagttttatagttcttaatctaacattttatatttccttcttttggaaaaacctacatgctacaagcccacatatgcacagactatacagtgagttgagtttggctctcccacagtcttttgagtgaatttaccaaagtcagccattatcatccctcctgagttatttgaaatgaattttttttgtacattttggctggcgaatgg

SEQ ID NO: 165795 - DNA, 543 bp, Homo Sapiens
  misc_feature (66)..(66): n is a, c, g, or t
  misc_feature (77)..(77): n is a, c, g, or t
  misc_feature (117)..(117): n is a, c, g, or t
  misc_feature (129)..(129): n is a, c, g, or t
gaatttttcttaagccatttcctttcaaccagttggatattacttaagcccaagagcctttcctgnggtaagagccnatatttgagtctctcgggcaatgagcctattctttggggnacaattccaccntatcatatgtgaaacctgcagtaaaataaacccagatgctaaatcattcctacaaaggtttgactgaaactgtggcagatgtctcatcttctttatatgttaagcagcatactcttctgatttttattgcaatcttttaccaagtggtgcacaaacttggtattgatgtctttattccattttgagtttagattgagaatatttttattttctgaaggcagagatatctactgtataattgcaccaaagtacatttgaaaggaaggttttcaatagtgtaatactgcagcgatgtagataaaatcacaaatgtataatgtgttaggttgaataaggtgtggaaaatgcttttctgttagtagaatgcaaaaacctacctaagccacataataataaaattcttttaccaacttt

SEQ ID NO: 165796 - DNA, 944 bp, Homo Sapiens
tccagtcagttatcctactataaggccccggatgaactggcttcatggtccatgtctatcaagtgctcatgtgttacagagacgaaaattctgtcattttccttaagctcaaatattccccccttgatagatggaatagagtccatattcggcatctttaagaccaacaactattcctagcacttttccatcaacaatatagggtcaggataacttgtgtatttgtaaatatattggaccatttgtttgtcgttctttgtgttttcttttatttcctcctgaaatcgaaagtatgtttgggaatagatgtagtaaaaccctttttcatggatgaccagttcaccattcctcaagtgcaagttgctcaggaatgaatgcccactccttgatgattcccaggagtttattttgcggcccagagccttttcattcttggagtttggagaagacaatgtgttgcttcttcctctggtcccagttatgtgagctgctactctctgaggacctctttctctcactaggggagaaatattttgttgcttttcttgaactgtagaaatggtttcctcagaggttctcaaaatcatctttctaacgagctgacggagttgccacttgacttgccagcaggggctgttcatactctcttcgtcattggggtcccaataactgtcatcttcttttaagaaacaagcaatgccacttttggagtacttgtcctgcatctgcttcagctcgttggtaaagtacacgtaagttacagccacacagagagactgcaggagcactgtgaagatcacgatcagcacgcaggtctgtcccaggctgggtcccccctggacctccatcatagccatgatcctgtcagagtctgactgctgtaagtcagccaggcagccggtcactgaagcccttccttctctattcttttatagtcagtcaga

SEQ ID NO: 165797 - DNA, 499 bp, Homo Sapiens
gggggggactatgagctcttcgtggaggctgtggaacaaaacacgctgcaggagttcctgaagctggcttgagtcaagcctgtccagagttcccctgctggactccatcaccacactccccccagccttcacctggccatgaaggaccttttgaccaactccctgtcattcctaacctaaccttagagtccctcccccaatgcaggccacttctcctccctcctctctaaatgtagtcccctctcctccatctaaaggcaacattccttacccattagtctcagaaattgtcttaagcaacagccccaaatgctggctgcccccagccaagcattggggccgccatcctgcctggcactggctgatgggcacctctgttggttccatcagccagagctctgccaaaggccccgcagtccctctcccaggaggaccctagaggcaattaaatgatgtcctgttccccccaccacaacgggcaccatcagtctaacatgtc

SEQ ID NO: 165798 - DNA, 1200 bp, Homo Sapiens
  misc_feature (1077)..(1077): n is a, c, g, or t
  misc_feature (1097)..(1097): n is a, c, g, or t
  misc_feature (1117)..(1117): n is a, c, g, or t
ggggccgctaccgccgccctctgcccgccggcccgtctgtctacccccagcatgagcggccggcgcgtctacagcacgtcggtcaccggctcccgcgaaatcaagtcccagcagagcaaggtgacccgaatcctggatgggaagcgcatccaataccagctagtggacatctcccaggacaacgccctgagggatgagatgcgagccttggcaggcaaccccaaggccaccccaccccagattgtcaacggggaccagtactgtggggactatgagctcttcgtggaggctgtggaacaaaacacgctgcaggagttcctgaagctggcttgagtcaagcctgtccagagttcccctgctggactccatcaccacactccccccagccttgcacctgggccatgaaggacctttttgaccaactccctgttcatttccttaacctaacccttaggagttccctccccccaaaggcaagggccactttcctccttccccttccctcctcttaaaatggtgaagtcccccctccttcccttcgcattctttaaaagcggcaaagacatttccccttttacccgcatgttaaatctccctccacgaaagatatgtgggtctcttaaaagagccaacacccagcgcgcctcgccacaaaaatttggcttgtgcaggctcctggggcccccccctccaaggcccgcacaagaaccactcttccgaggggagggccgcacccccaaatttcccttggcccgcatcggagccccaccctgggggactgcggaaaatggcgagcacaccccctctcccgcgtgcgtgtgggccttctcccgccaccccccacgccccactaagaatgacttctctgggctcacaaggagggcggacacccgccgggaaaataacgcccatccctctgctcgcgcagagcgtgggcgagcgacccctcacagacagtggcctgtattgtacagcaacggagagctgggtccgccggagagtcacccagacgtggggagggcgccacgacgacgcgcggactcgagagcgatacagatcccacacgcgcacgctcangcacacagcgctgttgtacnatcatacggtcccgcgcccnactgacgcaccacaccctcacctccctctttggggcgcccgtgtcactctgcgccgcccacctacaaaaagtagtcttctctg

SEQ ID NO: 165799 - DNA, 845 bp, Homo Sapiens
  misc_feature (787)..(788): n is a, c, g, or t
  misc_feature (791)..(792): n is a, c, g, or t
  misc_feature (796)..(797): n is a, c, g, or t
  misc_feature (803)..(804): n is a, c, g, or t
ggggctcccgagcacggcggcggcgtcgtctcccggcagtgcagctgccgctaccgccgccctctgcccgccggcccgtctgtctacccccagcatgagcggcctgcgcgtctacagcacgtcggtcaccggctcccgcgaaatcaagtcccagcagagcgaggtgacccgaatcctggatgggaagcgcatccaataccagctagtggacatctcccaggacaacgccctgagggatgagatgcgagccttggcaggcaaccccaaggccaccccaccccagattgtcaacggggaccagtactgtggggactatgagctcttcgtggaggctgtggaacaaaacacgctgcaggagttcctgaagctggcttgagtcaagcctgtccagagttcccctgctggactccatcaccacactccccccagccttcacctggccatgaaggaccttttgaccaactccctgtcattcctaacctaaccttagagtccctcccccaatgcaggccacttctcctccctcctctctaaatgtagtcccctctcctccatctaaaggcaacattccttacccattagtctcagaaattgtcttaagcaacagccccaaatgctggctgcccccagccaagcattggggccgccatcctgcctggcactggctgatgggcacctctgttgggtccatcagccagagctctgccaaagggccccgcagtcccctctcccaggaggaccccctaaaggcaaattaaatggatgggcctggtttccatttggaaannaannaccnnaaacanncacaaaccacaccataacctccggaccaccaataccaaatt

SEQ ID NO: 165800 - DNA, 922 bp, Homo Sapiens
  misc_feature (827)..(827): n is a, c, g, or t
ggggctcccgagcacggcggcggcgtcgtctcccggcagtgcagctgccgctaccgccgccctctgcccgccggcccgtctgtctacccccagcatgagcggcctgcgcgtctacagcacgtcggtcaccggctcccgcgaaatcaagtcccagcagagcgaggtgacccgaatcctggatgggaagcgcatccaataccagctagtggacatctcccaggacaacgccctgagggatgagatgcgagccttggcaggcaaccccaaggccaccccaccccagattgtcaacggggaccagtactgtggggactatgagctcttcgtggaggctgtggaacaaaacacgctgcaggagttcctgaagctggcttgagtcaagcctgtccagagttcccctgctggactccatcacccacactccccccagccttcacctggccatgaaaggaccttttgaccaactccctgtcattccctaacctaaccttagaggtccctcccccaatgcaggccacttctcctccctcctctctaaatggaatccccctctccttccatctaaaggcaacattcccgttacccattaggtctcaaaaaattggccttaaagcaacagcccccaaatgcctgggctgccccccaaagccaagcattgggggcccgccaatccctgtgcctggcaactgggcttgaaggggccaccctctgggtgggttcccatccagcccaaaacttctggccaaaggggcccgccaattcccctttccccaggaaggacccctagaggggaaattaaaaggatggttcctggttccctccggggnaggaggcgcgggacgggcgaaggccgataaccttgtggggccgccccttgcgccttcaaagaaatctttcttagaacctttcctttttgggccct

SEQ ID NO: 165801 - DNA, 697 bp, Homo Sapiens
  misc_feature (485)..(531): n is a, c, g, or t
  misc_feature (620)..(620): n is a, c, g, or t
cctggtcatcgctacacgattatcagctttagaactgaagaagtacctccactcatgggtcacaatcacaatttccaggattaaaaaccatctattcttaaatcctacactgttttagagcatcaagtcactgcagttattcagttctgagacactgtcgatttattttagcatttacatatgacattcatttaacagacacacaaagcaagccaacaggtaaacatgcttacacagcctgcagaaatcgtcaggttttaacttgtttattaagaaaacaaccaaaacaaccaaaaattaccatgacccggtacaggaaaaacaggaagactcaagtgaatactagagctgcaagtgtttcttagaattgaaacaaaaaatgtttttttccaacttgttcaaatttccctctaagtgcaggtgagaaaaaaagcaaatatattaagtcaaccaattatttttttaaaagtgcaatttaccctttnnnnnnnnnnnnnnnnnnnnnnnnnnnnnnnnnnnnnnnnnnnnnnngatccccaaaggcaaaatgtgtagagagacaagggtggtgatggaatgacctactttgtgatgtttttacgctttacaaaaagcagatntggtattcagaaaagcctgcaaatacaacattgcttaagagaacctgtaaacacgtttggaatacaatgcaacaccc

SEQ ID NO: 165802 - DNA, 1137 bp, Homo Sapiens
  misc_feature (110)..(163): n is a, c, g, or t
  misc_feature (196)..(210): n is a, c, g, or t
acaatgcccacccgcatcgccattctgtagtcttcagggtcagctgttgataaaggggcaggcttgcgttattggcctagattttgctgcagattaaatcctttgaggannnnnnnnnnnnnnnnnnnnnnnnnnnnnnnnnnnnnnnnnnnnnnnnnnnnnnagctttttaattcatgaatattttcgtgtctgnnnnnnnnnnnnnnngtgtttcctccagcccttgtctcggagacggtgttttcctcccttgccccattatcttttcacctcccaggtctaccatttcatggtggtcgttgggtccgcctaaaggatttgagcgtttgccattgcaagcatagtgctgtgtcatcctggtccatgtaggactggtgctaaccacctgccatcatgaggatgtgtgctagagtgtgggaccctggccaagtgcaggaatgggccatgccgtctcacccacagtatcacatgtggaaccgcagacagggcccagaagctttagaggtatgaggctgcagaaccggagagattttcctctgtgcagtgctctctggctaaagtcacggtcaaacctaaacaccgagcctcattaacccaagtgaaccaaccaaagtcaccagttcagaagtgctaagctaataggagtctgacccgagggcctgctgcttcctggttaagtatcttttgagattctagaacacatgggagctttttattttcggggaaaaaccgtatttttttcttgtccaattatttctaaagacacactacatagaaagaggccctattaaactcaaaaagtcattggggaaacttaaagtctattctactttggcaagagggagaaatgtgttttatggaacgatagatccacatcagaactcctgtggggaggaaaccttataaattaacacatggccccttagagaccacaggcgatgtctgtctccatccttccctctccttttctgtcacctttcccctagctggctccctttggacctacccctgtcctgctgactgtgtgcatggtattccaaacgggttacggttcctaagcaaggtgtattgcaggctttctgatacaaattggttggtaaagcgttaaaactcacaagtagtcattcattacac

SEQ ID NO: 165803 - DNA, 1058 bp, Homo Sapiens
  misc_feature (324)..(324): n is a, c, g, or t
  misc_feature (646)..(654): n is a, c, g, or t
cggtggctagatctctatgatactcgtgagtggctctgtctgtggtcatgttcatgcgcgtaaagatgaggcctgtgatactgggtacggtgtgagactggattatgagtgtatccatgctgctgtgtaatgttggatttgctgtttatcgtcctgtggatcgtcgagatgtgagggtaacagttacgggggcgatgactgctacatgtcgctgcggtgggttgagtgcgacaggcgtctgtgtgtttgtctagactatgatggttgtctctattatgaggttcagctagtggtgtttacttcaagaatattccgtattggatnagtggcgcactggctcgcttcgatcattttattgtgatgtagtatgatgtcgggtctgtgtgagagctgttagagcgaggggtgatatgatagtcctgtagagatagcgaccagtgcggtatggtttggagaaagacgtgtcttcctatgagtaaggttgggtttgttgatttgtgaggtgggggcccgggggaggaggggtgggaaataatgtcgggggtggcgcggtgaatgcgggtgctggtcgtgggtcgcttccagaaagtttgtgggggagataccaaggtgttaagatcctttgggggctccaagccttgcctcnnnnnnnnngctacgaggggggtaatcgcagattttgggcctttaattttcttttggccacggaaggccactggttttaatcccctttagcccgagccaccatcgaccagggatttttgccctccccctcttgtaatacagggggttgccaaactttttcttaaaggggccagatggcaaaatatttaggctttgcaggccacacagtctccgtctcaactacacaactcttgccattatagtactaaagcagccacagacaatattcaagtgaataagtatgactgtgttccaataaaactttacttacaaaaacttgccttagactgcatttggcatacagggcatagtctgttgattgtgctaatccaaccaactaatatcaactttcctaaattccatcacagatcatg

SEQ ID NO: 165804 - DNA, 428 bp, Homo Sapiens
  misc_feature (296)..(316): n is a, c, g, or t
agttgaaggcaccaagtgtttggttggttttcctaagacatactttaaaaagatgttctataaatttcctagttaaattatggggattttggagtatgtacatgataaattataatacgtatatggttgaagttattttattttttactaatgaattattttaatattccttattgaataaatgctgtaacttgtttgctatggaacttattcttaaagttctagttaaaaataatttttccacatgcatgaaaatatgtattaatcagaggtggcttaattacattgaaattgcnnnnnnnnnnnnnnnnnnnnnactgaaataactcatgtttgtgtagaagaatgcctgtttactcagagtttatattttccttcagttatattttaaatcaaaaggtctgggtaatgtatacttttgattaata

SEQ ID NO: 165805 - DNA, 195 bp, Homo Sapiens
tcatttgtctacactgaagaaaaagcacacagggattacgtaatttggccaaagtcacaaagtacataaatagccaaaccaggaaatgtaaattaacacagtcctttcaatggcaatttggcaatagtcatcaacaaccttaaaatgtgctactcttgacttggaaaatctcagtgctaagaatccacatacctt

SEQ ID NO: 165806 - DNA, 185 bp, Homo Sapiens
atgtgctgggtcgatctagaggtcccgttcattttacacacagcaaacgggctgagtctgtggaaaaggccattgaagagaaaaaataccttgctggggcagacccttctactgtggaaatgtgttaccctcctatcattcagagtggtggcaactataatctcaagttcagtgtagaagttgaa

SEQ ID NO: 165807 - DNA, 463 bp, Homo Sapiens
atcccggtcatctcgctacacccaacaagtctttatgcttcctcaacgcattctgtgcatattcctcacaggcaaagaggacaaaagcgtcccctgttggcctaccatctgggtaggtgacaaagaggatgccttcctttcccccagtaatagggcaatgctgtccaaagaaggccaccacttcttcagctgtggccgtgaaagggagcccccgcatgcgaacaatgacttgattttccttggagagaaactgggctacctcattggaagtaccaccagcaattttaaggaaatcttcacctgttgctttgtaaacctcaatgtaccgggtccccatgtgatgtttgtgcctctgtagtgctaggtctcggtgctcctcacttacaaacctaaccagagcttctccgttccttcgaccctgagcattcagtcaaagtgctgcagaggcagcaccaccaataca

SEQ ID NO: 165808 - DNA, 395 bp, Homo Sapiens
  misc_feature (365)..(365): n is a, c, g, or t
ggtcatctttctacactcgctagcggtatcattacatttacatctgccacctacagcaaaatcagagatggcataataataggacttgagaactttgggatcgttaaacacttcatctccaaaagtgttcaggcgattaagagttactctgatgtcagtggcagttacccattcctgcagcacagggctattgtcaaagttataggcgctgggccttccttccagggtagaaaaggccacgttgcccccagtgaggggagaaatgtcactgaattcatcagtacacaaggcctgctgctcgtcccctcctgtcctgatgaagccgcggtttgccttggagtaggtgttcttcgcaggaaccactngtagtacttggtaaggaatccagggcccgt

SEQ ID NO: 165809 - DNA, 247 bp, Homo Sapiens
cctggtcatcctgctacaccttgagagcattacctaggccaggctagtgagtgctttgtgaggaagctggtcagaaggttccctcaactccttcctggtcctcctggacactgcagaaaagacttaggggatccccagcagaggccaattgctctccttccttccctgccccaccaggaaaggaataacgtccacagacttgaagcagatagtgaagtagatctgtgagaggttctaggtacttagt

SEQ ID NO: 165810 - DNA, 239 bp, Homo Sapiens
agttcccatcagacggatttctatacattgacctctgtaggttataaaaacagagtcctgatgggagcaatgatgcgggatcatgtagctactttcatttcattctccagcagtccaggctctgtcctttgcttcatcatggagataatactcaggtcaggaagacagattcccagggaagaccaggttcctgttagttctccaactatcacatccctgctgagtgggacgaaagatcg

SEQ ID NO: 165811 - DNA, 756 bp, Homo Sapiens
ggggagtgaaggtcgcaccgcggcggattgacttctaaagacttggtacgtgaggaaaaaacacggaagaggaagaggaaagcaaaggagtcagggatggctcttcctcagggtctactgacattcagggatgtggccatagaattctctcaggaggagtggaaatgcctggaccctgctcagaggactctatacagagacgtgatgctggagaattataggaacctggtctccctggatacctcttccaaatgcatgatgaagatgttctcatcaacagcacaaggcaatacagaagtgatccacacagggacatggcaaagacatgaacgtcatcacataggagattcttgcttccaggaaatggagaaagatattcatgactttgagtttcagtggcaagaagatgaaagaaatggccatgaagcacccatgacaaaaatcaaaaagttgatgggtagtacagagcgacatgatcaaaggcatgctggaaacaagcctattaaaaatcagcttggatcaagctttcattcacatctgcctgaactccacatatttcagaccaaagggaaaattaataatcaagtggagaagtctatcaacaatgcttcctcggtttcaacagcccaaagaatttcttgtaggcccaaaacccacatatctaagaactatgggaataatttcctgaattcttcattactcacacaaaaagcaggaagtacacatgagagaaaaatctttccagtgtggagagag

SEQ ID NO: 165812 - DNA, 542 bp, Homo Sapiens
gggtcccacaaacccggaagcggatcgcgtggagtgaaggtcacgccgcggcgcgattgacttctaaagagtcatgctgtgtgatgaaaaagcccagaagagaaggaagaggaaagcaaaggagtcagggatggctcttcctcagggacacttaacattcagggacgtggccatagaattctctcaggaggagtggaaatgcctggaccctgcacagaggactttatacagggatgtgatgttggagaactacaggaacctggtctccctgggaatctctcttcctgacctgaatattaactccatgttggagcaaaggagagagccccggaatctgctgagagtgaagtgaaaatagcaaaaaatccagatggcagggagtgcatcaaaggtgtgaacacagggagcagctatgcattgggaagcaatgcagaagacaaaccaattaaaaaacaacttggagtatcctttcacttacatctgtctgaactggagctatttccagatgaaaaggtaataaatggatgtaatcaagtcgaacc

SEQ ID NO: 165813 - DNA, 232 bp, Homo Sapiens
tgattctagagtatccccggtcatcttgctacacaattaaaacaaagggcaagagtgctgacttcactaacttcgatcctcgtggcctccttcctgaatccttggattactggacctacccaggctcactgaccacccctcctcttctggaatgtgtgacctggattgtgctcaaggaacccatcagcgtcagcagcgagcagtgttgaaattcctgtaaacataacttcat

SEQ ID NO: 165814 - DNA, 492 bp, Homo Sapiens
  misc_feature (382)..(382): n is a, c, g, or t
  misc_feature (418)..(418): n is a, c, g, or t
  misc_feature (438)..(438): n is a, c, g, or t
  misc_feature (450)..(450): n is a, c, g, or t
aaggatttgaaaatttattcaaaacagtatgatatgaagggatgtggtggctgcatctcccaaccagagggtagaaggcaggtgttctagaaggttccagggacacaagaggcagggttcagtagggaaactactgtacttcatttacacttaagctagagagtttaggatcttaatttatttaaagccatagattcagtttagctttaacctagacagaaagtgaaaagcattttacaagtagaagaggcaatgagaaataaggcaacagataatacgtcaaagctggaacaagggcagaaatcagaacgtgtctggctatcagctttgtttttgactactaaggccaacctttttattcctctggatggtctgcagacanagttcagaatttaggcaaaaggatttccaaatgganccctatacatctcaggaagntacaggttgagnagaagccacagaggcttgtgatgaacccaaaggaatctttaa

SEQ ID NO: 165815 - DNA, 322 bp, Homo Sapiens
  misc_feature (269)..(269): n is a, c, g, or t
caagttcgccttgcagaagtctggatggatgaatacaaggaaatattttataggagaaatacagatgcagcacaaattgttaaacaaaaagcatttggtgatctttcaaaaagatttgaaataaaacaccgccttcagtgtaaaaattttacatggtatctgaacaacatttatccagaggtgtatgtgccagaccttaatcctgttatatctggatacattaaaagcgttggtcagcctctatgtctggatgttggagaaaacatcanaggaggcaaaccattaattatgtatacatgtcatggacttgggtactccgagg

SEQ ID NO: 165816 - DNA, 246 bp, Homo Sapiens
  misc_feature (118)..(118): n is a, c, g, or t
  misc_feature (132)..(132): n is a, c, g, or t
tcatcttgctacacagaatacaaaacacaactatctgaggtaaataatagaaggctgatggagggagaaatcaaaattcgaagaatgacaaagttatgagtttcagtggggctttccntcccatgttcccangcttaagagtcaagagcagtcctaattctggaactgtgcagcagatgtgaacagaaaaaggtccaaaagaaaggctgactttctgaccaaagagctaggatgggatcctctaga

SEQ ID NO: 165817 - DNA, 222 bp, Homo Sapiens
attctacaggctgtctcgctgagctttcgctaggttatgctacagtaacaaaagccccaaaatccttagcagcaacacatacacaaggtttacttgttcattgacatttccttttatgtcaggttgactgtgactctgctgtatacaagctattttatttgttagatggtgaaaactgtgacacttgctgtagcagatgaccggggatcctcaagatacagc

SEQ ID NO: 165818 - DNA, 596 bp, Homo Sapiens
cgacacatagatcccatatatcttggaggctttgttcatttctaattatgcttttctctaaactattcttctcgcttcatttcattcatttgatcttccatcactgatacctgctgggtcctcttcgctgaggcttttccctgagtcatatatttactggaaaggctacctgaagagcctttaaactgtgggcattcctttttaatgtgcccttctcttccacaaataaaacaacgtttatctcttaagtctttgtcatcctgtctcttccatttttctactggtggcctgaggatcttctccctccccaggtcagcagctgcccgcattggcttggctttctgaggtgtgcactgtatgggcttatcttcttttgttgacacctccctttctgtgtacttgttgtgaatttctttgtcctctttgcttcttttttccttgttctcagggtatctttggttcagggcatcttcctgatctcgccgccgtcttacttttctcctcataggacagtccttcatgaagtgtccgatttttccacaaattcgacaacatctatcatttggggccagctctccttcagttaacacatctgg

SEQ ID NO: 165819 - DNA, 290 bp, Homo Sapiens
tcagatcttaccttcatgtatataaaatttacactcttacctccctcccataacaaaagttaaattatcttagaaattaaggcttatatacctgaatgtttatataaatacttgcaggcaagttttaagttttaaaatccacaataattccaaaaggaaaagcaactaacagataaaacttttatctcctaatcaaggtaaatagaaaaaaagaactcttagatacttctagatattttttatatttgggtaggactttgatcaatagttagctgtaatagtttatgctg

SEQ ID NO: 165820 - DNA, 865 bp, Homo Sapiens
ggtatttgaagcagtttagaaaaaacaagatttgtattttatttccttgtaaaaatctttacacatgcagacaaaccagtgttaagaaagtattcaccatcatttaaacaaataaccacttaaatagaacagtgtctgcaattttatctgtataaaaataagatacatttttacagaattcacgctccagttcttatagcaataaacaatacacaactataataaagtacaattgaacctgaccatggtttttaattagatactgctagggcattttaatgtgcaaaaaaattaacatagttcttttcaaaagaaactgtcctcagtgttctagagacctagagggtttcaagaaatcaaatcctaatcagtttgcgtttaatgtttttgattgagtccatacatcacactgtagatagacaaaaccaagaactgatgcaggctcaaaggaagagaaagtcagcgcctgtgcctgccatgtcctgagcgactgccaccatggtgcttgcttttatgggacctctcaaaggagcgagatcgttcacgcctgtccctatgatgtcccctttcatgcctgtgtttcttggctgcatctgagtgatcccgagacttgctctgagatcgagaacgagattttttccttttatgaccatgtctgtttgaactttttaaatcatctctggtatgcttggccttaaggtgaggagaaccatgattatgatgtcttcgagggctttcactgtgactgcggggacctgcttcttgaactcgagctgtatgttccagatcgactccgcctattattatagtgtcttcttggagtatgtgatctagaacgtgatcgtgttcttgacctcgatcgact

SEQ ID NO: 165821 - DNA, 1110 bp, Homo Sapiens
  misc_feature (620)..(653): n is a, c, g, or t
tctaccattttcgcagagtattctatctggtgtagatgcttacgcaagagttttgagatgaccgtggaaaaagtacagggtattagcagattggaacaactttgtgaggaattttcagaagaggaacgagtaagagaactcaagcaagaaaagaaacgccaaaaacggaagaatagacgaaaaaataagtgtgtgtgtgatattcctactcccttacaaacagcagatgaaaaggaagtaagccaagagaaggaaacagacttcatagaaaatagcagctgcaaagcctgtggcagcactgaagatggtagtacttgtgtagaagtaattgttaccaatgaaaatacatcatgtacctgtcctagcagtggcaatcttttggggtcccctaaaataaagaaaggcttatctccacactgtaatggtagtgattgtggatattcatctagcatggaagggagtgaaacaggttctcgggagggttcggatgttgcctgcactgaaggcatttgtaatcatgatgaacacggtgatgactcttgtgttcatcactgtgaagacaaagaggatgatggtgatagttgtgttgaatgttgggcaaattctgaagagaacgacannnnnnnnnnnnnnnnnnnnnnnnnnnnnnnnnncaagatactgaaatgtgatgaacatatccagaagcttggaagctgtattacagatccaggtaatcgagagacctcaggaaataccatgcacacagtgtttcaccgtgacaagaccaaagatacacatcctgaaagctgttgcagctctgaaaagggtgggcagccattgccttggtttgagcataggaaaaatgtaccacagtttgcagaacctacagaaacgttgttgggtcccgattccggaaaaggtgccaagagcttagttgaactccttgatgagtctgaatgtacttcagatgaggaaatctttatctcacaagatgaaatacagtcatttatggctaataaccagtctttctacagcaatagagaacaataccgacagcatctgaaggagaaatttaataaatactgccggttaaatgatcacaagagcccatttgtagtggctgctgac

SEQ ID NO: 165822 - DNA, 1684 bp, Homo Sapiens
  misc_feature (897)..(912): n is a, c, g, or t
  misc_feature (1268)..(1485): n is a, c, g, or t
  misc_feature (1498)..(1539): n is a, c, g, or t
ggggtggggaaggatcgcaggcgagattacgaggcgaggctcgcgcgcccgcccccgccctggcccccagtgcccacccggtcggcccggcacagccatgatcaaggcgatcctaatcttcaacaaccacgggaagccgcggctctccaagttctaccagccctacagtgaagatacacaacagcaaatcatcagggagactttccatttggtatctaagagagatgaaaatgtttgtaatttcctagaaggaggattattaattggaggatctgacaacaaactgatttatagacattatgcaacgttatattttgtcttctgtgtggattcttcagaaagtgaacttggcattttagatctaattcaagtatttgtggaaacattagacaaatgttttgaaaatgtctgtgagctggatttgattttccatgtagacaaggttcacaatattcttgcagaaatggtgatggggggaatggtattggagacaaatatgaatgagattgttacacaaattgatgcacaaaataagctggaaaaatctgaggctggcttagcaggagctccagcccgtgctgtatcagctgtaaagaatatgaatcttcctgagatcccaagaaatattaacattggtgacatcagtataaaagtgccaaacctgccctcttttaaataaaaatgtaaaaaggccactcccaggtaaaatccagggggaagagtcatctaagtttaccatgcagttgttttaccaaaaaatagaggagaagagtcttaacttttgctcttggatttaagtcaaggtactgtatagaagttgtgtaaaatcagtatgaaagttcaatgttgctgttcttgctcagtgattttaaagaaattgagtagttcctatgtgannnnnnnnnnnnnnnnctaaactgcattcctgtgcccacctacggcatgcctctatgtattggctactacagtgttttaaaaagtgtttcagatatttctctaattatgtacaacctaaaatgttggtgttttgtatggatcacaagtgcagcattccttaattccttctgctatatgtcacacagttgttatttggagaaccaagtatgtattgcatgaaaacattatgacttttttctcttagtttaaataaactccaaggtaactggacttctaaagcacctttctgtttgcctgatatctactttagcaataattttttttacaaccctctgactcaacaaagtaaataaaagtatattttatcactnnnnnnnnnnnnnnnnnnnnnnnnnnnnnnnnnnnnnnnnnnnnnnnnnnnnnnnnnnnnnnnnnnnnnnnnnnnnnnnnnnnnnnnnnnnnnnnnnnnnnnnnnnnnnnnnnnnnnnnnnnnnnnnnnnnnnnnnnnnnnnnnnnnnnnnnnnnnnnnnnnnnnnnnnnnnnnnnnnnnnnnnnnnnnnnnnnnnnnnnnnnnnnnnnnnnnnnnnncagcggatgagcnnnnnnnnnnnnnnnnnnnnnnnnnnnnnnnnnnnnnnnnnntcagaacccggggcggaaggggcaaggagaggaagagacgagggcacagagtaagagaaagcaaacaggcaaagggagggcgagacgcaaacaaggcgaacacgacgcgaaaagaggaagccgagcgcgaaggagaaggagaggg

SEQ ID NO: 165823 - DNA, 479 bp, Homo Sapiens
  misc_feature (138)..(227): n is a, c, g, or t
ggtaccaggaacttcgtcacctccttgaatgctggcggttcatttcatgatcagtgttaagcattttcctccatgggaaggaagcatgggatatagaaaagcgaagggctgtcctttacaaattctggttctgcaacnnnnnnnnnnnnnnnnnnnnnnnnnnnnnnnnnnnnnnnnnnnnnnnnnnnnnnnnnnnnnnnnnnnnnnnnnnnnnnnnnnnnnnnnnnatctaccttcaggattgctgacagacagaatttgaaataaaatatgcaagttagctaatacaaaaagtagatgatccaaaaatggtagccactcacccttcacaaactgaagtccatggaccacggaagtcgagaattaatgtacacctgtatcatgtgtaggaaaccagaaatgtgttccttatttcttgttcccaaacaggattaactgtgaagactaatttataaatgtgaacctaagaaaactccaga

SEQ ID NO: 165824 - DNA, 415 bp, Homo Sapiens
gttctttaagtgactaaaaatgttgggctaaagccattaacttaagaatatgtcagtgtatcctttccaaaaagagtaatagttgtatactagtgtgctagatgagaagcgtgcaatatgctttaaagctatcaacaaaaactgacatattataagcaagcaatatcatagtaattggcagacttagctcatattctatacagcatcgattaaataggaaaacatttaatgctagcaaaaaataaatttagaaatatggcatgacatgaaaatacaatcttatatttacaccagcttttcacgtaatattttgtacctaaggtgatggggaactccattcagataataaaattctctttcagctagagaagttaacaggaataaatatatgaacaaaaaagctgcaaggataaat

SEQ ID NO: 165825 - DNA, 927 bp, Homo Sapiens
ggggggctgagtggaagcagatgcctgcacaagccaagtgtgtcttattgatctgtacaagctgatagaaggaccatctgctgaaatccagggctcctgagttggtgggtttgcttgtgaagcttctaggacaaggcgcagccagatggaagggagagggtccagggcttcctaaatgcagccgcatcacctgtcaactcgctgcagtttcagagacagtggaagctgctctttacctcaaaagcacaaagcagaattggcaacttcacttgtctcaagagctccaagatcctttggtctcgtgtcctttggcaccccgtaactggactggggacaaatttgttacgtgtttccaaggctacagacatggcgccatcctcacaggcctagctcatgtcatggatcaggtgctttgctggggggatacaatgacccatgtggtctgcgtcttctgccattggcttgaactgggcaccccctgaagtctccatctcagctgtatattctagtccaaattttcctggctcccctgctccctcccaggtcctgcacactgtctttttgccaacacctcagccctgtttgctatttcatgtctgcatggtacgagacaccccttcacggcatacactgccatggtatgtacatatgcatccacgtgtgtgtatgtgtagcatgtagctcattctgctcagcctctggcgccgttccacattgctcccagccccattgctgtcactgtcgtcccagatgtccttgccatggccacagacaatctgccgtctcctggaaacgctggggctgcccttcagagagctggcagccccagcagtcagggcctgctttgcagaatagaatgtgaacccaactcctgatggcctacttgacttatttaattaaagatgaaatcatgcaatgagcaaaaaa

SEQ ID NO: 165826 - DNA, 1391 bp, Homo Sapiens
ggatactcatctaggctgtgtgaaccagcccaagatgaccaacatccccacacctccacatctctgtcccctgtatctcttcctttctaccactaaagtgttccctgctaccatcctggcttgtccacatggtgctctccatcttcctccacatcatggaccacaggtgtgcctgtctaggcctggccaccactcccaacttgacctagccacattcatctagagatggttcctgatgctgggcacagactgtgctcatggcacccattagaaatgcctctagcatctttgtatgcatcttgatttttaaaccaagtcattgtacagagcattcagttttggctgtggtaccaagagaaaaactaatcaagaatataaaccacattccaggctgctgttttctctccatctacaggccacacttttactgtatttcttcatacttgaaattcattctgctattttcatatcagggtacagacttataagggtgcatgttccttaaaggtgcataattattcttattccgtttgcttatattgctacagaatgctctgttttggtgctttgagttctgcagacccaagaagcagtgtggaaattcactgcctgggacacagtcttataagaatgttggcaggtgactttgtatcagatgttgcttctcctttctctgtacacagattgagagttaccacagtggcctgtcgggtccaccctgtgggtgcagcacagctctctgaaaagcaagaacctccctacctattctaacgtttttgccctctaagaaaaatggcctcaggtatggtatagacatagcaagaggggaagggctgtctcactctagcaaccatccctccattacacacagaaagccctcttgaagcaaaagaagaagaaagaaagaaagcttatctctaaggctactgtcttcagaatgctctgagctgaatgctcttgtccctttcccaagaggcagatgaaaatatagccagtttatctatacccttcctatctgaggaggagaatagaaaagtagggtaaatatgtaacgtaaaatatgtcattcaaggaccaccaaaactttaagtaccctatcattaaaaatctggttttaaaagtagctcaagtaagggatgctttgtgacccagggtttctgaagtcagatagccattcttacctgccccttactctgacttatggggaaagggagaactgcagtggtgtttctgttgcagtggcaaaggtaacatgtcagaaaattcagagggttgcataccaataatccttgggaaactggatgtcttactgggtgctagaatgaaaatgtaggtatttattgtcagatgatgaagttcattgtttttttcaaaattggtgtagaaattga

SEQ ID NO: 165827 - DNA, 375 bp, Homo Sapiens
  misc_feature (238)..(252): n is a, c, g, or t
aagaaattatttaaatctacacagaaaaaaatatcaacttattaaaaactattaagagcactgtctataattcaaaatctttcaaacccaatcacaaagctctttgctgttttattgcccatccctgagtaaagattctatcatttgtaattttttaataacgtaaattttacattgataagaatgatgtttaacaatttttttgaaaatataaaataaaccctatatcattttagtnnnnnnnnnnnnnnntataaatgctctttgcaaagaccaccattcataaaaattgtaaatatttgtatgtcaatttctgacatcctttttactgggtaatttctgtttttatgccgttcatatatcgctcatttcctc

SEQ ID NO: 165828 - DNA, 487 bp, Homo Sapiens
gtctcatcttgaatccccagttattaactctactccgggtagaactcctcttcgagacaagttaaacattaatcccgaggatggaatggcagactatagtgatccctcttacgtgaagcagatggaaagagaatcccgagaacatctccgtttagggttgttgggccttcctgcccctaagaatgattttgaaattgttctaccagaaaatgccgagaaggagcgggaagaacgtgaaatagatgatacttacattgaagatgctgctgatgtggatgctcgaaagcaggccatacgagatgcagagcgtgtaaaggaaatgaaacgaatgcataaagctgtccagaaagatctgccaagaccatcagaagtaaatgaaactattctaagacccttaaatgtagaaccgcctttaacagatttacagaaaagtgaagaactaatcaaaaaagcaatgatcacaatgcttcattatgaccttctacat

SEQ ID NO: 165829 - DNA, 1120 bp, Homo Sapiens
ctttacaacaggcgtgatctggcaagaaccctgtcagagaaatgaaactattctaagacccttaaatgtagaaccgcctttaacagatttacagaaaagtgaagaactaatcaaaaaagaaatgatcacaatgcttcattatgaccttctacatcacccttatgaaccatctggaaataaaaaaggcaaaactgtagggtttggtaccaataattcagagcacattacctatctggaacataatccttatgaaaagttctccaaagaagagctgaaaaaggcccaggatgttttggtgcaggagatggaagtggttaaacaaggaatgagccatggagagctctcaagtgaagcttataaccaggtgtgggaagaatgctacagtcaagttttatatcttcctgggcagagccgctacacacgggccaatctggctagtaaaaaggacagaattgaatcacttgaaaagaggctcgagataaacaggggtcacatgacgacagaagccaagagggctgcaaagatggaaaagaagatgaaaattttgcttgggggttaccagtctcgtgctatggggctcatgaaacagttgaatgacttatgggaccaaattgaacaggctcacttggagttacgcacttttgaagaactcaagaaacatgaagattctgctattccccggaggctagagtgtctaaaagaagacgttcagcgacaacaagaaagagaaaaggaacttcaacatagatatgctgatttgctgctggagaaagagactttaaagtcaaaattctgaagtacagtttatattctgtcacaggattaattaattgccggttttcatactctagaaggctgaaactgatgtttatcttcattgacaaatttacccaccatctgtggtttttcagttgtttattttaaatgatatcgatcttacacattctgtgtataaagaccttaactccacaggacggacattttagagtttaaattattaaggctatcattcttttagtaatgtcatatttgcaaacttttttagttttggcctttaatttaaaaagcctaattttaaagtgctgcctgtgagtaactcttgaataaaaacaaaatataa

SEQ ID NO: 165830 - DNA, 539 bp, Homo Sapiens
acgcgtccgccgacagcggcgttgcgtctacaccatccctgctcatcagaacttagtgactggtgtcaagtttgagcctatccatgggaacttcttgcttactggtgcctatgataacacagccaagatctggacgcacccaggctggtccccgctgaagactctggctggccacgaaggcaaagtgatgggcctagatatttcttccgatgggcagctcatagccacttgctcatatgacaggaccttcaagctgtggatggctgaatagatgacaatgggaaaaggacttgaacctcaagctctctctaaggagctgttttcctcaaacgagaagaattgaagtgtttagttctatcatgttttctgccaattaccatgcatagaccctcagtagaattggatttccatgtcagcccccactccaggaaggcagcccaatccctaggtgatggggaacccctctcacggttgaaaatttattacctttttacgccctgccacgaactgtgtagacattgtttttattaatcttttgt

SEQ ID NO: 165831 - DNA, 987 bp, Homo Sapiens
  misc_feature (911)..(911): n is a, c, g, or t
ggggaggaagggtgggtggagccaggcttggcgggctgtgcgtgctcgcggtgggcggtggcggcggctgcctcgcgaaggttcgagatccgtcgcgtgcgggaggcgggccgcgatcttgcgcagggtcggtgtgggcgcaggctgcagcgccgcgactcgtgcgggtaggcgtctgcgctcggtttgagggctcggcgcggggtttcctgttccttcttctgcgcggctgcagctcgggacttcggcctgacccagcccccatggcttcagaagagctacagaaagatctagaagaggtaaaggtgttgctggaaaaggctactaggaaaagagtacgtgatgcccttacagctgaaaaatccaagattgagacagaaatcaagaacaagatgcaacagaaatcacagaagaaagcagaacttcttgataatgaaaaaccagctgctgtggttgctcccattacaacgggctatacggtgaaaatcagtaattatggatgggatcagtcagataagtttgtgaaaatctacattaccttaactggagttcatcaagttcccactgagaatgtgcaggtgcatttcacagagaggtcatttgatcttttggtaaagaatctaaatgggaagagttactccatgattgtgaacaatctcttgaaacccatctctgtggaaggcagttcaaaaaaagtcaagactgatacagttcttatattgtgtagaaagaaagtggaaaacacaaggtgggattacctgacccaggttgaaaaggagtgcaaagaaaaagagaagccctcctatgacactgaaacagatcctagtgaggggattgatgaatgttctaaagaaaaatttatgaagatggagacgatgatatgaaacgaacccattaataaagccctgggntgggaatcaagcagagaagccagcccaaaagaagaccccggaaattttgaagacttttaaaggtcggtttttgggg

SEQ ID NO: 165832 - DNA, 792 bp, Homo Sapiens
cggacgcgtgggtcgacccacgcgtcgaaatcacagaagaaagcagaacttcttgataatgaaaaaccagctgctgtggttgctcccattacaacgggctatacggtgaaaatcagtaattatggatgggatcagtcagataagtttgtgaaaatctacattaccttaactggagttcatcaagttcccactgagaatgtgcaggtgcatttcacagagaggtcatttgatcttttggtaaagaatctaaatgggaagagttactccatgattgtgaacaatctcttgaaacccatctctgtggaaggcagttcaaaaaaagtcaagactgatacagttcttatattgtgtagaaagaaagtggaaaacacaaggtgggattacctgacccaggttgaaaaggagtgcaaagaaaaagagaagccctcctatgacactgaaacagatcctagtgagggattgatgaatgttctaaagaaaatttatgaagatggagacgatgatatgaagcgaaccattaataaagcctgggtggaatcaacgcagagaagcaagccaaaggagacacggaacttttgagcaactttaaaacgtcgcttccggcgaactgtgactgtgcactgtggacaatactgactgttttccagtaacggaactattggtgacgctgcactattctaaactttgaccagactagctatccacactagcccttctaagctaaaggcaacttgcactcctcccatttctcatcctcccaggacttcattcaaaatcacactatgctttatt

SEQ ID NO: 165833 - DNA, 519 bp, Homo Sapiens
cctggatgacacccgcctaactgtgcaatgtaatgccgttaatcgcgctaatttaactccgatgtgactcctactccattgcttaccccaaagcatcagctaggctggagtgatttgttacaaatgagcaaaagatgagtccttgcttccctcagaaataaaaggagctcagctgcagcgttgcattgggcttcttggcctcccaactcttcccactcccagaatccagaagtaagctctgcatgttccccttcctgggaggaaaccaattgtcagaaggatgtatgatgaccccctcccctcccatccttcacctcctaagcagtcctggcttttcctcatcactcccctctacagtgcctggtagacaagtgctacattgcaagaacacaaacctcttgttaagacttgtcctgtagcttgatattacagatgtgctattagtgcaataaggtgaaggctgtctgcccagagaaataagtaatttatataagaaaataaatttcataaataaattgc

SEQ ID NO: 165834 - DNA, 2769 bp, Homo Sapiens
  misc_feature (576)..(576): n is a, c, g, or t
gggggggccactggtgtgacgtgtcccgcgcttggcgcagcaggaagcggcggcgaacgcggcctgaattcccggcgccggccccagctcctctgccgctgccgccatgctcgacttcttcaccattttctccaagggcgggcttgtgctctggtgcttccagggcgttagcgactcatgcaccggacccgttaacgcgttgattcgttccgtgctgctgcaggaacggggaggtaacaactccttcacccatgaggcactcacactcaagtataaactggacaaccagtttgagctggtgtttgtggttggttttcagaagatcctgacactgacatatgtagacaaattgatagatgacgtgcatcggctgtttcgggacaagtaccgcacagagatccaacagcaaagtgctttaagtttattaaatggcacttttgatttccaaaatgacttcctgcggctccttcgtgaagcagaggagagcagtaagatccgtgctcccactaccatgaagaaatttgaagattctgaaaaggccaagaaacctgtgaggtccatgattgagacacgggngggaaaagcccaaggaaaaagcaaagaatagcaaacacaaaagggggccaagaaggaaggttctgatggtcctttggctaccagcaaaccagtccctgcagaaaagtcaggtcttccagtgggtcctgagaacggagtagaactttccaaagaggagctgatccgcaggaagcgcgaggagttcattcagaagcatgggaggggtatggagaagtccaacaagtccacgaagtcagatgctccaaaggagaagggcaaaaaagcaccccgggtgtgggaactgggtggctgtgctaacaaagaagtgttggattacagtactcccaccaccaatggaacccctgaggctgccttgtctgaggacatcaacctgattcgagggactgggtctggggggcagcttcaggatctggactgcagcagctctgatgacgaaggggctgctcaaaactctaccaaacctagtgcgaccaagggaacactgggtggcatgtttggtatgctgaagggccttgtgggttcaaagagcttgagtcgtgaagacatggaatctgtgctggacaagatgcgtgatcatctcattgctaagaacgtggctgcagacattgccgtccagctctgtgaatctgttgccaacaagttggaagggaaggtgatggggacgttcagcacggtgacttccacagtaaagcaagccctacaggagtccctggtgcagattctgcagccacagcgtcgtgtagacatgctccgggacatcatggatgcccagcgtcgccagcgcccttatgtcgtcaccttctgcggcgtaaatggcagtggggacacatctcactcaatcttgccacagatttccttctggtagttcagcagcacatggcttcaggtgtcctcattgctgcctgtgataccatttcgtgctggggccgtggagcagctgcgtacacacacccggcgttcgagtgccctacaccctccagagaagcatggtggccgcaccatggtgcagtttgtttgaaaagggctatggcaacggatgctgctggcattgccatggaagccattgctggcacgtaaccaaggctttgacgtggtgctggtggacacggcaggccgcatgcaagacaatgcccctctgatgactgccctggccaaactcattactgtcaatacacctgatttggtgctgtttgtaggagaagccttagtaggcaatgaagccgtggaccagctggtcaagttcaacagagccttggctgaccattctatggctcagacacctcggctcattgatggcattgttcttaccaaatttgataccattgatgacaaggtgggagctgctatttctatgacgtacatcacaagcaaacccatcgtctttgtgggcaccggccagacctactgtgacctacgcagcctcaatgccaaggctgtggtggctgccctcatgaaggcttaacgtggctcttgcccaataccaaatcgccgctttccccacaagcccttcttcctgtatcaagaatgtgctttagagtatgtgagcaacctgtcttcagtgtagtacaaaggcagagtgagggggcttgtggctccttccaaccccactccccgttcagcacagccgccatttgcaaggaaggcctaatcatgttacaatcactgcccactgaccctctcccagcgggcctcccccttcctactcaggcacccccttcactctgcctacagactcagtcttattacagctttgaccaatggttggaacccaacaccagagctttgctaataattagtgtggtcaagagccgtctgagcctaatgagtcccagctgcattaggttaagagactcttccagagccagcgccaggtcttgaatggcacctctccctaggatacacagcctgcaggtccccaggacctgggatgacacccgcctcactgtggcagtgtattgcctgtaaattgctgctaaatcctaattctgatgatgactcctactccatggttttaccccaaagcatcagctaggctgggaggggatttgttacaaatgagcaaaagatgagtccttgcttccctcagaaataaaaggagctcagctgcagcgttgcattggggctttcttgggcctcccaactttttcccacttcccaggaattccaggaagtaaaggttttgcatgtttcccc

SEQ ID NO: 165835 - DNA, 468 bp, Homo Sapiens
  misc_feature (41)..(41): n is a, c, g, or t
  misc_feature (46)..(46): n is a, c, g, or t
  misc_feature (69)..(69): n is a, c, g, or t
  misc_feature (120)..(120): n is a, c, g, or t
  misc_feature (291)..(291): n is a, c, g, or t
ggacccccaaccccaatggtttaccccccaaaaagcatcangctanggctgggaagtgatttggttaanaaaatggagcaaaaaggatgaattcccttgccttcccctcagaaaataaanggagctcagctgccagcgttgcattgggccttcttggccctccccaactcttccccactccccagaatcccagaagtaagctctgcatgttccccttccctgggaggaaaccaattgtcagaaggatgtatgatgaccccctcccctcccatccttcacctcctaagcagnccctggcttttcctcatcactcccctctacagtgcctggtagacaagtgctacattgaagaacacaaacctcttgttaagacttgtcctgtagcttgatattacagatgtgctattagtgcaataaggtgaaggctgtctgcccagagaaataagtaatttatataagaaaataaat

SEQ ID NO: 165836 - DNA, 447 bp, Homo Sapiens
  misc_feature (362)..(362): n is a, c, g, or t
  misc_feature (390)..(390): n is a, c, g, or t
ggtggtcaagagccgtctgagcctaatgagtcccagctgcattaggttaagagactcttccagagccagcgccaggtcttgaatggcacctctccctaggatacacagcctgcaggtccccaggactgggatgacacccgcctcactgtggcagtgtattgcctgttaattgctgctaattctaattctgatgatgactcctactccattgtttaccccaaagcatcagctaggctgggagtgatttgttacaaatgagcaaaagatgattccttgcttccctcagaaataaaaggagctcagctggcagcgtttgcattggggcttcttgggcctcccaactctttcccacttcccagaantccagaagtaagctctgcatgtttcccntttcctggggagggaaaccaattgttcagaagggtgttttggatggaccccttccct

SEQ ID NO: 165837 - DNA, 474 bp, Homo Sapiens
  misc_feature (20)..(20): n is a, c, g, or t
  misc_feature (435)..(435): n is a, c, g, or t
  misc_feature (453)..(453): n is a, c, g, or t
  misc_feature (458)..(458): n is a, c, g, or t
tttattttcttatataaatnacttatttctctgggcagacagccttcaccttattgcactaatagcacatctgtaatatcaagctacaggacaagtcttaacaagaggtttgtgttcttcaatgtagcacttgtctaccaggcactgtagaggggagtgatgaggaaaagccagggactgcttaggaggtgaaggatgggaggggagggggtcatcatacatccttctgacaattggtttcctcccagggaaggggaacatgcagagcttacttctggattctggggagtggggaagagttggggaggccaagaagcccaatgcaacgctgcagctgagctccttttatttctgaggggaagcaagggaatcatctttttgctcatttgtaacaaatcactccagcccagccgatgcttgggggtaaacatgggntaggggtcatcatcaggnttggntttagccgcattttac

SEQ ID NO: 165838 - DNA, 747 bp, Homo Sapiens
  misc_feature (637)..(700): n is a, c, g, or t
gggagactgggttgggggaggggttcaggcctgttccccgcggctgcggcagcaccagggccggccgccaccgcctctagaacgcggaggaggtgggtcctgggaagcgggatgtccatcgctccagcttggtggtgaatgctgaggagagtcactgttgctgcagtctgtgccacccggaggaagttgtgtgaggccgggcgggagctcgcggcgctctggggaatcgaaacgcggggtcggtgcgaagactctgctgctgccagaccctttcctattctggccatgcctggaaggaacaaggcgaagtctacctgcagctgccctgacctgcagcccaatggacaggatctgggcgagaacagccgggttgcccgtctaggagcggatgaatctgaggaagagggacggagggggtctctcagtaatgctggggaccctgagatcgtcaagtctcccagcgaccccaagcaataccgatacatcaaattacagaatggcttgcaggcacttctgatttcagacctaagtaatatggaaggtaaaacaggaaatacaacagatgatgaagaagaagaggaggtggaggaagaagaagatgatgatgaagaacattctgggagctgaaatagaagannnnnnnnnnnnnnnnnnnnnnnnnnnnnnnnnnnnnnnnnnnnnnnnnnnnnnnnnnnnnnnnactgaggataatgaattggaagaattagaagagagagcagaagctag

SEQ ID NO: 165839 - DNA, 501 bp, Homo Sapiens
acttgtcatgcccagctgctgtccacttctccacatgagtcttccagatgacatctattgtgaccatctccaccccctgtgtaaatgctccacgctgggagtccacaaaacacagtctgacttagagattctctggcatgactctcttccccactgtgtacactgactgccttagatgtaggcctcttgtccggggcccttcctggccagacccctgaagcagcctctgaggagggtggtaagaatggttccctagagcccagttacagagtccgcgtgtagaaatagaacgttcaatttctacaaccatcccaatgcacaactgtcaactgtgcttatagaccacctccagacctgatgggagctgccacaccccttttaacttttgccaggctgtaccatgccctctagtggtaggactaggacatcacaattgtggtgcagagtattagccaagacagctctcaattagggttgccttctttaagatcgtgggtagga

SEQ ID NO: 165840 - DNA, 312 bp, Homo Sapiens
ataaatggtggggcccatggaaatcaaatgctgaatatggtacagcaagggaaaaggtccagcttttctctccctttgaggggctgattaacatcgacattaatccacaattacaagacaaggactagatcacaggtttgttcattcatatttaaaccatgtgctacttgcaccaaaaatcccacccccctccctcgcccctttccattcatgtccagttagagcattttacaaggtgcagcagattttattcgagtcattgcaacttcttttcctttttcttctcttcattagactcgtgtagaattgaac

SEQ ID NO: 165841 - DNA, 183 bp, Homo Sapiens
atcgaaggccaaaattactgcatactgagggtcatgttccaacatcactgaagccttcataacatcttttttatgcactgggccaatgttaattcctgcatagggcacttctgatgttttcagaaattccagtagagcttccaaagaacccaggaagtggtgaatatgattttcgatatatat

SEQ ID NO: 165842 - DNA, 1376 bp, Homo Sapiens
ttacttggtaaagtcctcaaagtagattttatttatacatttcttcaaatgattgtggtattttaaaaaatctctcccaaatttgatgacatagggacagtggtgagaacaaagtatccctaaaggaaacaaatatcgattggtgctttcctagctcactgagctaacactcagaagccaatttattctataatcctaaagaaccttaaatgtgggtttgtttgaattggccttctgagaatcattgaaataaaggaaatattacggaaaagagattagtttccaaaaatgtgctgtctttgaaaataagtcttcagacatgtgtgtcggaaaagatctgcaaagcttggtacagtgttaatgtgtaaagagaaccaatcacctccatggactttaaaactcaaaattatctatgaaatactttaaatgacatggcattaccaacattctttaaagcatttcatttaaaagaaaaatgtaagactgttctcacccttttgaaaagacctaatccctttctaaaccaaaagtataatttgcaagagaaacaacattacaattcactggtaaattaagatttctgaagttgtaagaaatggggccaaaacaagtcacgctcaaaaagggatggttaacacaagaaatgtgctatgagtaaagtgcatgaaagaaagcctgctcagctaaatgaagtagacaaagatcagaagtcaagggtcattcgccagagcggcagcaggctcgaaaaccacactgcaaattctggcatccactggcggtatcagcatgaggaccgttaatgttgtcacagtagtaaaagtattcatcattcagagaaggacatgctgaaaccaaatcctgcaggcctgcaccagttatagtaagacaaccagagagattaaggtgctccaaataaggcagccctcctcccagagtcaaaaccctgagaccatggtctgtgatcggataacatccagataaactgagaaacagaagtacacgtccagtctcttgatcagatttttcactcccaaagtaaattaagtcttttcccctaggcaatctagtccttgctgcttttctacacattgcagaagattctgggagtgatgacatagttcttaaagctgttcctgtacaacaaaatgagtgaccacaatacgcaaaggctggagaagcacaatgctgctgccaacagacactagtccttagtccaacaatgtccttactaaaacaaccagaggtggaacaactaaagttggatgctgtttccattaaacaaaggctttcaacatttctatgtctccattccacagtatcttcaatatcagccaaatcttcagcatctaacatccacacataagtgtagaagtgac

SEQ ID NO: 165843 - DNA, 1571 bp, Homo Sapiens
  misc_feature (106)..(106): n is a, c, g, or t
cgctgtacgcacggcgcaacagccgccgcacggcgggagattatcgcccacactaccgatgtgtgaggtgagtatatgtgctgcggtgcgtgtgagcggcacttcnccaccgtcgtgagagagagtgttattgtggggtgcgcgccgttgtcggccccgcgcgttttctattttcgtccctctgtaacaacatggggggggatgtcacactgggggcgcctccgacgatataagttattggcgggggggtgcgcccgaggagatatctcacacagcgctcccccgcacgtggtttgccacaacccgggggaggtatgtatctggagccccgcggcgtgtaaaactgggtcgttgtggagtctcttctacatccacgccccgagggggtcacaggaagaggtcttgtcgggaaataactccccgagggctcgtcgcgggtaccctttcccgtgtctccccgagaccaaagtttgcgggggcaaaaggggcccaaccgcggtgggggtgggcccccgcccagaacctgtgggaggttcccagcatgccggggaagccccagcgaagcccccggggtcggaaaattctgccaggaaagtccgcgggccttgccgcagggatagttagggctgaataacttttcacggttacccgtgcccggtgagcaccttcaccttttgggtctgtccccagctcacaagccacactcttcagcacgcgctctacgttgtcacaggcactgcccaggccgtagtgctgcacgtacccaaagcgctggtgtttgttgagggtgtacagcaggtagtcagccatggtctcctccccgaccaggtggtccagcaccgttccacacagggccagcttcaggcctgtctccacactttcaatccgaggagccagcacgccaggagtgtccaacaggaacatcaggggccgctcagagacctgaattttggacatcacagctctggtgatcccaggctcgccacccaccctggtggctttccctttcctgaggtgctgcctccggagggagttgatgagggaggacttgcccacgttggggaccccaatgaccatgatacagtactccaggttctcttttcggtggtagcggtggcttctcccaatcagttcagtgaccatcgggatgatctgcttgacattttcatcctttacacagttggtaaaaatgacattttttaggccttctccttctaagtgttgcataattttctgctgctctgtaagatccgccaagtccatcttgttgaggaccagcaagtgaggcttaagcccaagggtttcctgaaacagagggttgcggcctgaaagtgggatccgggcatcgtggacctcgatgatacagtccaccagcttcaggctgctctgcatcttcttcagccccttggccatgtggcccgggaaccagcgcgccacgtcgcgaccgcacagggggaagttctcccgccaggcggcctgggcggcgctgcacagcgcgcgcggggtcaatctcatggcggcaccgtccccggaaacgctcccgcagctgacctcctctgcgccgctgcccc

SEQ ID NO: 165844 - DNA, 215 bp, Homo Sapiens
ccgttctactttctacacgtttatcaatatcaccatgctgaagctgaacaaaccgagcactaatggcagcaatatagctctgctgattggagaaagcaactcgcccagcacctttggggtattttagctcaggatctgtatcaattcctgcataacaaactccaccatatagccggtccatgatcatagcaagttccacagcccttaatggccta

SEQ ID NO: 165845 - DNA, 1281 bp, Homo Sapiens
  misc_feature (44)..(44): n is a, c, g, or t
gtaaattaatataaaagttggggtatactgtctggcccaaaccngctgcctcataagtcattaacccaaacccattataggtaatttgttcagttcaatgtttacaattccttatggaaaaaattagcaacacacacatttaaaacgtgttcatttacctttgcgtgagtgcttaaaatacatatttctatttcaagatgacatttaaaaattattctaatatatcagcagcaaaaatataatttgcaattacaaaaaaataaactagaatccttaagttattctcatgtgtacagttgtgattctttaataaatactattatgcagctctatagtttaagctttctggattaggtttaaacacatgcatatatattgtcaattgagggaagctttacaagttatattccatgcactttttggacagagttctaacagagccagccagtccacaaaacaggcagacaaaagttgaattaactggggcaaataggactcttatgcaacatccaaaatatctgacattctgcagcaaacagggagtaccttcaggattggcctgttatcttctttagaactaagttcatcttaaaaatttaagaaggtggacatttcaacaccatcaagtgcatttaggtgacatgtttaagttaacttgacttccttgaatgacctagttagtaaactagtcactagtaattcggtcaccaagcaaatcaagcctgcaagaaaggaagccaatattcaaaatgccatgttaccatctaaacccatacaaattagtttatttccaacaataataggtaactttaataataagacatctaactaaagcaagctcctccaacaagaccaagacagcatctcttcttctaaggcttaggttttgcccagaattcccgatacatggaatagcccataccaacagtcattgctcctacaacaaagccttgggctgccacacgcatgtggatcagatgaatggacattttagtatttcccctgctcttcagtttatataatccatatgcaacaattgctgcaaaacccgctattccaacgggtacgaatggtgcctctttagcttttcgaatgagttttgatccctgatcttcctcatatgaaggaagggaaacacctgtgtctgttgacatagtgattgcttgaagaatctccctagagcgagaaaacctctcacaccccaaccggcttccgatccctgcaggcgcacccagtcctcccggcttctccccacccacagccgtcccgtggggtaggagg

SEQ ID NO: 165846 - DNA, 195 bp, Homo Sapiens
cggcccctatttagaagttcaatagcaacagtcgttgctcctacaacaaagccttgtggctgccacacgcatgtggatcagatgaatggacattttagtatttcccctgctcttcagtttatattatccatatgcaacaattgctgcctggggtttagcgtctgttgctagtgctattgaaacttctaaaactag

SEQ ID NO: 165847 - DNA, 633 bp, Homo Sapiens
ccggttggggtgtgagaggttttctcgctctagggagattcttcaagcaatcactatgtcaacagacacaggtgtttcccttccttcatatgaggaagatcagggatcaaaactcattcgaaaagctaaagaggcaccattcgtacccgttggaatagcgggttttgcagcaattgttgcatatggattatataaactgaagagcaggggaaatactaaaatgtccattcatctgatccacatgcgtgtggcagcccaaggctttgttgtaggagcaatgactgttggtatgggctattccatgtatcgggaattctgggcaaaacctaagccttagaagaagagatgctgtcttggtcttgttggaggagcttgctttagttagatgtcttattattaaagttacctattattgttggaaataaactaattttttccataagaattgtaaacattgaactgaacaaattacctataatggatttggttaatgacttatgagcaagctggtttggccagacagtatacccaaacttttatataatatacagaaggctatcacacttgtgaaattctcttgtctaatctgaatttgcattccatggtgttaacatggtatatgtattgttatta

SEQ ID NO: 165848 - DNA, 1074 bp, Homo Sapiens
ggtactcaggtcagtatctaatataagctcggagtttggacggagggtctggacctcagctccaccaccccagcgacctttccgtgtctgtgatcacaagcggaccatccggaaaggcctgacagctgccacccgccaggagctgctagccaaagcattggagaccctactgctgaatggagtgctaaccctggtgctagaggaggatggaactgcagtggacagtgaggacttcttccagctgctggaggatgacacgtgcctgatggtgttgcagtctggtcagagctggagccctacaaggagtggagtgctgtcatatggcctgggacgggagaggcccaagcacagcaaggacatcgcccgattcacctttgacgtgtacaagcaaaaccctcgagacctctttggcagcctgaatgtcaaagccacattctacgggctctactctatgagttgtgactttcaaggacttggcccaaagtaaagtactcagggagctccttcgttggacctccacactgctgcaaggcctgggccatatgttgctgggaatttcctccacccttcgtcatgcagtggaggggggctgagcagtggcagcagaagggccgcctccattcctactaaggggctctgagcttctgcccccagaatcattccaaccgacccactgcaaagactatgacagcatcaaatttcaggaactgcagacagtacaggggctagataacccacccaatttccccactgtcctctgatcccctcgtgaaagaacctttcagcataacgcctcacatcccaagtctatacccttacctgaagaatgctgttctttcctagccacctttctagcctcccacttgccctgaaaggccaagatcaagatgtcccccaggcatcttgatcccagcctgactgctgctacatctaatcccctaccaatgcctcctgtccctaaactccccagcatactgatgacagccctctctgactttaccttgagatctgtcttcatacccttcccctcaaactaacaaaaacatttccaataaaaatatcaaatatttacca

SEQ ID NO: 165849 - DNA, 1075 bp, Homo Sapiens
  misc_feature (528)..(552): n is a, c, g, or t
  misc_feature (860)..(920): n is a, c, g, or t
  misc_feature (993)..(1003): n is a, c, g, or t
ggggctgttacttgatcttaggaaaacagcacagtttaagatattgtgaattctgacttatactttattaaatgctgtaaatctaaatagatcctgttggatgtgatgggtctagtccagtttatttaagttcatgtttcactgtttgcactttgcattgaacaatgggtttattcgctgatgtaaacggttcgagtgaagaattaatgcagtaagtatgacaacacatacacacttgcctctccccatctccagaagaggggagcagagtccgagcttatctaaatatgaatgtggccacaaagctgtggaaggtgacaaagcttaaacacctttgccctggctctgcattgtcacctagagagcaagaggtctatagaaacatcatgtcacatgaaacgattctctgctttttggttctgaacttgaagtccctaaactgcaaaatctaagagttgggtggttattaaaatgcttttaaaaagtcaactgtggcaccaattctaatgtaatccaacttgtgactgnnnnnnnnnnnnnnnnnnnnnnnnngtgtgtgtgtgcgcgtggcactgggaaaagtggaaacaaacatgtattgaaatacatattggaaataaaaatggtttgagcgtcagtgatattctcccagaatgtacttatcttacctcggcatgtactgtactcactcagtatttgtatatgtcgctacaatttagattgtaaactagcgacattttactgcgcccctctgtttttaacgtatatatgccttgctccgaattatttggtttaaattaaaaccaccttgaaggcctcgtagccttctccctttacagcccacaccctaactccccaannnnnnnnnnnnnnnnnnnnnnnnnnnnnnnnnnnnnnnnnnnnnnnnnnnnnnnnnnnnntatttcccacccaattccaaagaacggaccgtcaattagaatcccacatcgctacatcctatatgtttatctnnnnnnnnnnnacaaagattataataacatcccctcaccccctttacgtcatccctgagacataccccgcaccccatctctcg

SEQ ID NO: 165850 - DNA, 825 bp, Homo Sapiens
  misc_feature (102)..(102): n is a, c, g, or t
gggagaaaaaacaaaacatattaatggtattgaaatgtgttagtagtctggctgtgtgcccaaaattctgtttcgcagcaaaagtgaagacctgtatgtaanagaaagtataacaattatttctttgtattttaggggctttaaccggaacatcgtctagctggtgttaggaatgtttgcttaatttccagacttttttttaaaaacacatcgtgggttttttgaggctccaacctgattagtgcatggtcagccctcaatgaaggctgaggcatctctgactgacgtgtttttgtttggttttgctttttaaaatcatgtatttgctacaaagcattgtacttgtctcaatgggaatggtgtaaaaaaaaaaaggccttatgtgatctgtatcatagtttaatacacgaatcctggaaaaacacccctcttttcccccactataatttaaccttgtccggcccccccttgggccccttcgaaaaaattcttctccctaaaaacccatctccttttttgcccccccacccgggtccccaaattacgggctaatgtcggaccccctggtttcccccaacctttcgctctcccctttaagggaaaaatttccttgggcctccattaaaacaaaggggcgccttggggaatttttccccccccaaattaaaaacaaaacaccgccccgggggcgggcaacacccccgcaaaccccttttcttgtaaaacccaaattcccccaaaacggggaaattttttggagaaggggccaatttacacggggggacctcttatccccacacggggaattttccaacccccctgcga

SEQ ID NO: 165851 - DNA, 863 bp, Homo Sapiens
  misc_feature (174)..(174): n is a, c, g, or t
tttgtcgccaaggggcgccagaggggggtgtgaatccgggcggcagggaaattaagggtttcattcctgcacgcctttttgcggagcggagttcccctttgcggggcaaaaaagggtcttataggaaattatccccccatttccttgccgggagggtgtgcccggggcggcggngaagaagacttggaatatcgggagggtgggctgtggacttccctgggggtaagattcccagggactgacgcttccagagcggcccattctgggattttggtcaggaaacgggcgggattgtccccccgggcggtttttttaattggggggggaatccaaaccccctaggtcatggcccaggggtttccttaggagaacaggtaatggcccatgtgccctttaccttacggggcccggcgcgcccaaacgaaatggtgatagaaaaggttctggaaggccgaagggcggccgaccaagggggggtggtggggagcgaaagtggtggggggcgaaaaccactcaccctcgcactgagtggacctgtaccacatcaaacagtctcctctcctccacgcctccggggtctgggaagtctcacctcactgatttcacgtagaaaagaaggcggaggcccagcagccgccgccgccagctccccaacgtgcaaatccatttcagtttgaccgtgaacccccttccagttcgtgtcctcctccgcccccgcccctagctcccgctgctgcgcttccaacggggttctcgggtcatttcctagcgccggtcacactggctggcctcctcccctcaacatctcctcctccggctgcagagggggcaaggggaaaagagggaggaaaaaaaagcccccc

SEQ ID NO: 165852 - DNA, 891 bp, Homo Sapiens; identical to SEQ ID NO: 96419
  misc_feature (641)..(706): n is a, c, g, or t

SEQ ID NO: 165853 - DNA, 927 bp, Homo Sapiens
  misc_feature (754)..(770): n is a, c, g, or t
  misc_feature (824)..(871): n is a, c, g, or t
gggcagcctcggcgtttccgccatgcgtctgcagtgctccgcgcgctcttgacgtccggagcccctggagtaggcgcttccggccattcatactgcagtcggtcagtgttcggttgaaggattctgtgtgctgtcggacccagagggtgacggcgccgctaggatgaagctcgtgagatttttgatgaaattgagtcatgaaactgtaaccattgaattgaagaacggaacacaggtccatggaacaatcacaggtgtggatgtcagcatgaatacacatcttaaagctgtgaaaatgaccctgaagaacagagaacctgtacagctggaaacgctgagtattcgaggaaataacattcggtattttattctaccagacagtttacctctggatacactacttgtggatgttgaacctaaggtgaaatctaagaaaagggaagctgttgcaggaagaggcagaggaagaggaagaggaagaggacgtggccgtggcagaggaagagggggtcctaggcgataatgtctctcaagatttcaaagtcatatgagatttgggatattttttgtacaggttgtgtttgtttatgtcagtttttaataaacataaatgtgggacagagctgtctatttagtatatcaaagttttagtagtttcctccacattcacgaaattaccacagtgagagctaagcatttctactgggcagtttcatttttagttgatcaggtttcaagttctttgaactaaaannnnnnnnnnnnnnnnnactgactgacataacggttacacactaacgacagcagagaaaccaacgcagcgnnnnnnnnnnnnnnnnnnnnnnnnnnnnnnnnnnnnnnnnnnnnnnnnagcccgccacaacagcagccccaccgaaaccaagccgcccaaccccaccacaccag

SEQ ID NO: 165854 - DNA, 311 bp, Homo Sapiens
ggaaaatgactaatgaagctaattaaaagaagcattcaaatctgctttctaccctcattaacaattagcagggcactggccagagtttgtaccctgtgttttaccttaacaacattctatttgctctttgtatatttaagtgttgtaaggaaacgtgtttcaatcaaaactgaccatgagataaaggaaagagatgtggcttttgtgatattctatcacaaacacttattgtatctctgtaaaatacaatgtatgtatgcatgtaagtgttttttgttcccaatggttggctactcccatgggccaaagga

SEQ ID NO: 165855 - DNA, 898 bp, Homo Sapiens
  misc_feature (868)..(868): n is a, c, g, or t
gagcattctgggcgtgcggagttttggaatagaggacaaagataagcaaattatcactttcttcagcccccttacaattttggttggacccaatggggcgggaaagacgaccatcattgaatgtctaaaatatatttgtactggagatttccctcctggaaccaaaggaaatacatttgtacacgatcccaaggttgctcaagaaacagatgtgagagcccagattcgtctgcaatttcgtgatgtcaatggagaacttatagctgtgcaaagatctatggtgtgtactcagaaaagcaaaaagacagaatttaaaactctggaaggagtcattactagaacaaagcatggtgaaaaggtcagtctgagctctaagtgtgcagaaattgaccgagaaatgatcagttctcttggggtttccaaggctgtgctaaataatgtcattttctgtcatcaagaagattctaattggcctttaagtgaaggaaaggctttgaagcaaaagtttgatgagattttttcagcaacaagatacattaaagccttagaaacacttcggcaggtacgtcagacacaaggtcagaaagtaaaagaatatcaaatggaactaaaatatctgaagcaatataaggaaaaagcttgtgagaatcgtgatcagatttacaagtaagggaagcccagttaacatcttcaaaggaaattggtcaaatcctatgagaatggaacttgatccattgaagaaatcgtctaaaagaaattgacataatctctctaaaataatgaaacttgacaatgaaattaaagccttggatagcccgaaagaagcaatggagaaagatatagtgaactggaagagaaatgggaaagntttcaaggactgtgagcacttaatgctatt

SEQ ID NO: 165856 - DNA, 406 bp, Homo Sapiens
  misc_feature (219)..(219): n is a, c, g, or t
acttgggcggaggaactctagatgtgtctttactgaataaacaaggagggatgtttctaacccgagcaatgtctggaaacaataaacttggaggacaggacttcaatcagagattgcttcagtacttatataaacagatctatcaaacatatggcttcgtgccctctaggaaagaggaaatccacagattgagacaagctgtggaaatggtcaaattanaatctgactcttcatcaatctgctcagttgtcagtattactaacggtggaggagcaggacaggaaggaacctcacagtagtgacactgaactgccataaagacaaactttcctcagcagatgaccatcgcgtgaacagtgggtttggacgtggcctttctgataagaaaagtgtagcaaatgacggg

SEQ ID NO: 165857 - DNA, 551 bp, Homo Sapiens
agcggcagacgatgtcaaagccatgccatttaggattcttaaccaaatcagacctgtctgactcaccccttatggtggtttgcctataaacttatcaatagttttttttcctctggccctgtttcttttaggaaataaggttcctaattcccaatcagggccacatccataagatcatcatcttcctccccaatcataaagtctgggctgtgccttgagggtctgtctgcagataagattgtgttacttgtcatagacaaggactggtctgaagagatgggtgatttggaccaactctctggcttgatgctatgagattttttcttgtctcggtctttgtcccggtctcgggccctatttttgtcttccttttggctttatttttaaactgctttagatattattgctcagtgtttgtgaactttcctagttctctatgttgttagtgcagccagcacccagtggggacctactagaaaaaggaactggcatgcacacgtgcccagcaggaaaagcttcgtcttcacatcgtctgcgctgggtcggagctc

SEQ ID NO: 165858 - DNA, 2266 bp, Homo Sapiens
gcactgtgatattaaattagaaataatttatcaaaatcagacctctcctaaaagaataagaaattcattgtttggcccatcctgaaaggtgaggtggcgagacagtggggtgcctccgtgccgcttcgtgcagcagcaagttcagcctgagatgctggctgtactcagcctttgcaattttgtagatgtagcttaggacgtgagttatttcttccgcagactggccaagagccaggttctaagcttggacctaaggtagaaagctgcccatcgggggccctagctcagccccaccaggccctctgttgggcctgcacacagctctgtggctagaacactccaaggcccttcggtacccatcagagtgggccccttgccaggtggcttttcagttacagagtccagtggaccattttgtagaaccatgcagctccctgcggaaggtggggtagggtgggaaagaggagcaggtctggaggtttgtggaacccagtcccctgcagaatctgtaaaacctaataaatcatggttgtggccattctcacggtggtgattgtgattagacgacccccgggaagcccagacactcggggcctggagttcctccccctgcctgacctagaagcagaaccgttttcagcgctctgccctgttggctttaaggctttgtcttaatttaacggaaaaagatcctcccgggtttaatttctctctttcttgagtggacttgtttccctataattaaaagaggtggtgagtcctggggcagcttccgcgcctccctgtccacatgctaacagatcaggacgcccccagcacccctgcctgcttttgctggtggcagtgacgggaccccgactcctcactctcgggccgcagacaatgctgtgagcaagtgtggccatgggcacagaatgtccctttggacgccgctgctgggggctgccaggggccctctggggtcgtgctttgaggcccgtccggttcacgagggggtccgggcagcactgactgcctccgacctgcaggaggcgtaggagcggccctgcgggccctttcacggcagctgctgctgtatagattttgtctccactcagtgacgtgggatttttttgtcttccttttggctttatttttaaactgctttagatattactgctcagtgtttgtgaactttcctagttctctatgttgttagggcagccagcacccagtggggacctactagaaaaaggaactggcatgcaacacgtgcccagcaggaaaagcttcgtcttcacgtcggctgctgccatccagaagaggcctggagcctcacgccgtcgaggctgctctcaggcgtccgttccgggcgaggcttgtgctgcaaggaagggcaccagcatgcaggctgccactggagggtccgggtgctgcgggcagagttcagcgcttgtccaccctcccttagctctgactcagtgcatcctactgtggggacatctcgtgaggggacacgaaatgactgatctcaccctttcccagtattcagagctgtgaacccctgtggcgcaggactggcctgtgtctgttattttggttgtaaatcattctcctgtggaattggcaaaagctacatttttactgtccttaccagcaacagtttgcgtcgtcacatgctgtgagtgtgggctgtggtgtgtccgtgtgtgtacatatgtgtatatgtatatatcacgcagcaggagtgtcattcatgctgctgtcccctggtgaagtgacaagtacaattaaaggtggctctgaaatggcctctggtttcttgggagtcgggcagggacctgcaggaggctttcccagcaggtgcacagaaggaagcgctgagcccactgtgtgcagagggtgtgtgcccagggcactgccacggcccccaccagcattggcctctgctctgcagggtggggtgcccatcctgggggctgtgtgtcatgctcacctgacccaggtgtgtgtcccggtgtgaaatcgaggaggggactggaagcccttccctgccttgaaacatgaaagctgattttctgagcagcagatacggtcagtggcaaagctgcatctgaagggcggccctgggaaggggcccctgtgctggccccggggtccgccccataggagtccacacagccaccacctccaaaaaggggctgggccccgggggtcctgcaaggcgggaaccttttgtggtaaagtttgcttccccgggtaaattgcggcaaaaatgctttctatg

SEQ ID NO: 165859 - DNA, 388 bp, Homo Sapiens
  misc_feature (227)..(227): n is a, c, g, or t
  misc_feature (231)..(231): n is a, c, g, or t
  misc_feature (268)..(268): n is a, c, g, or t
  misc_feature (333)..(333): n is a, c, g, or t
  misc_feature (339)..(339): n is a, c, g, or t
gctgtggtgtgtccgtgtgtgtacatatgtgtatatgtatatatcacgcagcaggagtgtcattcatgctgctgtcccctggtgaagtgacaagtacaattaaaggtggctctgaaatggcctctggtttcttgggagtcgggcagggacctgcaggaggctttcccagcaggtgcacagaaggaagcgctgagcccactgtgtgcagagggtgtgtgcccagggcntggnccacggcccccaccagcattggcctctgctctgcagngtgggggtgcccatcctggggggctgtgtgtcatggttcacctgacccaggtgtgtgtcccggtntgaaantcgaggagggggatgggaagcctttccctggcctttgaaaacatggaaa

SEQ ID NO: 165860 - DNA, 660 bp, Homo Sapiens
atggaccacaagccgctgctgcaggagcggccgcccgcctacaacctggaggccggccagggcgactacgcgtgcggcccgcacggctacggcgccatccccgccgcgcccccgccgccgccctacccctacctcgtcacagggatacccacccaccatcccagggtctacaacatccacagccggaccgtcacccgctatcctgccaactctatcgtggtcgtaggaggctgtcctgtctgcagggttggggtgctggaggactgcttcaccttcctgggcatcttcctggccatcatcctcttcccctttgggttcatttgctgttttgccttgaggaagcgacgatgccccaactgtggagccaccttcgcttaaagggaacaccaggcccggctttcctacacccagctctctttttctaatgtaaatgttgtgtacaatagttttatttgattaagcttcaggactgttttgtaaagcgaggtgggaccgatgtggcacacgccagctgcggtttcccggagcgtggagaggcagtgctgctgctcccgcccgaggctcatgacaactcaataaagcactgcttttattttttgcagtcttcaatttgagaaaggtgagaaataatgttttcaataaatgagattcataccatta

SEQ ID NO: 165861 - DNA, 826 bp, Homo Sapiens
ggtattatggacaggtctctggaaatttatctaataaagaccaacaaacttccccagcagtgcctctgagtaccgtgtgaattctggtgtcttgtgggaagtcagggtgccttctttgcattccaaagctttgagggagctgggaagctttggttcccattttaggagggctgtgtgatggtgacaaaggtgttctggtcatttctgctctgttctccgttctgtgaagtgaggtggatgtaatgtgctgtgggatggggtgctccatatgtgtgtgtagcctttactttccaacttagttttttgcatctctcttgtactgatgagccatacctctcagccttcatttggtcccaggcctgaccctttgctttcatcgtcagcttttctgtcctgctcgggcaggattaactctgttcttgccgcggatgtcaccatcactctggagtccagcccagtgcccacaggcccgatcagttcaccctcttccttctcttcaggggagaaactttctcgggcatcaaaaaacgtgattgtttcttcttgaagtttttgttcttccagctctgccccatcttcggtgcttttgcttttcttggtaggagatgaggagaaccctaatttgggaaatcggaaccagcctgccttctcctgtttttttaggcagttctgcctctggtcgtgcctcaggctgtgtttgaatgggagcagatctctggacgtcatttttggaatcaacacctgtctcatcaacagaagaggaaaacccaatgtttggaagccaaaaccagagcagaccagattttttactttctggtttgtcccc

SEQ ID NO: 165862 - DNA, 1101 bp, Homo Sapiens
aaaagcaggctggtacggtccggaattcccgggatatccgtcgacccacgcgtccgtctttttattgatgtgcaaaaatttttggattgacagtaacttggttatacatgacactgaaatgccttactttgtatgatattccatagtatattaaaaatggtaaaattgcatgggttttgtaggtacttttggaatctagaagaaatgaaattttaccaagttatataaagagaaaattgaatttaacaatgcgaatggtagtctaaccaaatgcatcaatcctgtgtggtttagtgtaaaaatgagaacatgttggtatttatctattgtaagataaaaaagctggtgggtgaaagaaatcatgttatgataaaaaattttgtaattttcttgatgactggaatttttattatgcataactgacaaatcaagtttccaagcaaatgttacatagtgtaggctttacttagcttatcaatttgtcattttgaagctaagttattttaattaggttaactatgtacaatattttaagcatatactcttgtaagattttgaaaactacattttaacatggaactctagggatagtcaccttttaaatcctgttgaaaagccatgtttaagatttaatttgccaaaataatgtcttgttaatattctttcaataacgaagttgggcaatataaccaatgtttaaaaaagtttaaaatgtataagttgaggcatttgggtggtaagagaatgttatagtgaattatcccttttcttgactattggaggacccaaaaaaataaggtgtattgcgtcttagcagtgatttttatccaatcttgtttccaaaaaccatgtctccccagggccttaaaagccatcatgtaaattacccgtaaagtgtaacatattgccacctaaccaaccgcggagaataccctccccccccatacattggcgggacggccttcggggcccttcgaaaaagccttttcttagaaccatttcgcgtttggggggcgcggggggcccccaagttagcggtatagggtggaaaccactgggctccaacaagaccctggtttttccccctaagggagagaatac

SEQ ID NO: 165863 - DNA, 518 bp, Homo Sapiens
  misc_feature (360)..(372): n is a, c, g, or t
ttctgcgagatccatgctttatgaacacattattctcacacatccggggataggtttgatacacaagatccttaaagtcattttacatattctgaaaccaagttgttcaaaagatgaattctgaaaacatagttggtgtagcaaatgaatatatcaaaacaaagaaaaacttcatccaaatatttacattttaaaaagacatttaaaaaataggctacttattaagtgtgcttgaacaaaccatgtgtggaattgaattccattcattacggagttagtttctgctaaatacttactgatgctagagcagacccctggcatctgaggatttaagagttcaactgttctcaatctatgctnnnnnnnnnnnnntgacaaataataaattctacatttccgaggcactaatttgaacttcagaagtgggagggctgatatgtaaggcaagttatttaggaatgaggagggctgacagctgtaactcagtgtggttttgcaactgcctacgttagtacccc

SEQ ID NO: 165864 - DNA, 750 bp, Homo Sapiens
  misc_feature (123)..(123): n is a, c, g, or t
catttgctaccgctacatgtcctctaatggtgaattcttcaatccttcattctcttctagagacattcttcatcgctttcaagctacattgtcaataaaaaaagtcttgtgaaaattttgccnaaaaataaccgtattacttccttcttaacagagattaattcttcattgactaaaattctgtgtggaagtttcaggccaagctcctttgtcttggtttaattcttgggtacagtcccagcaagttacgtggaacatatccctccttatcattaaggcgcgcccaccaccattcgatttcatcttcgtcttccctgtggatgattgtcatgcagtctccttctttcatgggcagctcatcatcattctgaggttcataatcccaaagcgcataaatgactcctttattcattatgcccatcttctcctgaactccataaagaaattgggagcactgagtgtagccttcctccatttcctcgcacttatctgcagcagtctgcatgtcactgtaggtcacggcaaacacagcggctcctgactccaccaaaaacttacacacttggacgttgttacatgaggcagcacaatgtaatggagtccatccatcactatcagcagcatttacatttacaccaaactgtaccaggaacttaacgatttctgtgtggcctgcacacacagcattgtgaagagccgtgatgccttcatcattggggagcgcctaaaatcttaactgggatcctctca

SEQ ID NO: 165865 - DNA, 587 bp, Homo Sapiens
gaggatcccggtcatttgctacactttccattcaaatgacagtgcgcacttatctggtttacacaatgataccattttgaaagttggaagcctcaaactgagacgacagtgcagaacaaaacaaaagtgagttagggtcgttaaaattgaagtgttcttcttagggcaaacatgttgactccgagtatagtgtatgaatgtgctacgagaaacttccaaagagcaccattcacaattgggcattttcaaagaatgttccagccctcaaaggggcaactctttaaagtccttgttggcttttatccaaaccttgtagaaattgggaaagctgatagaggtaaggaagacgagtgaaaaggacaagaaggccaaacaccagccaaaaagaaactaggaaaaaaagattttctttgctaatatagatgtaaaaataacatcagacatctttgaaaattagcctctaaactcttaatacatacgttctgtgtgtctctacctggcgtctttaagaatatcctctctgggctctgaaattttaggagtgattcttatccactccaagttgtaagtatgcgtagaaattgaac

SEQ ID NO: 165866 - DNA, 181 bp, Homo Sapiens
gaccgcattgcgtcatcagaatcaaaaagaaaaagaagaaaaagagaaaaatggtgaatgatgctgagcctgatacgaaaaaagcaaaaactgaaaacaaagggaaatctgaagaagaaagtgccgagactactaaagaaacagaaaataatgtggagaagcctgatgggagcaagatgcg

SEQ ID NO: 165867 - DNA, 888 bp, Homo Sapiens
  misc_feature (420)..(488): n is a, c, g, or t
ggggagctgcgcacgtgcggccggaagggaagtaacgtcagcctgagaactgagtagctgtactgtgtggcgccttattctaggcacttgttgggcagaatgtcacacctgccgatgaaactcctgcgtaagaagatcgagaagcggaacctcaaattgcggcagcggaacctaaagtttcagggggcctcaaatctgaccctatcggaaactcaaaatggagatgtatctgaagaaacaatgggaagtagaaaggttaaaaaatcaaaacaaaagcccatgaatgtgggcttatcagaaactcaaaatggaggcatgtctcaagaagcagtgggaaatataaaagttacaaagtctccccagaaatccactgtattaagcaatggagaagcagcaatgcagtcttccaattcagaatcnnnnnnnnnnnnnnnnnnnnnnnnnnnnnnnnnnnnnnnnnnnnnnnnnnnnnnnnnnnnnnnnnnnnnctgaaaacaaagggaaatctgaagaagaaagtgccgagactactaaagaaacagaaaataatgtggagaagccagataatgatgacgatgagagtgaggtgcccagtctgcccctgggactgacacggagcttttgaggatacttcgttatgcttctctatgtaatcttgtcaatgaaaacactctgaagggcaataacacgaaatgggttatacaaacatgacctgaaattcagcataaaagtatcagaccacttctgaaaggagggatctttctagcagctgcaaaaaaaggacagtggtaaaacccttggattatctcatccctgcaggttgaactcattgttcagttcaagggttcatgcccaggacatggcacaggacgtccgaggtacactagg

SEQ ID NO: 165868 - DNA, 609 bp, Homo Sapiens
ggaggctagaggttcttattctggctataaattatgtgagtaaaattgtgctaaccagttaaaagtactgtacacccatgctcaatatatagtcctggaaatagcaattgaaacatgtcttctcacaagagaaaatgacagttttaatgatgtatttgatgaatttaaactttaagtcaggtgctgcaaattggaaagaagacttgtggtgttttaagttgctgtggacacttttaagaaacttagaacccatggaacccttgtttatcgccatgcaaattacaatcttgaatgagtgttttttaaaaataaagtattagaaaaatgtgtagtaaagatgtaaaattaaaaaatggaattctccattaactgtggattttactaaatagaattactggtgaagcagatttatccatcgagactatctggtatgcgttatgtatgtagtctgttgctgctgaaagatgtctgtgtgcctgtatcaacatgtgacttcatgtaaagtttctttgtgttcacagttcttagcaaatgcagttacaatccatagatagccagcagtggatgttactccaggaaaatgcaggattaaaattgtccttgtggaaa

SEQ ID NO: 165869 - DNA, 465 bp, Homo Sapiens
  misc_feature (401)..(401): n is a, c, g, or t
  misc_feature (440)..(440): n is a, c, g, or t
attagattcactttggtctgcagtcctgcagtctcctggttagccttgtcgagtattgtgttgtagaatattatgcatatgtttaaagaatcatattttctaagattatttggaagcatgtttggtaatgtcaagtggagtaccccagatacattttagacatttatcgtcatcatctgctctgagtggaaggccgttcagagaggctagaggttcttattctgggctataaattatgtgagtaaaattgtgctaaccagttaaaagtactgtacacccatgcttcaatatatagtcctgggaaatagcaattgaaacatgtcttctcacaagagaaaatgacagttttaattgatgtatttggatgaattttaaacctttaaggtcaggtgctgcaaatnggaaagaggacttgtgggtgtttttaagttgccgttggnacacttttaaggaacctagggaccc

SEQ ID NO: 165870 - DNA, 418 bp, Homo Sapiens
  misc_feature (35)..(35): n is a, c, g, or t
  misc_feature (343)..(343): n is a, c, g, or t
  misc_feature (382)..(382): n is a, c, g, or t
  misc_feature (389)..(389): n is a, c, g, or t
  misc_feature (407)..(407): n is a, c, g, or t
acacaaggacaattttaatcctgcattttcctggngtaacatccactgctggctatctatggattgtaactgcatttgctaagaactgtgaacacaaagaaactttacatgaagtcacatgttgatacaggcacacagacatctttcagcagcaacagactacatacataacgcataccagatagtctcgatggataaatctgcttcaccagtaattctatttagtaaaatccacagttaatggagaattccattttttaattttacatctttactacacatttttctaatactttatttttaaaaaaacactcattcaaggatggtaatttgcatgggcggntaaacaggggttccctggggttctagggtttcttaaagngtccccnggcaactttaaaacaccncaggtttcttt

SEQ ID NO: 165871 - DNA, 1208 bp, Homo Sapiens
cccccaagttttttcccaattcagaagaggccgttcctttcaggggtctggaagactgggggtctgggggctagaggcccgttgggggttggggagggaaggtgtttgataaaaggaacccactgccagaaagggaaccacattgctgaaatgctgggcccaatgctttcctcccaagaccactgagtttcctgaagaccccagctttatctttccaaggggtaacaacattccccaagactcagagctggaaggcggcaagagtggagccaggagagacagatcgcatccactcctgaggccgcctcgaatgtctccattcccttctggcctgccttccccctcccttcaaccccaaagacccaagaagacaacggagatcagagaccacatccctcttccctaatcaaaatagccaagtacaacatttctaaagttagggagaaggaggaaaaatgccacaggcttttaaagggaagactggaaccgagggaagggagaagtagccccctgctttgtccagcctggaagctggcagccatggtgttggggccttgacccaaccacaccagcccatctagctgagcatcttgtgccgatcgaagactgtcttccgctgctcctgcacctgcagcttccaccgctgctgggcaccttccacacgctccaggactgtgtttgctcggggtcccccgagggatgcagcagctgctgccatagagcgagcatcctcattctcctcctcattgtgcagttgctcagtgtatgcatccggctttcggatcagagggtccaccagcatcaggaaggccatgtagagcaacagggcacccaccacggacaggtagatgacaatgatgaccttgatggtggtggtgctgcgctcctcgtacctgcactcgcacagcaggcagtaggcctccacgtcatggccaggcactggcatgggctccaccacgtgcaggcagttgcagtccttctgggatacattctggttgtaaatgtgcccactgatgtttctataaggtggacagatgcatttgcaccggatatcttcagaactcttgttggcttcagctgggggcaccagcaaacacccgaccacagccaccaaagataagagcttcatgcttatcaggcttgctgggccagcaaagccggacacctacaagcccgctgcagccgcaaaagacccagttgtccccgcc

SEQ ID NO: 165872 - DNA, 934 bp, Homo Sapiens
  misc_feature (182)..(182): n is a, c, g, or t
gagatggggtttaagggggggcccaggtttttccccttcaggaagctgttcttcaggggctggaagctggggctgggggctgaggccactgggggttgggagggaggtggtgataaagaaccactgcagaaaaggaacacatgctgaatgctgggccatgctttcctcccagacactgagtntcctgaagacccagctttatcttccaagggtaacaacattcccaagactcagagctggaaggcggcaagagtggagccaggagagacagatcgcatccactcctgaggccgcctcgaatgtctccattcccttctggcctgccttccccctcccttcaaccccaaagacccaagaagacaacggagatcagagaccacatccctcttccctaatcaaaatagccaagtacaacatttctaaagttagggagaaggaggaaaaatgccacaggcttttaaagggaagactggaaccgagggaagggagaagtagccccctgctttgtccagcctggaagctggcagccatggtgttggggccttgacccaaccacaccagcccatctagctgagcatcttgtgccgatcgaagactgtcttccgctgctcctgcacctgcagcttccaccgctgctgggcaccttccacacgctccaggactgtgtttgctcggggtcccccgagggatgcagcagctgctgccatagagcgagcatcctcattctcctcctcattgtgcagttgctcagtgtatgcatccggctttcggatcagagggtccaccagcatcaggaaggccatgtagagcaacagggcacccaccacggacaggtagatgacaatgatgaccttgatggtggtggtgctgcgctcctcgtacctgcactcgcacagcaggcagtaggcctccacgtcatggccaggcactggca

SEQ ID NO: 165873 - DNA, 743 bp, Homo Sapiens
  misc_feature (18)..(18): n is a, c, g, or t
gtctaggagcgagcctgngtggcgaattccgcacgagggtggtctctgatctccgttgtcttcttgggtctttggggttgaagggagggggaaggcaggccagaagggaatggagacattcgaggcggcctcaggagtggatgcgatctgtctctcctggctccactcttgccgccttccagctctgagtcttgggaatgttgttacccttggaagataaagctgggtcttcaggaactcagtgtctgggaggaaagcatggcccagcattcagcatgtgttcctttctgcagtggttctttatcaccacctccctcccagccccagcgcctcagccccagccccagctccagccctgaggacagctctgatgggagagctgggccccctgagcccactgggtcttcagggtgcactggaagctggtgttcgctgtcccctgtgcacttctcgcactggggcatggagtgcccatgcatactctgctgccggtcccctcacctgcacttgaggggtctgggcagtccctcctctccccagtgtccacagtcactgagccagacggtcggttggaacatgagactcgaggctgagcgtggatctgaacaccacagcccctgtacttgggttgcctcttgtccctgaacttcgttgtaccagtgcatggagagaaaattttgtcctcttgtcttagagttgtgtgtaaatcaaggaagccatcattaaattgttttatttctctc

SEQ ID NO: 165874 - DNA, 617 bp, Homo Sapiens
gatcaccggcaaacatgtgaatcagctttccatttcttatgcaggtcatgataacttgtagagtagagtacaatcatttgtgctatgtttttaattttctaaagcaccttgatgacagtgagtgtccagtggtgaagcatcctctattgaaccaccctcaaaaatttttttgccaagtcctaagttgatagcttaaagtaaaaagtgaaaattatagtttcattaggacttggtgtaaagaaatcccctccccccttccccaaagggatactgcagttatatcacatacccaataggcaccacgatgaagatcagagcttatacttaattaaggttttatacacaccagttccccagtaaatgcaaatttaacaagaaaatcagacatgtcatatgttcaaaatgctcatggcaaacaatcattttgcattcctgcaaataaaattgttttatactgtaagctggaggcgagtgtaacttatttttgtaataaagttgttatgtttttgtatgtgtcagtaatataaatgtgtgttagtgtagcaatcttctggtgttatcaacttagaattgcacacaacttctgtatgtttattcgtactaacatatttttcgat

SEQ ID NO: 165875 - DNA, 442 bp, Homo Sapiens
  misc_feature (284)..(297): n is a, c, g, or t
tatagttacattagagacttggtgtaagaaatcccctccccccttccccaaagggatactgcagttatatcacatacccaataggcaccacgatgaagatcagagcttatacttaattaaggttttatacacaccagttccccagtaaatgcaaatttaacaagaaaatcagacatgtcatatgttcaaaatgctcatggcaaacaatcattttgcattcctgcaaataaaattgttttatactgtaagctggaggcgagtgtaacttatttttgtaataaagnnnnnnnnnnnnnnatgtgtcattaatataaatgtgtgttagtgtagaaatcttctggtttaaaaacttagaattgcacacatttcagtatgtttatttgtacttacataattttagaatagtggttgccaatagcctgtaggttcacacgcgccagta

SEQ ID NO: 165876 - DNA, 749 bp, Homo Sapiens
caccaccctaaactgttgaataacacttggctttctaagagctcagaccctttggactcaggaaccaggagccccaaaagagatcccatagacccagtgtcagctggcgcttcagctgccaaggcagagctgccaccagatcatgaacacaaaaccttaggtcactgggtgacaatcagtgaccaagaaaagaggacagcactgcaggtgtttgacccactggcaaaaacatgactgagcagctttgaaggctgcagtcctatagaatgcataccttcctccctctagacatccctccaccagaagagacatctatttaaaggcacactggccaaaacgtttgtgcatctgtcactctcgtgtagtttacaaaaatcgtgtctcttattcagtaagatggttactcagccaccaaaatatatttcactcaaggcttgtacatctgaagtttgctcttcaaggaatgggaaccttcctgttaaattcggtgtatggattttaagaaaggaatctagccaatgaggtccaagaagttctcacccattgaatttttaaatggctgttcagttcatgttgtacgtgatggagatttgtcttttgttttatttgcattttacagatttggtataacattttgggggagccacctgaaaggttgatgtataaaggtaaggatttaaaggaaagaggtccgttggtgacccattagtagcctggtccttggccccactttaaaaccaaggggttac

SEQ ID NO: 165877 - DNA, 518 bp, Homo Sapiens
tcaagtcccaaccttctcctacttctagaagttgaataagaaagacatgggaagatacagcaggcaggcaacacaggttctaggggaaacctgatcaagcccttagcttctctagttctgttgatttctctacagggtagggatcactacagtcccatttaattaaaagaaactggatttaaaacacctgattctaaggacggtggtacactcttgagaaaagagttaaagcttttatttgtatgaaaggcaattactcagcccctaaaagctcaacagacaattaagggcttaaattatacaatgttttcccatcttctccagatacaacctcaattacatagttttttagcttgagatattaattgaattcagcatgattgttgataaaatgccctttggttagaaaaggaggaggagagagaagggaggggaaggaaaaaaattctattaactaggagatgttgtacagatagaaatctacaatttcaaatatatccaacctgaatgaacactga

SEQ ID NO: 165878 - DNA, 1553 bp, Homo Sapiens
  misc_feature (130)..(171): n is a, c, g, or t
  misc_feature (338)..(338): n is a, c, g, or t
  misc_feature (345)..(345): n is a, c, g, or t
ggggaggggggaatcgcacccggcggtttttgtgctttaccgccaattgtttttcttggtaaagggaaaccgggattgcgccacgctgttttctttccctctttgtggcggccgccgccccccccgggannnnnnnnnnnnnnnnnnnnnnnnnnnnnnnnnnnnnnnnnncccacaagttttggggggcgggcgaatgggtgtgttttacgggggggcgggcaggcgcggggtaatggcgtagaattttgatggggggcggaattagggcgcgggttcgggtgccatgccgggccccaacgggccgacagaaaggggggggagagtttcgggaccgncggcggngggcgaagttaactcattttatttctaggatttggatttcaacattttaatttctttggaatataagtcactttttgcaagctaaaaaatagaatcaaactaaggtgatctagtcctctaggcatccaggctgatccttggaatcatgagcagaatgatgacatactacaaggtgctagcaatacggctataaactctaaataataaccactacatgtttcattaggaaacagccaaaagtccggccgttaaaggaataatctgcagaacatcttgatttacaagggacaaaatgatgcaaattatatgctgtccaacctactggtgaactggatcagaatggtccaaggactgttaaacagaggaagtatttacattttgaaaacttgctctgcaggataaaaaaattcctggttgctgtcagtaagaaagcaagtaaaaaaaatattacagatgaactcactgatctttgattttactaaggtcttccactggaacatgaaggtagggataagtgtacaggataatatactcagatatttttaaaataaactacttaataataagaaattagccataccacattgttccatttgctacaagaacaaattggcaatgaagactatttaaaagaaatgctcagctctacagagggtggtggcaggcaacacttttccattacagaataacctctattcttccatgatacatattcctgtggaaaaacttgtcagggcccagggatgaaaaatagagcttgtcctaattagctaactgtaggttcacttaacatctttgggaaggacccaaaaaatctggccattattttcttaaacatctgcaagctgcagaattccttagtcctcagctatagtttctgctagatatcttaaagctgggacagttccactgtgactcctcctcagctatggggtgggtgctagtcatcaaagtctggaatgtcatcataggagtaaccacggtagcctttggatgcatagtaagcgatgcgcaggtggtaaaatccgggtaggaacaccagaatgccaatgatcagcactggaacggcccggtctgccccccctttgctgatgtagcctgacagcaggagggagcctataataatgagaaaggcgccaatcaaaaacagcacagtggcaagtgcgatggccttataagggatcttaggaggggttttcttaaactga

SEQ ID NO: 165879 - DNA, 1278 bp, Homo Sapiens
tccccgaaggcccaaacataatatatagaaccgtcggttcaaaaagcaggctggtaccggcccggaatttccgggatatcgctgagtggcacttaagcgggccatgccatgcaacctatgggcgctgccaaccgtgggcgagctctgggtgtgcgggcggcctggcgcggcgctccgctgtgtcagcgtgttatgatgccgtcccgtaccaacctggctactggaatccccagtagtaaagtgaaatattcaaggctctccagcacagacgatggctacattgaccttcagtttaagaaaacccctcctaagatcccttataaggccatcgcacttgccactgtgctgtttttgattggcgcctttctcattattataggctccctcctgctgtcaggctacatcagcaaagggggggcagaccgggccgttccagtgctgatcattggcattctggtgttcctacccggattttaccacctgcgcatcgcttactatgcatccaaaggctaccgtggttactcctatgatgacattccagactttgatgactagcacccaccccatagctgaggaggagtcacagtggaactgtcccagctttaagatatctagcagaaactatagctgaggactaaggaattctgcagctcgcacgatgttaacgaacactaatggccagattttcggggtacttcccaaagatgtcacgtgaacctacagttagctaataggacaagctctattttacatccctgggccctgaacagattatcgcacacggactactggtctcatgggcactaaatgcaggctaatcactgctactggacacagttgtagccattgcacacaacacatcctgtgacacactgaagcaatacttcacaaaagacttcatagacaaccatggacatgtacaccaacgtgtcacactgactgtattaggcatagtcctaatacgtaacggtaaactcgtattatagaccagatcttagggacatagttcgccgaaggagagagtaactcggtaccgtagttactatcaagaggagtgccagttggctcaagacgacggctccaggaacaaaagcgaaataacagaacggccattactacgagacgacgagatcataccacggagcacgcttcaacgaacaaccccagtgagagacgagggcgacacacagacgcaagtacgcactgtgtagagagcgaacagcggagcggagctcaaggatcactacagaacgtacgacgtctctatcttctaagcgg

SEQ ID NO: 165880 - DNA, 1144 bp, Homo Sapiens
  misc_feature (52)..(127): n is a, c, g, or t
  misc_feature (491)..(778): n is a, c, g, or t
  misc_feature (811)..(811): n is a, c, g, or t
  misc_feature (1086)..(1096): n is a, c, g, or t
tagaggaccctggtcactgcgacgaagtgtcttgcttatgttgcccaggctnnnnnnnnnnnnnnnnnnnnnnnnnnnnnnnnnnnnnnnnnnnnnnnnnnnnnnnnnnnnnnnnnnnnnnnnnnnnccctttaaacctttccctggcctttcccatagctggtgaaggacacctccatccattccacgcagttgctcaaagcagaaattttcagtgcaagtcttgatgctgcgccgtcccccactccctacatcagaacgcatccctcatctggactccagcggtggcttcttgatgctgcgcggtcccaccactccctacatcagaatgcatcccgcatccagactccagcggtggtgctctacctgcacgctgttgccaagtccaagctaccatactcctgcctgagctatgacaacagcctcctcactgatctcccctttcttccctttgcctcctccagctcatttttcacagtgtagaatgacannnnnnnnnnnnnnnnnnnnnnnnnnnnnnnnnnnnnnnnnnnnnnnnnnnnnnnnnnnnnnnnnnnnnnnnnnnnnnnnnnnnnnnnnnnnnnnnnnnnnnnnnnnnnnnnnnnnnnnnnnnnnnnnnnnnnnnnnnnnnnnnnnnnnnnnnnnnnnnnnnnnnnnnnnnnnnnnnnnnnnnnnnnnnnnnnnnnnnnnnnnnnnnnnnnnnnnnnnnnnnnnnnnnnnnnnnnnnnnnnnnnnnnnnnnnnnnnnnnnnnnnnnnnnnnnnnnnnnnnnnnnnnnntgagccacccggcctggcctagaatgacttttnaaagatcaaattaaatcaggtcactcctttgcttacaacgcagtgcgtttagaggtacaccccatgtcttcacagggcatacagcatccgatttaatctgggatcattcccgggccttcctcctccagtcaccccagagggcccaaaccccgggggcccctttccttcctaaaatgtccctcgggcttcaataaccggggcctgggggcctttttctcccttcccccccgggccggggaaaaattcccttccttttccccctttttggccctgannnnnnnnnnnggggttacccccttcaaagattttcacaggtcacagggtcccctgggc

SEQ ID NO: 165881 - DNA, 283 bp, Homo Sapiens
tgctgaaagcacacccgcctgggaaccgcaccccagaggggccacagtcagcgtgaagcagttatgttctacgctacctgtgcgccataaggaatttcaaaggaatattaagaaggtacagtaaattaatcttggttttcaagagtattggttaatgcacatgagcaaaagatttactaaagactgtttattcttcagttgattctcttgccataatctagatgagaaatgcttgatcttgcatttctcgcttaaagacttcaacattaaagacttaacttta

SEQ ID NO: 165882 - DNA, 985 bp, Homo Sapiens
  misc_feature (561)..(651): n is a, c, g, or t
gggagcacaacgtcgaaagcagccgttgggagcccaggaggcggggcgcctgtgggagccgtggagggaactttcccagtccccgaggcggatcgggtgttgcatccatggagcgagctgagagctcgagtacagaacctgctaaggccatcaaacctattgatcggaagtcagtccatcagatttgctctgggcaggtggtactgagtctaagcactgcggtaaaggagttagtagaaaacagtctggatgctggtgccactaatattgatctaaagcttaaggactatggagtggatctcattgaagtttcagacaatggatgtggggtagaagaagaaaacttcgaaggcttaacgatgaaaccatcactacatgccaagaatcaacgaaggttgccgacctaccacaggttgaaacttttggatcacgaggggaaaatctgagctcacaaaacccactgacccacaccaccagagcgaccagccatgtcagcggcgaagcagttaggactcgacacgtacctgagcaccataaggaaaatcaaaccgaaaattaagnnnnnnnnnnnnnnnnnnnnnnnnnnnnnnnnnnnnnnnnnnnnnnnnnnnnnnnnnnnnnnnnnnnnnnnnnnnnnnnnnnnnnnnnnnnatggccgtataagaaaataaacaacttgctaaaactgctgaaactccctctgcttgtgagatttaaaaaaactggctgaaattggttggaaccaacatgtccaatggagtctgaatagaaagagcttgctgacatcacagcccgaatttccaccacatttcatactaactccccctgaatttgcatatgcaaaccacaagcaagcatgatcaaacagacaactgcgcgtgtccgaggactttccagatctcccctttccttccaccaatcacttactaatctgagaatccatcccctaataaaatcactaccttaaagcctgcacagggaagac

SEQ ID NO: 165883 - DNA, 797 bp, Homo Sapiens
gggcgctatagggtcactttaagctctggggaaaaaggagaaagtgagaggagagttctctgcatcctccctccttgcttgtcacccagttgcctttaaaccaaattctaaccagcctatccccaggtagggggacgttggttatattctgttagagggggacggtcgtattttcctccctacccgccaagtcatcctttctactgcttttgaggccctccctcagctctctgtgggtaggggttacaattcacattccttattctgagaatttggccccagctgtttgcctttgactccctgacctccagagccagggttgtgccttattgtcccatctgtgggcctcattctgccaaagctggaccaaggctaacctttctaagctccctaacttgggccagaaaccaaagctgagcttttaactttctccctctatgacacaaatgaattgagggtaggaggagggtgcacataacccttaccctacctctgccaaaaagtgggggctgtactggggactgctcggatgatctttcttagtgctacttctttcagctgtccctgtagcgacaggtctaagatctgactgcctcctcctttctctggcctcttcccccttccctcttctcttcagctaggctagctggtttggagtagaatggcaactaattctaatttttatttattaaatatttggggttttggttttaaagccagaattacggctagcacctagcatttcagcagagggaccattttagaccaaaatgtactgtcaggggagaagaggggat

SEQ ID NO: 165884 - DNA, 971 bp, Homo Sapiens
cctggctctgaacttaggctggaaagctggtagaagatgaacgcagtgaccgggaagaaacagagagctcagagggggaggaggctgcagctgggggaggagcaaagagccggcccctagccaatggccaccccatcctcaataacaaccatcgtaagaatgactgaaccattattccagctgcctcccagattaatgcataaagccaaggaactaccccgctccctgcgctatagggtcactttaagctctggggaaaaaggagaaagtgagaggagagttctctgcatcctccctccttgcttgtcacccagttgcctttaaaccaaattctaaccagcctatccccaggtagggggacgttggttatattctgttagagggggacggtcgtattttcctccctacccgccaagtcatcctttctactgcttttgaggccctccctcagctctctgtgggtaggggttacaattcacattccttattctgagaatttggccccagctgtttgcctttgactccctgacctccagagccaggcttgtgccttattgtcccatctgtgggcctcattctgccaaagctggaccaaggctaacctttctaagctccctaactcgggccagaaaccaaagctgagcttttaactttctccctctatgacacaaatgaattgagggtaaggaggagggtgcacataacccttaccctacctctgcccaaaaagtgggggctgtactgggggacctgctcggatgaactttcctaatgctactttctttcagcctgtcccctgtagccgacaggtctaagaacctgaactgcctccctccttttctctgggcctcttccccccttccctccttctccttcagctaaggctaacttggtttgggaggtaaaaagggcaaactaaattctaaatttttaatttattaaaatattttggggggtttttgggttttaaa

SEQ ID NO: 165885 - DNA, 446 bp, Homo Sapiens
tcggcacgaggggaccttgatagagaactttataaacttctttctctttaataaagacttgtcgtacaccgtgctgccattaaaggcagctgttctagagtttcagtcacctaagtacacccacaaaacaatatgaatatggagatcttcctttacccctcaactttaatttgcccagttatacctcagtgttgtagcagtactgtgatacctggcacagtgctttgatcttacgatgccctctgtactgacctgaaggagacctaagagtcctttccctttttgagtttgaatcatagccttgatgtggtctcttgttttatgtccttgttcctaatgtaaaagtgcttaactgcttcttggttgtattgggtagcattgggataagattttaactgggtattcttgaattgcttttacaataaaccaattttataatctttaaa

SEQ ID NO: 165886 - DNA, 316 bp, Homo Sapiens
ttcactttctacaccattcccaaaaccaaaggacaactgaggagactgcccagcacataatgaataaataagaaaatgagtgaggagttattaacatcatttggaaaaaagatttcccattcacttgatattgtttgttcactcatttagtcattaaaagtgagattaataaaatctgagaatgttatataataactttaaaaagccaggtaattaataatctgcactgatattacatccacagtaccacagtatttatgtgtatgaattaaggattaaaagataatgtggataaataaactattgatctatggct

SEQ ID NO: 165887 - DNA, 395 bp, Homo Sapiens
  misc_feature (145)..(171): n is a, c, g, or t
caattgtataaaaataattttatttactactgtaaataaagtagtgcaaagagtagtttggacccacaaaattgcattaaagaaaaattcactaccttagcagcatgtagtatacagacattctgctcttcctcttcctctctannnnnnnnnnnnnnnnnnnnnnnnnnntatccctgtacagactcacgcaggcatgaggggtagggatgaaactataagctagaggcttacttgctgcatattcagttgctgccagtctattctaacgtgtaattcatggagaagactacagttaagtactaagaatcttctaaatgtaatttcatggattgcaattgaaatgtaggagatatccgacaatgccattaaatgattcggaagcactaggaccc

SEQ ID NO: 165888 - DNA, 925 bp, Homo Sapiens
aatcaaaagacttaggacatggaaaaattcataagtatgaagtaataaaacccaaaagtgacacaagaattacaaatatatttaaatctcagacctgggaaatggactatacacagccttctaggggagaagagaaatgccttagatgttctgacagcactgcacctttggcttgttttcagtggttggtggaacatgaataggaaccacattgttgcttggagacatgtcattttcgcgtctgtctgacatttgcttctgagaaacaatgcggtaaatctctgttaaaattgtctgaaaagcagcttctacatttgtagagtctagggccgaagtttcaatgaatgacaaaccattcttttctgcaaaagctcttgcttcatctgtaggaactgccctgagatgacgtagatcactcttattgcccacaagcatgataacaatgttactatcagcatgatctctcagttctttcagccatcgctctacattttcatatgtgagatgtttagcaatgtcataaaccaataaggcacctacagctccacgataatatgctgatgttatagctcgatatcgctcttgccctgctgtgtcccatatctgtgcctttattgtttttccatcaacctggatgcttcttgttgcaaactctactccaatggtgctcttgctttccagattaaactcatttcgagtaaatcgagacaggagattactctttccaacaccagaatctccaataaggacaactttaaagaggtagtcgtactcgtcgtcgcgggtgcccattgcgcggccgaggagcgaaagggcgggagcagcagtggtatctgtgggaccagggggcgtcgctgcaggggtaacccgagcgccgagcttcaactgccggactgggtgaagagcccctccctgccgctgcccc

SEQ ID NO: 165889 - DNA, 442 bp, Homo Sapiens
ctgatactgttgctgggcacaggccatgggccaggggtggaaggcgtgacacactacaaggccggcgaccctgttattctgtatgtcaacaaaagtgggaccctaccataaccctcaggaaacttaccactactatcagcttccagtctgctgccctgagaagatacgtcacaaaagccttagcctgggtgaagtgctggatggggaccgaatggctgaatctttctatgagatccgctttcgggaaaacgtggagaagagaattctgtgccacatgcagctcagttctgcacagatggagcagctgcgccaggccattgaagaactgtactactttgaatttgtggtagatgacgtgccaatccggggctttgtgggctacatggaggagagtggtttcctgccacacagccacaagatagactctggcccatttgactta

SEQ ID NO: 165890 - DNA, 471 bp, Homo Sapiens
caattaaactttttctattttaatccatagaaatattcagtaacataaatacaacatttgttgcatattaatgaatgtgtggcttcttgtgctttccatccaaattagaggtaaaaatccccaatgactttattttcaatgagatatagttgtaaagttatataaaacatctacacaaaaatcaatctttccttcaaccgaattctatatgaaagtactaacagtgaagattcatgatgttgtgtgaaaatggtgactcataacaatgtagactcacgctacagattttaattcacaacatatatatattgcgcctatgtgtatgacacactgtatgaaacatagtctcaaaaataagagacaatacttgagacacaaagcaacccattttccctgattttgcattctattacagggaaaataagtctctgatgcttcataaatactttaaaaaagttccgttgaagccgt

SEQ ID NO: 165891 - DNA, 1539 bp, Homo Sapiens
  misc_feature (1310)..(1318): n is a, c, g, or t
ggataaagacccaataacgattgttgatgttcctgcacacctccagaacagctgggagagttattatctagaaattttgatggtgactggtctgcttgcttatatcatgaattacatcattgggaagaataaaaacagtcgccttgcacaggcctggtttaacactcatagggagcttttggagagcaactttactttagtgggggatgatggaactaacaaagaagccacaagcacaggaaagttgaaccaggagaatgagcacatctataacctgtggtgttctggtcgagtgtgctgtgagggcatgcttatccagctgaggttcctcaagagacaagacttactgaatgtcctggcccggatgatgaggccagtgagtgatcaagtgcaaataaaagtaaccatgaatgatgaagacatggatacctacgtatttgctgttggcacacggaaagccttggtgcgactacagaaagagatgcaggatttgagtgagttttgtagtgataaacctaagtctggagcaaagtatggactgccggactctttggccatcctgtcagagatgggagaagtcacagacggaatgatggatacaaagatggttcactttcttacacactatgctgacaagattgaatctgttcatttttcagaccagttctctggtccaaaaattatgcaagaggaaggtcagcctttaaagctacctgacactaagaggacactgttgtttacatttaatgtgcctggctcaggtaacacttacccaaaggatatggaggcactgctacccctgatgaacatggtgatttattctattgataaagccaaaaagttccgactcaacagagaaggcaaacaaaaagcagataagaaccgtgcccgagtagaagagaacttcttgaaactgacacatgtgcaaagacaggaagcagcacagtctcggcgggaggagaaaaaaagagcagagaaggagcgaatcatgaatgaggaagatcctgagaaacagcgcaggctggaggaggctgcattgaggcgtgagcaaaagaagttggaaaagaagcaaatgaaaatgaaacaaatcaaagtgaaagccatgtaaagccatcccagagatttgagttctgatgccacccgtaagctctgaattcacaggaaacatgaaaaacgccagtccatttctcaaccttaaatttcagacagtcttgggcaactgagaaatccttatttcatcatctactctgtttggggattggggttttacagagattgaagatacctggaaagggctctgtttcaagaannnnnnnnnccagataatcaaattattttgattattttataaaaggaatgatctatgaaatctgtgtaggttttaaatattttaaaaattataatacaaatcatcagtgcttttagtacttcagtgtttaaagaaataccatgaaatttataggtagataaccagattgttgctttttgtttaaaccaagcagttgaaatggctataaagaactgtcttggttcgcatct

SEQ ID NO: 165892 - DNA, 1184 bp, Homo Sapiens
ggacgcgtgggtcgacccacgcgtcgggaggctggcgtggagaggatcaaggtctctcaggcagctgcagagcttcaacagtactgtatgcagaatgcctgcaaggatgccctgctggtgggtgttccagctggaagtaaccccttccgggagcctagatcctgtgctttactctgaagactctaggagagaagtttgctgaggaatgccttcaagcacaaagtgatgaatgactgccttcaagtctcaagaaaacacttttccctaacttttagagatatttcagccctttcctgtggcctggtcctatagccaaaatcacagatattcatgagtttctacttgagtgagaaaactgggtgaaggaatagaattttaaatagtaataactgcttgtttttttgtgcaagtacttttatacataagataaacaaaaaccttacaacaaacataccaaaatgcacctctttcataagtgagttactaagatttctatacctggaaatatcatgtaatgtttcattttactggatgtttccattttaggaaggaaaatagttctgtttattttaaacaactgaatactttataactgttgttcctggaagttattttattccataacaaaatttgttcttttctcatgaattttataacttcctaaatgaagaccagaaagtacaaattgctgggaggaagaataggctttattaatcaactgatgtcttgatttttctaaatgggaagattgctttatttttaacactaattatgggagcagattcttagcaaacttctttggaaaagttaatgttatgatgtgcattaggctgccccatcgtgtatataaatgaagcagatttgatttttgtattcttacgtttctctgctttgtagttgtggctgtacttaaagaaatacagaatttcatatatttaaaaatgtttaaaatgtgacccacagaacattgtaaatgattaaaaactaacatgaaaatattacaacctacaaagaattcttaacttcacaagtgttttacttcgacgatgtgcctttgatttaattggggacacttttttagaaggatacattattcgtgttcgcaacggtctttgcaagagcttggaaatcaaaatttctgcttaattcaatcatttttctatgcaagccatttaggtagggtc

SEQ ID NO: 165893 - DNA, 894 bp, Homo Sapiens
  misc_feature (764)..(764): n is a, c, g, or t
gggccagcagcccctaggagcccagcgccgccgccatgtcctccggggctagcgcgagcgccctgcagcgcttggtagagcagctcaagttggaggctggcgtggagaggatcaaggtctctcaggcagctgcagagcttcaacagtactgtatgcagaatgcctgcaaggatgccctgctggtgggtgttccagctggaagtaaccccttccgggagcctagatcctgtgctttactctgaagactcgagagaagtttgctgaggaatgccttcaagcacaaagtgatgaatgactgccttcaagtctcaagaaaacacttttccctaacttttagagatatttcagccctttcctgtggcctggtcctatagccaaaatcacagatattcatgagtttctacttgagtgagaaaactgggtgaaggaatagaattttaaatagtaataactgcttgttttttttgtgcaagtacttttatacataagataaacaaaaaccttaccaccaaacataccaaaatgcacctctttcataagtgagttactaagatttctatacctggaatatcatgtatgtttcatttactggatgtttacattttaggaaggaaaatagttttgtttatttaaacaactgaatacttataaactgttgttcctggaagttatttattccataaaaaatttgttcttttgtcatgaatttataatttcctaaatgaagaccagaaagtacaaatttgctggggaggaagaatagngctttattaatcaactgatggtcttgattttttctaaatgggaagattgcttttatttttaacactaattaggggagcagattcttagcaaactttcttttggaaaaagttaatggtaatgatgtgcatt

SEQ ID NO: 165894 - DNA, 407 bp, Homo Sapiens
tccctttccttcctggcgctttcctgggttgcttctggcggccatggtgttgctgctgtactccttctccgatgcctgtgaggagccaccaacatttgaagctatggagctcattggtaaaccaaaaccctactatgagattggtgaacaagtagattataagtgtaaaaaaggatacttctatatacctcctcttgccacccatactatttgtgatcggaatcatacatggctacctgtctcagatgacgcctgttatagagaaacatgtccatatatacgggatcctttaaatggccaagcagtccctgcaaatgggacttacgagtttggttatcagatgcactttatttgtaatgagggttattacttaattggtgaagaaattctatattgtgaacttaagc

SEQ ID NO: 165895 - DNA, 1012 bp, Homo Sapiens
attttattggggattttaagaactaataacatcttgagttatttttaattcaggcggatgtggaaaggtttgcaattgtcaagtgttttgttgtagcttagtatccataagggaaacttagactatagacataactacaaagccagtgcagcttttgttttctgtatgttgttgggggatcaactttcacacatagcaagcacatggcctccctgatgtcaggatgcctttgttaggatctgtatttgcccttaattttgttgaaatcttttttccttcttcctcttgaaaagttccaaaatatagtttattgtatctttcatcactaaaaatttgttcctttttcactatgggcagttcacacaaggcaaaaactattgaacagttggttttagtgtgttgtataactttgctgtatatcaaactaattttgacaagttttcatcctaagcctcaaatcatgtaattaataatttgcctgtttatttatgacctaattgtgattcttttattaataaaagctaatgggaaaaggatccctgattaagctgatgactagacctacaattaattttcctgcagtatatgaagtattgtaccagagtattaaaagatatgtaatattttattgataaatctatcctttaaaaggaatacgttttaggatgtcatcattttgatgtgaatcatgtaaatgttgataatatgctgtttattatacatttagtgtttcaagagattcacttaattgcctttttgcccacgtatattatgtagtctatttgcaactgttcttaaaaaaatgacattaaaagaatagtttatgtagagaaacattagtggatgttaattgtctccccacctatatttatgggtgttagcgcaactgctttgctagttgcaaagctgtattatcagagtaaaagtgtatttgtaaactgtatgggaactaaaaattaggaataaaaccattttctttatcaaacattacactaaagaccccacaaaacac

SEQ ID NO: 165896 - DNA, 443 bp, Homo Sapiens
tagtctaagaaacaaaatactccaagaaaaagaaaattttcaaataagacgcaaaataatagcttagcttaccctgttagggatccattggagcattaaggagcacatatttattattaacttcttttgagctttcaatgttgatgtaatttttgttctctgtgtaatttaggtaaactgcagtgtttaacatgagataatgttttaaagacttagttgtcagtattaaataatctctggcacttataagggaaaaaaacctcctagaagttagattatgttgctgatctgtgagaatactgtcaccactggaagttactttagttcatttaattttaattttatattttgtgaatattttaagaactgtagagctgctttcaatatctagaaatttttaattgagtgtaaacacacctaactttaagaaaaagaccgcttcg

SEQ ID NO: 165897 - DNA, 1345 bp, Homo Sapiens
  misc_feature (853)..(853): n is a, c, g, or t
  misc_feature (855)..(856): n is a, c, g, or t
  misc_feature (858)..(858): n is a, c, g, or t
  misc_feature (860)..(860): n is a, c, g, or t
  misc_feature (865)..(865): n is a, c, g, or t
ggcatgggagccagaagagaacctggattgccccgacctcattgcttgagtttcttgcagtcacagaaaacagcacatgagacagataaatcagagggaggcaagcgcaaagctgattctgattctgaagataagggagaggagagcaaaccaaagaagaagaaagaagagtcagaaaagccacgaggctttgctcgaggtttggagccggagcggattattggagctacagactccagtggagagctcatgttcctgatgaaatggaaaaactctgatgaggctgacctggtccctgccaaggaagccaatgtcaagtgcccacaggttgtcatatccttctatgaggaaaggctgacgtggcattcctacccctcggaggatgatgacaaaaaagatgacaagaactaacgctcctgagtaccagcccctgtcacatctgactgtgggtttcaagtgggaagggaaggagttctacttgtcttgacaccatagaggtggcttgagaagatgtcctttgaagagccagtatagtttctgtgccctgcagcagcccaagtgctttaaagccgtttcaagctgtatagtttgcacacccatcccagtggaggggaaaggggataagtgtttcaaggcaaccttttctgcactttgctgcgaaaagcaaagggccttctatgaaggacaaaacttgcagaattgggtgtgtgggagagcaaaaaaatactgtagatcttcaaagagcatctccacaacccacagccttcttcccaatagtgttaactctgcatttttacagcgtagcatgtgtgtagtttttggctattactggtgtattatttgggggagggangnncngncccancgcgcctgggatgcccccgcgcgggggctggccgccccgcccctccctcgcgggtcctgtggtttggctcttgtcgcgcccccctgggtggtcctcccacccctggggggcgacaccccacctggcgcccggcacctatctccgcgagaaccggcaagcgaacatggcttccctgccgcgacggcgccgggccgccgcggtacccccaccgttttatattaaaccgtacccccgcggccgcgcacggggccggaaaccccgtgcccagccgcgtgccccgccgtccattttcgaactaggacgcggggaccgggggagcgcgcccgccgcgcgttccttggtggggccaccgtccctcgcaggcctaagaccccgtcctagcgccgcgcacgcgggagaagtcacgcccgcgcagatcgcacgtctctcgatacggtcgaacaacacaccgccgccagcgcctttattgccgaggtggtc

SEQ ID NO: 165898 - DNA, 769 bp, Homo Sapiens
  misc_feature (256)..(256): n is a, c, g, or t
  misc_feature (340)..(340): n is a, c, g, or t
  misc_feature (347)..(347): n is a, c, g, or t
  misc_feature (369)..(369): n is a, c, g, or t
  misc_feature (387)..(387): n is a, c, g, or t
  misc_feature (478)..(478): n is a, c, g, or t
  misc_feature (544)..(544): n is a, c, g, or t
  misc_feature (569)..(569): n is a, c, g, or t
  misc_feature (594)..(594): n is a, c, g, or t
gaaaaagttctcgaccgtcgagtggtaaagggcaaagtggagtacctcctaaagtggaagggattctcagatgaggacaacacatgggagccagaagagaacctggatagccccgacctcattgctgagtttctgcagccacagaaaacagcacatgagacagataaatcagagggaggcaagcgcaaagctgattctgattctgaagataagggagaggagagcaaaccaaagaagaagaaagaagagtcagaanagccacgaggctttgctcgaggtttggagccggagcggattattggagctacagactccagtggagagctcatggtcctgatgnaatgganaactctgatgaggctgacctgntcccctgcaaggaagccnatgtcagtgcccacaggttgtcatatccttctatgaggaaaggctgacgtggcattcctacccctcggaggatgatgacaaaaaagatgancagaaactacgctcctgagtaccagcccctgtcacatctgactgtgggtttcaagtgggaaggaangagttctacttggcttgacacatanaagtgcttgaaaagatgtctttganaagcaggatagttctggggcctgcagcagccaagtgctttaaagccgtttcagctggatggttgcccacccctccccatgaaaggggaaggggataaatgtttcaaggcaccttttctggactttggctgcaaaaagccaaggcccctctcatgaaggaaaaaactgcccaaatt

SEQ ID NO: 165899 - DNA, 953 bp, Homo Sapiens
  misc_feature (683)..(683): n is a, c, g, or t
  misc_feature (692)..(693): n is a, c, g, or t
  misc_feature (727)..(728): n is a, c, g, or t
  misc_feature (749)..(749): n is a, c, g, or t
  misc_feature (882)..(882): n is a, c, g, or t
  misc_feature (885)..(885): n is a, c, g, or t
  misc_feature (892)..(903): n is a, c, g, or t
  misc_feature (905)..(911): n is a, c, g, or t
  misc_feature (913)..(915): n is a, c, g, or t
tggggagcaggcacaggactgggatgctctgccacccaagcggccccgactaggggcaggaaacaagatcggaggccgtaggcttattgtggtgctggaaggggccagtctggagacagtcaaggtagggaagacatatgagctactcaactgtgacaagcacaagtctatattgttgaagaatggacgggaccctggggaagcgcggccagatatcacccaccagagtttgctgatgctgatggatagtcccctgaaccgagctggcttgctacaggtttatatccatacacagaagaatgttctgattgaagtgaatccccagaccctgaattcccagtaacctttgaccgcttttgtggcctcatggttcaacttttacacaagctcagtgttcgagcagctgatggcccccagaagcttttgaaggtaattaagaatccagtatcagatcactttccagttggatgtatgaaagttggcacttctttttccatcccggttgtcagtgatgtgcgtgagctggtgcccagcagtgatcctattgtttttgtggtaggggcctttgcccatggcaaggtcagtgtggagtatacagagaagatggtgtccatcagtaactaccccctttctgctgccctcacctgtgcaaaacttaccacagcctttgaggaaagtatggnggggtcatnnttgacagtagtagaacctggttctgaaaccagannactggttgatgtcacatcctnttgacccctggtctgagctgactggctgggaagatgatctttctgcactgaaacatgtgggaagttttggggaaagcccaaaggctggtacatttttgctaatttgggtttatccctaatgaaaatacctggnttnccttgcnnnnnnnnnnnnannnnnnnannnaaaaaactccaagggggaattcctatttggtccggggg

SEQ ID NO: 165900 - DNA, 1015 bp, Homo Sapiens
  misc_feature (920)..(922): n is a, c, g, or t
  misc_feature (925)..(926): n is a, c, g, or t
  misc_feature (928)..(937): n is a, c, g, or t
  misc_feature (939)..(941): n is a, c, g, or t
  misc_feature (943)..(943): n is a, c, g, or t
gggattgttgcaagatggccgcgcccagtgatggattcaagcctcgtgaacgaagcggtggggagcaggcacaggactgggatgctctgccacccaagcggccccgactaggggcaggaaacaagatcggaggccgtaggcttattgtggtgctggaaggggccagtctggagacagtcaaggtagggaagacatatgagctactcaactgtgacaagcacaagtctatattgttgaagaatggacgggaccctggggaagcgcggccagatatcacccaccagagtttgctgatgctgatggatagtcccctgaaccgagctggcttgctacaggtttatatccatacacagaagaatgttctgattgaagtgaatccccagacccgaattcccagaacctttgaccgcttttgtggcctcatggttcaacttttacacaagctcagtgttcgagcagctgatggcccccagaagcttttgaaggtaattaagaatccagtatcagatcactttccagttggatgtatgaaagttggcacttctttttccatcccggttgtcagtgatgtgcgtgagctggtgcccagcagtgatcctattgtttttgtggtaggggcctttgcccatggcaaggtcagtgtggagtatacagagaagatggtgtccatcagtaactaccccctttctgctgccctcacctgtgcaaaacttaccacagcctttgaggaagtatggggggtcatttgacagtagtagaacctgttctgaaaccagaaactgttgatgtcacatcctttgaccctggtctgagctgactgctggaagatgatctttctgcactgagactgtggagtttggggaagccaaggctgtacatttgctatttgtttatcctatgaatactgttcttgcaaaaannnttnntnnnnnnnnnnannntntcctggtcggccccttcggccctcgagaactttctaaaacccttctttggccccccggccccataaggtaag

SEQ ID NO: 165901 - DNA, 907 bp, Homo Sapiens
  misc_feature (53)..(64): n is a, c, g, or t
  misc_feature (721)..(721): n is a, c, g, or t
  misc_feature (800)..(800): n is a, c, g, or t
  misc_feature (848)..(848): n is a, c, g, or t
  misc_feature (858)..(858): n is a, c, g, or t
  misc_feature (884)..(884): n is a, c, g, or t
acattttttttggatttatttagagaacacacaaaaaagtgcatctaaatgannnnnnnnnnnnaaaaaacaatgtctttaattcctcatatgctgacttggcaatccatatgcagcctaaaaggtggttgaaagatgtctgtggacttctacacaaattgtttaagattattgaatttgatacaagaatacgtgaagtgtcttcttgagtggtaatgggcaccctgtagttatatgctcagaaccactcacacacccttcccctccccacacacacttttgccagttccccctgttgaaccataatacacacgtgggagacagctggcatcatctgagtcttggaatagctttcttgtttgttatctgcaaaaagctaggtggcctttttagtatcaaatttcaatcttggcctcactggaaccatgctctacagagctttcccaacagcttagcaagtaagcaaaatcagctttggctcttcatatttcgtaggtgagactggggcttttaaaagaaatatttcataaaaaagacaaaagcataaatgagaaattagagggattttagttatcattaaaggaaaaaactcacaaattgatcccatttgttccatggggaagaaaagtattataaaaggaaataacttgatttgtaggtttgaagggggtcccaatctaataataaaagtctttggataaaaccatcataaaaataaaanctaatttaaaatataactgccagtgttttttaggatttaaaaaggtgagatgttccagggtttaagcaaatgggttccntgggttgccaaatgcattcccatgagtgtttcttagggctgaggggantagggagccntgctcaatctgtttaccccgtaaggncctgaaattccacctaccatggt

SEQ ID NO: 165902 - DNA, 399 bp, Homo Sapiens
agaattgaaggagagatgttgtatcactgttagaaggctgctttgggacattctgcagcagggaggagggactgtcaacccctacaccatgaccaccaagttcctcaccttggctgagtccctaaaactctctgaacctcaggttcctccaagcataatgcagacttcacagagctgttgtaaagattaggtgaggtcaattgatactgcttaaaaggcccggtccgtagaagatgcccaataaacattactgctttccccctcaccctactgcctgaaaaaatattacacctgtgagactgactttgagaaccagtgttgggtggggagttgtgcatataaactatttaatgagtacccaacacaaaagtcaaggttgttaaaattttcagggctttg

SEQ ID NO: 165903 - DNA, 637 bp, Homo Sapiens
tagactctagaggaccccgttcatttctacacaacacagataaaacggaagttataacatataaaccagtacctgcccacactcatagcagtgaggggaataaaaatcaaggttgcactgtaattccatgactctaagaaatcaagtctatttgacatgggtttgaagcaacagaacctttatagcagattcccctttttaaagaaaaacgccaaggagagatgagtcaagcacaaatgatcacttcatgcattttattgatagtctatattttaaatctgcagtatgacatcttacatagggaaaaaagcttcttcctaaaagataactattaataatcaaaccagctttaatatgattgacctttcaaggtcttgttttgctttaaacaagttaacttttagcagttgtaaagcactgtacaaaagaaaactgtgtacattctcaaaatttaatacagggcttcccaaccaggagtctgctggataggtatcggagaagggtgttatgttcaggtttaaattgaaagaaaatgagaaaccagataaagcaagccaaccaaattaacttcactttgtgctcctctctgcttttttgagtctctcccgaaggtcaggaagccctggtataacaatca

SEQ ID NO: 165904 - DNA, 363 bp, Homo Sapiens
actcctaggcaatgacaactacaaacaaatagcaatgtgtgttctttaccacataagcatggatgaccgctttaaatcaatgtttgcatacactgactgtataccacagttaatgaagatgctgtttgaatgttcagatgaacgaattgacttggaactcatttctttctgcattaatcttgctgctaacaaaagaaatgtacagcttatctgtgaaggaaatgggctgaagatgctcatgaagagggctctgaagtttaaggatccattgctgatgaaaatgattagaaacatttctcagcatgatggaccaactaaaaatctgtttattgattatgttggggaccttgcagcgcagatctc

SEQ ID NO: 165905 - DNA, 997 bp, Homo Sapiens
gggagcggaggacgacctttttccggttccggcctggcgagagtttgtgcggcgacatgaaactgcttacccacaatctgctgagctcgcatgtgcggggggtggggtcccgtggcttccccctgcgcctccaggccaccgaggtccgtatctgccctgtggaattcaaccccaacttcgtggcgcgtatgatacctaaagtggagtggtcggcgttcctggaggcggccgataacttgcgtctgatccaggtgccgaaagggccggttgagggatatgaggagaatgaggagtttctgaggaccatgcaccacctgctgctggaggtggaagtgatagagggcaccctgcagtgcccggaatctggacgtatgttccccatcagccgcgggatccccaacatgctgctgagtgaagaggaaactgagagttgattgtgccaggcgccagtttttcttgttatgactgtgtatttttgttgatctataccctgtttccgaattctgccgtgtgtatccccaacccttgacccaatgacaccaaacacagtgtttttgagctcggtattatatatttttttctcattaaaggtttaaaaccaaaagcggtttctctttgcagcaaatatacatttaaaatagagtctctgtacagcccaagggctcttggggccctgccttgccccatgtccctgcgcctccctggccaaacccaaaaataaatatagtgttattgctctgcagggcatagaggcagtgctctcctaccccctgaggaggctcgttgggagctgatggggaagccctggccaccccaggggtccaggggctggagtctgcttggagttattgcttcaaggggggacactaatgcccaatgcaaatgatgagaggaggagcgaagggggcatgggcctttgctctccaagtcccactctgctttgaagagggggtaggattaagcagcagcaaaagcatcacccactgggagactctgg

SEQ ID NO: 165906 - DNA, 987 bp, Homo Sapiens
gaggataatactttttggaaagggcaaaattgctgcatcaactgttcagaggcacttatcatagaatcatcctcctggaaaaagagaactgcaaatggtaactttgaaaattactttccttgccctatacccagcatgcgtgaatgtcatctaatgagctattttgtaggctgaggaagtgaagagttgaaatgcagaattgcaggttttagttgagctggtaacactggtaccactttcttgtttcccttccaatggatttcaacagtttgttcctaaacatttcacagttctcaaaacttttcacataaaaggggaagattattaaagcttattagattctgtcaatttggtcaaaagaaaaaatgtatttcaacacagcttgtcatctttggaaaaaatcaatcataattacgtttccttatactgaatttaaggtagagagacctaaattacaagcactcacaatttggtgggaaagtggcaaatccttgtcatttggtgactgtggcaccaaataaagaggaattcattcacaactgaatgagttattcaaataaaaaaagcagaaagctaatctagacattttaggtcctaaattaaatttttcaggtgtgatatttttagtttgagtaataatgctggtctagtttgctaaaaaattagcaacattctcctttaccttgagctgggtagactcagccacaatgtcctactgtctctttatgtatgtttaaagtaatgcctaaccagactcataatgcatgtagatgcaacatgctagttggcacaaagcaggcagggagaaatgaccctaccttcccaaaaaactcacaggagcatgaccagtaatcattttcctcatatagacaatgtcagtagatatcaagacagatacacataaagttacataaatgtttccaccttttcaccattgagtgaaacatgctgttctttggagaaaaaaatacattcatttttttcaag

SEQ ID NO: 165907 - DNA, 718 bp, Homo Sapiens
gttcaatttcacacgccgtttacgagcacgttctactgctgcagaaatttctgatgtagtcttcgtctttgcttccagtatttcatcttcatcagctacttgctgcttggagggaaaggggcctggtcttccaggtactgcctgtcgatctggaggtggatgctgctgtgcaagcaactttggaggtggtggcagatgtgaagatgttccacgttcctgattaaatgaaggtcctttcccatagggaacttttgctactgatggttgggcaggtatctgggaagatgatttagtgttggaaacttcatctgtttcttttttgttttcgttgttttcagaggcttttgaaccttgatcctcactgttattctctttagagactgttacttccttgttcatcatcatcactgaaattcagttgctctgtataatctacttccatctgagcacctgcccaaccttcatcagcttcagcatctaagttatcaaatttatcaagctccttcagttctgatgcactaagaatggatgggcgttcaggctcagaggcccatgaaggaggtgggcctcttcctcgaaggcctttgtttgtttcagataaagaaggtgggaatctcatgggaccatgtagaggaggatatgtcatcctcggatactgttggaacatataaggaggcatcatagctctatactgggaagcgagagcagtctgctgtcc

SEQ ID NO: 165908 - DNA, 493 bp, Homo Sapiens
caatctctacagttttttttggaactcttaaggactttagacaaaggctacacaaggctgacaatccaggtaactatggcagtgacagaagtcaatcattaatactgccattattttagacaaagggctgacaatctcagaaactagttctagaaattatcatcaatgtggccattttactatggacaaataaatatgggagatagggaacttgttacaccattctcctatagaaaaatatataaattgacctatcacataaacacaggatatgtatacacatacagtatatgtttttactgagcaggcacaccaactaggaaaaaatacaatagcaacataggattaggtattgcttctcatactgatcactaaactaaatggtataataattatcggttaataagccgcatgcataactaaacagtttaaatacttgaatcaaaattctttaatatcttttctgtaattataaagttagctactgaaaagc

SEQ ID NO: 165909 - DNA, 335 bp, Homo Sapiens
cattactgagggcttatacattggtgttataaaagtgacttgattcagaaatcaatccattcagtaaagtactccttctctaaatttgctgttatgtccataaggaacagtttgacctgcccttctcctcacctcctcacctgccttccaacattgaatttggaaggagacatgaaaattggacatttggttttgcccttgggctggaaactatcatataatcataagtttgagcctagaagtgatccttgtgatcttctcacctctttaaattcccacaacacaagagattaaaaacagaggtttcagctcttcatagtgcgtgtagaaatgaa

SEQ ID NO: 165910 - DNA, 1809 bp, Homo Sapiens
  misc_feature (1530)..(1560): n is a, c, g, or t
ggattctatcatgaagtctttgcaggatgacagcaagaatgagaatctgcttgacctgaaccagaagcttcagttgcagctaaaccaggagaaggccaacctgcagctggaaagtgaagaactgaataccctcatcaggtgttttaaggatttccaactgcagcgggctaacaagatggagctgcgaaagcagcaagaagatgtgagtgtggtccgtcgcactgagttttactttgctcaggcacggtggcgcctgacagaggaagatggacagctgggaattgctgaattagaactgcagaggttcctctacagcaaggtgaataagtctgatgacacagcagaacatcttctggagttgggctggtttaccatgaacaacctcctccccaatgctgtctataaggcagtactgcggccccagagctcctgccagtctgggcgacagctagctctccgcctcttcagcaaagttcggccccctgttgggggtatctctgttaaggagcattttgaggtaaatgtggtgcctctcaccatccagctgacacaccagttcttccacagaatgatgggctttttctttcctggccgaagtgtggaagatgatgaagttggtgatgaagaggataagtccaaactggtgactactggaataccagtggtgaagcctcggcagctgattgcaacagatgatgcagtaccactgggccctgggaagggtgtggcacagggtttgactcggagttctggggtcagaaggtcatttcgcaaatcgccagagcaccctgtggatgacattgacaagatgaaagagcgagctgccatgaacaactccttcatctacataaagattccacaggttccactgtgtgtcagctacaagggtgagaagaacagtgtggactggggtgaccttaacctggtgctgccctgtctggagtaccacaacaacacatggacatggctagactttgccatggctgtcaaaagggacagccgcaaagccctggttgcccaggtaatcaaagagaagctaaggctgaagtctgcaacaggctctgaggtccggggaaagctagaaactaaatcggacctgaacatgcaacagcaggaagaggaggagaaagcccggctcctcattggtttaagtgtgggcgacaagaaccctggcaagaagtccatctttggcaggcgcaaatgatttggcgattcgagtggctgcagtacaggatctgactctggctcaggctccagggacttgtggggtgggaggggcttcccgttatccacgaggatttgtgggtgtcagagcccataggcatcactcttcagcacctggtctgttcgctgcagggcatggtggacagtaatgctgagttctgtctcacactgatcaggctcagggccagagaggcaacaagagagcaagacccagggaatgggcccagggcaggaccctattcccttggggtcaagtgaaagggtagggggatagtcctgatcaagtgtgataaatttttatagacnnnnnnnnnnnnnnnnnnnnnnnnnnnnnnnttctaagtgtaactgtccttcctctgtgccaggaaacgggagggggctgatcctctgatcctcactccactgtcatgtttgaaagaggtattggtgttctggagtgggggtcaacccctccccagtctctgtgctaagttcacttgggaggatggcagtaggagccagggctggccatgggtcccctacccttccccgtaggatataccctggagaatggcaaaatgatttaaagagaaaaaatatgat

SEQ ID NO: 165911 - DNA, 684 bp, Homo Sapiens
  misc_feature (393)..(393): n is a, c, g, or t
  misc_feature (421)..(421): n is a, c, g, or t
  misc_feature (438)..(438): n is a, c, g, or t
  misc_feature (446)..(446): n is a, c, g, or t
  misc_feature (454)..(454): n is a, c, g, or t
ttctcaacttcccttcaatgggaagcattatggaatttcagcagtagtgatgaatcaaattattgaattaaatttcttcttaagaagtaaaaactcagaatgtaccatcatgtttcctttcagtttattaaatggcatcataaagatgactttgctaagttaatagagttaaaaatttttttaatataagccaaaatattaactttaatgaaacattgacttggcaaatgaatttcctataaattatcattggtcagaatgctgttttgtttaataatattacgcaacataaaccataggtgttattagaagtggagaactgcctttttcatctggggcttttaaggacttgctataaatgattattttttaaatgctttataaatcttcatnggtttttcttattctctgatacactcangctatagttaataccangagtatcnctaccagngagtaatattgtggaatatttaaatctagtgaaagaagaaagttgtacttcctggctgggagtattaggagatgggagtagagattcacttttaagttcttgaaaatatatgcattctcctaaatattaacaaaaatgatgtggggaaatgacatggcttgattgttctgtctaaatttgtactgtggcttatgttcacatgtcatgttcactctcatcacctgtttata

SEQ ID NO: 165912 - DNA, 1127 bp, Homo Sapiens
tccagaatccaaccaattcagagtaagaggtccgaagatgaatgtttttcttaaggttttccatgaacgcattcatatttgaaggtttaaggtaataagtacgaaattcatagaacgttccatcgtattgtctagggcccgtagcaaaagatgaacacaccacctccttcaaataaaagtgagaacctcttgggagaatttaagcaccattagcagacagatcctatagcagttaatgaaatgttttgtatttcagtagaaaactatttcagtggtgaaaacgatgtaggaatcagaagcatattctgctgagatactaggtagttgacactttcccgaacagctgccacaactctgggatcctcatgggacttatgtctcccagctggcacgactatctgcactctcattccaccaaagaacatgaactctgttgagtgctccgtactctgtgtggaacactcccaactagttttgtgtagcctagattgacatgagcatgaactgcccttttaaatgcatcaccccacagagctggcccaccaggtttcatctgaaaagtggccagttcatagactccttcttttggaggtttttctaatttgcaccatggtaccagataagtaatctcactctcttgtttatcaatgagagccaaatttggaatgaggaattgttcttgccattccttatctttggccaaggctttctgaacttcagttcgatgagcaaaattatcatacttccaaatatgaaacactgtattcattctgcctccaaattctacactccagtatccaaccaattcagagtgagctgtccgaagatgagcgtttttctcaaaattttccaggaactcattcatctttgagggcttaaggtaataagaacgaaattcatagaatattccatcgtattgtctgggtcccgtagcaaaagatgagcacatctgaggcgccagcgtccgtgaggccagcgcccgagtcagggcgcttctgaggacgagcatggcgcggcttcggcgctgagaaaagcagccagccgtgtcctttctgagactcctctgaaggtttcccgagtggaaaggagcggctcctggatcattggcagacgcaggctggggcccc

SEQ ID NO: 165913 - DNA, 1364 bp, Homo Sapiens
gaggatccccaagccctcacatacttccgctcctctctgccttttcttcgtctgttaaaccataatttcgaggctccccaatctcttgatgagctgtttgatagcaagtctattctgagcatcttcaagttttcctacatcaatatgtatcgggtgaatttcaagttcatcaaaatagttgaagacagtctcatcgtcgatattgatgtcccggtagttgctcagagcccggaggaatcggtcttggctgtagtgggtccccgccacgatgctctcaggaaggtttatcacacgctccttcagaaactcatccgaagcatccagtgcacaaacgaattcaggtataattaatttatcaaagggaaacattctgcctctgacatcatcttcctcctcctcatcttcctgattgaacaggtcttttgcttgatcataggtctttgggaatccatccaaaatataaccttgattcctgcaaggaattgattttagctttttctttcataaatctaattatatattgatcgtctagttgacctgcattctgctccatgctctccttgatgccatctaggagctcctgtgcatcttccacattctcctcctcctcttcctcttcgacttctctttctccttccccctacatcgttaggggcagcaatcgcctccagttttgctatggcttcagaaatgacatccttcagttggatgtgatgcagtttgtagtacttggccaattctttagcaatactggattttcccacagcagggggaccaagaatgcagatcttgattggcatcaatcctctgctttgcttgtactccttgaggatagtgttgatattttccacaaatcctgtttgggcagcccatcgaatattaaaattctccttcacaaagagcgcttccattcttaagttgaccagtaaatggtcaagacaatcttgcgttaagtccttggttaggtatgcattttctctgggtattttctggattttcccagggccagtatttttactgatacacctgctagatcaagaacatggattgttggaattacatttgttccatcgccaaaaactggtaatgcaggaatctcgcccaaccaagccatcttaaaaaatgtgtgtaacatgcctccttccgctccatactggagtccagcagcaactacgtatgctgcaaattttctggcaacggcatcgtctccggcgccggcaccgcccagtcacttcccccccgcaaccgccgccgctgccgccctgggcatgatccactgaggcgggagggaggggggggcctgcctcagccctgggtccaacccctctcccgcaccgctcccgccgctttaagcgcttctcctc

SEQ ID NO: 165914 - DNA, 1086 bp, Homo Sapiens
gggagcgctcgggcgccatgttaggacgaaggggaaggaggagaagcgcttaaagcggcgggagcggtgcgggagaggggttggacccagggctgaggcaggcccccccctccctcccgcctcagtggatcatgcccagggcggcagcggcggcggttgcgggggggaagtgactgggcggtgccggcgccggagacgatgccgtttccatgttacaacacagggatcacaacaaacacaaccgccacagaagcactatggcattacttctcctatcagcttagcagcccccaaggagactgactgcgtacttacacagaaactaattgagacattgaaaccctttggggtttttgaagaggaagaggaactgcagcgcaggattttaattttgggaaaactaaataacctggtaaaagagtggatacgagaaatcagtgaaagcaagaatcttccacaatctgtaattgaaaatgttggagggaaaatttttacatttggatcttacagattaggagtgcatacaaaaggtgctgatattgatgcgttgtgtgttgcaccaagacatgttgatcgaagtgactttttcacctcattctatgataagttgaaattacaggaagaagtaaaagatttaagagctgttgaagaggcattcgtaccagttattaaactctgttttggatgggatagagattgatattttgtttgcaagattagcactgcagacaattcctgaagatttggatctacgagatgacagtctgctaaaaaatttagatataagatgtataagaagtcttaacggttgcagggtaaccgatgaaattttacatctagtaccaaacattgacaacttcaggttaactctgagagctatcaaactatgggccaaacgccacaacatctattccaatatattaggtttcctcggtggtgtttcctgggctatgctagtagcaagaacttgccagctttatccaaatgcaatagcatcaactcttgtacataaatttttcttggtattttctaaatggtatgtgtttagattatattaaaataaaattgattgtagacactgaaaaa

SEQ ID NO: 165915 - DNA, 713 bp, Homo Sapiens
ggctcccatacaggtctaattaagtattgcattcttcaggctgttttcaatatgctctggatttgtccattccccatttagcatattccaagaaaattttatgtacaagagttgatgctattgcatttggataaagctgtcaagtttcttgctactagcatagcccaggcaacaccaccgaggtaacctaatatattggaatagatgtttggcgtttggcccatagtttgatagctctcagagttaacctgaagtttgtcaatgtttggtactagatgtaaaatttcatcggttacccgtgcaaccgttaagacttcttatacatcttatatctaaattttttagcagactgtcatctcgtagatccaaatcttcaggaattgtctgcagtgctaatcttgcaaactaaatatcaatctctatcccatcaaaacagagtttaataactggtacgaatgcctcttcaacagctcttaaatcttttacttcttcctgtaatttcaacttatcatagaatgagagtgaaaaagtcacttcgatcaacatgtcttggtgcaacacacaacgcatcaatatcagcaccttttgtatgcactcctaatctgtaagatccaaatgtaaaaatttttcctccaacattttcaattacagacttgtggaagattcttgctttcactgatttctcgtatccactcttgtaccaggttatttag

SEQ ID NO: 165916 - DNA, 1328 bp, Homo Sapiens
gttagctggaaaccagacaggcttccacattagaaggacggagaattatgtgctatgatggtggcccagaaattccagatatccaaatggacactttgtgagaaatttaggtgatgttggagagaaagagactgaaacagaagttctgtgacgtgaacacgatgttccccatcagcctttttcacaggctgttcttagttttctgccaaagatgccctggagcattactgaaaaggacatgaaaaaccgagaagacctgaggcatctgtgtatttgtagtgtagacccaccaggatgtactgataatagacgatgctctacattgtcgagaactcgaaaatggaaatttggaggttggtgttcatattgctgatgtgagccattttattaggccaggaaatgccttggatcaagaatcagccagaagaggaacaactgtgtatctttgtgaaaagaggattgacatggttccagagttgcttagctctaacttgtgttccttaaaatgtgacgtggacaggctggcattttcatgtatttgggaaatgaatcacaatgctgaaatcttaaaaacgaagtttaccaaaagtgttattaattcaaaggcatctctgacatatgctgaagctcagttgagaattgattcagcaaacatgaatgatgatattaccactagtctccgtggactgaataaactagccaaaattctgaagaaaagaaggattgaaaaaggggctttgactctatcctctcctgaagttcgattccacatggacagtgaaactcacgatcctatagatctgcagaccaaggaacttagggaaacaaattccatggttgaagaatttatgttacttgccaatatttctgttgcaaaaaaattcatgaggaattttctgaacatgctctgcttcgaaaacatcctgctccacctccatcaaattatgaaattcttgttaaggcagccaggtcaaggaatttggaaattaagactgatacagccaagtctttggctgagtctttggatcaggccgaatctcctacttttccatatctaaacactctgttgagaatattagccactcgctgtatgatgcaagctgtgtacttctgtgctggaatggataatgatttttcatcactatggcttagcgtctccaatatacacacattttacttcacccattagaagatacgcagatgtcatcgttcatcggcttttggctgtggctatgggggctgactgtacttatccagagttgacagacaaacacaagcttgcgattatgtaaaaatctaatttccgggcccaaatggctcatatgccc

SEQ ID NO: 165917 - DNA, 759 bp, Homo Sapiens
tgcaggtccccggctcccctccccgtgcgtccgcccatggccgccgccgggcagcctgtgcttgctctacctgtcggcggggctcctgtcccggctcggcgcactttcaacttggacactcgggaggacaacgtgatccggaaatatggagaccccgggagcctcttcggcttctcgctggccatgcactggcaactgcagcccgaggacaagcggctgttgctcgtgggggccccgcgggagtaagcgcttccactgcagagagccaacagaacgggagggctgtacagctgcgacatcaccgcccgggggccatgcacgcggatcgagtttgataacgatgctgaccccacgtcagaaagcaaggaagatcagttggatggggggtcaccgtccagagccaaggttccaggggggcaaggtcgtgacatgtgctcaaccgatattgaaaaaaggcagcattttattacgaagcaggattcccgagacatctttgggcggtgttatgtcctgagtcagaatctcaggattgaagacgatatggatgggggagattggagcctttgtgatggggcgattgagaggccatgagaaattgggctcttgccagcaaggtgtagcagctacttttactaaagactttcattacattgtatttggagccccgggtacttataactggaaagggattgtccgtgtagagcaaaagaataacactttttttgacatgaacatctttgaagatgggccttatgaagt

SEQ ID NO: 165918 - DNA, 471 bp, Homo Sapiens
  misc_feature (404)..(404): n is a, c, g, or t
  misc_feature (434)..(434): n is a, c, g, or t
gccctctcccatccatatcgtcttcaatcctgagattctgactcaggacataacaccgcccaaagatgtctcgggattcctgcttcgtattaacatgctgccttttttcatatcggtgagcacatgtcacgaccttgccccctggaccttggctctggacggtgacccccatccactgatcttccttgctttctgacgtggggtcagcatcgttatcaaactcgatccgcgtgcatggcccccgggcggtgatgtcgcagctgtacagccctcccgttctgttggctctctgcagtggaagcgcttctgcccgcggggcccccacggagcaacagccgcttgtcctcgggctgcagttgccagtgcatgggccagcgagaaagccgaagaggttccccggggtnttccatattttccggatcaagttgttcctnccgagttttccaagtttgaagggttgcgcaaggccgt

SEQ ID NO: 165919 - DNA, 559 bp, Homo Sapiens
cccttagggttcccaaatggtaattccttggaaaagttcgcaataagattctagtcctctcttttctttaagcttatggttgaaggttaaccttgtttgtgcagattaccaaattactgctgatgtagtatgataaagtcagcttcttggatacagacacacccagggcagctgccaatcagaaatgcaaattgctaaattccaaacagaaccagtgactttgctgctacatatttactaaattgaccactttgattcttgcttgtttgtctcagttatagggagttttgtacatggtgcctcttgttttccatcttcatggccttttctgttgagaaacatctaaagtgtattaacagtgcatgcttttactttgtaaatgtggtgccaaatccctgtttgccatcgtttttactgtaccgatgttaactgtagtaatccttagccagtatgttcttttgctgaaactgttgcattttgggacttttttccactttgtcatgtgtacatttttaatctgttatagttggcggcagtattaaaatggggggttaagggc

SEQ ID NO: 165920 - DNA, 480 bp, Homo Sapiens
gcaggatcttatggcgttgtcagtggcccacgctgtcgtgaaggtcattgtagatagaccaaaatgataatgcgccggtgtttgtcaaccttccctactacgccgttgttaaagtggacactgaggtgggccatgtcattcgctatgtcactgctgtagacagagacagtggcagaaacggggaagtgcattactacctcaaggaacatcatgaacactttcaaattggacccttgggtgaaatttcactgaaaaagcaattcgagcttgacaccttaaataaagaatatcttgttacagtggttgcaaaagatggagggaacccggccttttcagcggaagttatcgttccgatcactgtcatgaataaagccatgcctgtgtttgaaaaacctttctacagtgcagagattgcagagagcatccaggtgcacagccctgtggtccacttgcaggctaacatcccggaaggccttgata

SEQ ID NO: 165921 - DNA, 487 bp, Homo Sapiens
  misc_feature (133)..(133): n is a, c, g, or t
  misc_feature (142)..(142): n is a, c, g, or t
  misc_feature (148)..(149): n is a, c, g, or t
  misc_feature (168)..(168): n is a, c, g, or t
  misc_feature (186)..(186): n is a, c, g, or t
  misc_feature (224)..(224): n is a, c, g, or t
gtagtgttgctgcggtcggtctagaggatcccgttcattttctacaccaagctcagcaatcggacatctctggggaaaggaaggtggcacagaccatgttccctggttcctccctgccccttgccaggcttcncttattccnttactnnatgggaagaggtcatatcnccttccctgcccctcgcntgtctttagcaatgcaggtttcactgtcttcattaganagaggacaagtcaaaagtgaatcatttttcactacttaaggaataaatccaagagctttccagagactggctgctgcagccctgggaatgtctgtggaattactatgtggaaatggaactttgtgttatgctctagacattacagttatttgagtgttactcgttactgttgaggtcagtgcttcgtggcaaatggctgtactggatatcccagctctgctgcccttgttttgctgcatgttaaataaaaccattttcactgc

SEQ ID NO: 165922 - DNA, 992 bp, Homo Sapiens
  misc_feature (581)..(589): n is a, c, g, or t
tctacatagtgtttaatgaagaagagacagatggaaagagatgggcgaggaaggctgatgttacaaatataaactttgccagcactttcaaaacaatagcaaatacacttaaatacatacaaagtttattaaaaataggttgcaactgaaatacagtagaaatggaaaactacagcagttttgatgttttctcatagtaatgcagttctgaaaagcacttttacacatattcacatttgacctcactgcccaaagatggccaaatccacttgtgtatgggtttcacaaccacacatacaaatatccctgtatgtagatatttacatgtatctgcatgttctcctgtgtatttttctatatattaacagaaaagtaattcatctgcatctctttaaagaaagtgtggatttagtcaccataaggctgccagtgtcctcaagatatttgggaggtgcctgcttttcctagaacttctgctgcaagcaagcaaatccttcctaaacactcagaaccattcactctcttactcaaacaaggaaatggtaagagcacactttcaaataaaaaccctgatagaggtnnnnnnnnntatttacactcgcatttttaatgatttatcatacaacttttattaaaagtgatttcgaaggcagtaaaaagcccctatacctctctttgaaagtgtgcctattttcctaacatatgtaagagaacattctctttgaaaatgtgtctattttcctaacatacgtatgtgtaagagaacattctctttgaaagtgtgcctattttcctaacatacgtatgtgtaagagaacaatatggtacagaaaaatcatttggactccaccaagggctttgtcaaatagaaaatttgcttgtaatcacaaagtaatttatcatcttaacaccagacaatataaaacacactgaggtccgtctctccaacatcagccacatatccatagctgaagaaatgacagtggtaacta

SEQ ID NO: 165923 - DNA, 832 bp, Homo Sapiens
gaaggcagagggcgtccaggtccgctcggtaaccgtttcccgcgcgcccggccccgactccggggtaaagagccccggagcggagcagcgctggccgcgtgccgcctccggagccggcagcccccatggctgggggttatggagtgatgggtgacgatggttctattgattatactgttcacgaagcctggaatgaagccaccaatgtttacttgatagttatccttgttagcttcggtctcttcatgtatgccaaaaggaacaaaaggagaattatgaggatattcagtgtgccacctacagaggaaactttgtcagagcccaacttttatgacacgataagcaagattcgtttaagacaacaactggaaatgtattccatttcaagaaagtacgactatcagcagccacaaaaccaagctgacagtgtgcaactctcattggaatgaaacctcagaaaaagagcaacagaagtaattgtttcaagctcctgattctttctactaaatcatgaacagctttaaaaacatttctgtctgcataaaattattttacttgtaacttttccccaattgttctgtgcattgttttgcctttttaaattacatctccaagtggctcaaaaggccttgacacagggaacctgcacatatccaggatatgtgtaaccagcgatggtgacttgaccttgccaagacctgtgattccttcaggatacaatcagtgagaaataaaaacacatcttgggaaagtgggaatcctggagtttatgccatttgcaatattaaacaataaaaatgcaagttattatttcaagtaaaaccacaaaaaa

SEQ ID NO: 165924 - DNA, 240 bp, Homo Sapiens
atagaggatcccgttcatttctacacgctattttaagtaacctgaattcttctgagtttcgcatgtattaaattcaattaatgctgaacatgaagagtaaagtatttatctgaaagaagtttctgggttaggagaagtaatgaatgtatccatttgtacatggtttacatgtggtggatgctttgtaaacattttcctgtatgtttaaatggtgtttcagcaggatgtaattgcccttgt

SEQ ID NO: 165925 - DNA, 374 bp, Homo Sapiens
  misc_feature (31)..(31): n is a, c, g, or t
  misc_feature (47)..(47): n is a, c, g, or t
  misc_feature (53)..(53): n is a, c, g, or t
  misc_feature (63)..(63): n is a, c, g, or t
  misc_feature (71)..(71): n is a, c, g, or t
  misc_feature (163)..(163): n is a, c, g, or t
  misc_feature (170)..(170): n is a, c, g, or t
  misc_feature (173)..(173): n is a, c, g, or t
  misc_feature (180)..(180): n is a, c, g, or t
  misc_feature (340)..(340): n is a, c, g, or t
  misc_feature (349)..(349): n is a, c, g, or t
aataagccactgttacttacaagtagatggncccacatcttaaactntggggnagatatttanaaatattntttaaatagctggctgctggagctgaaatgtaaaaagaagtacttcattcattctttaatttgctgtgctgataatacagccccagccctanaaactgnttnatgctcnactcctacacatcccctcaaactgcttaaaataattgactttaaaacactccagatatctgcaaagcccaataggctaggggaatggagaaaaaaggatactgtttgactatacagtaactatagcattaactgaccctgcactggccctgctaaaaagncagaaattnactgaactgaaccctaggttaaaga

SEQ ID NO: 165926 - DNA, 1099 bp, Homo Sapiens
  misc_feature (934)..(957): n is a, c, g, or t
gtgaccctcaacgagtggtcactgcgtatcagaaagccactgaagaacatagtactcggcaaagagagccctgaaatacacaggagaattgacatctcaccaagtaccctgaggaagcatacccgtttagcaggggaagagagagtttttaaagaagaaaatcaaaagggagataaaaaattaaggtgtgactctgctgaccttcggcatgacattgatcgccgtagaaaagaaagaagtaaagaacggggagattccaagggctccagggaatccagtggatcaagaaagcaggaaaaaactccaaaagattacaaggaatacaaatcttacaaagatgacagtaaacataaaagagagcaagatcattctcgatcttcatcctcttcagcatcaccttcttctcccagttctcgagaagaaaaggagagtaagaaggaaagagaagaagaatttaaaactcaccatgaaatgaaagaatactcaggctttgcaggagttagccgaccacgaggaaccttttttcgaattagaggcagaggaagagccagaggagtttttgctgggacaaatactggtccaaacaactcaaatactacttttcaaaagagaccgaaggaagaggaatgggatccagaatataccccaaagagcaagaagtacttcttgcatgacgacagagatgatggtgtggattattgggccaaaagaggaagaggtcgtggtacttttcaacgtggcagagggcgctttaacttcaaaaaatcaggtagcagtcctaaatggactcatgacaaataccaaggggatgggattgttgaagatgaagaagagaccatggaaaataatgaagaaaagaaggacagacgcaaggaagaaaaggaataataaatatgaagtaagattacaacagagcagaacttgcacccaccannnnnnnnnnnnnnnnnnnnnnnncaaataagaatgtaagcattttacttaaattttactgtttgcaagtagtctatagaaattttgttttaagtcttcaaatatcttgagaaatagtagactgtatgttgaaaattgtactgaaataaagtagaaaattgttacg

SEQ ID NO: 165927 - DNA, 1701 bp, Homo Sapiens
  misc_feature (1065)..(1235): n is a, c, g, or t
  misc_feature (1242)..(1351): n is a, c, g, or t
  misc_feature (1368)..(1377): n is a, c, g, or t
  misc_feature (1479)..(1488): n is a, c, g, or t
  misc_feature (1530)..(1551): n is a, c, g, or t
gcgaccgctccaacatcagaatggggtggaagggtgatggggagctaatgaactagggagaaaaactttccatgtgtgcggtatcgtctttcagaatgtctcctggcatcctaaccatgtaatatgacaattgggggtggggttgaaatagcccataaagacctgtcttcacaacacttgcattgtagagaaaggcttcttatatccttttcaatagactgccctggctctttcctaggccttccactacctcctttctttctcccactttctaggatcatttttatgtaaagtcacatatcccaggccctcaggttgaatccagagctgtagaggttacagtagcatcaccagccttgggggtccagagcctaatttatattcactatccttccaagtcccgggtagcagaagggttgccatagatctcagtttgatcaaaaagaaggcttagaattctgcagttaagctgaggtttaaactaaaaaatgtttccttgggtcagtggttttgaggtccagtagctaggcttttctcctttggccttcctgtgggaatgaaaacatttcgattttccttcatctgtgactggtgccatagacacaggtttatagttttaacttacagtattgtttgaaatttacctgtttttcttgtcaaacctgagcactcctcctgctgaagtttcttatttaattccagagtactgtcctctactctaaggcattacttttaagtgtattatgaaggcagttttcaaaggatatgaccagttggggtaattcaaattaaaaaggaaaagatttgtttggaagtaactggtgtctctaagaggaatttttagatgtcagtttggaggctctttcccccctcaattgagagctcttgttattcagagctccaagactagacctggctaacaaacataggagacaaagttaggaaacattgatacaagctttgtacagagatttgtacatttgtgtaataggccttttcatgctttatgtgtagctttttacctgtaacctttattacattgtaaattaaacgtaacttttgtcnnnnnnnnnnnnnnnnnnnnnnnnnnnnnnnnnnnnnnnnnnnnnnnnnnnnnnnnnnnnnnnnnnnnnnnnnnnnnnnnnnnnnnnnnnnnnnnnnnnnnnnnnnnnnnnnnnnnnnnnnnnnnnnnnnnnnnnnnnnnnnnnnnnnnnnnnnnnnnnnnnnnnnnnnnnctttggnnnnnnnnnnnnnnnnnnnnnnnnnnnnnnnnnnnnnnnnnnnnnnnnnnnnnnnnnnnnnnnnnnnnnnnnnnnnnnnnnnnnnnnnnnnnnnnnnnnnnnnnnnnnnngggggggtttccccacnnnnnnnnnncccccggggccccaaccggttttcaaaaaaacaaagaggggttttgggaggtttttcgggcttctcacaagggggcccccggggctctttttttatatattnnnnnnnnnnggggattttttgggaaaggggggaaaatattaaaaaactttnnnnnnnnnnnnnnnnnnnnnnagggggtgggtagcgatcttttttttcccggcggccccaacccttttgggcgccgggggaaaaaattttcccccccgggggaaaacggggggcccaataaaaatcgttttcttggggccccccgtttaaaaaaccaagcggggggaaaca

SEQ ID NO: 165928 - DNA, 835 bp, Homo Sapiens
  misc_feature (77)..(118): n is a, c, g, or t
ggtgaggagatacaagggaagtggctatcgccagagtcggattcgccgccgcagcagccgccgcccccgggagccgnnnnnnnnnnnnnnnnnnnnnnnnnnnnnnnnnnnnnnnnnncgcaccatgccgtcggagaagaccttcaagcagcgccgcaccttcgaacaaagagtagaagatgtccgacttattcgagagcagcatccacccaaaatcccggtgataatagaacgatacaagggtgagaagcagcttcctgttctggataaaacaaagttccttgtacctgaccatgtcaacatgagtgagctcatcaagataattagaaggcgcttacagctcaatgctaatcaggccttcttcctgttggtgaacggacacagcatggtcagcgtctccacaccaatctcagaggtgtatgagagtgagaaagatgaagatggattcctgtacatggtctatgcctcccaggagacgttcgggatgaaattgtcagtgtaaaaccagaaaaaatgcatctcttctagaattgtttaaaacccttaaccagggaaaaacagggggtgttaccaacttgagaaacgatcaggttcatccaatccccgattctgcaaacaggagtgtgtcccccctgggagtcgtcaggaaactgcggttgtggcctccagcacaaaacaacggagccccaagtggagccccttccgcctttggcaaccttatttatctctcaaggacggccaccctcggttttcaaatttttgaaaggtccaacatcaagaatacctttgccattctcaaggtgcccacaacaaatcgaccctcccacgtaaccaa

SEQ ID NO: 165929 - DNA, 429 bp, Homo Sapiens
  misc_feature (200)..(200): n is a, c, g, or t
acctcctaccccacgagctcacactatcaagtaggtacacttttctagtgtgaaattttctgatccatcagaaacatacatcatgaagagggccttcataatgcaaaaggagtaaacagaagataggtttaaaaaggagaaattcatcatctctacatcaggcattagaactgtaagctgtatagcaaaagcacacaccngaagctccagcctatttctgtatcagtcattgcatgctcatatcagagcatcacaatccagtatgagggggaaaaatctgaaaaataactctaactatcaaagataatcaattaaagacacacaggcggcaatcctcaggagttggatcatccttttttccacagtaacttattctgtttcgattaagtgtcaaatgattagcaacaaaaaataacatatggttttaat

SEQ ID NO: 165930 - DNA, 840 bp, Homo Sapiens
  misc_feature (727)..(779): n is a, c, g, or t
  misc_feature (781)..(782): n is a, c, g, or t
  misc_feature (798)..(799): n is a, c, g, or t
  misc_feature (822)..(822): n is a, c, g, or t
gggtttcaagctggcaatagaatgaatgcaatgttatggtttaagcatttgagtgcagcctgccaaagtaacaaacaacaggttcctacaaacttgatgacttttgagtagaagcctgagaaaaaaagagaggtgaactgttgcttctacgtgagcatgaggacctgataaaagagagccagctataaaccatcctgtgccaggaagagcccagaggctctgtctcagtcgttggagttctcaaccaaaaaagcactaatttcagggaatgatttgagatattcccagagaacaaattggagttgcaaaacaaactgccatgaaccatgcttcttatctcagaactgacctgtggaaaccactgccttaaaagaatgaaaggaaaaccaacatgaaacaccaaatagtgtgtgtgaatcttctggcggtgctgtgcttggaatagatcgtagctaatttgcatttcttttaactttgtaataattttagaggggggaatggccttttttagatatgctttaaaaaggaaaaacatactcttgtggattccatcaggagctggttttgaaccgaggtgaagagacttagcagggattgtaccagcagcccacctgcaaggtttgttctccctctagtagtctgcaacctcactggctttctcacagcaagagtgtaggaatgagaaatgttagtcatgtgaagttcttgggtttgttttggatatttnnnnnnnnnnnnnnnnnnnnnnnnnnnnnnnnnnnnnnnnnnnnnnnnnnnnngnnggttaatttttgtgtnnttgttgttttgtgtggggggaanttttattttagggtaggg

SEQ ID NO: 165931 - DNA, 610 bp, Homo Sapiens
tcccccacgcagattgtgcctaatttgaatcagtcaggaacagggttgaatcagtcgaggacgggcatcaaccagccaccatccctgacgcccagcaattttccttcacccaaccaaagttccagggcttttcaaggaactgaccacagcagtgacttagcttttgacttcctcagccaacaaaatgataacatgggccctgccctaaacagtgatgctgatttcattgattctttattgaagacagagcctggtaatgatgactggatgaaagacatcaatcttgatgaaatcttggggaacaattcctaaagaagaaagggaagacaatttacaaactccatagcactaaaaggcagtatattacagaaactctgtagaggctgaactgttgatgttcaggtggactacatgaagataacatgcttaaaaatggaaagcagaaagtaactgcagtgatgaacattttggtccaaattcttgttttaaatcttacacctgaaagtaaaatattgggatcacttttccctgtctaaactccaggatacagtatccaatttatccaaacagaactgtggtgtcaatgtgtaattaatgtgtagaaagtgaa

SEQ ID NO: 165932 - DNA, 607 bp, Homo Sapiens
ccagtaatgtacccttcgcatgaacccaaagtgaccttcagcgagtaactctagcaggcctgggctagctgaagggactactgggcttccggagccttagttatgtctgatgactttcaagaatcatcctggtggaggctttagccctcgtcaaggtactgtgtcttctaggctggtctcctgggctccctgcaaggaaacctttaggcttctaagatttggacaagccacctagagtgtggctacacttacagagtaaacttgctctccgagctgaaaacaaggacacaggacaaggacacagaaaggacaagagctcttttaagcagaccagaaagcagaggggtctggggaatggggttttagcactgtacctaaagccatgttgcttttcagccccaaactgccctcaagcccattcctcagttgtcctcattttaccttatacacttctctcctaggatgtctgaatccagagttctgcgcgtgctctacacaactcctcctgcttggaattgcaattaccccacatctctctaataccttaggtgccctgtctctaaaatttatatggtatctctgttggtaccgcatagggggacctcta

SEQ ID NO: 165933 - DNA, 456 bp, Homo Sapiens
gaagaaagcgtgatgaggaccggcatgacatcaacaagatgaagggttatactctgctgtcggagggcattgatgagatggtgggcatcatctacaagcccaaaactaaagagactcgggagacctatgaggtgctactcagcctcatccaggctgctcttggggaccagccacgtgatatcctttgtggggcagctgatgaagttctagctgttctaaagaatgaaaagctgcgggacaaggaaaggcgaaaggagattgacctgctgctgggtcaaacagatgataccagataccatgtgctagtgaacctgggcaaaaagatcacagactatggtggagataaggaaatccaaaatatggatgacaacattgatgagacacacggtgtgaatgtgcagtttgagtctgatgaggaggaaggtgatgaagacgtatacggggaggtccaagcag

SEQ ID NO: 165934 - DNA, 790 bp, Homo Sapiens
ttttgcagtgctcccaattttatttttatttaatgctaaaagttaaagaaaaaaaggtactgtaaatctgacaaatgacagaattcaggtgatatttccatagcgtgattttaaaatataataatgttgatatctgagattacactcacttcagttgacatgagtttcatcatatatagaaaaagtatcaccttcaacttaaaaaaagtaaaggttaaaaggtggcacacttttaaaatacttggtggccaaggaaaggtatatagtaaaagttgtaaaccatgtgtatgttctcataactttaaatgtgaggccacatgaaagacagtacatctgttaaattctataaattgttaaaagcaaaaaaagggaaagcttcaacaccccatcccctaatattttgagtattaaaagcacagctgaaatattaggatttgaaatctgatactgcccatgtacagtaagtagctttgtgacatttttatccagctgtggagaatctctgcactgtcatcaggtacaacaaaagatcaaacccatgtcccgatgttaactttttaacttaaaagaatgccagaaaacccagatcaacactttccagctacgagccgtccacaaaggccacccaaaggccagtcagactcgtgcagatcttattttttaatagtagtaaccacaatacacagctctttaaagctgttcatattcttcccccattaaacaccagtacagagaaaccacaggttgccctttccacagctggatagacttatccaaaacggcaggatgg

SEQ ID NO: 165935 - DNA, 618 bp, Homo Sapiens
tgggcgaggctcatttcaacacagatgcattagaccaaggactctgaactcactttccctggaggtgggggtgctatcagctgcttaatggagcatcatggaaaatgtgggactcaaggcctgaaggactccattcctaagagatgggagcaggagacatgctacggagtttgaatcttgcctagcacagggatttctgcctgctggaagggctctgtcagggcctagtggaagcccctgcctcagtggggcaaactgccactggacacacccatcattcatcatcacctctctgggacagtagtagcagccaggcacctccaaagagcttgacaacagaggaacccgcttcggcccctcctctgaagacaggatcctgcgctactccaactctgaactggttcaaggtgagagacgtcatccacagaggccacaaaaccaagaggtggatgcctcattgttacttcatgctgtctgggagcaaagagagggccttaggcacaaaatcctccagacccgcatctgccccttggctttctcaacccttcactctccaacttctataaataacctgtacagtggccaggcaccgtgcttatctcaatccggggatcctct

SEQ ID NO: 165936 - DNA, 514 bp, Homo Sapiens
ttctggtacataaagatgagtaatataaactgaaatctataattttaagggcttaacctgtgactttaataagctggaacagtccactgaatgggtataatgaattgcagtatatacgtatgattgctttttaagtgattatcttttcttctgttaagtcatgtaaattcataaatccttttgcactgatgtgttgaaccttattcttgtacattcattcaatcaaggcaaacttttataatttttcttttgtttccaatgaccttgaaatgttatagcatggtaatattctatgcaactatagttatactttttggtttgacactgtattttttcacattgatttactggttgatgatagattttataacctaacggttctcatgcggtgcgtaattgtagatgcatgtacttgtgtgttttgtgtaattattgaagtgcaatgatgtataaaaaagtggattcacctgtttttaaaaataaaacattgataacacaggcccaagatgagggt

SEQ ID NO: 165937 - DNA, 621 bp, Homo Sapiens
tattttctacacacgtacaaggtgtcagagtcaaaggaagcctgtgcttcagggcaggtaagacctcaagtggacctgggcagtgacgccggctgctccacagccccaaacgctgaggaacgtgggcctcccaactccaccgcggacccgcccactgggccactcgggaaaccctttcccaaaatgaacttttaccaaagaggacaaaattcaactgaatcacatggaaatctgacaggacaagggaaagaaaacttgactgagagacaggcacgaggacgggagggaggaggatccaggcaggtcctcacgtgtccaggcgctggatctcagggcgactgtccacatccctggactccgtgcgggctcggatgtagtcattggtgctctgctggcggacgctgactctccatttctgcactgccaggaatgtgttcactgcatatgccgcagtcgccaagaagccaaatatcacggcagcaatttctgctccggctctatggtttaaagcagccagtacgattgaagcaataaagaaaaggaaagcgctgagtccagtgttgaccaaatctgtcagattccagttgatctgggggatcctcagagcgacgatcctctaga

SEQ ID NO: 165938 - DNA, 349 bp, Homo Sapiens
  misc_feature (232)..(285): n is a, c, g, or t
ggcagaagactcaggacctatggaaaggctccttttagtaagacaaaagtgattcatgattcacaggaaacagcagagaaggaagtaaaaaggaagagatcgcatcctgaattggaaaatgtgaaaatctctgaaacaactgggaattcaaagtttagacctgatactagttccaaatcatcagatttgggatctgtaactgaatcagatattgactgtactgataataccnnnnnnnnnnnnnnnnnnnnnnnnnnnnnnnnnnnnnnnnnnnnnnnnnnnnnnacttttacagctaacatatctaaaactgtgagacgtcaaagacaaagcaaacgccctaggttaa

SEQ ID NO: 165939 - DNA, 302 bp, Homo Sapiens
  misc_feature (118)..(118): n is a, c, g, or t
atccattgttgttgaatgagttactgtaaagatcaaatgaaatgtccgaagtgagagcactttgaagtacagagccacgtagtcctatacccacttccagagttactcactgctacgngcatctcctgtcctctcctccatcctcttccaacttttcttttgggccctatgtctcattttcccaccgtttcctaactttatacctttggttatttttacaccaggattcttaacttgtgattcatgggtaggtgctgggggtttcataaccccatgaaatcgtatgtaaaattgtatgtggc

SEQ ID NO: 165940 - DNA, 1788 bp, Homo Sapiens
gagactcgagccctcaaatacctaactgatgagacccacagagaagtaaaatttacttctctctgagaagggagagatgagagaaaggtttgcttttatcattaaaaggaaagcagatggtggagctgaatatgccacttaccagactaaatcaaccactccagcagagcagagaggctgaatagattccacaacctggtttgccagttcatcttttgactctattaaaatcttcaatagttgttattctgtagtttcactctcatgagtgcaactgtggcttagctaatattgcaatgtggcttgaatgtaggtagcatcctttgatgcttctttgaaacttgtatgaatttgggtatgaacagattgcctgctttcccttaaataacacttagatttattggaccagtcagcacagcatgcctggttgtattaaagcagggatatgctgtattttataaaattggcaaaattagagaaatatagttcacaatgaaattatattttctttgtaaagaaagtggcttgaaatcttttttgttcaaagattaatgccaactcttaagattattctttcaccaactatagaatgtattttatatatcgttcattgtaaaaagcccttaaaaatatgtgtatactactttggctcttgtgcataaaaacaagaacactgaaaattgggaatatgcacaaacttggcttctttaaccaagaatattattggaaaattctctaaaagttaatagggtaaattctctattttttgtaatgtgttcggtgatttcagaaagctagaaagtgtatgtgtggcatttgttttcactttttaaaacatccctaactgatcgaatatatcagtaatttcagaatcagatgcatcctttcataagaagtgagaggactctgacagccataacaggagtgccacttcatggtgcgaagtgaacactgtagtcttgttgttttcccaaagagaactccgtatgttctcttaggttgagtaacccactctgaattctggttacatgtgtttttctctccctccttaaataaagagaggggttaaacatgccctctaaaagtaggtggttttgaagagaataaattcatcagataacctcaagtcacatgagaatcttagtccatttacattgccttggctagtaaaagccatctatgtatatgtcttacctcatctcctaaaaggcagagtacaaagtaagccatgtatctcaggaaggtaacttcattttgtctatttgctgttgattgtaccaagggatggaagaagtaaatatagctcaggtagcactttatactcaggcagatctcagccctctactgagtcccttagccaagcagtttctttcaaagaagccagcaggcgaaaagcagggactgccactgcatttcatatcacactgttaaaagttgtgttttgaaattttatgtttagttgcacaaattgggccaaagaaacattgccttgaggaagatatgattggaaaatcaagagtgtagaagaataaatactgttttactgtccaaagacatgtttatagtgctctgtaaatgttcctttcctttgtagtctctggcaagatgctttaggaagataaaagtttgaggtaatccgtgagggccctcacggattacctcaaacaatctgcctttacttgctgcagccaaaactaaagtcgtctagattcccctctcccatttcttcacttcttctagctccttaacaccactggtccaattctgcccaacaatttgggaaaatca

SEQ ID NO: 165941 - DNA, 245 bp, Homo Sapiens
ttttttttaattgacaactcaatctctacatacatacagtattgcacgaattataagtggatcaacaattatattattgatacaaactcatgagcatttacataaaactaccgctctaggttttggtgtgttttgtgtcagctactttagtgaataaacgaaacataaaggaactcagctacttgaattcatgagaatcagctttcaaaaaaagcatatatatactcatagtgtagaaaatgaac

SEQ ID NO: 165942 - DNA, 691 bp, Homo Sapiens
atagaagtgaaaaatacacaccctgtggaggtagtgtaccttagtgaggctcaaaaggattcttttgagtctatttaacgccttatctttgacattcaccactcgggtgagaaaggtgacattgtagtctttctggcctgtgaacaagatattgagaaagtctgtgaaactgtctatcaaggatctaacctaaacccagatcttggagaactggtggttgttcctttgtatccaaaagagaaatgttcattgttcaagccactcgatgaaacagaaaaaagatgccaagtttatcaaagaagagtggtgttaactactagctctggagagtttttgatctggagcaactcagtcagatttgttatcgatgtgggtgtggaaagaagaaaggtgtacaacccgagaataagagcaaactcgctcgtcatgcagcccatcagccagagccaggcagagatacgcaagcagattcttggctcatcttcttcaggaaaatttttctgcctgtacactgaagaatttgcctccaaagacatgacgccactgaagccagcagaaatgcaggaagccaacctaacaagcatggtgctttgtatgaagaggatagacattgcgggcctaggccactgtgacttcatgaacagaccagcaccagaaagtttgatgcaggcataggaagacttagattatc

SEQ ID NO: 165943 - DNA, 935 bp, Homo Sapiens
ccgtcaccattcatcaatagtatccgaaaaggaagaatcaggagttacaaaaacaagttaaatgcaatatagaagcctactaaatacaaatacaagttcacaaacacatatgcaacagaaacttgtttagattgtttcttgaagtttgactacttaaaaacataggtgtaaaggaaagacattcagactggtccacgtgggcttgttagcaggcagaggaaccctgctttccaaaaactgatatagtccagagtcacggcatgtgggaatgtttccatggacactggatcttaacagatgctatagtgtttacaaaactacacacacagagaaagcccaaggaagcctgcaggctaagccctatgcttttagagggctgaaggaaccaaacctagtttaatcctgtttgtttgctccatgcaaaactttatggaagactccccagactaggctatttagcagcttccatgaatggtcctcagatcatgtgattctacggcatagacgacagctgccctatttacacagaagctgcagaactcaagaggaatgtggatttgctcttgggagttcaatgttgcagggtagagtagtcttggatgataaccatgttctaaatgactagtgaagagacactgtggtttcttgcttttaacaaattggtgtactcttgccctcctcccatagtgtccaagggctggtaaaacctttgattaaggcgtgctgctgtgagttctccaaggcacttggacagggagctgcatttcagactgaacaagtggagtttgaagagtttttagatgggatggatacataaaagcttgaaatgctaaacaaagtggaattttctcctttcaaatgagaacaagaaaaactagaaggaattctatttttggcacaacagtttctcacagttgcctgtgcattacaacccc

SEQ ID NO: 165944 - DNA, 736 bp, Homo Sapiens
  misc_feature (390)..(390): n is a, c, g, or t
tttgattacggcaattcgagcacatggattaaataagaataagccttgtatgagatctagtaagtcgtctcctgctgcactgaagatgtgatgcaaagatattccagggaaactcttaaatgtcacataatctggaagactacacatgtccggccactgttcctcagttggtgtgcccaaagtttcaaatattcttgttagctgatcaaggtctgaatctcctggcaaaaaaggaacccttagaagtaactctgctaatatacagccaacagcccacatgtccacacctacaccatacatcctagctccaaatagtaactcgggggcccgataccacctggttacaacctgatgtgtataagctctatgggggctcccaaaagatttggncaggccaaaatctgccagttttagaactccattttcatctagcaacaagtggttgggtttcagatccctatgtaggatccaatgttgatgtaaatattctaatccttgaagagtcatcaacatgtaggctttgatgtgtgatggtgtcagcacaagactattatcctttattataacctctagatcagtttccataaaatcaaagacaaggctaatattagatttatgtccaaaagcatcaggagaccattatattggatgacttagctccgtaataatttatctctctaaggcggtctattatacatcttagctcggcgggtacgagccgatcgaacaggcagcg

SEQ ID NO: 165945 - DNA, 972 bp, Homo Sapiens
  misc_feature (830)..(830): n is a, c, g, or t
  misc_feature (855)..(855): n is a, c, g, or t
  misc_feature (870)..(870): n is a, c, g, or t
aaggggggtgagccacactcgcgagggtgcaccccccccaaaacccgtgttgctttccccctatgcgcgaggaaatgaggggtcccctgtaaacccccccaagggaggccccccaggaaacccctcatgtttttcggggggggcccttccttaaaagataggcaaagggggggccaaaaggtatttccctaccgggtcctaacaaattaagaaccccttcttttttaggtgcaaaaaatatacctttaggggggaccggaccctagggttttccccccttaacgaaaaggcaaaacccgaacggagcgggaccaagggaccagaccaggagcaagcggccccccagggccagggatgtccaagaaccgaagagaggtgacccgcctgcagcactggccgagaactgcgggggaggtaagggccacagcttgacctgctcatctattgagggggctagggaaggttgcaggggttgagggcccaggcccaacctccccactccacagttggcacaggttctccctgcttggcagcttctatcgtgggcagccctctggggacttgcaggggtaggtgtaaaggtggcagtactggggctgggctggggaccagtttctagcaccacactctgagccaagggggtcctggggatgaggctagagtcccgtgtgccctcggttcctaggccccaaattcctctcctggggctgtgcaagcccagtgttggcacctcccttggccaggcacagacacacaaacaccacacacgtggggccagggaacactcagaggagccgtcccatggcaggcagacgggatggcagggcagnggtggcctccatcctgggccacagnaaccctgctcagccntgtctataccttgttagcaggcagaggaaccctgctttccaaaaactgatatagtccagagtcacggcatgtgggaatgtttccatggacactggatcttaa

SEQ ID NO: 165946 - DNA, 908 bp, Homo Sapiens
ggggtgggtgttggaggctttaaggtagctttaaattcgtgttgtcctgggagctcgcccttttcggctggagtcgggctttacggcgccggatggctctggacgtgaagtctcgggcaaagcgttatgagaagctggacttccttggggagggacagtttgccaccgtttacaaggccagagataagaataccaaccaaattgtcgccattaagaaaatcaaacttggacatagatcagaagctaaagatggtataaatagaaccgccttaagagagataaaattattacaggagctaagtcatccaaatataattggtctccttgatgcttttggacataaatctaatattagccttgtctttgattttatggaaactgatctagaggttataataaaggataatagtcttgtgctgacaccatcacacatcaaagcctacatgttgatgactcttcaaggattagaatatttacatcaacattggatcctacatagggatctgaaaccaaacaacttgttgctagatgaaaatggagttctaaaactggcagattttggcctggccaaatcttttgggagccccaatagagcttatacacatcaggttgtaaccaggtggtatcgggcccccgagttactatttggagctaggatgtatggtgtaggtgtggacatgtgggctgttggctgtatattagcagagttacttctaagggttccttttttgccaggagattcagaccttgatcagctaacaagaatatttgaaactttgggcacaccaactgaggaacagtggccggacatgtgtagtcttccagattatgtgacatttaagagttccctggaatactttgctcacatcttcagtgcagcaggagaagaacttatagattctcatcag

SEQ ID NO: 165947 - DNA, 916 bp, Homo Sapiens
ccagtgctggtaccggtccggaattcccgggattcgtcgacccacgcgtcgggctgagctggttcctgtggcccaggatggaggccaccggctgccctgccatcccgtctgcctgccatgggacggctcctctgagtgttccctggccccacgtgtgtggtgtttgtgtgtctgtgcctggccatagggaggtgccaacactgggcttgccacagccccaggagaggaatttgggtgcctagtgaaccgatgtgcacacgggactctagcctcatccccaggacccccttggctcagagtgtggtgctagaaactgttccccagcccagccccagtactgccacctttacacctacccctgctagtccccatgagggcttgcccactgatagaagctgccaagcagggagaacctgtgccaacgtgtggagtggggaggttgggcctggaccctcaaccccttgcaaccttccctagccccctcaatagatgagcaggtcaggctgtggcccttacctcacccgcagttctcgcccagtgctgcagccggctcacctctctccgcttcttgcacatcactggcctgtgtgtgctgcttgctcctgttctgttcgcttgctcccgttccgttcggcttttgctttgcgttagggtgaagaccctagcgtccagctcccctcaacgctatatttttgacactaaaaaagaaggtttctaaattgtaggagcaggattggaaatactttgcttgcccttgtccatcttttaggattgggccccaggagactgaggtcttcctgggcctcattgctgcttatcgtaacccccataactgcacatgggacagaccggctgagggtgaacttgggtgtgtacgtcccacaaagagctcttgggccgattcgctgtgcctgaa

SEQ ID NO: 165948 - DNA, 466 bp, Homo Sapiens
  misc_feature (314)..(314): n is a, c, g, or t
  misc_feature (348)..(348): n is a, c, g, or t
  misc_feature (382)..(382): n is a, c, g, or t
  misc_feature (385)..(400): n is a, c, g, or t
  misc_feature (426)..(426): n is a, c, g, or t
  misc_feature (435)..(435): n is a, c, g, or t
ctgtgattattaaccccactcactaccctgtttcagatgcatttggaataccaaagattaaagccttgacataagatctcatttgcagaaagcagaataaagaccatcagaaggaaatgatttaggttgtaatgcacaggcaactgtgagaaactgttgtgccaaaaatagaattccttctagtttttcttgttctcatttgaaaggaggaaaattccactgtgtttaggcatttcaagcttttatgtatccatcccatctaaaaactctttcaaactccacttgttcagtctggaaatgcagctccctgtccnagtgccttggggggaacttcacagcagcacggcnttaattcaagggttttacccggcccttgggacanttnnnnnnnnnnnnnnnncaggaggtacacccattttggttttnaaaagggcnagggaacccacagtggttcttctttcactag

SEQ ID NO: 165949 - DNA, 758 bp, Homo Sapiens
  misc_feature (179)..(179): n is a, c, g, or t
ggaccatcaaatgttttcaaaagtgtgaagatgattatggaaagaaatttccaacctgtgattattttcagttttagtaagaaagatgtgaagcctatgcacttcaaatgaccaaattagatttcaacacagatgaagaaaagaagatggttgaagaagtattcagtaatgcaattgantgcttatccgatgaagataaaaaactccctcaggtagaacatgtacttcctcttttgaagaggggaatcggtattcaccatggtggtttacttcctattttgaaagaaactatagaaattctcttttctgaaggattgataaaggccttatttgccacggagacctttgctatgggaattaacatgccagctagaactgttttatttacaaatgcccgcaaatttgatgggaaggatttccgatggatttcttctggtgaatacattcagatgtctggtcgtgctggaaggagaggaatggatgatagaggaatcgtaattcatatggtagatgaaaagatgagcccaacaattggaaaacaattacttaagggctccgctgatcctctaaatagtggctttccatttgacctacaacatggtttggaacttactacgtgtagaagaaattaatcctgagtacatgtggaaaaaatccttctaccagtttcagcattatagagcaattccaggagtagtaggagaaggtacagaattcagaagaacagtataataaaatagtgaattcccaatgaagac

SEQ ID NO: 165950 - DNA, 807 bp, Homo Sapiens; identical to SEQ ID NO: 10523
  misc_feature (779)..(780): n is a, c, g, or t

SEQ ID NO: 165951 - DNA, 788 bp, Homo Sapiens
atgctgattccaaaggatccccttgatagcccaatcccaggagagtggctgcaatgagtgtggctcagagagttgctgatgagatggatgtgatgttgggccaggaagttggttactccattcgatttgaagactgcagtagtgcaaaaaccattcttaagtatatgactgatgggatgttacttcgtgaagctatgaatgatcccctcctggagcgttatggtgtaataattcttgatgaggctcatgagaggacactggctacagatattctaatgggtgttctgaaggaagttgtaagacagagatcagatttaaaggttatagttatgagcgctactctagatgcaggaaaattccagatttactttgataactgtcctctcctaactattcctgggcgtacacatcctgttgagatcttctatactccagaaccagagagagattatcttgaagcagcaattcgaacagttatccagattcatatgtgtgaagaggaagagggagatcttcttcttttcttaactggtcaagaggaaattgatgaagcctgtaagagaataaagcgtgaagttgatgatttgggccctgaagttggtgacattaaaatcattccattgtattctacacttccacctcagcagcagcaacgcatttttgagcctccacctcccaaaaaacagaatggagcaattggaagaaaggtagttgtgtcaactaacatagcagagacgtctttgacaatagatggtgtggtgtttgtgattgatcctggtggctatcaa

SEQ ID NO: 165952 - DNA, 490 bp, Homo Sapiens
cactgcctgaaagtctttattgaaaatctgggagaaaatatattgaaatgttagtagtgcataactttaatttttatactttttgcatcttacaaactttctacaataagtacacatgacttatataaacagagaaaagcaatcattatcttaaaaataactatccagtaactgccacaatctactgagtccagacaatctagagcagaagggtagacctgaggaaaatatacacagtataaaaaagtaacaaaatcaaaacctgaaacaaagatcaacatccaataaatgcttctgaataaagggagagtagataagaactggattttaatcccaacactgccatttaccagctggccaatactgagctagttactctaaagagttcagttttctcatttgtacaaataggatttgtctttccatctcactgagttgtgatgagagtcatatgcaacagcatatgaagaggctagcaaaaggtatttaa

SEQ ID NO: 165953 - DNA, 465 bp, Homo Sapiens
  misc_feature (421)..(421): n is a, c, g, or t
  misc_feature (435)..(435): n is a, c, g, or t
attgcatagcctagatgagaaaacacttgtacaaatattaactgagccacgaaatgctgttattcctcagtaccaggccttattcagcatggataagtgtgaactgaatgttactgaggatgctttgaaagctatagccagattggcactagaacgaaaaacaggtgcacgaggccttcggtccataatggaaaagctgttactagaaccaatgtttgaagtccctaattctgatatcgtatgtgtggaggttgacaaagaagtagtagaaggaaaaaaggaaccagggatacatccgggctccaacaaaagaatcctctggaaggagggagtatgactctgggagttggaaggaaggaaggatgggccccgccaaggcaggatgctgccaaacagcttaaactgttcatatttgctgtcnttgtattttacagnttttccctccttttgttttaggggtccata

SEQ ID NO: 165954 - DNA, 357 bp, Homo Sapiens
  misc_feature (263)..(314): n is a, c, g, or t
acagacggcctagacaagggaaggcagacctgcaaatggataatttcagtgtcctgtggctcagtagagatccaggcagagtcccatgggcgtgtttaccgctagataatgcagccacaacactgcagagccagtgccagaacacaggtcctctttgccttagttctggcctcttggtcttatgttgtatttctccctaccatatgaaaatgactaattgtatttctctcagaaggatctctgtttaagtcaaagaactagannnnnnnnnnnnnnnnnnnnnnnnnnnnnnnnnnnnnnnnnnnnnnnnnnnnggctgttaaccgaaaactctggagacagcaagagttggtgagg

SEQ ID NO: 165955 - DNA, 560 bp, Homo Sapiens
  misc_feature (510)..(510): n is a, c, g, or t
  misc_feature (534)..(534): n is a, c, g, or t
cctgagcagtcggtcccaacagtgggcttaaaatactcagtacactatgatgtaaacagacatgctgtcatccaggctttgttgttccatttataaagcacaggcagagtagattcagcaaattctaagggtcctaggattatcagaatgataaatgagcactagcttccacttaaaagtgaccagctgcattatccactaatgagagttagcatgtcctttcaaagcagatgttgtcttctctctagttatgaaagtcctagacggcaccttcttccaatggaaggctgtttcctctacactgacaatctgtttagtcacctgcatcaactgatcttagctagatcttctgggtaacttgcagcagcttctacatcagcacttgctgcttcattctgcactcatggagatggcttctttccctaaaccacaggaaccaacctctgctagcttccaatttttcttctgcagcttcatcacctctcttaggcttcacagaattgaaacganggccttgctctggataagctttancctaaggaaatgtgggggtgctttga

SEQ ID NO: 165956 - DNA, 1560 bp, Homo Sapiens
  misc_feature (1452)..(1462): n is a, c, g, or t
agccccgcagctccccagccaccacactctcaggcctcatcttactggcaggttatattgcttttgacagcttcacctcaaactggcaggatgccctgtttgcctataagatgtcatcggtgcagatgatgtttggggtcaatttcttctcctgcctcttcacagtgggctcactgctagaacagggggccctactggagggaacccgcttcatggggcgacacagtgagtttgctgcccatgccctgctactctccatctgctccgcatgtggccagctcttcatcttttacaccattgggcagtttggggctgccgtcttcaccatcatcatgaccctccgccaggcctttgccatccttctttcctgccttctctatggccacactgtcactgtggtgggagggctgggggtggctgtggtctttgctgccctcctgctcagagtctacgcgcggggccgtctaaagcaacggggaaagaaggctgtgcctgttgagtctcctgtgcagaaggtttgagggtggaaagggcctgaggggtgaagtgaaataggaccctcccaccatccccttctgctgtaacctctgagggagctggctgaaagggcaaaatgcaggtgttttctcagtatcacagaccagctctgcagcaggggattggggagcccaggaggcagccttcccttttgccttaagtcacccatcttccagtaagcagtttattctgagccccgggggtagacagtcctcagtgaggggttttggggagtttggggtcaagagagcataggtaggttccacagttactcttcccacaagttcccttaagtcttgccctagctgtgctctgccaccttccagactcactcccctctgcaaatacctgcatttcttaccctggtgagaaaagcacaagcggtgtaggctccaatgctgctttcccaggagggtgaagatggtgctgtgctgaggaaaggggatgcagagccctgcccagcaccaccacctcctatgctcctggatccctaggctctgttccatgagcctgttgcaggttttggtactttagaaatgtaactttttgctcctataactttattttattaaattaaattactgcaaaacagaggggggataagcgggggcaaaggactagagggagaccgggcggggctcggccagccgtgagggcgggccgagaggccggcgggatactcattcttcgtgtgggcggcccgcccctagggccgccccggagaaaaactttttttaaaaaaacccttttcctttgggggcggcgcggggggcccccgtgtgagggaaaaggggacacccggggggcccacacacgtgggtccttcccaaaagaagaaacccgcgggggcgcaggaaaacaaagggggggtggtggagttctcgccccccccctttatgtgaaaaacgccccccnnnnnnnnnnnataatacagaaaagggatttttgatacaaacaacattttccccagagcgggtgggcgcgtcctcccgtggagggtcactcttattacctggggcgatc

SEQ ID NO: 165957 - DNA, 1226 bp, Homo Sapiens
gggttcctggtgctaatgaaccgagtgctggcactgattgtggctggcctctcctgtgttctctgcaagcagccccggcatggggcacccatgtaccggtactcctttgccagcctgtccaatgtgcttagcagctggtgccaatacgaagctcttaagttcgtcagcttccccacccaggtgctggccaaggcctctaaggtgatccctgtcatgctgatgggaaagcttgtgtctcggcgcagctatgaacactgggagtacctgacagccaccctcatctccattggggtcagcatgtttctgctatccagcggaccagagccccgcagctccccagccaccacactctcaggcctcatcttactggcaggttatattgcttttgacagcttcacctcaaactggcaggatgccctgtttgcctataagatgtcatcggtgcagatgatgtttggggtcaatttcttctcctgcctcttcacagtgggctcactgctagaacagggggcccctactggaggggaaccccgcttcatggggcgacacagtgagtttgctgcccatgccctgctactctccatctgctccgcatgtggccagctcttcatcttttacaccattgggcagtttggggctgccgtcttcaccatcatcatgaccctccgccaggcctttgccatccttctttcctgccttctctatggccacactgtcactgtggtgggagggctgggggtggctgtggtctttgctgccctcctgctcagagtctacgcgcggggccgtctaaagcaacggggaaagaaggctgtgcctgttgagtctcctgtgcagaaggtttgagggtggaaagggcctgaggggtgaagtgaaataggaccctcccaccatccccttctgctgtaacctctgagggagctggctgaaagggcaaaatgcaggtgttttctcagtatcacagaccagctctgcagcaggggaatggggagcccaggaggcagcctttccttttgccttaagtcacccatcttccagtaagcagtttattctgagccccggggggtagacagtccttcgttgaggggttttggggggaattttggggtcaagaaaagcataagggaaggtttccaccagttaactccttcccacaaagtttccctttaaagtcttggcccctagctgtggcctccggccaccctttcccaaaattcccctccccc

SEQ ID NO: 165958 - DNA, 810 bp, Homo Sapiens
  misc_feature (324)..(379): n is a, c, g, or t
ggtaggaaggttggatttggcgtgacttgcttgagcaagagtcctggggagagattttgaggtttaatttaacggtatatccagagctaacagtgactcaactcgtctagttctgcaagtcagatgtacacttagagtctctctgtgaagggtttgggtctgagctgtatagtatgtcaaactgccagtaagccagcccctcaccctctgatagatattcctttaatgcaccagacttcatgtttgataaatgattaatggttgaaattgtttctcttcttttgtgttttcccagttaatagatggtcactgtttccacaatgnnnnnnnnnnnnnnnnnnnnnnnnnnnnnnnnnnnnnnnnnnnnnnnnnnnnnnnnaagcttgttgtggtctaatgagaagtatttttcagtgcataatgtttttctgagcttctgtaaatgccatcccaatgtggtttggttttgttgaacagaaaccaaaataaatttccaaatgtttaagcaagaccaaccacctttccatccaccaaaccttgtcgggcccgcctcggcccctccaaaaactttctagacccatttcgttttggccgcgcgggccccattaggtaacctggaccttggcccttacctgttttcctagggagatccctggccttggccaaagggctttggatttctcccccactaaaaaaacgcccgggcggcaaaccgaggggtttcctgaacaattccccaaaaggggttttcgaagggccctttccggggcacttaccccaacgggaaatccaaatccgacctctaattat

SEQ ID NO: 165959 - DNA, 1159 bp, Homo Sapiens
  misc_feature (890)..(908): n is a, c, g, or t
  misc_feature (1076)..(1076): n is a, c, g, or t
  misc_feature (1104)..(1104): n is a, c, g, or t
acatcacagcataaagataaatgccgctacatttcaagactatatatatgaaacttagctaattacaagaggctacgacaaaattaataatggaccaaacatatttatactaataaaaaagtttctcaaattttcaagtctatttgagtttagtttagagttcatgcacagacatgaatatgttttatttgatatcctactattgagacagaaaaactccaaccggcctgcccactgaggtagtctaaatgcaatcatgattgcatttagaccaagtttggaaacgatgtgcagcacttcaaagtgctccgagatggagccgggaagtacttcctctgggtggtgaagttcaattctttgaatgagctggtggattatcacagatctacatctgtctccagaaaccagcagatattcctgcgggacatagaacaggtgccacagcagccgacatacgtccaggccctctttgactttgatccccaggaggatggagagctgggcttccgccggggagattttatccatgtcatggataactcagaccccaactggtggaaaggagcttgccacgggcagaccggcatgtttccccgcaattatgtcacccccgtgaaccggaacgtctaagagtcaagaagcaattatttaaagaaagtgaaaaatgtaaaacacatacaaaagaattaaacccacaagctgcctctgacagcagcctgtgagggagtgcagaacacctggccgggtcaccctgtgaccctctcactttggttggaactttagggggtgggagggggcgttggatttaaaaatgccaaaacttacctataaattaagaagagtttttattacaaattttcactgctgctcctctttcccctcctttgtcnnnnnnnnnnnnnnnnnnnctcttctggccatcagtgcatgacggttaaggccacgtatagtcctagctgacgccaataataaaaaacaagaaaccaagtggggctgggtattctctctatgcaaaatgtcctgttttagttgggaatgacttgaaagaagaacagctggttcctgtgtttcttccntatatacaccacaaaaaagggaccgggncaaggcccgcctccgatgcccttttgctggtttagccttccctccacaaggaagg

SEQ ID NO: 165960 - DNA, 1033 bp, Homo Sapiens
cttatccgagagagtgagagcgctcctggggacttctccctctctgtcaagttggaaacgatgtgcagcacttcaaggtgctccgagatggagccgggaagtacttcctctgggtggtgaagttcaattctttgaatgagctggtggattatcacagatctacatctgtctccagaaaccagcagatattcctgcgggacatagaacaggtgccacagcagccgacatacgtccaggccctctttgactttgatccccaggaggatggagagctgggcttccgccggggagattttatccatgtcatggataactcagaccccaactggtggaaaggagcttgccacgggcagaccggcatgtttccccgcaattatgtcacccccgtgaaccggaacgtctaagagtcaagaagcaattatttaaagaaagtgaaaaatgtaaaacacatacaaaagaattaaaccccacaagctgcctctgacagcagcctgtgagggagtgcagaacacctggccgggtcacccctgtgaccctctcactttggttggaactttagggggtgggagggggcgttggatttaaaaatgccaaaacttacctataaattaagaagagttttattacaaattttcactgctgctcctctttcccctccttggtcttttattcatccttttgtctcttctgtccatcagtgcatgacgtttaaggccacgtatagtccctagctgacgccaataataaaaaacaagaaaccaagtgggctggtattctctctatgcaaaatgtctgttttagttggaatgactgaaagaagaacagctgttcctgtgttcttcgtatatacacacaaaaaggagcgggcagggccgctcgatgcctttgctgtttagcttcctccagaggaggggacttgtaggaatctgccttccagcccagacccccagtgtattttgtccaagttcacagtagagtagggtagaaggaaagcatgtctctgcttccatggcttcctgagaaagcccacctg

SEQ ID NO: 165961 - DNA, 395 bp, Homo Sapiens
atttagaccccctggcctggtctcagattggatcataagctccctcattcttgtatccccatgcccaaaactgtgcctggcacttaagggcccataatacatatttttggcttcgttgaatagtttaactcattagtgatgcaacagtcccaactgcatatttagagatatttatgtgtgcactacattatggatcgtatgggtgagaaggaggaactcaaggagaataaatcatactttccctccccaaaatgtttataaagccaccaagaagacaggacatagacactatcaaatataaataaaatacaaaaggatgtaacctgacatgccaaatatgtgttcacagcaaacaaagttcctcttgccaaattcctgtcgtctaaatgcaatca

SEQ ID NO: 165962 - DNA, 907 bp, Homo Sapiens
  misc_feature (863)..(863): n is a, c, g, or t
ctgcattagacaacaaggtggcatttcctcactttggcagctcacaccccagccctgaactttcaatctggacacttggtccagtggtgagagaagtggccgtgagtctagctgtggcaccctgaagagtttaacagccacgcggccagaaacacattcatctttcacatacaatgacagaagtaaaaatatttattttatcttaaaaatctggtcccgcaaaaaggccaacacttttttcagttcacggtcttgacctttcaaagaagaaatctttcaactgagaggtgagttaataaaaggaatgtcagaggtgctttcagatttcttataaaccaggaaaccaagcaaccctggacttctagtttactgagctccttcttctagccattcacagttcctgaaggagaaaagaagttgtttgcagataaggcactttagaaaccaccaaagagaaaacccaagtctgccaggagctgcactgtgaacatgtgagccgagagggccaccagcagacagagtgccaactcccacagctccatgacaacagcatccaccttcctgccccaacactgttccgtctggcttccagcacccgccttggctctgtgttgcctacctggcctagaatacatggaaaccagacaactggccagagatgaacactgctgcctgaagctcagggcagctgccaacagtgaggaatcccttcagaggccccagatgggacacgccgagggagcagtaccttttgcaaagatgagttaggtgcggatcagcacattagcaaagcaaaatatttaaacatttttaaaagctgataatccttcaaacttccctcctgatagtagctcaggctgcangctctaaagctgctaaaattcaggaagaacccctcctcggaggg

SEQ ID NO: 165963 - DNA, 1487 bp, Homo Sapiens
  misc_feature (1036)..(1098): n is a, c, g, or t
  misc_feature (1236)..(1245): n is a, c, g, or t
ccgtaacacttcctgtcccggcctgcgtggtgtgggcttgtgggtctttgagacccgaaaattgagagcgttttcgcactccaggggctgctcctggcggctctgcggccgtcaccatgccacagaatgaatatattgaattacaccgtaaacgctatggataccgtttggattaccatgagaaaaagagaaagaaggaaagtcgagaggctcatgaacgttcaaagaaggcaaagaaaatgattggtctgaaggctaagctttaccataaacagcgtcatgctgagaaaatacaaatgaaaaagactatcaagatgcatgaaaagagaaacaccaaacaaaagaatgatgaaaagacaccacagggagcagtacctgcctatctgctggacagagagggacaatctcgagctaaagtactttccaatatgattaaacagaaaagaaaagagaaggcgggaaaatgggaagtccctctgcctaaagtacgtgcccagggagaaacagaagtattaaaagttattcgaacaggaaagagaaagaagaaggcatggaagagaatggttactaaagtgtgctttgttggagatggctttacaagaaaaccacctaaatatgaaagattcatcaggccaatgggcttgcgtttcaagaaagcccatgtaacacatcctgaactgaaagccaccttttgcctaccaatacttggtgtaaagaagaatccctcatccccactgtatacaactttgggtgttattaccaaaggtactgtcattgaagtaaatgtgagcgaattgggccttgtgacgcaaggaggcaaagttatttggggaaaatatgcccaggttaccaacaatcctgaaaatgatggatgtataaatgcagtcttactggtttgacagcaatttcatatataattattgaggactacacaccaattgaagaaactgccattactgtgatgtttctgaatactaccaaacagccatacatgtctgcaatgaagagatttattaaattgtaaacattaaagtgnnnnnnnnnnnnnnnnnnnnnnnnnnnnnnnnnnnnnnnnnnnnnnnnnnnnnnnnnnnnnnncccttgtcggcccccctccgcccccacaaaagctttctaaaacattctctttggcccccgggcccaatagggaagggaacctgggcataactggttcctaagaaaacctgggcatgaataagggttggattccccccnnnnnnnnnngcccggggggaacccaacgttttgaacaaattccaaaggaattctgaaggccttactggattcatccaccgggagtcccagcggactccaaaattaaattaaccccccggcctggcatttattcgaagaacgggggggaattcctttaaccattcctgcccaacttggaaacccattccaaacggggtttgtagaaaccttaaattcccaaggggatttaacacccttggccgcccttgggg

SEQ ID NO: 165964 - DNA, 797 bp, Homo Sapiens
  misc_feature (732)..(732): n is a, c, g, or t
  misc_feature (742)..(742): n is a, c, g, or t
  misc_feature (748)..(748): n is a, c, g, or t
  misc_feature (758)..(758): n is a, c, g, or t
  misc_feature (768)..(768): n is a, c, g, or t
  misc_feature (783)..(783): n is a, c, g, or t
gcttgtgggtctttgagacccgaaaattgagagcgttttcgcactccagcggctgctcctggcggctctgcggccgtcaccatgccacagaatgaatatattgaattacaccgtaaacgctatggataccgtttggattaccatgagaaaaagagaaagaaggaaagtcgagaggctcatgaacgttcaaagaaggcaaagaaaatgattggtctgaaggctaagctttaccataaacagcgtcatgctgagaaaatacaaatgaaaaagactatcaagatgcatgaaaagagaaacaccaaacaaaagaatgatgaaaagacaccacagggagcagtacctgcctatctgctggacagagagggacaatctcgagctaaagtactttccaatatgattaaacagaaaagaaaacgagaaggcgggaaaatgggaagtccctctgcctaaagtacgtgcccagggagaaacagaagtattaaaagttattcgaacaggaaagagaaagaagaaggcatggaagagaatggttactaaagtgtgctttgttggagatggctttacaagaaaaccacctaaatatgaaagattcatcaggccaatgggcttgcgtttcaagaaagcccatgtaacacatcctgaactgaaagccaccttttgcctaccaatacttggtgtaaagaagaatccctcatccccactgtatacaacttttggggtggttattaccanaggtactgtncattgnagtaaatgtnagcgaatttngggccttgttgacgnaaggtggtcaaagt

SEQ ID NO: 165965 - DNA, 853 bp, Homo Sapiens
  misc_feature (30)..(30): n is a, c, g, or t
cttacccacgcctgtgcccaagagcagaanggaatgagtggacacaccacacactgtgcactgcacacacaatacagtattcttctacccagatgccacaatgtctgcgtatctctgctagctttgaggacctgtgtcaggacagagtcctcatgattagttctttcaattccatcccactggcttgttcagtatttcttttatactaaatgaaaggactggaatgtttcagcaggaattttttgcttacattttagacaccaaaaaagctattagtctgaaagcttatttgaacatacaaatagtggaggtgctgttccgtgtcactaatatgaattaagatgacctaatctgtacatttttacaaatgtaagaagagccaaaatgatgcatctactacacatgatagctagcgcttttcataggtaccttggttaggaccattctctgcccagttacattatgtttggcatgattaataaaaagcacacaacttatggctacaatgattctagaatgaagttagtggtttcatgccaatctgactccacagtaccaggaaggggaatgggaaggagctcacagtctccagatgttagtagccaaggatatggttttctatttagaagaggactgcaaattaaccttataatagtaactttccatttaaaaagaaacaagagtaataaaactgtcaatgcttttttataaatgaaaactgactaatcagtgttatccggtaacagtcacatttccgtgtcccgtcaatgctgtgtggaccttcagacggcagctctgagcacgcaagtgaaaagcgcgtatttcagggcaagaatagagatgtgggtctgta

SEQ ID NO: 165966 - DNA, 447 bp, Homo Sapiens
aagttgacaggaacagtataacaggaatagatataagcatgagtaacgtgttactctctgtacggtcctttacagcgtacagctcggtagagaatcgatgctgtcatgtccgtataattcacaatcttaggtctcaaatattctgtcaaaccctaacaaagaagccccgacatctcaggttggattccctggttctctctaaagagggcctgcccttgtgccccagaggtgctgctgggcacagccaagagttgggaagggccgccccacagtacgcagtcctcaccacccagcccagggtgctcacactcaccactcctgtggctgagtgaaggatagcttggctcatcctctggaaaacagacccacatctcttattcttgcccgtgaaatacgcgcttttcacttgctgtgctcagaacaccgtctgaaggggtacctgagctc

SEQ ID NO: 165967 - DNA, 316 bp, Homo Sapiens
gtgtgtgtgtttaaagatttaagagccattatcaaaaataagatacattttttttccaggtacagaaatgtgattacgatggctgggagcccagcagcctttcaatggctgcattgatgtcgcctcctgttgctattagggcctgcaagtttgcttcacggtttaagaaccccattgcgttgagctgttccagttgttgctgaaatctgacttctggattcggcagctgtggagcatttgctccagccagggcctgcaccatttgctgaatgaactgctggttgggtccagattctgatgtaggactcgtggtttc

SEQ ID NO: 165968 - DNA, 1518 bp, Homo Sapiens
ctctagcaggatcccctcaaagctatccgcatcaaacttagaaattctcaccggggttctggaggaggcatcaggcccgcctgactttttctgggtaattccgttctgtgcttccctccttgttgtgtctccgaagttttttctgttccttcttggtaagatatactcccagagtaactggtgtgtcattgtcaactggaggattgagctgtgctggatgttcaacaagatttgtgattccgaaattatcttctctctagggattttcctctgtaagatccaagccattggggattatgttagagtcccaccactcaatttcaggaatatctccttcccttagctccttcttaggagcaatgagggcaagcctagtcgaagtatggatgcctgtttttcgagctgcttgtgaaatctctgcctgtagcttctccagttgagccttgtccgtaatcgctgagcaatcttctcaaatttgcccttgtcatggaatttaaaagtgcgtctctggcgctgggaaggggcaatggagactcgggggtcaaaaaaggagggaagcacagaaggaactacaagaaaaagtcaggctgggcctgatgcctcctccagaacccaaagtgagaatttctaatttgatgcgagtattaggaacagaagctgttcaagaccccacgaaggtagaagcccacgtcagagctcagatggcaaaaagacagaaagcgcatgaagaggacaacgctgcccgaaaactcacagaagaacagagaaaggtcaagaaaattaaaaagcttaaagaagacatttcacagggggtacacatatctgtatatagagttcgaaatttgagcaacccagccaagaagttcaagattgaagccaatgctgggcaactgtacctgacaggggtggtggtactgcacaaggatgtcaacgtggtagtagtggaagggggccccaaggcccagaagaaatttaagcgtcttatgctgcatcggataaagtgggatgaacagacatctaacacaaagggagatgatgatgaggagtctgatgaggaagctgtgaagaaaaccaacaaatgtgtactagtctgggagggtacagccaaagaccggagctttggagagatgaagtttaaacagtgtcctacagagaacatggctcgtgagcatttcaaaaagcatggggctgaacactactgggaccttgcgctgagtgaatctgtgttagagtccactgattgagactactgcaagcccttgcctctcctcccttgcctttgtctcttcagtcctctcacttattctatttcccaaccccctcccacttgtttgtgtgatctcagaactgtgccaagcagacactgggacaaagggagaatatcttgctcccctcctgagtcagcctggtgttgccctttattccccttatgtgcatatgattaaagagttatttttaaacttggtgtgatatttttcacacgttcgtaagtattagagtttgggtatcctttggaca

SEQ ID NO: 165969 - DNA, 792 bp, Homo Sapiens
gagaaaaaacggtttaaaaatgtatataccatcatgttttacttttctctattactgtttaatttacaatttttcttttagcagacttattctaactttgtaatttaaggatttttttctaattgacaacagatgctaaaaatagtgggtgaaaagtttgcttaacttaaacagatacagagggaaaaatagcaactttaccctggagaaacctgacagacatccccttaaacaagttaacacacaataatggaaaacatagacatcatgtgcttcctgatgtgcacgaagagggacacaacaccgcttatgaggtattcatgccaaaaatgcattacctcaatctaatcttgaggaactatcaaacaaacacgaattgagggatgctctccaaagtggtattcaaaatgtcaagtcataaaagacaaacaaaaactagggaactatttagattaaagcagaggtaacttccactcccaactaacagaaattagatttaaacctcccacccacctttaacaactagaaaattagacacacacacaaaaaaacaatggttttcaaactctacacacaaggtagcacagaactgtatacctaacaaaagggaaacaaatcaagtgagtcctgtggctgccaaagcttgaggcctagaagtagctgggggaaggggaggttaacagagcctacttactagtttcactgagttgaggaaacacaagtctttcaaggcagctagaatttgggaaacagagtactgatgatgatggagctgcacaaaaaagctctgat

SEQ ID NO: 165970 - DNA, 376 bp, Homo Sapiens
  misc_feature (120)..(120): n is a, c, g, or t
  misc_feature (294)..(294): n is a, c, g, or t
taatattgtaatatttattatactaaataagataatttcaagtaaaaattacaattcatttattcaataaaacctggaaatcatactcttcatattgcaagatttgtactgtgacagagnaaaaaacggtttaaaaatgtatataccatcatgttttacttttctctattactgtttaatttacaatttttcttttaggcagacttattctaactttgtaatttaaggatttttttctaattgacaacagatgctaaaaatagtgggtgaaaagtttgcttaacttaaacagantacagaggggaaaaataggcaactttacccgggggggaaacctggacaggacatcccctttaaacaaggtttaacacacatt

SEQ ID NO: 165971 - DNA, 1287 bp, Homo Sapiens
tgattgcatttagacgaaatacgcgtgaatcctttatgagatttataagaacatcaacaaacagtaacttgggcaaagaattccaaagacatttctttagtcctctttcaataagcacattttctgacattaggtagtaataaaagacagtgctcatatcgaggcttactacatgcttttggaattgcaggattttgttatttaaatttagactgtgattctctgagtaactgtatatattgctttaccccaaatccactcaaatcctctgagcagcagtccttcgggtctaaatgcaatcagattgcatttagactgaagaacagaaggcgatcaaggccaagtatccgccagtcaataggaagtacgagtatttggatcatacagcagatgtccagttacacgcatggggagatactctggaggaagcattggagcaatgtgcaatggccatgtttggttacatgacagatactgggacagtggagcccctccaaacagtagaagtagaaacccaaggagatgacttacagtctcttctgtttcactttttggatgaatggctttataagttcagtgctgatgaattcttcataccccgggaagtgaaagtacttagcattgataaaagaaatttcaaattacgatcaattgggtggggagaagaattttcattgtccaagcaccctcagggaacagaagtcaaagcaataacatattcagcaatgcaggtctataatgaagagaacccggaagtttttgtgatcattgacatttaagacaccaaaaaataaaagactcctgcgtccgacagcgagcgagcgcaggaggaaaacttgtcggcccgcctccggccctcgaagaaagttttctaaaacccattccgtttggccgccgcggggcccccagttagggtaaagtggcaacagtggcgccctaagccgtggttctccctaaagggaaaacatcctggggcgccattgggacgtaagggggccttgggaaatttcctcccccccacattaaaaacacacccccccggggcgggcccaacgccgaaaacgcgtttgcctggaaaccaaatctcccgacgaatgggggaggtgtcctcgcaagggtccattttaacggtgggaatccttaatccgaacgaggggggatctccccaggcgccggagagctcccggaatatttccaatattttacgcggcccccgccagccctctgggccaaaatattcaattcggcgcaaagacaaccccggaggggggtaaaaatttcagagtc

SEQ ID NO: 165972 - DNA, 860 bp, Homo Sapiens
gggggaagtagagtgtctaatcctgcagtcatggcgcaggaagaggaagatgttagagattacaatttgactgaagaacagaaggcgatcaaggccaagtatccgccagtcaataggaagtacgagtatttggatcatacagcagatgtccagttacacgcatggggagatactctggaggaagcattcgagcaatgtgcaatggccatgtttggttacatgacagatactgggacagtggagcccctccaaacagtagaagtagaaacccaaggagatgacttacagtctcttctgtttcactttttggatgaatggctttataagttcagtgctgatgaattcttcataccccgggtggggagaagaattttcattgtccaagcaccctcagggaacagaagtcaaagcaataacatattcagcaatgcaggtctataatgaagagaacccggaagtttttgtgatcattgacatttaagacaccaaaaaataaaagactcctacgaagaactgttttggttttcctcttccttttgagaagacactatgaattaaattctacagcttttttttgatatatggaaatttgtagaacagaaatattttagttaaagtgtgactttcagaaagggaaaatcagggcacagccttggtctgtgttccccaaatattcacactttaaagaattcttcaacccccaagggacagttatggtcctttgattctctgctgtggcaagtaggtgtgcctcatgcccttccaagtgcaatgcaagccctccaggctcaccccaggagaggatcactggatgtcaagcagcagcctgaggctgaattccagggttgaaacgaacgact

SEQ ID NO: 165973 - DNA, 388 bp, Homo Sapiens
tgattgcatttagacagggctatgagcgtggcctgcaaagtcactctgagcaacacaaggtggagtttgaaagcagattcaaagccagaccactgggcttgagtcctcacaagcaagcatgtagtcttcaccatggagaagggggtttgcctttctcaaagcttttttcttttaaattaagaaaaagaactgatttatcagtctagtgtgtcatttaactacatatgaaagggtgggtacttgcagaagaaagtatttggagcctattattccattaagggttataatggcgttcatgtttggggaggcggcatgtgcatattatatcaaaaactggtatggttctataccagtccaaatgttaatggttccatgttgatatactatc

SEQ ID NO: 165974 - DNA, 241 bp, Homo Sapiens
acacgacactgaagagttcagtatacaccaaataatgtctcatctctatagtacagggaatataaaagtggtttcctgtggtcatgatcaagatagtagtattattacacaagaaacttggtctgcagtctggaagcttgtctgctctatagaaatgaaaatgcagcatgaagttgacattgtggaaatgaaagtaattgggtattagaaatctgaaagtactgtcgtctaaatgcaatca

SEQ ID NO: 165975 - DNA, 1003 bp, Homo Sapiens
  misc_feature (205)..(218): n is a, c, g, or t
  misc_feature (706)..(714): n is a, c, g, or t
ggaacttcaagagcagtgagattgagcaggctgtgcagtcactggacagaaacggcgttgacttgttaatgaagtacatttataaaggctttgagaagcccacagaaaatagcagcgcagtgttactccagtggcacgaaaaggccttagcagtaggaggactaggctccattataagagttcttacagcaagaaagactgtttnnnnnnnnnnnnnngactcatgttaccttgagaagaattctggatgcccaggctggtgaagaagggattgacaatggaccatcttcctaggaactcccaagtaaactatttcaggacatgtatctgctgaaatgtattttattttcaaggtggaggggaaaatcgtctgtttcctaaatcctgtttaggatctgatagtctatgcctttgtctccgagtactgcagaactgacattttgacggtctaccagcgtggcggctggtgttggtcagatgcacctgtgtgcactgggggagggatggtttgggcaggtgcagatccaagggctgtggtaaacgggagagcttgtgtttttgaagtggaaaaaaacccaagagtttgtacagacatcctgtcttcccagagaaggtggacactcttgggctcattgtaaagtgcctgctgcatcaataaagctcttggcttattagtctatacattgcggtgtgtttcgtgtatgtnnnnnnnnntggtaatgaatgggatggtaatgaatgagagttcagttgttgttccggaaacccgatgtggaaggagtagacctgtgtccctgttgagccacccctgggagcgagcatggcaatccacaggccctctgccacaggacgccagcctcggcctcagagctgccggctgctgcagagaggtgtttgctgaataaactatttattgtttcttattcctttgatttgtatgtaattaattttggagcttatttaattaatttaataaagtgccaaacatttaataattgaaaaa

SEQ ID NO: 165976 - DNA, 647 bp, Homo Sapiens
  misc_feature (501)..(501): n is a, c, g, or t
  misc_feature (522)..(522): n is a, c, g, or t
  misc_feature (540)..(540): n is a, c, g, or t
  misc_feature (555)..(555): n is a, c, g, or t
  misc_feature (593)..(593): n is a, c, g, or t
  misc_feature (607)..(608): n is a, c, g, or t
  misc_feature (625)..(625): n is a, c, g, or t
ctcctagccctcttaccaacgaatattaccaccagagaagagagctttctacaaaagtcactacagattttgctatattgctttgtagatagatttttacttttgcctaaaagcatttatccttcataccaattgtaacatctgacaccatgtagaagctaaaagtttagagggagtgagcgttttctcaagaccttcctcaagcattttatctttagaagagaaactgatgggcacctgatactctgtctaaatacgtttgttatatgtgttttgccctgtgccattcatttggaactttattgcattctttattttaaaaagcttgtttttacgtaatcatagagcttgctatttgtacatctgttgagcaacactacataactgatttttagttgacttagctatagcagtacaatggattagtaatgtaaaaattaacacagaaattaacctaaggaatgaagggtgggtttgtcaaaatatcaagtaaatttttgnttctaaaggacattaatgganatgacctaaagaatgcgntatccatcctatttnaaagaaagattaacacaggtcaccaattttctcatttnccccattaccctgnntagagggatggtcattnctttggactaagtatagtatgg

SEQ ID NO: 165977 - DNA, 1465 bp, Homo Sapiens
  misc_feature (830)..(883): n is a, c, g, or t
  misc_feature (1031)..(1272): n is a, c, g, or t
  misc_feature (1295)..(1315): n is a, c, g, or t
gttgctgagcaagaatttatccatcccttttctttcagcctcctgtctgggcagctttcctagagaaagggaattgggaaaagacttcggttcttttcaaggccagggccagcgcttgttttttctttcgaatttccaacttcatccccccacagcatctttgccagagtgttcaatcaatgtgttgactgagaaaaaagaaggggggtatctattttttcttatatacacacactatcaaaaaactgattttaccagtttcaatacctactgtgggagcagcggagacaggaagacaatctgctttttgtattactatgaagttccactataaaaaaccccaaatgagtattaatctggattttagctataatctataatattttgacactgacatttcactagatgtggatctcagtatattttaaaagatttagactcaaaaatggatgcaaattctttaagcatctattttgtttttttctaattttagctactacctgatcagatctaaaattattctggctagaatacagtatatacaaacatgtatttaagtgagccctaaaagaaatactcataggtggtttagaatcgcttgttagaggcacaggttcgtttacagttgctggttactagactgtacgcagctggacacttctatgttaaagggaagagaatgaatactatgtgccaggcagtcaacacatgaagacagagttgtattagcctcagtgtcttatgcttcacaattactcgtttactttcaggtaggataaaatgttccatgtttcatagtttcccagttttaattgtccctaaaagcagcnnnnnnnnnnnnnnnnnnnnnnnnnnnnnnnnnnnnnnnnnnnnnnnnnnnnnnactataataatactgtcctaataacacaagaggactattaaggtaactttcagatttaaatgggaattttcattctaaagtgatgacaaaaagggtaaatataaaaggcaattatttaaaaaacatgaggccaggtgcagtggctcannnnnnnnnnnnnnnnnnnnnnnnnnnnnnnnnnnnnnnnnnnnnnnnnnnnnnnnnnnnnnnnnnnnnnnnnnnnnnnnnnnnnnnnnnnnnnnnnnnnnnnnnnnnnnnnnnnnnnnnnnnnnnnnnnnnnnnnnnnnnnnnnnnnnnnnnnnnnnnnnnnnnnnnnnnnnnnnnnnnnnnnnnnnnnnnnnnnnnnnnnnnnnnnnnnnnnnnnnnnnnnnnnnnnnnnnnnnnnnnnntgacagagtgagactctgtatcnnnnnnnnnnnnnnnnnnnnncatgaatcttgattcagatataatttttctttcacagttctgaatgttttaaaattaataaatcacattctgtattacttttaagattgtttaaaaatgacacatttcaccattaaacaaagtatatttctgttagaggttagtttatcc

SEQ ID NO: 165978 - DNA, 316 bp, Homo Sapiens
tagagtactgtacatcttaaattatgtttatcaaccttagggtctcacagattaagaatgtactagttaagaaccaaggagttatacccagttcacaatactgtttccttcacttgccctttagatataatggatctggaattctcaatgagtgttacatggtttgggaattctggcaattttccttccaagacctccctatacttatctccatttcaaaatatacaaagctgagtgacagaggcaaaaattaattcctaaagatccaaagggtatacaatacctgtcaaatttgatatgtctgggcgagacactc

SEQ ID NO: 165979 - DNA, 698 bp, Homo Sapiens
gtaaatcgtcccgataagaagaaaatacttttcttcaatgataggagctgtcagttttctgggatgaagatctcagacactgtggaggagtgtcactgtagattccatggacgaggagaaaattgaagaatatctgaagcgacagggtatttcttccatgcaggaatctggaccaaagaaagtggcccctattcagagaaggaaaaagcctgcttcacagaaaaagcgacgctctaagactcataacgaacacttggctggagtgctgaaggattactctgacattacttccagcaaataggcaacagttttgccctggaacagagttacagatacacaatcaagagtgttcttgctgatgctcggggtctgaagactgtcttcctatctgcttcttgcggctgaggagaggagcagttcagtttacaaaacaagtgcaaattaccaaactcaaagcttatttgagtagaatgggctcatgggcaatgtgatgttccctgttaaccttctgttactccctgggagaaaggcgctgagcgtggcatgcaggtgtctttgctgtgtttttctccacttctaaaaggttcctggttcctttcttcctcgtttgttactttagagcaagtttgcccatagtcttgaatgcaatatttgtttattccaaaagaacatatttataataaaatcactgtagaagg

SEQ ID NO: 165980 - DNA, 181 bp, Homo Sapiens
ggttgctctagaggtccctgatggcatttagacaggagcagactgtggagcaaaggtggtagagaaaacgaaccctacagaaccagttggagtggtttgccgagtggatggagtttaccaggtggtagaatatagtgagatttccctggccaacagctcaaaaacgaagctcagacggacg

SEQ ID NO: 165981 - DNA, 1020 bp, Homo Sapiens
  misc_feature (15)..(15): n is a, c, g, or t
  misc_feature (27)..(27): n is a, c, g, or t
  misc_feature (45)..(45): n is a, c, g, or t
  misc_feature (53)..(53): n is a, c, g, or t
  misc_feature (58)..(58): n is a, c, g, or t
  misc_feature (64)..(64): n is a, c, g, or t
  misc_feature (70)..(70): n is a, c, g, or t
  misc_feature (85)..(85): n is a, c, g, or t
  misc_feature (96)..(96): n is a, c, g, or t
  misc_feature (118)..(118): n is a, c, g, or t
  misc_feature (182)..(182): n is a, c, g, or t
  misc_feature (535)..(535): n is a, c, g, or t
  misc_feature (664)..(682): n is a, c, g, or t
  misc_feature (892)..(892): n is a, c, g, or t
  misc_feature (946)..(946): n is a, c, g, or t
  misc_feature (966)..(966): n is a, c, g, or t
  misc_feature (978)..(978): n is a, c, g, or t
  misc_feature (980)..(980): n is a, c, g, or t
aagcctcatcgaggngtaaaacttggnggttacggaaccccgggngggcactnaatgnatttgnaagtgnaagttttaaggggancccacaagggnaacacccatatgcaaggcgggnagtatgggaaaagttcagagtgggacctacctggataaaataccctttcaaaatctcccatctnataggattcatgaataaaattttcccatccccaacattgatgaagcgtcaggaactgtgtgtctagatgtaattaatcaaacttggacagctctctatgatcttaccaatatatttgagtccttcctgcctcagttattggcctatcctaaccccatagatcctctcaatggtgacgctgcagccatgtacctccaccgaccagtaagaatacaagcagaaaattaaagagtacatccagaaatacgccacggaggaggcgctgaaagaacaggaagagggtaccggggacagctcatcggagagctctatgtctgacttttccgaagatgaggcccaggatatggagttgtngtagaaaaagcacctgcttttcagaaagactattatttcctaaccatgagaagcagactataatattcatatttaaacaaagcaattttttttattactaaacaaggtttttatgaataatagcattgnnnnnnnnnnnnnnnnnnncgaccctttagatcttgatttcttggtcatttctcaacctgaggtgcatagcatattcccacattccatttggtagcaatatgcggtctgaatgcatgcattcatgagtccatgtggccaagtcagcctcgtgctactgaactgtcgaaggaaatagccgttctgataggtagactgtgagtaaaaagaactggaaaaaattgcttcttnttattggtttccaaagaaacaaaccaaaccaaccagctcttggatgtgaagatnaaatagtgcttttttgaaantgggagaggaananacttggggtggagtaggcctgctgtggggcctcggagcca

SEQ ID NO: 165982 - DNA, 468 bp, Homo Sapiens
  misc_feature (342)..(342): n is a, c, g, or t
  misc_feature (384)..(384): n is a, c, g, or t
  misc_feature (390)..(390): n is a, c, g, or t
  misc_feature (407)..(407): n is a, c, g, or t
  misc_feature (413)..(413): n is a, c, g, or t
  misc_feature (436)..(436): n is a, c, g, or t
  misc_feature (453)..(453): n is a, c, g, or t
cggagagaggcggcggcgacaccatgtcatctcccagtccgggcaagaggcggatggacacggacgtggtcaagctcatcgagagtaaacatgaggttacgatcctgggaggacttaatgaatttgtagtgaagttttatggaccacaaggaacaccatatgaaggcggagtatggaaagttagagtggacctacctgataaataccctttcaaatctccatctatagggattcatgaataaaattttccatcccaacattgatggaagcgtcagggaactgtgtgtctaggatgttaattaaatccaaacttgggacagctctctatggatctttacccantatattttaaaggtcctttcctggccttcagtttatttgggnctattncttaaccccttaggatncctttncatggggtgacgtttgcaggccntgtaccttccaccgacnggagggttacaggcg

SEQ ID NO: 165983 - DNA, 1571 bp, Homo Sapiens
agcggagccgcagccaccagccgcccgcgccctccagccccgtccgggagtccccggcccgctgcggtgccgtgagtacctccaaccccctgcgccccggagggaggccgaggggcttagccaccagggctcggaagtgggggccgaatccggtgcgagacccaaggagaggggagcagagccggagttggggagactgtggctgagaactgtgtcttcctggagactaggctggcattttgactttggggttgctgaaaagccaggagtcaaaatgactgagcgctttgattgccaccattgcaacgaatctctctttggcaagaagtacatcctgcgggaggagagcccctactgcgtggtgtgctttgagaccctgttcgccaacacctgcgaggagtgtgggaagcccatcggctgtgactgcaaggacttgtcttacaaggaccggcactggcatgaagcctgtttccactgctcgcagtgcagaaactcactggtggacaagccctttgctgccaaggaggaccagctgctctgtacagactgctattccaacgagtactcatccaagtgccaggaatgcaagaagaccatcatgccaggtacccgcaagatggagtacaagggcagcagctggcatgagacctgcttcatctgccaccgctgccagcagccaattggaaccaagagtttcatccccaaaagacaatcagaatttctgtgtgccctgctatgagaaacaacatgccatgcagtgcgttcagtgcaaaaagcccatcaccacgggaggggtcacttaccgggagcagccctggcacaaggagtgcttcgtgtgcaccgcctgcaggaagcagctgtctgggcagcgcttcacagctcgcgatgactttgcctactgcctgaactgcttctgtgacttgtatgccaagaagtgtgctgggtgcaccaaccccatcagcggacttggtggcacaaaatacatctcctttgaggaacggcagtggcataacgactgctttaactgtaagaagtgctccctctcactggtggggcgtggcttcctcacagagagggacgacatcctgtgccccgactgtgggaaagacatctgaattcaacacagagaagttgctgcttgtgatctcacacacagatttttatgtcttctttctcacccaggcaatcttgccttctggtttcttccagccacattgagactttcttctagtgcttttcagtgatactcacgtttgcttaaaccctttagtgctttgtgatagttcagtcccagggaaagagaaaactcgccctaggccctaggtgggaagatggtttgaaatttttgtaatcgagtaaggcacacccaaatgtaaaaatccttttgaatgatgcctttataaatctttctctcactgtctatttaagtgcaattaacatatgtcacgaacttgaaagttttctaaactcaataaggtaatgaccagttgttatttacagctctgtaacctcccgttgcgtcaagtctaaaccaagattatgtgacttgcaataaagttattccggaccag

SEQ ID NO: 165984 - DNA, 751 bp, Homo Sapiens
  misc_feature (19)..(19): n is a, c, g, or t
agactaatacaataagcantactaaagctacagtgactgaggttcaatctttacattcagcaagtttaaatccttacatgatttttgaaaccttattaactgaaaatattgcttgctgataaaacttgctcaaatgctattgctgaatgtacaagtcactgattatgccaatacagcgagttcttgaagctacacaaggtatagtctggctgagttacatgtggtttccatattagcttgtttggcagggtgacctactgcaaagcaggctcagttaccccaccagtcaaccccctgggagttataatttcctccatatccatcactgttgtaaaagcctccatagccacctccaccaaatcctctgctgctaccgtggccacctccgccactgcggctgctgcttgcgcggctgctgctgaagctggaactgctggcaccgctactttgtcggtagtctctggcaccaaaccctccactaaatctgctactcttagaacgtccacgactgctacccttgtagtggtgttcataagccatgttttctaaccaagacggcacttcttgtttagcttcaacaagaagatccaacaaatccttagtaatatttatgttcctctcgttaaagaatgaggttgccagcccaaggtttcctacacgtcccgtacgaccgatacgatgtacatattcttcaatatcacttggcaagtccacaattgataacatgtttcacatttgaaatgtccagcct

SEQ ID NO: 165985 - DNA, 974 bp, Homo Sapiens
  misc_feature (76)..(80): n is a, c, g, or t
  misc_feature (82)..(84): n is a, c, g, or t
  misc_feature (88)..(90): n is a, c, g, or t
  misc_feature (94)..(95): n is a, c, g, or t
  misc_feature (99)..(103): n is a, c, g, or t
  misc_feature (402)..(415): n is a, c, g, or t
gggcccacaaaagcgaaatggtgtttttaagaaaagcttttttgggaggggcccgagggccgcccccaacatggtnnnnntnnntttnnntgtnntgtnnnnntttttggccaggtccaacttttttattttaataaaatcagaatatgcacagcacatgcagtgctagcatctaaactaatacaataagcaattactaaagctacagtgacttgaggttcaatctttacattcagcaagtttaaatccttacatgatttttgaaaccttattaactgaaaatattgcttgctgataaaacttgctcaaatgctattgctgaatgtacaagtcactgattatgccaatacaacaaagataaccacatgtttgaggattgcaatgtgccagacattcactggnnnnnnnnnnnnnncacacaactaaacaaaatccacacaacaaacatctgagaatctggacacttcacatcagtgttttgaagtgtttcattaatatcttaagacaagtgtatcaaaaccttggcatgatttaatttcaagtcgccaattttgtttttactaacatcagaaagttatggctacactgccaacgccgggtctgcttaatttgacttaagagtttaatatgacttaaacattaaaagctcacactaccccgaaatatataatttcacgcatacggtgacattcaacattcaagtgccagtgtttttgtactgtcttttggtcaagtttctttaaactttcaaagaatcacttttaggcttacaaaaataaatatttgtcaaaatgttcaataaatattacacaaaactagcagcaaaaagtatctaaaatctgttgtgtgcaaatagttttcttctcaactaccattccatggtccccaataaaatttaggaatctacttcttcactggctgcattcaacaatctccaagagacgaaataagattggaaggtcgaggacaccccc

SEQ ID NO: 165986 - DNA, 866 bp, Homo Sapiens
gagaacatatattcgacggagttggagggcatctatagtcgggcatacaataaaattttgtaactgtgtatttagaatgccggtttttccccgttgccctcaggggaggaccttttggagtagggcccctgttttttgaaagttttgcgcgctactagaaccctttctctggccggtcctggatttggaattgacttgcctctgtctttgtaaagatctttagactgggatacagcagaagtaagtgacacatttggggcacccactttatcacacatgtataagtagtagctggggtgtaaaaatgaatgtgtctgagaaacatggtcaccttcctgctttataacaggataccatgactgtaattccattcctgatggtgcatctgtcttggattgatttctctttccacttctcatgctaaacttctccttcatttcttctaaaattatcttcagtttcttttcttcaggtgttcctaagtatttttggttcacatgaagatagcaatgccatttagctgattcaaagccccagtggcaagttcttttgtcaggtgatctgtgagaatgcatcacaaacgtctggggtgcaaacattccacaacactccagacattgaatacacggagcatcaggctgaacataaaactggggtgcaaataggccctgacatttgcctaggcattcatgctccacttcaaaggcactgccagtttcctttaactgggccaatgagcttttagcaggaagtacgctaccattttgaggaaaagttcgtggccgcaataaagcattacataatctttgtgcatcagttaatgtaatcagcccacaggatggggcattgaatggaagtatgccccc

SEQ ID NO: 165987 - DNA, 393 bp, Homo Sapiens
cttctcccacatatggggtatctaatgattatattgtccaggtttctgtgtactagacaaggaagcctcctctgccccatcccatctacgcataatctttcttttcctcccagcagggagtgccagctccataagaaccttacatttggacagtcaaggtgcacaattctaagtgaccgcagacatgcaccttggtcaataatgtgtgtaactgcacacggcctatctcatctgaataaggccttactctcagaccccttttgcagtacagcaggggtgctgataaccaaggcccattttcctggcctgttatgtgtgtgattatatttgtccaggtttctgtgtactagacaaggaagcctcctcttggcccatcccatctacacagggtac

SEQ ID NO: 165988 - DNA, 384 bp, Homo Sapiens
cgtatggcatttagaccccgttttgcttcacaaaaaccttgttgaataatacaagccatatggactctgatttacagtttagaagatgagcagaggtgggtgtgagttgcccagtcatgttgctagttgttgaagaaactaggattgttctcaggtcttgggctcctggcccatagaccagtggctctgtgttctgatggggtattggggaggatttttacaaatgcaggttcctgagattgttcctggaacatctccgagtgggtgtgggttgtggccctgcgtgtgtgattttgcctatcccagctccggggtaccaccaaccactttttgtctctgtgggtttacctactctggatagtttgtttaaatggaatcatacca

SEQ ID NO: 165989 - DNA, 1135 bp, Homo Sapiens
gaagtgaaagtcagccctttagctattatttattgctttattagagcagagggaagtgacactcattgccttcacagagctctgcagaaatatatgcacagagtgttcaatgacaacatctgagtaagtcttccaaattatcacattaaaataacctttcaaatttgagtgcctctcctttgcaaacaactgcaacctcataatgaataattttatatattatcaaaaagaaccagaagcccaggtgcttttttccccaaaatccacttactaaggacttgagtgaaaatccactctaagcagatcactgttactatttccctttcaaaacagttggaaatcctaaggtacgggtactaagaagatacgcaatatccttcttaagctggtaagaatctagccccacagggacaatttggcaatcctgtttctggaagccaggactccagagatttgtcttagtgatggacagatactcctctaaccttaaggcatgagggctgtcaaacaaggctctgaatagtgccttcctgctcatcaatgtcatcacaatgaaggagagaacaggttttcgttttcctgaagagtggtcagtaggagtgcagtggtttggcatagatcggctccagaacataatggattaaaaccaagaagaggcctccaaggaagatggcactaaggaaagccagcaggacatagcggccaatgaaaaagtcatccacaatcttaacttccacttctggggctgggaattcaccagctcgcgggaaaagcaacagaactgatgtgatgatcacagcaccgaagaataaaaaaatgacagagaacctcgccgccccggaggctctggacagcagcacacacagcagcagcactgccacccagagcagggctaagatgaacacgcccgcaccgactccgagcacagtgccagccatcccgcggggaggcagcggcggccccccgccctgcgcgccgcacgatcgagtgtcctctgtgcaggcaatggatcacaagacagaaagttcccactctgttgtcgagttcttattcaagaggacgaaaactcccagtcctctgcccccttcacctggatccactctcccccaggctctactcacacctcagattccgg

SEQ ID NO: 165990 - DNA, 461 bp, Homo Sapiens
tggctaagtttggtattagatcaaggggaatgtccagtaaacagagaggtaagcatgatggaaataatgaagtggggtacacaggaaaaacctgactagtgaggaggagcagctgagagatagggtcagtgaatgcggttcagcctgctacctttcctgtcttcatagaaccattgccttagaattattgtatgacacgttttttgttggttaagctgtaaggttttgttctttgtgaacatgggtattttgaggggagggtggagggagtagggaagtggtccttttacaagaattttgatgcataagtgtctattgtagggtttggatgatctagtaaagtgttttagaacccctttttatcccatgcaccattcagtaaacataaaaatcacaattctgctaatgtcattcggaacttcaaaataaatatcttgtctaaatgccatccgtgatcctct

SEQ ID NO: 165991 - DNA, 301 bp, Homo Sapiens
gtggtacctagatgatcccggctatcacattatccataaagtctgagaggaaaacaaaaaagaaaactttatcctttaaaaccaagcttcattgttttcggttttgagccacacggcacacaatgagagaatacgttctcgcttccttcgagactttacctgtttgcaagagcctttgttagtggtgcatagtgtactagttcccaagcatttagttgatggtacaacactacatggttaataggcacaacgaaacactacccttcttggtgatggaacacctccagtaacaatcaccagt

SEQ ID NO: 165992 - DNA, 576 bp, Homo Sapiens
  misc_feature (124)..(135): n is a, c, g, or t
ctttgctctttagaacccagtgaaaaataccagggtactggggtgcaactctttcttatgataggtcattagtgctttaagcaaaagatattagcagctttgactgcagcattagcaattaggnnnnnnnnnnnnttaagttccctgcggacatgtaactttgccatcagttttgatgtggaaacactgtgatatataaaatgttgttggacaacagtagtttgaagagtaaaatatgaaacgtttaaaaagttccaaaaaaagctagctctgtcctttacttatagagacactttaactttttccgttgtatttccattgtattagataaataaatgtgaatgtaaaattgtataaattactgtacttgaatacttctgtttcccagtgtagcttgctggacattttagtgccttggacttctattgcttctgccattagcatcaacttaccagaccccagatcaataaagggcatgtggaaggaaatcgtaggtccatgtgaccccagcagtccagcagtggttatgccaaagggaaattgaaaaagtattttcttaagtcattcaacaacttt

SEQ ID NO: 165993 - DNA, 585 bp, Homo Sapiens
tgaagaagttctaacttttagcatgctgcacagaaactggtataacatgccttcagtatactaacactcatatgctcagttttgtttgttttggcagttgacaagaagttaatttgctttagtaaaaatccctcattccagcctttctatataaatagctctttcttgctgttttaatgtggtgcacactatagcctcacaaacctgttattccagtgtaatctgcagtgtcgtaactaaagttactggcttggtcttatttgcacagtttttgcgtcttgtttgcttcttgcatctgattaactagaatatttctctttcccccttttaatttgtgatgtcacttgaccccatttatgtgtaggagcactacaccattggtttccaatactgcacacataagatacatacttgtgtgcagaaagtatcttcctccaggcttgtaatacccttcacatggaagattaatgagggaaatctttatattctgtataaaaacaaaagcaaatttatatactaaaatcatttgtctaaaaatttaagttgttttcaaataaaaattaaaatgcatttctgatatgcaag

SEQ ID NO: 165994 - DNA, 1179 bp, Homo Sapiens
atattcagaatgcatggtaattttcatttgtattccaccttaaatttttagacgatgattttagtatataactttgctttgtcttttatacaggatatattagatttccctcattaatcttccatgtgaagggtattacaagcctggaggaagatactttctgcacaacaagtatgtatcttatgtgtgcagtattggaaaccaatggtgtagtgctcctacacataaatggggtcaagtgacatcacaaattaaaagggggaaagagaaatattctagttaatcagatgcaagaagcaaacaagacgcaaaaactgtgcaaataagaccaagccagtaactttagttacgacactgcagattacactggaataacaggtttgtgaggctatagtgtgcaccacattaaaacagcaagaaagagctatttatatagaaaggctggaatgagggatttttactaaagcaaattaacttcttgtcaactgccaaaacaaaacaaaactgagcatatgagtgttagtatactgaaggcatgttataccagtttctgtgcagcatgctaaaagttagaacttcttcactggtgcttatcaatcattaatagtcacgtttttgccccttcttgccaaatttcaggcatgtcttattttagatggagtatagcttttatctattatttcatcttgtaaaaacatgtgaagacaacgttcgttctgtgccagaggatgaccagcgaccttgtttataaactgctccagcccttgttttctttcctcaataaaattgtcatcaaatattccatcatctcctctaaaaggaagctgacgcaaaaacgctttcccagggagcgggggaactacgaccttgctctctctttctaattcacttcgcagccattcaaagtcactgtatcttcttctaacagtagattctttcagcttgaaaataggaagatttgtcttgaccctgatttcgtaagtggtgaagcggccccggccgacccccaccgtttgcgggttgctcacatcgatctcgaggaagttgctggggggtccgtaggcgtcattcaggttctgcggcttggtgatcagccgccgggtgtcagccacggtctccgccatttcgctgtagctgctgccgccgccgcgggctccctccgccccctccgcgttcagc

SEQ ID NO: 165995 - DNA, 275 bp, Homo Sapiens
gtaggtgttctagaggtccctgatgcatttagacctagtactagggccattattaactagtaacatagattagtgacttcaactgggctgtccttatatactctgattgtctgaagtgaaaactgttaaggtgctcttttaaaatgtatttggaaacaccatagttagggtaaatacaatgtcacaattcactcttgcatattatttgcttagccaaatttatgaattctaagttaggccaaattgaaggttttggagttttacattgtgggtga

SEQ ID NO: 165996 - DNA, 859 bp, Homo Sapiens
cgcatcgacccatctatactgacctatctatactacgtacctatactgacctatctatactgacctatctatactgacttatctatactgacctatctatactaccattttggaatgactgtatatcatctggattacgtggctgtatgttaattgaattagcattgagaggaaggttacaactagaggcttgtggaatgagaagaaaaagtctattaacaagaaaggtaatctgtaaatcagatgctccaacaggggatgttcttcttgatgaagctctaaagcatgttaaggaaactcagcctccagaaacagtccagaactggattgaattacttagtggtgagacatggaatccattaaaattgcattatcagttaagaaatgtacgggaacgattagctaaaaacctggtggaaaaagggtgtattgacaacagagaaacagaactttcctaactttttgacatgacaacacatccccctcaccaataacaacatttaagccagcgcctcatcaagaaagtaccaggaaagcccgttccttgacaaaggggtggaaatgacccctcaccgcattggacaggcgctttgctggccctcatttaccttgggttcatgccctcggaacgtcctggaagaatgctttttgctcctccttctggacggagccttatgaatttgggctaccaacaagagggcggcaaacttctccaacttagaaaccctgtaagtggaaaaggtccggaagggcccacccccactgaaggttcttgtgggccggagggtgggcgcgcctttaaccaagaaaatcgtgcctcggggtggaaacactttcccccttgctctccaagaaaaag

SEQ ID NO: 165997 - DNA, 545 bp, Homo Sapiens
cctgtaatgacggcagtgtaaacgacggccagtgtcaacgacggccaggtgtaaacgacggcagtgtaaaacgacggccagtgtacaacgacggccagtgtaaaacgacggccagtgtaaaacgacggccagtgtaaaacgacggccagtgtaaaacgacggccagtgtaaaacgagcggccagtgtaaaacgagcgggcacagtgtaaaacgacggccagtgtaaaacgacggccagtgtaaaacgacggccagtgtaaaacgacggccagtgtaaaacgacggccagtgtaaaacgacggccagtgtaaaacgacggccagtgtaaaacgacggccagtgtaaaacgacggccagtgtaaaacgacggccagtgtaaaacgacggccagtgtaaaacgacggccagtgtaaaacgacggccagtgtaaaacgacggccagtataaaacgacggccagtgtaaaacgacggccagtgtaaaacgacgcccagtgtaaaacaacggccagttttaaaaggagggcaagtgtaaacacgagggcaa

SEQ ID NO: 165998 - DNA, 384 bp, Homo Sapiens
aatctatactgacttatctatactgaccaatctatactgacatatctatactgacctatctatactactaatctatactgacctatctatactacccgactcttagcggtggatcactcggctcgtgcgtcgatgaagaacgcagctagctgcgagaattaatgtgaattgcaggacacattgatcatcgacacttcgaacgcacttgcggccccgggttcctcccggggctacgcctgactgagcgtcgcttgccgatcaatcgcccccgggggtgcctccgggctcctcggggtgcgcggctgggggttccctcgcagggcccgccgggggccctccgtccccctaagcgcagacccggcggcgtccgccctcctcttgcag

SEQ ID NO: 165999 - DNA, 798 bp, Homo Sapiens
cctcagagccaccagctgctgctcctgatgctgcaccaccaccccctgataggcccattgagaagaaatcctattcccgggcaagaagaactcgaaccaaagttggagatgcagtcaagcttgcagaggaggtgccccctcctcctgaaggactgattccagcacctccagtcccagaaaccaccccaactccacctactaagactgggacctgggaagctccggtggattctagtacaagtggacttgagcaagatgtggcacaactaaatatagcagaacagaattggagtccggggcagccttctttcctgcaaccacgggaacttcgaggtatgcccaaccatatacacatgggagcaggacctccacctcagtttaaccggatggaagaaatgggtgtccagcgtggtcgagccaaacgctattcatcccagcggcaaagacctgtgccagagccccccgcccctccagtgcatatcagtatcatggagggacattactatgatccactgcagttccagggaccaatctataccgcatggtgacagccctgccccgcatgactccacagggcatgcttgtgcagcccaggaatgaaccttccccacccaggtttacatccccaccagacaccagctcctctgcccaatccaggcctctatcccccaccagtgtccatgtctccaggacagccaccaactcagcagttgcttgctcctacttacttttctgctccaggcgtcatgaccttggtaatcccagttacccttatgctccaggggcactggctccccc

SEQ ID NO: 166000 - DNA, 569 bp, Homo Sapiens
gggagcttctatcccggaagttgatgccgagcgcagatcgcttgcagcttgctagctgtgtgggctgggaggtctggtagggctgagcttgcaagaggatcaacatgcctttggctagagatttactacatccgtccttggaagaggaaaagaaaaaacataaaaagaaacgcctagtacaaagtccaaattcttactttatggatgtaaaatgtccaggttgctacaagatcaccacggttttcagccatgctcagacagtggttctttgtgtaggttgttcaacagtgttgtgccagcctacaggaggaaaggccagactcacagaagggtgttcatttagaagaaagcaacactaatgattcaaacagcttcctgaattttaattttgtgttgtctcacagaaagccttatcataaattccataattctaattaatttaccaagataatgtaattacatttggttttgtaaggtatacagcagtaatctcctattttggtgtcagtttttcaataaagttttgattatgggcaaaagcaaccgaaagaaagaaaaaaggaacatgg

SEQ ID NO: 166001 - DNA, 737 bp, Homo Sapiens
  misc_feature (141)..(161): n is a, c, g, or t
aatcagctcggcccttcattatattgagctgatgcctgtatatagaaattagcttctcgaaagctgttctatgttttgctgttattttagtctttattctcttcctttaggtggagaaacaaagtaccaagtttgaagggnnnnnnnnnnnnnnnnnnnnnggtttctgtcagtagaaataaccatatgtgctaaccaaatttctgtgaagaatgttttcatggttatcattatatctaactataacctcccccatagttatgaagagtaacctgaaatgccactattgtggaaataggataattgtaattgtgaaaaaataattttaaggaaatcttacaagtattacattaaaaagatactatgactgccacctgccatttaccttctaataaccctgccatgtggtttgcagaaagagatggatatagtagcctcagaagaaatattttatgtgggttttttgtttttcgttactagatttcatggatgaggggatatggttgaccattttactttttaatggagcagccagtttttgttaattactcacttgtaaattgtgagattctgaatcccgtacctgctattcttggacttgtctcaggccaaatctatgctggggttcttatgagacttgtatgaagatgccctgatttgtacagattgaccacgggaatactactgccatgtaatctgtatagttccagataatttgtcatgaacattgacagaat

SEQ ID NO: 166002 - DNA, 251 bp, Homo Sapiens
tggtttatgtccccagagaataggggtagcaatggaccagactcagactgtgatgagagggagaaaatagctaggtttggtgcatttcagagattaactgaactcccttgggagtcacatttactcctagcttggtgccaggagcatattattaaaacaaaacatcttattttaaaacagccttaccactgttccaacttctgcacttctcagtcctaacctcatcttctcctcacaatagtttatgctgt

SEQ ID NO: 166003 - DNA, 1920 bp, Homo Sapiens
  misc_feature (1593)..(1595): n is a, c, g, or t
  misc_feature (1597)..(1696): n is a, c, g, or t
  misc_feature (1713)..(1713): n is a, c, g, or t
  misc_feature (1717)..(1717): n is a, c, g, or t
  misc_feature (1719)..(1722): n is a, c, g, or t
  misc_feature (1730)..(1730): n is a, c, g, or t
ccgctcagacagtttctgaaggacgagcccaagagcggcgaggaggcgctcatcatcccccccgacgccgtcgcggtggactgcaaggacccagatgatgtggtaccagtaggccaaagaagagcctggtgttggtgcatgtgctttggactagcatttatgcttgcaggtgttattctaggaggagcatacttgtacaaatattttgcacttcaaccagatgacgtgtactactgtggaataaagtacatcaaagatgatgtcatcttaaatgagccctctgcagatgccccagctgctctctaccagacaattgaagaaaatattaaaatctttgaagaagaagaagttgaatttatcagtgtgcctgtcccagagtttgcagatagtgatcctgccaacattgttcatgactttaacaagaaacttacagcctatttagatcttaacctggataagtgctatgtgatccctctgaacacttccattgttatgccacccagaaacctactggagttacttattaacatcaaggctggaacctatttgcctcagtcctatctgattcatgagcacatggttattactgatcgcattgaaaacattgatcacctgggtttctttatttatcgactgtgtcatgacaaggaaacttacaaactgcaacgcagagaaactattaaaggtattcagaaacgtgaagccagcaattgtttcgcaattcggcattttgaaaacaaatttgccgtggaaactttaatttgttcttgaacagtcaagaaaaacattattgaggaaaattaatatcacagcataaccccaccctttacattttgtgcagtgattattttttaaagtcttctttcatgtaagtagcaaacagggctttactatcttttcatctcattaattcaattaaaaccattaccttaaaatttttttctttcgaagtgtggtgtcttttatatttgaattagtaactgtatgaagtcatagataatagtacatgtcaccttaggtagtaggaagaattacaatttctttaaatcatttatctggatttttatgttttattagcattttcaagaagacggattatctagagaataatcatatatatgcatacgtaaaaatggaccacagtgacttatttgtagttgttagttgccctgctacctagtttgttagtgcatttgagcacacattttaattttcctctaattaaaatgtgcagtattttcagtgtcaaatatatttaactatttagagaatgatttccacctttatgttttaatatcctaggcatctgctgtaataatattttagaaaatgtttggaatttaagaaataacttgtgttactaatttgtataacccatatctgtgcaatggaatataaatatcacaaagttgtttaactagactgcgtgttgtttttcccgtataataaaaccaaagaatagtttggttcttcaaatcttaagagaatccacataaaagaagaaactattttttaaaaattcacttctatatatacaatgagtaaaatcacagattttttctttaaataaaaataagtcattttaataactannnannnnnnnnnnnnnnnnnnnnnnnnnnnnnnnnnnnnnnnnnnnnnnnnnnnnnnnnnnnnnnnnnnnnnnnnnnnnnnnnnnnnnnnnnnnnnnnnnnnnacaacaccaaaaaacanccancnnnnccaattgnggcccccccctttggccccataaaaaattttttccaaaactctttctcttggggccccgccggcccccccaagaggaaagagaacctcctccccccacgcctttttcacgacagaaaatctgcgaccacaaaaaaattggggtgtctctctcccccacaaacaaaaaaacgcccgcgggcggaacaacag

SEQ ID NO: 166004 - DNA, 449 bp, Homo Sapiens
  misc_feature (15)..(15): n is a, c, g, or t
  misc_feature (29)..(29): n is a, c, g, or t
  misc_feature (41)..(41): n is a, c, g, or t
  misc_feature (59)..(59): n is a, c, g, or t
ccctcctggaaaaangccaaataaaaccntaaaaaatcccngataaaggatttaaaggnaaatggtaattcatccctacctaccctaaggtggacatgtacctattacctatgacctccatacagttactaattcaaatataaaagacaccacacttcgaaagaaaaaaattttaaggtaatggttttaattgaattaatgagatgaaaagatagtaaagccctgtttgctacttacatgaaagaagactttaaaaaataatcactgcacaaaatgtaaagggtggggttatgctgtgatattaattttcctcaataatgtttttcttgactgttcaagaacaaattaaagtttccacggcaaatttgttttcaaaatgccgaattgcgaaacaattgctggcttcacgtttctgaatacctttaatagtttctctcgttgcagtttgt

SEQ ID NO: 166005 - DNA, 675 bp, Homo Sapiens
  misc_feature (67)..(96): n is a, c, g, or t
cataggtaagtgtgtagatgttatacttagtagtataaatataaacagaagtgtaccttttataatnnnnnnnnnnnnnnnnnnnnnnnnnnnnnncacacaaaccggttagtttcaaaaatgacatggctggcttaaaggttctgaagtaaaggcttgttaagtttctcttagttttgatttgaggcatcccgtaaagttgtagttgcagaatcccaaactaggctacatttcaaaattcagggctgtttaagatttaaaatcacaaacattaacggcagtaggcaccaccatgtaaaagtgagctcagacgtctctaaaaaatgtttcctttataaaagcacatggcggttgaatcttaaggttaaattttaatatgaaagatcctcatgaattaaatagttgatgctgtaatagtttatgacagcataaattattccagtctgtcattgatgggcattggggctgatgccatgttttggctgttgtgaatagtgctgcatggaacatatgtgcgcaagtatctttataatagaataatttataatccttggggtatatacccagtaatgggatcgctgggtcaaatggtacaaatggtatctctgcctctaggtccttgaggaattgcacactattttcacatggttgaatatttacccccataacaggtaa

SEQ ID NO: 166006 - DNA, 835 bp, Homo Sapiens
  misc_feature (242)..(244): n is a, c, g, or t
gttgtagttgcagaatcccaaactaggctacatttcaaaattcagggctgtttaagatttaaaatcacaaacattaacggcagtaggcaccaccatgtaaaagtgagctcagacgtctctaaaaaatgtttcctttataaaagcacatggcggttgaatcttaaggttaaattttaatatgaaagatcctcatgaattaaatagttgatgcaatttttaacgttaattgatataaaaaaaannncaacaaaattaggcttgtaaaactgactttttcattacgtgggtttggaaatctagccccagacatactgtgttgagagatacttagagggagggagtaggttttgaagaggttgatggtggtggggagggaaggcctcctgaattgagtttgatgcagagctttttagccatgaagaatctttcagtcatagtactaataattaaattttcagtatttaaaaagacaaagtattttgtccatttgagattctgcactccatgaaaagttcacttggacgctggggccaaaagctgttgattttcttaagttgacggttgtcaatatatcgaactgttcccaagttagtcaagtatgtctcaacactagcatgatataaaaagggacactgcagctgaatgaaaaaggaatcaaaatccactttgtacataagttaaagtcctaattggatttgtaccgtcctcccattttgttctcggaagattaaatgctacatgtgtaagtctgcctaaataggtagcttaaacttatgtcaaaatgtctgcagcagtttgtcaataaagtttagtccttttttaatcaaagtaaaaa

SEQ ID NO: 166007 - DNA, 670 bp, Homo Sapiens
  misc_feature (85)..(93): n is a, c, g, or t
atggccaattaaactaattttattcaaagtaagtctacattaaattacaatattaacaatctctagacacaacgaacttataagnnnnnnnnntagaaatctgtttggtctttcttagaccacatatcatggaactcataaatgaaaattttcaaagatagaaatgacaattaaagagtgaggattttaatatggaaacccacaaggtgtcatatttcaaacccgcatgtttcaaaaagagactcttaataatttagcacaaaatcaaattatataaacttggtatattccagaaaatattgctttaaacacttatgccatgatcaaaattcctttggtagcttttaatcaaaatgaaacatgctattatgtaaaatataaagtacttttaaatgttatctcaaaagtatctgtgtcatagttacccttctaacatcactactgaactttcctttcactgttcaacctcatgtatatatacacaacacaaaaccaggtaccaacaaaatccttttaatctttccacaaaataacctctgcttcacaacatcaagactttaagtctccataaactttttacagtttacagcagagaacaaggatcgtccctgcgcatgactgtaaaaaccaaaccaaactttattattgcaatcacacaaatactgcaatt

SEQ ID NO: 166008 - DNA, 485 bp, Homo Sapiens
  misc_feature (325)..(400): n is a, c, g, or t
gaataactattacagcataaactattacagcataaactattacagcatacaagtccacttaaaaaatatccacatataagggctgggagagagacatcactacaggtaattttatatttggggttaactcaaatcaaaatgactagaatatacagtaaatgtctttaattaacattattaactgataaaacaaattagtggatcataggattgcttattcaatattctaattatcaattcaaaaatgattttcgtaagccctttgtgactatctctttaataaaacccaaatgaatagtttatgctgtacagcataaactattannnnnnnnnnnnnnnnnnnnnnnnnnnnnnnnnnnnnnnnnnnnnnnnnnnnnnnnnnnnnnnnnnnnnnnnnnnngtcagtgcaatgcaccacacattaacagaatagagggggggaaccacttgatcaactcatgcagaaaaagcattctgacaagata

SEQ ID NO: 166009 - DNA, 311 bp, Homo Sapiens
tattaaagctagatctataagtacaaattttcaatatgtgggaaagtaaatctgtttttaaattaaagagaaattattactctatttcttagaaataaaactatcagaatataattcaagtgtagctgctcatactcactgaataagtttaaatttgataataaaacatttaagtttcaaccaatgcacctttgctgaagcacatttagctgaaataacttcgattctggtttatttccatcacatatagtacatttttccacaagagcatgtacattcaatatagacatttccaatatctatggtttgcc

SEQ ID NO: 166010 - DNA, 1152 bp, Homo Sapiens
ggggtgatgaaggcagaaatgaatggctcaaaacttgggagaagagcaaaacctgaagggaccctccagaacaatgatgggctttatgatcctgactgcgatgagagcgggctctttaaggccaagcagtgcaacggcacctccatgtgctggtgtgtgaacactgctggggtcagaagaacagacaaggacactgaaataacctgctctgagcgagtgagaacctactggatcatcattgaactaaaacacaaagcaagagaaaaaccttatgatagtaaaagtttgcggactgcacttcagaaggagatcacaacgcgttatcaactggatccaaaatttatcacgagtattttgtatgagaataatgttatcactattgatctggttcaaaattcttctcaaaaaactcagaatgatgtggacatagctgatgtggcttattattttgaaaaagatgttaaaggtgaatccttgtttcattctaagaaaatggacctgacagtaaatggggaacaactggatctggatcctggtcaaactttaatttattatgttgatgaaaaagcacctgaattctcaatgcagggtctaaaagctggtgttattgctgttattgtggttgtggtgatagcagttgttgctggaattgttgtgctggttatttccagaaagaagagaatggcaaagtatgagaaggctgagataaaggagatgggtgagatgcatagggaactcaatgcataactatataatttgaagattatagaagaagggaaatagcaaatggacacaaattacaaatgtgtgtgcgtgggacgaagacatctttgaaggtcatgagtttgttagtttaacatcatatatttgtaatagtgaaacctgtactcaaaatataagcagcttgaaactggctttaccaatcttgaaatttgaccacaagtgtcttatatatgcagatctaatgtaaaatccagaacttggactccatcgttaaaattatttatgtgtaacattcaaatgtgtgcattaaatatgcttccacagtaaaatctgaaaaactgatttgtgattgaaagctgcctttctatttacttgagtcttgtacatacatacttttttatgagctatgaaataaaaccctttaaactg

SEQ ID NO: 166011 - DNA, 404 bp, Homo Sapiens
tatgtgtacatgaggaaacaacaaaataaacaaatgaaaaactgaaatcagaatcactaatattatcaagtagggaaacaaataaattaaaatctagcagccatcagcaagagtacagcaaagacaatgctgtaaaaagaaacaaagaaaattgctagaaaactgtatgcatcataatctttcaaaccagcaaaatatgcttctgcataaaatggaacaacagaattttttttcctgtatagtatagaaatgccaagttgttttctgactattgtggataggtaaaatctgtatgtaattaatggtaattctactgaactattacagagtgggccaggaacacatttatggattctggggatgtgtactgtaattctttgattgggatagtggaaactctagcc

SEQ ID NO: 166012 - DNA, 490 bp, Homo Sapiens
  misc_feature (73)..(102): n is a, c, g, or t
  misc_feature (182)..(196): n is a, c, g, or t
ggcttgctgatggctgctagattttaatttatttgtttccctacttgataatattagtgattctgatttcagnnnnnnnnnnnnnnnnnnnnnnnnnnnnnncctcatgtaacattggtgaaggatccaggaatatgacacaaaggtggaataaacattaattttgtgcattctttggtaannnnnnnnnnnnnnngtaactacaaagctttgctacaaatttatgcatttcattcaaatcagtgatctatgtttgtgtgattccctaaacataattgtggattataaaaaatgtaacatcataattacattcctaactagaattagtatgtctgtttttgtatctttatgctgtattttaacactttgtattacttaggttattttgctttggttaaaaatggctcaagtagaaaagcagtcccattcatattaagacagtgtacaaaactgtaaataaaatgtgtacagtgaattgtcttttaaaaaa

SEQ ID NO: 166013 - DNA, 912 bp, Homo Sapiens
taaattcgcggccgcgtcgacagaaaatactaattaataatagtaagttgttagtgttggttaagttgttgcttggaagtgagaagttgcttagaaactttccaaagtgcttagaactttaagtgcaaacagacaaactaacaaacaaaaattgttttgctttgctacaaggtggggaagactgaagaagtgttaactgaaaacaggtgacacagagtcaccagttttccgagaaccaaagggaggggtgtgtgatgccatctcacaggcaggggaaatgtctttaccagcttcctcctggtggccaagacagcctgtttcagagggttgttttgtttggggtgtgggtgttatcaagtgaattagtcacttgaaagatgggcgtcagacttgcatacgcagcagatcagcatccttcgctgccccttagcaacttaggtggttgatttgaaactgtgaaggtgtgattttttcaggagctggaagtcttagaaaagccttgtaaatgcctatattgtgggcttttaacgtatttaagggaccacttaagacgagattagatgggctcttctggatttgttcctcatttgtcacaggtgtcttgtgattgaaaatcatgagcgaagtgaaattgcattgaatttcaagggaatttagtatgtaaatcgtgccttagaaacacatctgttgtcttttctgtgtttggtcgatattaataatggcaaaatttttgcctatctagtatcttcaaattgtagtctttgtaacaaccaaataaccttttgtggtcactgtaaaattaatatttggtagacagaatccatgtacctttgctaaggttagaatgaataatttattgtattttaatttgatgtttgtgcttttaatgagcaagatagaggggaacatccg

SEQ ID NO: 166014 - DNA, 160 bp, Homo Sapiens
cggtccacagcataactattgcgcaatatgactgaaagatagtcatgtcttgaatctcaaatcttcagaatgataaaccacaaaactctactttgacacctaatgtatacagatgaatgtctgtctacttcctactggaatcgtgatagttgaattaaga

SEQ ID NO: 166015 - DNA, 141 bp, Homo Sapiens
cataaactattggtgattactaatgcatgtggaaaataatactattctgagttatattcttgagaccagcctggagactatagtgaaacctgactctatagaaaatttgccagcatggtggtgtccctgcgtcggtccgct

SEQ ID NO: 166016 - DNA, 353 bp, Homo Sapiens
tcctcacccaagtaaattctatgcttgtatgaagatagaaattaaatttgtgtttcttatacaaagaatctaggcaggtttccagatataatttatggaaggacctgtaatttattttctaatcatcacagtttgttaatcattgcaggtctgtgggagggggtaaaaagtggcactaggattcacacacaagtaaataattatagagcctgactggtgctgccactgtgctggccagaccttcctgcagggtcatgcttgattttacacataatgcttgattttgtttggaaaacatgtttcttcttctgggtagatatatttctatttgtatagttatggctctgtaccga

SEQ ID NO: 166017 - DNA, 593 bp, Homo Sapiens
acagcatagactattggtatgagtatcatttccagaaacctaaaagagctttcctgaaatcccaacatcccgtcagctccacctagtcttccatagttcattaaaaacaagcagcatttctttcatgcctcatcattaatgataaagcaaatgagtcaactgtacagaaacaaagaaaacatcaacaataatttactattagcatcattgcatttgtgtagcactttatacacccgctatctcatttgacctttttcatgagcttctgcagtacaaggaaatggaataattattttagagacaaggaaactccagtccataagatgtccaagaacacacggctagtaagaggttatggcaagatgtgattcaggattcgagaacttttcatctagatttttgttcatttatgcaaaactgtctctcttatctaataaaagtgtttaccaggcttaagaagtggatgatggagcttctgagatccacataaataggaagttgtctaattcaggccagatgtggtggctcataactgtaatcccagcactttggaaggcttcatgggaggatcgctgagcctagattctgaatag

SEQ ID NO: 166018 - DNA, 221 bp, Homo Sapiens
cagcataaactattaacttaaaggtgttaaaataactaattttttgctacagacatcattttggttggtggtgagaggaagactttgctggactggggccccatgaagtggagacagaaactatgctggaaattgttatcaaatagttttttcccaaggccatagggcatgggaaatatcttctgtgtatcttttctcccatagtttatggtaccgactga

SEQ ID NO: 166019 - DNA, 213 bp, Homo Sapiens
acagcataaactattacagcataaactattacagcaaactattgcataaactattttatacagctcattttaaacagtttgaaacttaaggtgatatcatttggtgccttagaatggtgttttagtcttcaattgccaagaaatatcagcaactaaatagataatattccatctgggattatcctaaaccagcatcagccccttcccatagtt

SEQ ID NO: 166020 - DNA, 693 bp, Homo Sapiens
taataggatgaatcacattaatcaaccatttatttgtcagtctccatagtaattatttaactcttctgtgtttaaagactaatgtgctttttactgacttgtacacacatttccacaggaggttgttcataaggagcttactaactgtggtttgcaccctaacactctggagcaacttagtcaaataccgttacttgggaaatcatctttacggaatgtggtgctgagagactacatttataattggagatcctgaacaccaaagtaagcctaaaaggaatctttgaggaaaaaagccttctagcaaggaaattcaagattcttgaagttgaaggaatatactgaaatgtttataaacataacttttactacagtagcatctaaggttttaaatgtgttttactattttcagattagatttttagatataaagatgaaaaactcagataactcaaatgagatatctatatccctacaacctaattgtatattgagcagaaactgaattaatatgcttccttgcaaatgggaaatcacatagcagttaccccatggcattgtgactaatggcatcagggcaaaaatatgttactttacgatttacctgttagcaggttcttgtttcataaaggtagaaaataaatacagacaacatctactgagctagttgattgggttgacgtcagggggtct

SEQ ID NO: 166021 - DNA, 576 bp, Homo Sapiens
gaattctacctgctggacagaaacctggaaagttctttggaattcgctgaattacagtttagtatgtcctgattacagagtgacaatatttatcaagcctttgttatattggattatcttctctcttaaaatacaactgtattataattgaaatgacagcccaaaattggatggtttaccaaaaccaatgaaagggatttcacacatcaatttttatttctgttttgaagagcacatgctatataataattgctagtagcaactgcagtaaaacaggtgataagttattttctctgaaaagatccagtcctagagcaggattcttcgatcattcatggcagagtgaaaaaggtttgtatggttcttgtccaaataactcagttcttaaaattcttaaaatgatcgtaaaccattatcctttaaaggtttatttgaagatgctgttaaagtacagaattttgtgtacaggtagatttttccgtccctcattaatagtgccttcttaattaatacagactggtgttagctataacaaaactccagtaaggccaaagaatcccaagttctttgtggaac

SEQ ID NO: 166022 - DNA, 611 bp, Homo Sapiens
ttcgagcctgtgcatccaccttagagtccacacaggagagaaacctttcggatgtgatgagtgcggaaaggccttcagtcagagtacgagcctctgcatccaccagagagtccacacaaaggagagaaaccatctcaaaatatcagttatataaaacgttttgctaagagtttaaaatcttaaaacccataagtgccactaggaaggaaaccctgtatatacctacattgacccaagaaatatttacgcaatccctagcagaacattgtttctgaggaggcatatgtgagattgatttgttggttcatgccaagtgtgttccacaggttgactttgaatgtggacctctgagcatccacgcaggatggctctcaggtcccagtcacagacgtcgcttcctgggattccagcacgatgcctccatagttgaaagactacacaaaaagccacaatcattgcccggcctcctgagtcaccttctatctatactattgcttaaaagctatcccagatactcccccttgaggagctcatgcccttccttcctctttattcgagcatactggcaatgcattggaaaacagacagctcccactaagatcaccttctgg

SEQ ID NO: 166023 - DNA, 200 bp, Homo Sapiens
acagcataaactattgacttgtcacagataacagctgcatggcagagctaggataaaaagccagatcttcagagtcccagaacaacgtccaaacctctacctgagctataagctcgtatttccaactgcctaattaacatggcacctaatggtaccatgtgatgccattactcagtcaaagcaaattcacaaaataggtc

SEQ ID NO: 166024 - DNA, 450 bp, Homo Sapiens
  misc_feature (109)..(159): n is a, c, g, or t
  misc_feature (162)..(162): n is a, c, g, or t
ttagaggatccaagctccaacaagaacaaggaggcttctctttttttatttgaatatctaaatgcatttaataataataattatttaatttcagagttcactcttgtgnnnnnnnnnnnnnnnnnnnnnnnnnnnnnnnnnnnnnnnnnnnnnnnnnnntgngaggtacgtcattgttttaaaccacttatgtgttgtagattttactctgtgtatacgtttggtgggttatagtttaccaagttgtccaaaatggataattcatgtgagataggcaagagcaagtgttgtatcccaataccatttggtgaaaaagttgaacttcagaaaggataagtagtttgccaagatcacctgtcaacctgcatagtcaaatttgagatggaactcagctactccaatatctgtatttgcagaataattctgttgtgtaaatcttgtagggagctt

SEQ ID NO: 166025 - DNA, 176 bp, Homo Sapiens
accgtatacagcataactatacagcataaactattacagcataaactattctgcatagcaatattatgaaaatatgttatgattaacttttactatataaaccaaattctaatttcccccccaattaactcagtataggatattgtttatatagtaaaagttaatcataacatatt

SEQ ID NO: 166026 - DNA, 202 bp, Homo Sapiens
tccaccatgatttatggttcaatcatcttttcctgaaacaggactatataggcaccaaaattgtggcttttttagaaacactgtgcaagtaattcttgccatgtctctactagttgtggggtttcattattatgttatgaataggtgaagctaagaataatagtttatgctgtaatagtttatgctgtaatagtttatgctg

SEQ ID NO: 166027 - DNA, 670 bp, Homo Sapiens
gctagaactctaaatctgctacagtatgtcatacaggtctaacaagaggaaaagcatccttaagtcagtctatttagataaactcttcaagtccctatataaggacgtattccactagcaagccagtaaatttttccaaggtcacataatcttacatgaaatggaacctttcatcttagacttcatcaaactcaattttttcccttctagattcactttgtgtttatgcatgcatgcacgcgtgcacacaattctatcagcagctgtaaactacccacatattttcttaatctctttttttcagtttttcttcatccttaaaagaggttacatttcattcctggtcaactcttaaaaagaattatgtaatgttgggccttcatattaaagagagagactggttataagatcctttacagtccattcattttattctgatgtctaaccagatagacactagcaagcaaaacttccctcttaatcctggaccaaatgcataattttactgtcactttcaaaaatctgttatgactgaatcaaaatccttttaaagaaaggaaaaagctccttttgtgtcaaatagttgaacacatgaaaacgtatgagccggttaaagatagatgatttttacttacacggggatctctagatcgaccacagcatcagctgc

SEQ ID NO: 166028 - DNA, 445 bp, Homo Sapiens
ttagagcataaactattacagcataaactatgacagcataaactattacgcataaactatagaagaaattctgttgtatgatttgaacactattaggttggtatgtgtgtttaattggaagaattttatatagagtatctctgctgcttttgtttacctgggtaccacacaaccaaatacacattgagatttcaagaaatgatgatgaaagccagaaggccagaccacagctctgcagcctgtttcctacaaccagatataagactctttctcgtcgccatgctgatagtcacactgaactagaactgtcccaacacattcttcctctctcataatggcttccatttaatacaggcaaagccctttaccttagcaaattctttatctttcaaaagtgaccaaaatgaggacttcaaccttggctgcacctcaatagtttatgctg

SEQ ID NO: 166029 - DNA, 342 bp, Homo Sapiens
cataaactattcatggaatactgtgccacacttgatgggtttgctgttgtatttaatgatggtaaagttggatttattacaccagtgtcaagtagatttactgcagagcagcttcatggagtttggccacaagatgttgttgacggaacgtgtgtagcagtaaataacaagtatcgactaatggcatttggctgtgtgagtggttctgtgcaggtctatacaatagataacagcactggagaccatgctgctatctcataaattagagctaacagcaaaacatgtatcctgacatttggaataaaacaggagctgttaaattgatgagatgctctcctgaca

SEQ ID NO: 166030 - DNA, 1351 bp, Homo Sapiens
  misc_feature (1085)..(1085): n is a, c, g, or t
  misc_feature (1138)..(1138): n is a, c, g, or t
  misc_feature (1146)..(1154): n is a, c, g, or t
  misc_feature (1211)..(1211): n is a, c, g, or t
  misc_feature (1237)..(1237): n is a, c, g, or t
  misc_feature (1243)..(1252): n is a, c, g, or t
gtgatgtaagcttaggagtttcctactattataaatgtgctctatttttacatttatgttcagaaagttatctgacttttggtcctaagtggtatgttcaaggagcctattaatatatttatagtttttgaatgctgtaagtttcaaattgctgtgttacgtcattcattttcttctggttccttaagtttttcaagttatccttttctgaggaaaattattctagaggaacctaaaaagggacaaaaaaattgaaacttcttaggagtctaatcttggtgccttctgttaaaagtcagtgtatcagaaaagaaagcagccatgtaagaggctaacttaagtagaagtgctagaaatatctttgtgtattaacatgcaataaaaggtaccattcaaagcagggggaaaggtaggaagaagaggtaatttttactgaaaattaaggcaatgttggtcgccttttattaaaagctttttttaagctttcatacagattgctttttgctatctttgacaatatggtattatagttcgcatggcaactggtcatatatgacagtctactgcatatatatgactgactaggattaatctggcgcgcttacataggatatacctaggtcaaatctaaccctgaaaggttaaaaaaaggaacatactgccccaataatttcttaaaaaccaaaaacgcccgtccatttgcggatgcacgccacttggatttcacccactcccccacctaattcccgctgaaagtcccactttttttaaacctcttttttggggcaaaagaaaagggtttattccgcttcttgcgtcaggaaagaagaacaatccttccgcatacttgtgggggggctttaccaaaaagaaatctaccggggtctgctctttataacccaaaacgtcgtgattacaaaacaggccggccgggcgcgcctgctcgctgctatcattgtctgctctcctctcccgcgggcacaaaccaaccactccaccgtaacaccacacacaacattcaccccctttttcatcggcaaacatacaaactcaccccaagggcccaccagcccgcttcaaacgcngtacttgctcgcgcaaaaacttaccaccccgcgcacaactcgtgcacccacgncgtcaaannnnnnnnnacaaattgggccaatccctccgcgcgcggacacccacgcgccacaccccgattctgntttactcatgaaaaagactctcttgncccgcnnnnnnnnnntttccccacacgggggcgcgtgggcgctccccccacaagaccccctttttctccctctctacaccttccccgctcgtcttcccccgcgaagcgggcccc

SEQ ID NO: 166031 - DNA, 877 bp, Homo Sapiens
acttgatcctcataaggaaactaaggctcagaatgagtagagctgggttcagaatctagctcttctaactccaagccacctcctctttccactgcaggaaactgcctcttttgtcagtgaaataatagaaagattgtgttagttaagtgataactgtcatttgtttgaaaatgttcgagactgaacaaatagcatttaaactgctggcatatagatgagatattgtacttttgtgcaatgtttattacctttgattaaattgtaatgtgaagcttttactaggtgaatagttcattatgtagtggaggcttcgtggttgtccattgaattgtcacagcaaaatctataagtttcttcaattctacaagatagatccatatacctttgatcacttggagactctttttttgctggtttctagataactcaggtaaatcagacctttacagagtacagggctaggtgaaagaattactgaaaaatcaccttgaaaatccgaagggctgatataccctttatgttcctgactgatgcgcagaacctgggggaaatctacagcaatatacaggttgcaatgctgataacacaacagcaatcctctcctctacgtggacttactgttgtttttttaattattattggaatgggattttagaaaatagaagttacctttgtgtgtgttttagggaaggtagagaagaatctgctctttctctgaatactgttttgaccccaggcaggaccttggaaaggccaaaacattaacagtagtacttctgttcactgaagagttatgttacatgaagataaaatggttttgtcgtgtttattattgtattttgtgttgatataaataaacatggtaatttaaacaatg

SEQ ID NO: 166032 - DNA, 426 bp, Homo Sapiens
  misc_feature (30)..(30): n is a, c, g, or t
ggctgatattgaaatagaccttttctctcnagacatcctcctaccaacgcagtggacttcactggaagatgctatttcaccaaaatctgcaaatgtaaactgaaggacatcgcatgtttaaaatgtgggaacattgtaggttatcatgtgattgttccatgtagttcctgtcttctttcctgcaacaacagacacttctggatgtttcacagccaggcagtttatgatattaacagactagactccacaggtgtaaacgtcctacttcggggcaacttgccagagatagaagagagtacagatgaagatgtgttaaatatctcagcagaggagtgtattagataaatggaattatgatatatatgatatacaaacttttttctatttaaaaatatattaatggatcaactttaaaattgttagttg

SEQ ID NO: 166033 - DNA, 708 bp, Homo Sapiens
agttactttccatcactctgtaaagggcaattggaaaaaagaataggcccaagttcccctcttggcatcttgcagaagtctgtggagtctagtctgttaatatcataaactgcctggctgtgagacatccaggaaggtccgttcctagcaggaaagaagacaggcaccacatggtaccatcacatgataccctacgatcgtctcacatggatacacaaccgatgcccttcagtttacatttgcagattttggtgaaatagcatcttccagtgaagtccactgcgttggtaggagggatgtctgtccttgaaactgcttaacactttggggactcctttgaacaataattggttaaagagtcataggaccctttctcaagaagtttcacatccaattataaaaacagatgaaataacactggaaagcagggcgacgctctcttggagagtagacacgatttttaggcctagatcgtctcttcttttccccgcaggagttcgtagttaactttccatcactctgtaaaaggcaattggaaaaaagaaaaagcccaagttcccctcttggcatcttgcagaagtctgtggagtctagtctgttaatatcataaactgcctggctgtgaaacatccagaagtgtccgacgttgcaggaaagacgacaggatctacatggaacgatcacatgatgactaacgatggtaccaca

SEQ ID NO: 166034 - DNA, 479 bp, Homo Sapiens
ggggtgtagttttccccggcaggacggtagaagtcgtggtttgtgcgcggccaggcgctggagcctccgctgccgggagcaatcagaccttccagctgcctctcatgtacttgtctgttgggggcttgtgttgatcaggagtgaattcacagtctaccatgaattggaaggttcttgagcacgtgcccctgctgctgtatatcttggcagcaaaaacattaattctctgcctgacatttgctggggtgaaaatgtatcaaagaaaaaggttggaggcaaaacaacaaaaactggaggctgaaaggaagaagcaatcagagaaaaaagataactgaagattctgccatgtaaatgtcagcttgagtggactccagctgagaagaaagagaagaaagacttaattattgaataactttgtcagaggataaactcccaacctagacctttcacttaaaatagtgtgaatttgtatatgtttt

SEQ ID NO: 166035 - DNA, 588 bp, Homo Sapiens
ggaattgcatttccactactttgcactcattttatgagttgcacgcatgaactatgtccagaagagcgacatcatattggagatcgcagtctttccttatgtaatatgttcctagatgaaatggccaaacaagctcgaaatatcatcactgatatttgcacagaacagtgtacccttagtgaccagttgctacccaagcattgtgccaaaactatcagtcaagcagtgaataagaaatcaaaaaagcagactggtaagaaaggggaacctgaaagggagaaaccaggtgttgagagcatgaggaaaaacaggctggttgtgaccaaccttgataaattgcacactgcactttctgagttatgcttctctataaattatgtaccaaacatggtggtatgggaacatacctttaccccacgagaatatttgacttctcatctggaaatacgctttaccaagtcaattgttgggatgactatgtataatcaagccacacaggaaattgcaaaaccttcagaacttctaacaagtgtaagagcatacatgaccgtactccagtcaatagaaaactatgtgcaacacgaataa

SEQ ID NO: 166036 - DNA, 593 bp, Homo Sapiens
cataaactattcatccaatgtctaaagtgaaaatttaagttctggtctttagtttgctccccaaaatactgtagcaggtatagtcttggtaactcaacgatgggctctatacagattcatcagattaaaaataagcaagggcttctatcccataccccaatgacagaataaagatcatctctgagcagcaggcagttatttaatacaaggtcactcctcaatagcgttggctgtaccagtcgttgttgtttaactgaagaagttctgtcacaacctgcaggatattgtaattgtgtttcttcagcagccgtaggttcagctgcctgtcacagaatcccatttcaaagagatgggccatcagggctgctgtctgatcttcagaaattattggctgtgcagtgactggtggcccagcaaacagggccttgtatgcagaggcagcaacagacaaagcccccttcaccagtcctccagcaatgctgctcccatgatggtgccttgagtggtcatagctcttctgtctgctgtttacaagtcctgatgagcctctgggctctcctctgatctgatcagggactgaagaaacttctggt

SEQ ID NO: 166037 - DNA, 259 bp, Homo Sapiens
acagcataaactattagggggaaaaacctatgcattcaactaaatatagcattttaaaatacttctatttaatatttccaatagctgaggaaaacctcttttaggaagactttttatttcttcttcatgaagctgagcttgttccaaaaggaggtagaaacagaattttcaagaaaataaacacaccaaccagacttctgcccctctatatctcacaaatactgatatttttgaaggcacctctgatatagtcatgctc

SEQ ID NO: 166038 - DNA, 295 bp, Homo Sapiens
ataaggaaagctatataggaatacgcaaaacaggacacagtctctaaccccgtgaccttctacaaagtggacagacctctgctgatgacgcaagggaacagcacctaagccctgtgcttaggcatccccgttttctgggttcatgcaatggcttcatcatacagcagtgcagagagctcaacagtctttatgagatgggacataactaagtgcactccaaacataccatgcttttcaacaatctcaaatcaaaatacgaatctacttttaagaaatgtggtaatagtttatgctg

SEQ ID NO: 166039 - DNA, 327 bp, Homo Sapiens
acagcataaactattcacaaatcaaaattgcaataagaaatcatccacctcctgttagaatggctattatccaaaagacaaaaaacaacagatgttaatgaacgtgcagaaacaagggaactcttatacaatgttggtaggaatgtaagctagtataaccattatggaaaacagtttggggttacctcaaaaaattaaaaatagaactacctatatggtttagtaatcccactactgaatatttatccaaaggtaatataaatcagtatatccatgggatacctgcacctaccatgcttattgcagcactattcactatagttatgc

SEQ ID NO: 166040 - DNA, 713 bp, Homo Sapiens
ctggtttaatcagaggttctaagcactggacatttgaaaaggtggagaagtttgggagcttctgtgccctctgcttagaacagcactgtccaatattaccgtagaaacttataatgactggggagcttgtatagcaacatcctgtgaaagcagagatccccggaaacttcactggctttttgaactgctgctggaatcaccattgagtggtgaaggaggatcctttgtagatgcatgtcgactttatgtactacaaggtggccttgcccagcaagaatggagagtgcctgaactattgcacagactactgaagtacttggaacccaaactcacccaggtttacaaaaatgtcagagaaagaataggaagtgtgctgacctacatattcatgatagatgtatctttgccaaataccacaccaaccatatcgcctcatgtccctgagtttactgctcgaattctggagaaattgaaacctctcatggatgtggatgaagaaattcagaaccatgttatggaacgaaaatggaatcggtgaagaagatgagcgaactcagggcattaaactcttgaaaaccatattgaaatggctgatggcaagtgcaggaagatccttttctacaagcagtgacagaacaacttctagcttctacctttgtgttcaagattgccccagtggaaaatgacaatagctacgatgaactgaaaagaga

SEQ ID NO: 166041 - DNA, 692 bp, Homo Sapiens
agttgaaatattagtatatcctataggtcacagtgatttccataaaatgctgcacagatacaaagtcttgagtatgttacttagtagctaaaaagagagccttgatgtgaggcacggctgacttggaacattaaagagcctggcttccctttctgctttccattctcccaacagaaaaaaaggtcttcaaagaattggccagtcttacagctcaccttggggtgtagatgactctccactgtggtgctaggcaattttattgaacaggtggccactggtggtgatggctgaaccactcattaaacaaattgctctaaatggcctcagtatcaaggtgtgctttctgtacccttaatctgactttaatcctgcagaacctcagtcttaccatgtttaacagcattgccatgtacgatatgcctttatcctacactgtatatatactctttatgcagaagtatatctaactgaaaagtataaaaatataatggtggaaaacaaatgaattaaaaaatgtatcacggccgatagcccaggtaactgcaggtgaaatgtagccagaagtcagaatcttggggcaaaatcaagtatagtcttatgggctgtgccttcaaatggtatagtttataccctcttaggcagaatcaagtctcttatgtctgtgggatctctgagtgactgcagatcaactg

SEQ ID NO: 166042 - DNA, 849 bp, Homo Sapiens
ctattgacctaaagtaaggatgaagttgtcctcttttctataggggatctaacttgagccctcactggagtcaaatgttttggccattcaatttgctaaatgtatgggtaaactctccaatgaatagtccaaatgttactgtgcacatattcggatattcattagcactgcaattatgctaattttgtgaatttaaacaatgtattctttttggcaagaagcactagatgtagaactattcaaacacgcatgaatgataccatgataccacgaacatgcacgataccatgaacttgcatcacggtgccgggctacgtatgtgtagctcatggattaccatggcatgaaaatgctagaagttcatatggatacaatgatagtggaagttcaaatgtgagaaaagtcaggtatgtcaagaacaatccctggttagttcactgaaaagccccactctcgtatcagacagcaagacagaacaacagccactgacttggaaaggctgggtgatccataacgaccaatctttcaaggaccaataaaatacctgagtacacagtcagctatacagtaaaatgacagatatcacagtcttaaaattttcaggaaaagtagaaaagctgtcagacttttcaagctgtcgccagccttggacttctgtttctctaattgtagcactacatacagcctagaagatagtatttcagtactgcaaaccagccattctgatgagttcactatgaatgtatctgcgatcacaaagctacttcgtggacacattttaatttggtaagcagtcgggggaggtcaatgtcatcatctttaggtgcgaactaacaaaatcactactga

SEQ ID NO: 166043 - DNA, 638 bp, Homo Sapiens
caaggtattgatgtacatagatgatttaccaatatggggtatgttggtgaggctgatgaaaatggagaagattactatctttggacctataaaaaacttgaaataggttttaatggaaatcgaattgttgatgttaatctaactagtgaaggaaaggtgaaactggttccaaatactaaaatccagatgtcatattcagtaaaatggaaaaagtcagatgtgaaatcagaagatcgatatgacaaatatcttgatccgtccttttttcaacatcggatacattggttatcaattttcaactccttcatgatggtgatcttcttggtgggcttagtttcaatgattttaatgagaacattaagaatagtttatgctcggtacagtaaagaggaagaaatggatgatatggatagagacctaggagatgaatatggatggaaacaggtgcatggagatgtatttagaccatcaagtcacccactgatattttcctctctgattggttctggatgtcagatatttgctgtgtctctcatcgttattattgttgcaatgatagaagattatatactgagaggggatcaatgctcagtacagccatatttgtctatgctgctacgtctccagtgaatgttatt

SEQ ID NO: 166044 - DNA, 337 bp, Homo Sapiens
ataactattcccgagtggatatggcaaccagtgtaacggcatacaagaaaccctaggagcaaacccacaccactcattctcagctaagagattttacacaggcaaacgtgtcttaaaccatctataaatcagttattttatatgacagtcaaaaccttagaaaccttaggatcattatatctattttctgcctattaattgctgtgaggtttgatttgaccaatctgggcaatttattcatcagcttcccttgaagtgcaccagaaaatagaagaaaggtgtgtggagacttagggtattttattacatgttttcatagtcttaaatagtttatgct

SEQ ID NO: 166045 - DNA, 532 bp, Homo Sapiens
acagcataaactattctccaattttgtacttttatgaattctggcaagaagggttggagtgattctgggaaagaacatccttaggctgccttgaagggagaagataatatagcttttcatttaaaaaatgctgatatctacttgcaatcaaaatctaagaaaacattcaaaatgtggtactttgcttgaggcagaatttctaactatcttgtgaattaatgataagataaatgaaatggccaaacaatcccttcagtttaccaggtaagaggatacaaaactccacacttgtgcacaatgaagctattcaggttttgatgatactttacagtgtcccctattaacattcagcttttaaaactagtattctgataaagtgacattgtattattagttttttatggcagtagtaacttagcacttaattaatccagtcatctgtgacatacataaacgtatcctgtaaaaaagaaaacaaacataaaggccaagaggagagaatgcctggaattagtatccatctgccaaaata

SEQ ID NO: 166046 - DNA, 502 bp, Homo Sapiens
aatacacatatgcaaccaactaaacagttataatcttggcactgttaatagaaaggtgggatagtcttagctgtatgcggtgaaatgctttttgtccatgtgccgttttaactgatatgcttgttagaactcagctaatggagctcaaagtatgagatacagaacttggtgacccatgtattgcataagctaaagcaacacagacactcctaggcaaagtttttgtttgtgaatagtttatgctgtacagcataaactattttagaaaaaaacatgaatttagaaatattcaaaatggtttttgtggcagattcaatattatgaattcacagatatttaaagaatgagaaacatagtaattagtagaaatgccagaaacagttcctggttcctcttgtgtttgacactaagaaaatagcaagagtgtgaaatctcagatacttatgaaatctcacagatgtaaggactcaagtgtagaagaaaatatccccttcttacaaaa

SEQ ID NO: 166047 - DNA, 243 bp, Homo Sapiens
tgctaaattttatttgaatgcttatactgtgtctattgagatgattgtatggtttttatttttaattccatttatgtgatgaatcgtacttattgacttgcaaatgttaaagcatccctgcagccctggatgaaacccagggtgaattatctttttgatatgctgttggattcagtttgctggtattttgctgagggtttttgcatccatgttcatcagggctattggtctgtagtttctttc

SEQ ID NO: 166048 - DNA, 731 bp, Homo Sapiens
gggtagatggggctgcaaccagagctgaataacatgttaggctcacacatgcatcagcactgcacactggaatcattgctcttcctggactttgtagaaatcagtctcaagtgcttcaagagtctggctcctgctacttttatctgtcaggtagcacataaggtttgcagggtttatattttgtatagaatcacagttgtggagaaaaagtaataatttctcaatgaattttaaaaatgggcctattttctatccccgtggttcatctgatataattagtgttccctgtgaattccccccctctatgggaaggatgcctttactctttatcagtaataaattatgactgttttcatattgccttagggttatttccctgtgtaaaccattgtcttttgttttggttttctttagcattatgaagctttggtattgtacaaggtcagtagtaagatgctcactagtctcagggcttgtgtaatattctgggaggtcatttaaatgccagaaatggtcaagcaattatacacagtatttatgactctgttaagcataccgtttgtctgtcacattagtagattctgagattaaaaaaaatttttaaagagtgatcatttaaataatttctaaaagggtcttttcaagctctaacaagtcactaacaatcattattttctacagaattagatgttagtagtacagtactgcatatcagggaaaattgacggatg

SEQ ID NO: 166049 - DNA, 453 bp, Homo Sapiens
  misc_feature (190)..(210): n is a, c, g, or t
  misc_feature (253)..(263): n is a, c, g, or t
ggagaaccagtataaacgatctaccatatcactctcatatatcagtgatgaaatgtcagatttgagcagtagctctttgacagtgtccttttatacccagtcttttctgcattgaatgctttgtgccttttcgatgtgttgtagttgcttagagttgattctgctggctagattgtactgattaatagannnnnnnnnnnnnnnnnnnnnggttatgggtgttatgattgtgttgcctgctggttgggcaacnnnnnnnnnnnaggttgctttatgtttatataggcaaattggcactaagtgttagtgtgaatatttgtttttatgatttatatatcattttaaaaatctctgttgtggcctttatagttactgtgaagccactcttgggcctgtctctatatgcttattagaggaatctgacaagtaaaataaaatgagtagtgtgtctgc

SEQ ID NO: 166050 - DNA, 1705 bp, Homo Sapiens
  misc_feature (1377)..(1381): n is a, c, g, or t
  misc_feature (1383)..(1383): n is a, c, g, or t
  misc_feature (1385)..(1390): n is a, c, g, or t
  misc_feature (1392)..(1394): n is a, c, g, or t
  misc_feature (1397)..(1408): n is a, c, g, or t
  misc_feature (1410)..(1410): n is a, c, g, or t
  misc_feature (1412)..(1438): n is a, c, g, or t
  misc_feature (1446)..(1446): n is a, c, g, or t
  misc_feature (1493)..(1493): n is a, c, g, or t
  misc_feature (1495)..(1497): n is a, c, g, or t
  misc_feature (1564)..(1635): n is a, c, g, or t
acccatcaactctttggggatgatgaaactgctttggttacaagggtctaaagatcctgttatactatattgctggtagcctgtcaacaatgttccgtgttgaatatgcatctaaagttgatgagaactttgactgtgtagaggcagatgatgttgagggcaaaattagacaaatcattccacctggattttgcacaaacacgaatgatttcctttctttactggaaaaggaagttgatttcaagccattcggaaccttacttcatacctactcagttctcagtccaacaggaggagaaaactttacctttcagatatataaggctgacatgacatgtagaggctttcgagaatatcatgaaaggcttcagacctttttgatgtggtttattgaaactgctagctttattgacgtggatgatgaaagatggcactactttctagtatttgagaagtataataaggatggagctacgctctttgcgaccgtaggctacatgacagtctataattactatgtgtacccagacaaaacccggccacgtgtaagtcagatgctgattttgactccatttcaaggtcaaggccatggtgctcaacttcttgaaacagttcatagatactacactgaatttcctacagttcttgatattacagcggaagatccatccaaaagctatgtgaaattacgagactttgtgcttgtgaagctttgtcaagatttgccctgtttttcccgggaaaaattaatgcaaggattcaatgaagatatggcgatagaggcacaacagaagttcaaaataaataagcaacacgctagaagggtttatgaaattcttcgactactggtaactgacatgagtgatgccgaacaatacagaagctacagactggatattaaaagaagactaattagcccatataagaaaaagcagagagatcttgctaagatgagaaaatgtctcagaccagaagaactgacaaaccagatgaaccaaatagaaataagcatgcaacatgaaccgctggaagagagttttcaggaactagtggaagattaccggcgtgttattgaacgacttgctcaagagtaaagattatactgctctgtacaggaagcttgcaaattttctgtacaatgtgctgtgaaaaatctgatgactttaattttaaaatcttgtgacattttgcttatactaaaagttatctatctttagttgaatattttcttttggggagattgtatattttaaaatactgtttaagagtttatgagccatatattgcatttaaagaaagataaagcttctgaaatactactgcaatgcttcccttcttaaaacagtataataaatgcttagttgtgatatgttaaannnnnanannnnnnannnaannnnnnnnnnnnancnnnnnnnnnnnnnnnnnnnnnnnnnnncaaacaanaccaacccccacccaaggtaaaaaaccccaacccccaaccccaaaanannnctctttgtgggggccgccttcgggcccccttgaaaaaaacttttttaaaaaaccccttttttttttnnnnnnnnnnnnnnnnnnnnnnnnnnnnnnnnnnnnnnnnnnnnnnnnnnnnnnnnnnnnnnnnnnnnnnnntttcttcccacaaaaggagaaaaccccccgggggccataagaaaacaaaaagggggcctggtggggattt

SEQ ID NO: 166051 - DNA, 328 bp, Homo Sapiens
cttgggaggtcatgaaggggtccaacttctcgggttgttgaacgtctacctggaacaagaagagagattccaacctcgagaaaaagggctgagttatgattgaggctaccccgagagaatgataacactttgtgtccaggattgagaaatgccaaagttgaagatttaaggagtttagccaacttttatggatcttgcactgaaacttttgtcctggctgtcaatatttaggacaggttcttggctcttatgaaggtgaaacctaaacatttgtcttgcattggagtctgtaacttatttgctggctgctagaatagttatatgctgt

SEQ ID NO: 166052 - DNA, 477 bp, Homo Sapiens
agcataaactattcagaaaccctcattgtgtttctaccggagagagaatgtatttgctgacaaccattagagtcagaagttttactccaggttattgcaataaagtataatgtttattaaatgcttcatttgtatgtcaaagctttgactctataagcaaattgcttttttccaaaacaaaaagatgtctcaggtttgttttgtgaattttctaaaagctttcatgtcccagaacttagcctttacctgtgaagtgttactacagccttaatattttcctagtagatctatattagatcaaatagttgcatagcagtatatgttaatttgtgtgtttttagctgtgacacaactgtgtgattaaaaggtatactttagtagacatttataactcaaggataccttcttatttaatcttttcttatttttgtactttatcatgaatgcttttagtgtggcgacgttggggggatcctt

SEQ ID NO: 166053 - DNA, 390 bp, Homo Sapiens
gagtagatatgtaccaaacatcatcaaaaatgcagagcaaacttctctgtatataaactgcacataaaaacaaggcactatacattttatggggagatattaaggtagaaaggttgattcgcatagattctccagagtccatgccattaagtacaaattctttgttcattttagcaccggaagcagtactcagaacaagtcatacctaatgctgcaggaaacatttccaaacgtgtatgaagatacatattggtggcagagctaattcaacagaagcaactccatctaccttttcatgttactttgacaccaaaacaaatcttgaaagtgaatgaatacatattgctttgttaaatacatatttgacttatatggaatagtttatgctgt

SEQ ID NO: 166054 - DNA, 924 bp, Homo Sapiens
tttttgcaaggctgtggtcggtggtcatcagtgctcttgacccaggtccagcgagccttttccctggtgttgcagctgttgttgtaccgccgccgtcgccgccgtcgccgcctgctctgcggggtcatggtgtgcttccgcctcttcccggttccgggctcagggctcgttctggtctgcctagtcctgggagctgtgcggtcttatgcattggaacttaatttgacagattcagaaaatgccacttgcctttatgcaaaatggcagatgaatttcacagtacgctatgaaactacaaataaaacttataaaactgtaaccatttcagaccatggcactgtgacatataatggaagcatttgtggggatgatcagaatggtcccaaaatagcagtgcagttcggacctggcttttcctggattgcgaattttaccaaggcagcatctacttattcaattgacagcgtctcattttcctacaacactggtgataacacaacatttcctgatgctgaagataaaggaattcttactgttgatgaacttttggccatcagaattccattgaatgacctttttagatgcaatagtttatcaactttggaaaagaatgatgttgtccaacactactgggatgttcttgtacaagcttttgtccaaaatggcacagtgagcacaaatgagttcctgtgtgataaagacaaaacttcaacagtggcacccaccatacacaccactgtgccatctcctactacaacacctactccaaaggaaaaaccagaagctggaacctattcagttaataatggcaatgatacttgtctgctggctaccatggggctgcagctgaacatcactcaggataaggttgcttcagttattaacatcaaccccaatacaacactccacagcagctccgtttac

SEQ ID NO: 166055 - DNA, 686 bp, Homo Sapiens
  misc_feature (603)..(603): n is a, c, g, or t
gctcggtaccggacttcctggtgtgttgtgtaagtgaactattatcatttggaaaacaggaaccaggagagaactcagagatccttcctaccctcaagtatgtccgaccaggtggaggctttgtccctaatttccagctctttgagaaaggggatgtcaatggagagaaagagcagaaattctacactttcctaaagaactcctgtcctcccacctcggagctcctgggtacatctgaccgcctcttctgggaacccatgaaggttcacgacatccgctggaactttgagaagttcctggtggggccagatggtatacccatcatgcgctggcaccaccggaccacggtcagcaacgtcaagatggacatcctgtcctacatgaggcggcaggcagccctgggggtcaagaggaagtaactgaaggccgtctcatcccatgtccaccatgtaggggagggaccttgttcaggaagaaatccgtgtctccaaccacactatctacccattcacagacccctttcctatcacttcaaggccccagctgggcacaaatggatggcatacagttctgtgtactgccaggcatgtggggtgtgggttncatgtggggtgttttacacacattgccttacaggtattgcgttgattgtgtgtgttgttgcatgggtgtacagccacgttttt

SEQ ID NO: 166056 - DNA, 765 bp, Homo Sapiens
  misc_feature (718)..(718): n is a, c, g, or t
tacccatcatgcgctggcaccaccggaccacggtcagcaacgtcaagatggacatcctgtcctacatgaggcggcaggcagccctgggggtcaagaggaagtaactgaaggccgtctcatcccatgtccaccatgtaggggagggactttgttcaggaagaaatccgtgtctccaaccacactatctacccatcacagacccctttcctatcactcaaggccccagcctggcacaaatggatgcatacagttctgtgtactgccaggcatgtgggtgtgggtgcatgtgggtgtttacacacatgcctacaggtatgcgtgattgtgtgtgtgtgcatgggtgtacagccacgtgtctacctatgtgtctttctgggaatgtgtaccatctgtgtgcctgcagctgtgtagtgctggacagtgacaaccctttctctccagttctccactccaatgataatagttcacttacacctaaacccaaaggaaaaaccagctctaggtccaattgttctgctccaactgatacctcaaccttggggccagcatctcccactgcctcccaaataaatagtaactatgactgacgtccccagaagtttctggggtctaccacactccccaaccccccactcctacttcctgaaggggccctcccaagggttacattccccaccccacagtttttccctgaggaggagattcaaacctccctggngattcaaaccaagggcaggtgttgacaggcaagggggccacggggac

SEQ ID NO: 166057 - DNA, 586 bp, Homo Sapiens
  misc_feature (200)..(200): n is a, c, g, or t
tgtgtaccatctgtgtgcctgcagctgtgtagtgctggacagtgacaaccctttctctccagttctcactccaaatgataatagttcacttacacctaaaccatacggaaaaaccagctctaggtccaattgttctgctctaactgaaaacctcaaccttggggccaaaatctcccactgcctccaaatattagtaactnatgactgacgtccccaaaagtttctgggtctaccaaaatccccaaccccccaatcctacttcctgaagggccctcccaaggctaaatccccaccccaaagttctccctgagagagatcaacctccctgagatcaaccaaggcagatgtgacagcaagggccacggaccccatggcaggggtggcgtcttcatgagggagggcccaaaagccttgtgggcggacctcccctgagcctgtctgagggccagcccttagtgcattcaggctaaggcccctgggcagggatgccaccccctgtcttcggaggacgtgccctcacccctcactggtccactggcttgagactcaccccgtctgcccagtaaaagcctttctgcagcagccg

SEQ ID NO: 166058 - DNA, 470 bp, Homo Sapiens
  misc_feature (305)..(305): n is a, c, g, or t
  misc_feature (308)..(308): n is a, c, g, or t
  misc_feature (390)..(390): n is a, c, g, or t
  misc_feature (397)..(397): n is a, c, g, or t
  misc_feature (405)..(405): n is a, c, g, or t
  misc_feature (420)..(420): n is a, c, g, or t
  misc_feature (428)..(428): n is a, c, g, or t
  misc_feature (457)..(457): n is a, c, g, or t
ccagctctaggtccaattgttctgctctaactgatacctcaaccttggggccagcatctcccactgcctccaaatattagtaactattgactgacgtccccagaagtttctgggtctaccacactccccaaccccccactcctacttcctgaagggccctcccaaggctacatccccaccccacagttctccctgagagagatcaacctccctgagatcaaccaaggcagatgtgacagcaagggccacggaccccatggcaggggtggcgtcttcatgagggaggggcccaaagcccttgtggnggnaacctcccctgagcctgtctgaggggccagcccttagtgcatttcaggctaaggcccttgggaaggggatggccacccctgnttctttngaagaacnttgcccttaaccttnaattggtncattgggtttgagatttaacccgttttgnccattaaaaagtt

SEQ ID NO: 166059 - DNA, 505 bp, Homo Sapiens
  misc_feature (24)..(24): n is a, c, g, or t
  misc_feature (45)..(45): n is a, c, g, or t
  misc_feature (60)..(60): n is a, c, g, or t
  misc_feature (71)..(71): n is a, c, g, or t
  misc_feature (76)..(76): n is a, c, g, or t
  misc_feature (150)..(150): n is a, c, g, or t
aaattctcaacccaatggaaccantgaagggttgaaggccacgtncctcccgaaaggaancagggggtggnaatcnccttccccaggggccctttagcctgaaatgccacttaagggctggcccctccagacaggctccaggggaggttncccccacaaaggctttgggcccctcccctcatgaagacgccacccctgccatggggtccgtggcccttgctgtcacatctgccttggttgatctcagggaggttgatctctctcagggagaactgtggggtggggatgtagccttgggagggcccttcaggaagtaggagtggggggttggggagtgtggtagacccagaaacttctggggacgtcagtcatagttactaatatttggaggcagtgggagatgctggccccaaggttgaggtatcagttagagcagaacaattggacctagagctggtttttcctttgggtttaggtgtaagtgaactattatcattggagtggc

SEQ ID NO: 166060 - DNA, 463 bp, Homo Sapiens
  misc_feature (417)..(417): n is a, c, g, or t
  misc_feature (422)..(422): n is a, c, g, or t
  misc_feature (435)..(435): n is a, c, g, or t
taataagaaaggcttttactgggcagacggggtgagtctcaagccagtggaccagtgaggggtgagggcacgtcctccgaagacaaggggtggcatccctgcccaggggccttagcctgaatgcactaagggctggcccctcagacaggctcaggggaggtccgcccacaagggctttgggcccctccctcatgaagacgccacccctgccatggggtccgtggcccttactgtcacatctgccttggttgatctcagggaggttgatctctctcagggagaactttggggtggggatgtagccttgggagggcccttcaggaagtaggagttgggggtttgggaattttggtagacccagaaacttcttgggggacgtcagcattagttactaatattttggaaggcatttggganatttnggcccaaggtttnaggtttcatttagagcagacaattggac

SEQ ID NO: 166061 - DNA, 1141 bp, Homo Sapiens
  misc_feature (113)..(187): n is a, c, g, or t
acagcataaactattctattaaataaatgactactactaaacttgtctgtagtcattaatcttaaaattacctgaaaatctgatgacagctgccttccctaactttaatgtannnnnnnnnnnnnnnnnnnnnnnnnnnnnnnnnnnnnnnnnnnnnnnnnnnnnnnnnnnnnnnnnnnnnnnnnnntacacctttcatattatgtattatcttgcttaatgggttttatcttgattatccagttacttccatcctcttcccaatgttaatttgcaatagttttaaaatgggaacaaatgaatcaatcatcagatagttaaaatgaaattaaatcagctgcctaataatttatggaattcattggaatgtgcttaaaatgctaaagtgtatgtcattgaacatgaaatcttttttcaggcacatacattgttggtattgatgactttttaaaacctgtgggataaacttgcactgcacacggaagttttattcttgtatatttagatttgtatgcttgtgagtaaaaatgtgcatttgtaaatactgtgttttaggttgaatcaattaagtcttaaaactgtaaatttattaagcttgttgccagtaggtttaagaaaatcatgatctcacatgcctcactttgacatttatcatgccttttattaaaaatatcccttaggaacagtaagtttgccttaactctctgcatggtttaaaaagccattggttttgtgtgtgtttacagtaattatgcagatgactaaatgagttgacacagtaaaattacttccatatggtacagaaacaacctaactcccttctacctgatgtaaccatttacaaattatagttattgaaccagtctttcaacatttcagggttaatctgacctatgcagaattctagtgtgaatttattgtgaaaatgctaaatgaaacaatttgtcagaaattatgtacaattttcattaccttcaaaatggatcttttgcactgtctgagagtatatatttttgcaactcaagacttggtactagttttaatacttaacacttactgacccaacagaagtttggaattaccttgcatataaaaattgaggttgaataaaatgaaaaattgttgttttctgttaaaaaaa

SEQ ID NO: 166062 - DNA, 463 bp, Homo Sapiens
  misc_feature (41)..(68): n is a, c, g, or t
gatatctatactgggagcacattttaaaattattgcacagnnnnnnnnnnnnnnnnnnnnnnnnnnnnaaacaataacagaggtcaaccacagatgtggacctccagcaataaaagcaggaattcaagtgccagatactcagcatattaggtttcctacgtaagtcacagggtaatatgttctaaatatctctaatgtgatccaaaaccctaaaaagagctggcacaaaaccatcgtgaatgactgcctctcttgatgtaaatttttaaaaatattattacagtatcatagtccccactaacaacaactggggtacatataacaatgtattgtgaaattaagtgtatttattctctttaccaatagcaaatgctaccctaccttagtaaaaccaagacttgcttcaatcaatgctgttttgtaaaaatagcaaagcaacgaatgctgaaatcaatcaaagctg

SEQ ID NO: 166063 - DNA, 798 bp, Homo Sapiens
tacttgacctgagtccctcacacggagcccagtggccccatgatattaatgacccaggaaacttcgtttctctgctctcaacatagtaggaactttaagactattcttttacaggtacaggtttgcagattccgccagcagcacagcaagctctacagatgagtggctctttggcatttggtgctgtggcagaattctcttttgttatagatttgcaaacaagactttcccagcagactgaagcttcagctttagctgcagctgcctctgttcagccacttgcaacacaatgtttccaactctctaacatgtttaaccctcaaacagaagaagaagttggatgggataccgagattaaggatgatgtgattgaagaatgtaataaacatggaggagttattcatatttatgttgacaaaaattcagctcagggcaatgtgtatgtgaagtgcccatcaattgctgcagctattgctgctgtcaatgcattgcatggcaggtggtttgctggtaaaatgataacagcagcatatgtacctcttccaacttaccacaacctgtttcctgattctatgacagcaacacagctactggttccaagtagacgatgaaggaagatatagtcccttatgtatatagctttttttctttcttgagaattcatcttgagttatcttttatttagataaaaataaagaggcaaggatctactgtcatttgtatgcaatttcctgttaccttgaaaaaataaaaatgtacaggatgcagtgtgctcatcctccctttatagatatcgtc

SEQ ID NO: 166064 - DNA, 572 bp, Homo Sapiens
agcataaactattccagtttcagtttggaggattcttccattgtttcaaggtgtgggaattacaatggtcctgatctccatttttgtgacaatctattacaatgtcataattgcctatagtctttactacatgtttgcttcttttcaaagtgaactaccatggaaaaattgttcttcgtggtcagataaaaactgtagcatatcaccaataggtaaaatttgtcaacacccaaatagttcttttatatatatgtgttataagcttgaagggtcaaatcattctctaagcaacttaggtacaattttaaatgttccaaaggtcactggtgaaagcagaagatagcatatataatcagaaaaatgattaatacaatgtattaatccctgagaacagtcaggaaggctagatcatgcctaagagtacttcttccaggcctaagtcttgggcaggagaggggaaactggagaaatgataaagggggaaaagtgccatccaggataagtggtgtgtggtcccagtggacagtaggtggtgttcccggtcaaaaggtggcaaactctggggataacct

SEQ ID NO: 166065 - DNA, 906 bp, Homo Sapiens
  misc_feature (424)..(567): n is a, c, g, or t
  misc_feature (851)..(851): n is a, c, g, or t
ggtcgtactagcataactatagctgcaggtctctctcactgccatcaaactgtaaaagattaaactgcgaagtcaagctcaacagattattttggaaagtttttgtattaagggatttagtaacatcattttgttttccaccaggcagggagtagggcttagtgttttaaaacacctctgctttctgatgttgccttaatattctgctattgcagcaattaaaaattgtcttcatgtacatttggaactaacacgtgatgtgatatattcctaaactatgaaacctttttcctagtagtcagctagatcatttgttctgggagtataaagccacccacgtaagttaataagcaaaatcctgactattatgttgttagagaaaaatgctttgctttgtctggaagaaagataaaatagtgaattnnnnnnnnnnnnnnnnnnnnnnnnnnnnnnnnnnnnnnnnnnnnnnnnnnnnnnnnnnnnnnnnnnnnnnnnnnnnnnnnnnnnnnnnnnnnnnnnnnnnnnnnnnnnnnnnnnnnnnnnnnnnnnnnnnnnnnnnnnnnnnnnccacgaaagcacacacaaaataaatcagtgggatttggtaatgtgttttagagtaagaaatttcaggttgttggtgactatcccaacagtcatgttttaaatgtacagtttggggcaagtcatgtaaatactgttggtggtcttccccacacgccccaattttcaggtagtacttaagagtatgtgccagggaaactctttgcttatttgaatttgaggatggattaaaaatgggtgacttaatcccgtagttatttttgcacccacttgaaagggaaagtgcntttccagattatatggagtatcttaaaagtgtcaccttttctttgcctgatccaa

SEQ ID NO: 166066 - DNA, 846 bp, Homo Sapiens
tagcttagaaaaacaagttttctatttatttaaaaataagtttgtagttactacattgcagggacaggtattcttacacatacattctagtttgtataaaaggattcaaagaattatgcatcaaaactaacatagaaagtgtccacgtaacagtaaagaaaggtccaatcagtatgtacaaaaagaaagggcactgctattctggtgtgaaactgctgtttataatatgatactccaggttcggaaggaaaaaaacaaacttcaataaagctaaataattaatttgttttaaaactctgtgttacttattacatacaacagatctgcttgtgtttaaacattgttttctgtacaaaataagcataatcttaatttgaaaatgtgtcagtttcaactttcaccctctaggtcagttactttttaaaaattgagctacattctacacatgtctaaatatcctgtgacaggatttaagttttctaaaagatcttcagtaagacccctgtcttcttgcagttttaatatggtccaaaaatgtaactttgtattgtctcatgttatagtctatcattgtgactaatcaacacacacaatcttaaagtaaccagcatgtgtgcatctgccttatatgcatgtactatattccatcttgaacctattttcttggctccttgaattgtagaaactcagccatgcactaagtatttggtctgtgccataaggttaatttcctgataatttttatctgcattaaaaaagtatttcaacacagagctatcaaaactaaaaataatatctatttatagctcatattttctactcactgttctactgcagtgtgtacag

SEQ ID NO: 166067 - DNA, 328 bp, Homo Sapiens
acagcataaactattgatgtggtgttatagaatagcatgttgtagatacaatcagctgctttgttaccttaaaactaggcatttgtaaatattaaaccataagatggcaggggatgtcctgctaaacactcagatgttcagattggacactaactgacttagttcttcccttctctcgtctatcaaaattataggagacttgtagtttagtgtggttttctgtttctaagttgctgctgataatgtatatgaacttaacctgctgggtaagcagtgtcctagttcttgaacattttatgcagtgctgatttaccaaataaagttaaaa

SEQ ID NO: 166068 - DNA, 1061 bp, Homo Sapiens
caattcatgggctcggtactggggatcagatggaggaggcagcctgtatccactccgccggtctggcacaaaccttttgttgcaccaattgtgcatatagacatttagtgaatgtgaccgaggtcattattcgtgtttcaggcaagaatgtcttgaaaacacggacaagcttcgcaggtcaatagggtctcataggtaaaatgcctggactgctgcagccaccaatctggggcgctgctttagcactgccacaatgccagctggaaggaagcagtgtgctcgatgaagtgaggcctgaattttttctgggtaccctctgatgcgcctattcacagcagctcgtatagattctgaagcaagtattttttctgaatgtgctgtgattatattcaatgcttgtggaattgtggggggtgtggtgggtaaccaagattctgctccagattttcttggtgcagggataatacacaattccccatggcagaaaaataccctattggtgctattttcaggatccagccatttagggagaaagtcagcagcttctattaacaagaattcaccatcattgtcttcaatccttgctactaactctggaaattcctttgtgatctgctttattacataaacaataaaccattcatcctcaatgttatccccaaactttgtcacgccaaacatatgagcaggaacacctcctttcccaggtttatatttaagattgaaaggctgattctgccagatgtaggggaccagcataggtgcaaaccgagtgattattctctcaatgtacttctgaagaatctctttatgtttatctgagtcccttgactcatctggtatcaggaacaggcagtactccactgtgtcttccatcgtagcaagcttcatggtttcttccattcttctttgaaaaggttctagggcctctccttcgcgtctctgctgtggcacctttccttagccacctctccgactgcgagagctgatcgagagctgccaccggccgccgaagcctggatcaggctctgtcccgacgcctgaccggaacctgaagcccc

SEQ ID NO: 166069 - DNA, 370 bp, Homo Sapiens
gtaaggccacccctacataagcctatcgcactcttccactgcatcttccagaaaattcttacctgctactctagtaggaaaggctaccaggcggtctagaggggttatccatttactcggcacgacagccacagggacagaataatacttccaaatgagtgagatcatcagggcagcctgtaaagacacctctggtgagcaaagcagcctgccaatcacacaaccgaccacacagaagggaggacagggaaatgcgaaaataaaaccaggaaaactctccagactgagcacctcaagcctaggaacccagtccccacagacaacagatgagcacgcacagccactaatgtcccttggtgaaaccttgaat

SEQ ID NO: 166070 - DNA, 981 bp, Homo Sapiens
  misc_feature (389)..(397): n is a, c, g, or t
  misc_feature (897)..(897): n is a, c, g, or t
  misc_feature (970)..(970): n is a, c, g, or t
agggagaaaagccacgcatggtcaactaggttggtcttgaaccatatgaatgtgattaaaggagaattttcgaattttagtacggtattaaaattaagtactgtctaaacgtggattaaaacagcactaagtcttccaaggacttacttaaagttgttagaaaatttgactttccagttggcaatatgacccaaatacataagagggccaatcacaagtgacagcatggagatgtccctaaacatttcacatttcgtacagatcgaggacggtgttcactagtacatacgtgtcataaactggactttcttggctcaatgacaggtgtagaaaatcgtgattcttataagactatctcataaagtccaaggacacaacatattccaccnnnnnnnnntctaaactatgcacttttgtttcttaaaaaacaaaacagtgtaaatcagattttaagctaggaagaggaaatccgtattattagcctcgcggctgtatccatcctactgttcagctgaacggatgaagcacaatagcgacaactttgtaacagactaaaatccaacaggtaattccaacaccacctgctactctagtaggaaaggctaccaggcggtctagaggggttatccatttactcggcacgacagccacagggacagaataatacttccaaatgagtgagatcatcagggcagcctgcaatacgtagaaagcgacacttatcacccattttatcttggctaattgagctgtccgagctttcacatgggttttgagcttatccgtcatcttgttgatctttctttccagcctggcatatctggcaaactcgtccatcatgttgactgtggagagctcctgcttcatgtcctggatctccgctctcatctgtgaatncctgctccgcgtccttctgcagcaccctggacataggtctcctccgcctgccgcacagtagggacatctctcnatttagagctt

SEQ ID NO: 166071 - DNA, 211 bp, Homo Sapiens
tctacgaatagcttcaaaggaaatagggagacacaagttgtattatattattattgttggcttaaaaaaattacttctttaacctccttaagtttgtcagtttgtgggaggtgaatctcaatggcatcaaaagttatagtcttcttacacttgttaaaaataaagtgtttaaacaagtttgtttccattcacaaacttgatacccaactac

SEQ ID NO: 166072 - DNA, 397 bp, Homo Sapiens
agttggtaaaaacattcctgactatccttcttaaccacgtggctgatgtggggtaggtatgaggggaaggaagtggagtagcctaatgaaaaggggttctagttgagctctgtagataaatgccttgtttcagtgtggttggagacctggtgtcagataaaagaaactccatccgcacagacagatgcaaacagctcctctagttctgcagagctagttgagaactcaacattaatcattttaaaaagtactgtccttgaaatagatttgctgtgggaagaagggcagtgagtgtgggagaaaggagccgtgagcgtggggaaccccacagagcccaaaggactttttcagtattcgaaataaacaaaacaaaaacccatgaaaaaacccaacccag

SEQ ID NO: 166073 - DNA, 824 bp, Homo Sapiens
atcgagtcggccaatactgagccttgataaactagaagctcagctgaaagcttgcaactgccgactcatcttttcaaaagcaaaaccatctgtattagccttgtgccttctcaatttggaagtggaaactttgaaatctgttgaattactggaaattctcttgctagttaaaaaacattccaagattaatgacactgagttcttctactggagagagttggtttctaaatgcctagccgagtattcttctcctgaatgttgcaaaccagatcttaagaagttggtttggatcgtttcaaggcgcacagcccagaacctccacaacagctactatagtgttcctgagctgccaacgatacctgaggggggttgttttgatgaaagtgaaagtgaggactcttgtgaagatatgagttgtggagaggagagtctcagcagctctcctcccagtgatcaagagtgcaccttctttttcaacttcaaagtggcacaaacactgtgctttccatcttagaaatctgattgttctgtcagaatttatatttacaggtttcaaagcaataaatgggggaataggtagtttcctggtttagcccccatctagtcaggaattaatatactggaatacctaccttctatttgttattcagatcagatctggcctattttcatatttatcctaagccatcaaatggggtagtgcctcttaaaccattaacagtactttagacattggcactttatttttctcgtagatctttagctactttggggaggaaggaaggtgctgatccttcaattggtacttttcaagaattttaaaa

SEQ ID NO: 166074 - DNA, 382 bp, Homo Sapiens
ggtaaccaccacccccaatcaaagtaaagaacattttcttaccagaataaatttcctctccgtttgcagtcattctccccagccctaggtcaccactgatccaccttctgttactggaaggttagttttcttccctgatttagaatttcatataaattaaatcagatagtatatactcttgtgtttagtttctttagcttaacatgtttagagatatttgctgttgcctgtgtctgtagctttttgttttcattgctgaatagtatttcattgtaatataccacagttgggtttatgtatttgctgatgaatatttgtgttatttccagcgtggggattattatggaataaagttgctacaaaccatttgtataccaaaaaa

SEQ ID NO: 166075 - DNA, 2533 bp, Homo Sapiens
  misc_feature (1234)..(1235): n is a, c, g, or t
  misc_feature (2315)..(2347): n is a, c, g, or t
agaccgcagggggtaagaagccctcggggcgtgtgctgggcgccaccagcccagcacacgtaccctagatcgtgggcggggggtggggcctcacgcggacccggcagcggagtgcggggggttatagaaaagaggcgatagtgtgcgcgcccccgaaggtatcgtgggcgcccgcgaggcatttctttgtgatttagatcctgccaccccgggcactgtatgtgtctcacaccaccgtcgggggccgcgcacgactgtttgatctcttcgttcgctcccaccaatcatgggactccatcccgcgggcgagggtttgtgtaggtatactgcgcgtcatcgggacgcgatatatcccgcgacacggtttgtcctcgtgaattaacgccacggccgccccagtattcagaggggggagggtgctaccacggctccgtggcgggctgcgtaagccagaaccttcttatgcagaaaagaagaggtgggtcgctcagcagcggcctccgttgtactccatatcatcgattgctccgcggaccgccggcgcggcggttcagactgtatagatgatgggaggagtctcggcggttgaggcagcgcccgcgctgaggtaatgggcgcccgcccataatgacccctcggagagggtgcctgctttgggggttggtttgtggagaaacacccttggtttgcccccccgggggggcgttgtttttgtgggggggaatacccccagcccccttgcgatatcgcccagggtttttcctggggaaaaacaatataccgccaggttccggggcgcctgtggggggcgggcggcgccaaaagagggttttggatggatttttgttggggccagggggccccccccatgtcgtgtggttggggtttatgggcatgcaaggttaggtctttctcgtgggttgtggtagccatgtttttgtgttctatgttgggtgggagggaggtagggtttgtgttgtttgtgtgtgtgggtgataaaagtaaccactgtaaatttattatgcattaggaagcttaacctaaaaaccaatagcatagtaaaaagatatgttatctctgttcatagcagaacaggtttcaaaatatattttcttttaaatgtattcagtcagtacacaatcctttataaaagttgtatatatttttttctgtcaataccttcattacatttataaatacaagatttacacagcaccccatcaaaagaaaaatnntaaaaccctttacaaatatctacatatatttcatacctataaaactttcaaaggggtgctctgttaaaggtgggccctagttaatggtccatttactggtgcagcaaaatacatataaatctgtaaagttttctttgtccataaaacatctcaaaaaatagcaagacacttatcgtgaaactcagcttcataaaaccttattttagaaaggaacttaatgtgcgtattcccatgcgattcaaaagttaaacagattgaaataaagatgaattgaaaacaaatgcatactcagagcagttaaggcaggagtgtgatggatgagaaaaactttgagaagcaggacatggaagacatgggaagaagcaaatcataataatgcctttgagtctgaacttggatataaacttcactcgtatccagttactaactctcatcctacttaggaatttccaaattgttaataactttcttagaagcagcctacaatctctatgttgccaccagaatgcttgagttgtttttttcttctgtaaaatcaccttggacccaaccaggacaccaggtccaggaatctgagttgttgagttttacatgatttaagtttgtaatgaaaatttctttcatctaagtaaaggtaaattactatccaatattattatgtcccagaagtgtatatatgctgagtttcattctagctaagaatagaaagtaggaataaaaggagactaggtttttatttgacctttgaacaaagacagtagatccctgatactgagtgactctttaagagtggccactcatcaacacctatgggctgattcagagaaacaggaaggtagaaattaagaagagattctttacctgaaatcttgccagagatggcagtcccgctactgttctgtgccttctgctgaaaagggcatggaaagattgctgccactcttactctatagtcattacaggaaagccatcctttctaccagagagatgactttttctatttgagtttcaccttgggagttgcacattatttgcaaggaagtatttcaaatcttatcttgttctaatgtataaacaggnnnnnnnnnnnnnnnnnnnnnnnnnnnnnnnnncaggaggaggatgagcagaatgatggcggtggtatttatcaaacttggccctgaaggatgccgctagcgtctcccatccagcaccatgaagtcaccaggggtgtggctccctccatggctctcagagatggcgtatgcagaatcccactttctgccgagtttacagctcagtgcactgattccccc

SEQ ID NO: 166076 - DNA, 520 bp, Homo Sapiens
  misc_feature (487)..(487): n is a, c, g, or t
agctataccaccacagcacgtgaaatgcattgaacgctttagctatacaagaaccctgcagcttcattacattgcaaataggctaggccacaacccgagaggacaaacaaacatgagctgtttttaagagttcaacagaaatttggcagctttagctttttattctacatttccacaacttcttcacatggcatcttatagaagatgaaaattaattattaaagaaacatgcattattttttaaaaatgcatactaatgcatgaaaaaaatacatcacctgagaatgtctttttcctcagaaacatggatccagacataagcaatatgctaaagatggctttctaattaatttatgaaatcacttcccctccaacccaagggaaattatttgttttaacaagtagatgaaatattataaaatgttccaatcaagggcttgtggtcataggtgtttctattataaatgatgaccttatattagatgantgcattgatgcttaaatagtaaatcaggccgag

SEQ ID NO: 166077 - DNA, 1037 bp, Homo Sapiens
  misc_feature (664)..(799): n is a, c, g, or t
  misc_feature (812)..(931): n is a, c, g, or t
cgatgagccggcccgaggttatacaccaaaaggggggaaaatctataaccttaggactttatgccaatcaagaagcctctaaagtacctctctaatagatcagtatcagacattcttcccttttacataattcctatattacatcacttaatcataaaatctgactgatacttcataaagaattcctcattcatttatatttgagccatccagcctggctactcccctgttctccacccttttccatcactttgcagtggtattttttagcaatcttcaatagttttccaaagcaaggaaacaagcaagcaagcaatgagtcagaaagtcaaccaagggcagatgtgtggctaaatacactcatagagacatacattaggatagcaatagcctgattcactgaagtctaaactaagctgacttggcagaaaagttgctgtggctcgctcaaagatctgtaatgccaccttaggttgtgctactagtgccagacctcttgtttttaagggattagcagtggtctaaacaagaagccagggagctaatgtaaccaggcagctaatgacacaacagtcaatgctttggacatgtattaggagcagactatggcttccgtcattaacatttgccaagtgtaaaattcataaagaattttgcggctgannnnnnnnnnnnnnnnnnnnnnnnnnnnnnnnnnnnnnnnnnnnnnnnnnnnnnnnnnnnnnnnnnnnnnnnnnnnnnnnnnnnnnnnnnnnnnnnnnnnnnnnnnnnnnnnnnnnnnnnnnnnnnnnnnnnnnnntatggtggcacannnnnnnnnnnnnnnnnnnnnnnnnnnnnnnnnnnnnnnnnnnnnnnnnnnnnnnnnnnnnnnnnnnnnnnnnnnnnnnnnnnnnnnnnnnnnnnnnnnnnnnnnnnnnnnnnnnnnnnntccatctcaaaaaaaagaattttgtgcaaaacttcaagacactaaggaaacaatctttaaatattttggactggggccaggcgtggtggctcacacctgtaatccc

SEQ ID NO: 166078 - DNA, 359 bp, Homo Sapiens
tgcttgcttgcttgtttccttgctttggaaaactattgaagattgctaaaaaataccactgcaaagtgatggaaaagggtggagaacaggggagtagccaggctggatggctcaaatataaatgaatgaggaattctttatgaagtatcagtcagattttatgatgtaaaagggaagaatgtctgatactgatctattagagaggtactttagaggcttcttgattggcataaagttcctaaggttatagattttccccccttttggctgtatagcaaagtgttttaatccacggttgtgccttattgttccattaaaattgtatcttcgatccatcaataaatacttgtggttgaaac

SEQ ID NO: 166079 - DNA, 734 bp, Homo Sapiens
gggggggacggacgcactagaggcgacctaaacatggagacagcgggcgctgcaactgggcagccggcctctgggctggaggctccggggtccacgaatgaccggcttttcctggttaaaggtggaattttccttggtaccgttgctgcagcgggaatgctagctggatttattacaacattatcattggctaaaaagaaaagccctgaatggttcaataagggaagtatggccacggctgcattaccggaaagcgggtcttcccttcccttccaacctctggctctggcgctccctatatgcatggtgtggggttggtgtgattagcttcgcagtcttggaaagctttaggagttcacagtatgaacgactttcgaagtaaaatgcaatcaatatttccaacaattcccaagaactccgaatcggctgatgagtgggaggaaacattgaaatccaaatgagatgagcatggatgaatttcaaaatgcttgttacagaaaagggtggctctgggagacaccatgacagcaaaaaggactggggacctgattttctccccaaggaacatggggcagaattgcctgaactggaacccagttgcccctggggataagcatttcaggccctccttccacagggaaaaataattgttggtgtggccctggccttgggggggaaagggtaaaaaaggtttttccccccccacgttttaaaagaaaagaacttaatttttt

SEQ ID NO: 166080 - DNA, 611 bp, Homo Sapiens
ccatctggaagtttgtcatatttctttagccccaagctagaatctcaatggcagtgagctggaccacaggcctgatcccctgggggaccatgtatagatttggcgccctttgagggggaagaatgggaaggttggagccatccttgcccctcagaatcagctctgcagttacaagaacatccccgcaggctttgtctccattcattactgggtgccagagaagtttgggtgcgatgtccatttctgagttcagtttcaccacaggagagaaaatgcttcgtcctaaaaattcatctttgcccacttggtcattgtcaaaaagttccatgataactttgggtggattctgtagaactgtttggggttccccatagatttcaacttcatcgaatataattgtttggtcccacgtgggattcagggttgaatggatgatctcagtggttttgctccgatggaggaaacagatatgagcatatggatctgaaaagctatccttatctaaagccaagaggtttctggcttgatagacatagcagcgcagatggtagatgtagactctgtcaaaattgcaggaaacaatggggggtgtatagcacggtaggcagctc

SEQ ID NO: 166081 - DNA, 349 bp, Homo Sapiens
gtggcccctattacctatacacatgtctcctggagcatttatgattgacctgctgcaagtatttgatgtaatcaatggccttcctcagaacgccagacttgtgcatcttggcgtctgtccccatgaccaggtctttcaattcgatgattttgtcattgatggaggagcgatatcgtttctcaatgatattatgggttgtccgcctttctccttctttggggggctcaagctgcttgactcccccaggtacctgcttaatgggcactttctcttgccccatcatatacacgggctatgtgtgctcagaatggtcccactgctgcccaccaggattggtacttgaagggca

SEQ ID NO: 166082 - DNA, 492 bp, Homo Sapiens
acgatcgagctcggcaccgctatacacccttacaccactataccactctatacaacctataccaccacaccgttttgcagatgaggaaactagaggctcagggatgtgtaaacaccagcctaaggttttccagttggagactgggcctaggactcagggccgggatgcctaggccagctctctttcataactggctttctagtgaaaaatgaaatgagctgtgtaaaaaccaacatcattaagtataatagaactattattttccttgagcagatcagactagtgctatcaatcctaatgttaatgtcatgctgcatggcagctgagatgaataattttctgaatcgttcatgtgtttatacctacaacaaaatgactgttttccatttgggctctgcctcatcttaatttaaagtcaccaatggccgctgagaaatgacacactgattagatttcattgacttaagtcttctatggcacggtggtatcagc

SEQ ID NO: 166083 - DNA, 123 bp, Homo Sapiens
gagccggcccgctatacacccaatgtgcatataaaggagactctactataatttcagctttcctactctttatagaaaccatcttctctgcaaacacacaggcaatatctggtggtatcagga

SEQ ID NO: 166084 - DNA, 279 bp, Homo Sapiens
ttaggctcggccctgattcacccacagcccgccttatgattctctgtctcgtgtatgactatgaaggaagcggttccgaagctgctagtctgagctccctgaactcctcagagtcagacaaagaccaggactatgactacttgaacgaatggggcaatcgcttcaagaagctggctgacatgtacggaggcggcgaggacgaataggggactcgagagaggcgggccccagacccatgtgctgggaaatgcagaaatcacgttgctggtggtatagcct

SEQ ID NO: 166085 - DNA, 971 bp, Homo Sapiens
  misc_feature (52)..(52): n is a, c, g, or t
tgttgacaccttaattaaaacaaaagccttttgggtttaaagcggctggtangggtcggaatcccgggatatcgtcgacccacgcgtccggacagaagtccttatacttcagtgttcagtcagattggaccctgtaaaagctgtaaaatgataacagagcatacaagcaatgacccatattgcttatgtggaattttagtgagacacagagtatgcagatgctgcattagcggctatgaatgggagaaaaattttgggaaaggaggtcaaagtaaactgggcaaccacaccaagtagccagaaaaaagatacttccaatcacttccatgtgtttgttggggatttgagtccagaaattacaacagaagatatcaaatcagcatttgccccctttggtaaaatatcggatgcccgggtagttaaagacatggcaactggaaaatccaaaggctatggttttgtatctttttataacaaactggatgcagaaaatgcgattgtgcatatgggcggtcagtggttgggtggtcgtcaaatccgaaccaattgggccactcgtaaaccacctgcacctaaaagtacacaagaaaacaacactaagcagttgagatttgaagatgtagtaaaccagtcaagtccaaaaaattgtactgtgtactgtggaggaattgcgtctgggttaacagatcagcttatgagacagacattctcaccatttggacaaattatggaaataagagttttcccagaaaagggctattcatttgtcagattttcaacccatgaaagtgcagcccatgccattgtttcggtgaacggtactacgattgaaggacatgtggttaaatgctattggggtaaagaatctcctgatatgactaaaaacttccaacaggttgactatagtcaatggggccaatggagccaagtgtatggaaacccacacacggaggaaaccacacaccggaagg

SEQ ID NO: 166086 - DNA, 993 bp, Homo Sapiens
taggttcttagggagaagggtggagtggaagaggcagggtcttgggttaaagggaagattctgaggtctcagggcaaagggaaaggtgtttggatgaagactgagacagtgcctacctccctccacatctgaggatcaagcaggtgtggcaagaacagagccctggcctgggctctgctggccgcagcctcaggagccagggttaaggccagagataaatgaagatttgagccattgataaatgccaatatatgtttcaggtatttcattaggatcctcccatcaagcagggaactagatgtttgagaagatcaaacaacatcctgactttggggtccttaagacctgggttattctcctcccagtcctagtgggaggctatccattccacaaagactcaaaggcaagaggcctggagaagcaggggctcctaggaccccgcctgcatgcctctctgcctccaatagtgactccctaagctgggactcctcaggcttactctgagggacaccaggaagctcaacctctttcccacagaggagaatctctgagatccaaaaaacccagccttcccccctcctcatcttggtcttgcttccctctccctccagcctgttgctgctgctcctctgggtgccaagatgtgtcctcaggtgtcttggtcagctgatgatggacacgcagcacaggaggctaagaacagagctctgtggggcgaggtgtggggagaggggcctgctctcacctagacccaaaacactgaggtctcctactggtgatggtgtcagatcccaggcctggggagccctttagtggggtgggacctcaggcagacccccaaaccaaagggagccagatgcccaagttcaagtcattagtgatatgtggcagggctgacagagaaataatcctggaggtctccaaagctgctgggaatggaatggcgatgaaaagcgcaggagtgggcagggtgtggtgggtgatggtggcccc

SEQ ID NO: 166087 - DNA, 1094 bp, Homo Sapiens
  misc_feature (976)..(976): n is a, c, g, or t
acacgccttccgcggagcggagcaaaacggcgcgcaggccgggcgcacccagccgccacttccgagagcgcctgccgcccctgcgccgccgagccagctgccagaatgccgaactggggaggaggcaagaaatgtggggtgtgtcagaagacggtttactttgccgaagaggttcagtgcgaaggcaacagcttccataaatcctgcttcctgtgcatggtctgcaagaagaatctggacagtaccactgtggccgtgcatggtgaggagatttactgcaagtcctgctacggcaagaagtatgggcccaaaggctatggctacgggcagggcgcaggcaccctcagcactgacaagggggagtcgctgggtatcaagcacgaggaagcccctggccacaggcccaccaccaaccccaatgcatccaaatttgcccagaagattggtggctccgagcgctgcccccgatgcagccaggcagtctatgctgcggagaaggtgattggtgctgggaagtcctggcataaggcctgctttcgatgtgccaagtgtggcaaaggccttgagtcaaccaccctggcagacaaggatggcgagatttactgcaaaggatgttatgctaaaaacttcgggcccaagggctttggttttgggcaaggagctggggccttggtccactctgagtgaggccaccatcacccaccacaccctgcccactcctggcgcttttcatcgccattccattcccagcagcttttggagacctccaggattatttctcttgtcaacccttgccacatatcactaatgacttgaactttgggcatcttggctccctttgggttgggggtcttgcctgaggtcccaccccactaaagggctccccaggcctgggatctgacaccatcaccagtaggagacctcagtgttttgggtctaggtgagagcaggcccctctccccacacctcgccccanagagctctggtcttagcctcctgtgctgcgtgtccatcatcagcctgaccaagacacctggagggaacatctttggcaccccagaaggaagccagcagcaacaaggcttggaagggga

SEQ ID NO: 166088 - DNA, 534 bp, Homo Sapiens
ggttttaaggcccccaaagtcagatgtggttgatcttctcaaacatctagttccctgcttgatgggaggatcctaatgaaatacctgaaacatatattggcatttatcaatggctcaaatcttcatttatctctggccttaaccctggctcctgaggctgcggccagcagagcccaggccagggctctgttcttgccacacctgcttgatcctcagatgtggagggaggtaggcactgcctcagtcttcatccaaacacctttccctttgccctgagacctcagaatcttccctttaacccaagaccctgcctcttccactccacccttctccagggacccttagatcacatcactccacccctgccaggccccaggttaggaatagtggtgggaggaaggggaaagggctgggcctcaccgctcccagcaactgaaaggacaacactatctggagccacccactgaaagggctgcaggcatgggctgtacccaagctgatttctcatctggtcaataaagctgtttagaccag

SEQ ID NO: 166089 - DNA, 384 bp, Homo Sapiens
ttcgtagtatctaggcggggagagtagggtgatattactcgccatattgtggggggtgtccacccccctgtgatatggttcgtaatatccattgtgggagatgggggtgatattactcgttaatattctagggggatgatacttctaaagtcgcaaagggtgcacaccctgtgatatcattggtaatattctagggggatgttactcctaatgtaacaggtgtctacaccctgatataattattcacaacatactagcggtatactactactaatgtcacaatgtgtgtacaccttttgatattatttgtaatatactggggggatgttctgccaatgtcaacaggggtgtacatgctgggtgtataaaggtacgggctcgatt

SEQ ID NO: 166090 - DNA, 665 bp, Homo Sapiens
  misc_feature (189)..(215): n is a, c, g, or t
taaccgatcaaaccaacccttggagccctttctaaaactttgacctacaaccctgaatccagaatctctgtttagtgggccaacattaataaatttagcctactccaactttgtgttacttccaccatggtgccacacacttaatatccattcccacatatattctccagatttctttctgtataaatnnnnnnnnnnnnnnnnnnnnnnnnnnnagaaagagagcatcaactgaaaaatcacacaattttataaatttagaaaagagagctttatttcttataaaggtttgcagcctgcaaggtggccattatgacaggctgggaagtgtggcctacagccaaggctagaggcaggcccttccagggagggaaggagaggacaggaatttgagctaaatgagttgactacatatacatactcaataggatatcagaggagctatatcattttatgagaatactcataaaagaggtcctaacacatgcatattgaataaacatgcatgttcattctggggtggagacttgacatttaaatgtattataattagggccctacacatcaaaaagtgaagcaggggacataaaggtacttcaggcctctgttaaaggcttcagcctcctgttaaagggcacagccttcttaaaactgggcccggaacc

SEQ ID NO: 166091 - DNA, 276 bp, Homo Sapiens
ataccaccctgcaacaggagaaagtgttcctcggggggagccccttggaccgcttctcagagcaccgctccagacttcccttcgtgtatgtcactgggaccggcctcgcagttactcttctgtcgtgactcagagtgccgctgcagacttcgcttcttgtgtcttactggggccagccttgcggtactctcctgttgtgacttttccctccttctgtgcagttctgctgcactcacatgaacatgttgtcggtgtatagcatggtaccgagctcca

SEQ ID NO: 166092 - DNA, 258 bp, Homo Sapiens
accacccttccgagaataaatatctctctggtttaagcagcaataaacaaaatcaaactactctgcttcctctttcgttcttcttttctttcatagctttacttacctctatttgtggcctttctgcattatatgtcattgagcatctactctatgaaaatcaccgatgggaaaacaaaagaaagtccagctattctggaacgtattacaggtgtaagccatccatgctgaaggggcaaatgaatatataaagtggtc

SEQ ID NO: 166093 - DNA, 1418 bp, Homo Sapiens
acggatagcggatctgcgggaagatggcgttggaagtcggcgatatggaagatgggcagctttccgactcggattccgacatgacggtcgcacccagcgacaggccgctgcaattgccaaaagtgctaggtggcgacagtgctatgagggccttccagaacacggcaactgcatgtgcaccagtatcacattatcgagctgttgaaagtgtggattcaagtgaagaaagtttttctgattcagatgatgatagctgtctttggaaacgcaaacgacagaaatgttttaaccctcctcccaaaccagagccttttcagtttggccagagcagtcagaaaccacctgttgctggaggaaagaagattaacaacatatggggtgctgtgctgcaggaacagaatcaagatgcagtggccactgaacttggtatcttgggaatggagggcactattgacagaagcagacaatccgagacctacaattatttgcttgccaagaaacttaggaaggaatctcaagagcatacaaaagatctagacaaggaactagatgaatatatgcatggtggcaaaaaaatgggatcaaaggaagaggaaaatgggcaaggtcatctcaaaaggaaacgacctgtcaaagacaggctagggaacagaccagaaatgaactataaaggtcgatacgagatcacagcggaagattctcaagagaaagtggctgatgaaatttcattcaggttacaggaaccaaagaaagacctgatagcccgagtagtgaggattattggtaacaaaaaggcaattgaacttctgatggaaaccgctgaagttgaacaaaatggtggtctctttataatgaatggtagtcgaagaagaacaccaggtggagtttttctgaatctcttgaaaaacactcctagtatcagcgaggaacaaattaaggacattttctacattgaaaaccaaaaggaatatgaaaataaaaaagctgctaggaagaggagaacacaagtgttggggaaaaagatgaaacaagctattaaaagtctaaattttcaagaagatgatgatacatcacgagaaacttttgcaagtgacacgaatgaggccttggcctctcctgatgagtcacaggaaggacatgcagaagccaagttggaggcagaagaagccattgaaagtgatcattctcatgatttggacatcttttaagtacattttcaacagtttgaagactaagcctttctaaaataacattgttaataaaccattttttactgagaattgcaacgtttttgcactggaataaacatggagaatccgggagggaaaagacaattggcttttccttggtttaaaaataatgtggggggaaaaagggagattgccaatttggaataaaaacccttttaaaaaggatat

SEQ ID NO: 166094 - DNA, 543 bp, Homo Sapiens
tcggctcggtccctgattcaccacctcctataaaacacaacatgaatattggaacttgggatgaaaaagggtcagtggtaaaggctccaccaacccaaccagttctgcctcctcaaactataatccagcagcctcagccattaattcaaccaccaccattggtgcaaagccaactgcctcaacagcagcctcaaccaccacaaccacagcagcaacaaggacctcagccacaggcccagcctcaccaagtgcagcctcaacagcagcagctgcagaatcgctgggtagctcctcgtaacaggggagcaggcttcaaccagaacaatggagcgggcagtgaaaactttggtttaggtgttgtacctgtcagtgcttcaccttctagtgtagaagcgcatcccgtgctggaaaagctaaaggccataaacaactataatcccaaagactttgattggaatctgaagaatggacgtgtgtttataattaaaagctactctgaggatgacatacatcgttccattaaatactctatctggtgtatag

SEQ ID NO: 166095 - DNA, 464 bp, Homo Sapiens
agcgataccaccagcgtgacaaggaagtgaattcacaactatatagcaagcggacagtaagaggtaaagtgcaagttaagagttcagacagacaagttggagacctcatcatagtggaaaagaatcaaatgaattccatcggacatggtgtttcttaggacttcagaaaaagcaggttcgtgttttattcgaactgatcaactagatggtgaaactgactggaagctgaaggtggcagtgagctgcacgcaacagctgccggctctgggggacctgttttctatcagtgcttatgtttatgctcagaaacctacaaatgggcattcacagtttcgaaggcacatttaccagggaagacagtgacccgcccattcatgaaagtctcagcatagaaatatacattgtgggcagcaacattgttgcatcaggtactgtaataggtgtaacaggtagcgagctcgatt

SEQ ID NO: 166096 - DNA, 261 bp, Homo Sapiens
actataccaccgcggtgtatccagacaatggaatattactcagcctttaaaaggaaggaagtgtttacgcctgctgcaagcatgaaccttgaatggatgagcatgctaaatgacatcagccagactcaaaaagacaaacactggctgataccaccgacatgagctacctaaaatagtcaaattcctagagacagaaagtagaatggtgtgactaggggttagtagtggtatagggtgtatagcctggtaccgagctcgatc

SEQ ID NO: 166097 - DNA, 637 bp, Homo Sapiens
ccgttatacaccagaatcgatactgttggtaaccaggagtataaggcagtggctctggggttcttaattcattcctaacttctttgatacttcacaggattaggaaagtggtcatcatacatcccacacagtctgtattacttcaggcttgtgggcaaggttaggaagaatcaatcagccttaactataaatacctgcactgtctctgaggacttactattttatgttctttttaatcaataccgatcagaagtttaggttataaaaacaattctacttcatgctttggtgcttggtaatttttggtgcgtctttaagcattactcttatatatcatatattaaaataccataaaaatgaaattcagacaaaatcactggcaccaaaaatggtttattctgagctgtcttcactttgacgatttggggggcttctctcaagtacagatgtgggttggggtcccctggagcaggcaggattggcagtaagagatattggccactcaagtctactgtgtgtgtgtgcctctggaagagtgaagaatggacttcaaaagtaacatcaaaaatctaactgacaccatcctggagacattttgcagggctttccttccaaatcggcaaagtgcaggaattgg

SEQ ID NO: 166098 - DNA, 144 bp, Homo Sapiens
tataccaccatcacatcctggggctggagcagggtcccaagggttcggctgttcgccgatttaaagtggtacgtgagctgggttcagaacgtctagacagtttggtccctatctgccgtgggtgtaacagggccgagctcgatg

SEQ ID NO: 166099 - DNA, 653 bp, Homo Sapiens
cgatcccctattcagaataaacctttcactttgtcactactatagcaagggttccattccaacaatggattactactatgtagaccaactcctgtctgatttagatcttcctttcataaacacattgatacttgttcaaggacagctgtaaatacatccaatttcttttctttttatccccctctacaactctgcttggctacaaaaatctaggactcacagagcaacagcagcgatggtcagaaaataagtgccagttccaatgcaagaactctctaaagttcattggtcacaatttttttctcattatcttgccaattatttctttcgaaattcaatcctccgagctacattctgagcaccaaattttttgaccaatgcctctctggtatcctcatcatctttttgcaaatctatgtcatcttgtcgggaccaaatgggatatccatcagctctctgaccagacgctaagaaggcggaagtagcctccagctcaccactattttttaggaaggcctgtgtaactgttgatagatccaagttaaacttctccattaactgccgaatgatcttaatggcagctcccacctctggttgagaaacttttttttctcttcaacatttctttttccgcaagggttattctgggatga

SEQ ID NO: 166100 - DNA, 1204 bp, Homo Sapiens
agccctcacatacctcagccacacacacacctgaggaagactcagaaacacagcctgatgaggaggaagaagaagaagaagaacaaagtttctcaaccagaggtgggagctgccattacagatcattcgcgcagttaactggagaagtttaactatggatctatcacacagttacacacggccttcctaaaaaaaatagtggtgagctggaggctacttccgccttcttagcgtctggtcagagagctgatggatatcccatttggtcccgacaagatgacatagatttgcaaaaagatgatgaggataccagagaggcattggtcaaaaaatttggtgctcagaatgtagctcggaggattgaatttcgaaagaaataattggcaagataatgagaaaagaaaaaaagtcatggtaggtgaggtggttaaaaaaaattgtgaccaatgaactttagagagttcttgcattggaactggcacttattttctgaccatcgctgctgttgctctgtgagtcctagatttttgtagccaagcagagttgtagagggggataaaaagaaaagaaattggatgtatttacagctgtccttgaacaagtatcaatgtgtttatgaaaggaagatctaaatcagacaggagttggtctacatagtagtaatccattgtttggaatggaaccccttgctatagtagtgacaaagtgaaaggaaatttaggaggcataagccatttcaggcagcataagtaatctcctgtcctttggcagaagctcctttagattgggatagattccaaataaagaatctagaaataggagaagatttaattatgaggccttgaacacggattatccccaaacccttgtcatttcccccagtgagctctgatttctagactgctttgaaaatgctgtattcattttgctaacttagtatttgggtaccctgctctttggctgttctttttttggagcccttctcagtcaagtctgccggatgtctttctttacctacccctcagttttccttaaaacgcgcacacaactctagagagtgttaagaataatgttacttggttaatgtgttatttattgagtattgtttgtgctaagcattgtgttagatttaaaaaattagtggattgactccactttgttgtgttgttttcattgttgaaaataaatataactttgtattcga

SEQ ID NO: 166101 - DNA, 417 bp, Homo Sapiens
ggggagggaaaagaggattgaggggctaggccgggcggatcccgtcctcccccgatgtgagcagttttccgaaaccccgtcaggcgaaggctgcccagagaggtggagtcggtagcggggccgggaacatgaggcagtctctcctattcctgaccagcgtggttcctttcgtgctggcgccgcgacctccggatgacccgggctatcggcccccaccagagacttcgagaagcttgattctttgctctcagactacgatattctctctttatctaatatccagcagcattcggtaagaaaaagagatctacagacttcaacacatgtagaaacactactaactttttcagctttgaaaaggcattttaaattatacctgacatcaagtactgaacgtttttcacaaaatttcaaggt

SEQ ID NO: 166102 - DNA, 619 bp, Homo Sapiens
  misc_feature (325)..(369): n is a, c, g, or t
taaactgcttgaagtctgtggcattcaggcacacgtctggctggccggctgggtctcctcccgggctcagtgggcctggggcctctctgacgtggtgcctgctggagggaggctcgtcgtcaccagctgactgctggtccggcttctgactggcctttgtcctggctccgtagcagaacactgtaaaagtgcccgcgtctttgcagtagttgcagatttcagtcgtcgtgttacttgtgcacaaacagaagctgggtcttacccgcagcacgagtgtctcgggctgcccggagtcgcccgggagcaggtgctgcagccagagttnnnnnnnnnnnnnnnnnnnnnnnnnnnnnnnnnnnnnnnnnnnnnaacctgtgtttcacgtgactcagcagtgcccgccgccgtcaccagcctatgcattcactccgtttccagtgagcagatgtcttgcttggaaagtggacctgtgtctgtgtctgtcctgagaacttaccagcagaaatcctcatttctgtgctacggatttaccaaaaattgtcaagtctttttcagtttaacagttcctttacatgtgtagtatttgaggaaaaaaatcaataaacagttgatctcgtgc

SEQ ID NO: 166103 - DNA, 1128 bp, Homo Sapiens
ggcttgtgacatatagaaaagtgtacgtaaaagcaggctggtaacggtccggaatcccgggatatcgtcgaccacgcgtcgcccagagctatcccaccgactggtcagacgatgagtctaacaaccccttctcctccacggatgccaatggggactcgaatccattcgacgacgacgccacctcggggacggaagtgcgagtccgggccctgtatgactatgaggggcaggagcatgatgagctgagcttcaaggctggggatgagctgaccaagatggaggacgaggatgagcagggctggtgcaagggacgcttggacaacgggcaagttggcctatacccggcaaattatgtggaggcgatccagtgatgagtcggggacaggccagcggggggacggaggcggcgggcccaggagcctcagccagccacgtgggcatccactccttttcctgcaagagatgatggttccattgctcttggcttcatggtgttcctggaaggcagatgagctggtcatttcgcctgggactcggcacctttccgagtgcagctggcagggatctgagcgcaggaagacgcagaacaacagaaatagccgcccctccccgcccactgtgcctgttggcctatcatagatctctaatgttcttgacttggtgctctcctttccgagtcaatggtgggttacactgatcttggtccactgattactcgtctctgaacgagtccattcaccttgcaattcaatgaagcagcttacattcccaaaagaaacacaaacaggggggacccgaccccatagaagcgatactcccatcgaagggcggcccgagcgactataccgcgatacccccccgacgctatgccaggggggaccccaaaccgggggggcccccataaatcgaaggaagcgcgacaattagtaggcgacagggaccagaggggccggtcggtaatacaaacaagcgacaaggacacgggagcaacacacggagatacacaggaggaacccagggtggaagaggcaccaccacaagcacatgggggaggtgagaccacaaatagggggaaccaacccgtacacccaccagagcacagttaaaagcgccataagcggacaagca

SEQ ID NO: 166104 - DNA, 703 bp, Homo Sapiens
cgggaggttctgctggaggttcagaagcacctagacctgtccaatgtggctggctacaaagccatttaccatgacctggagcagagcatcagagcagctgatgcagtggaggacctgaggtggttccgagccaatcacgggccgggcatggccatgaactggccgcagtttgaggagtggtccgcagacctgaatcgaaccctcagccggagagagaagaagaaggccactgacggcgtcaccctgacgggcatcaaccagacaggcgaccagtctctgccgagtaagcccagcagcacccttaatgtcccgagcaaccccgcccagtctgcgcagtcacagtccagctacaaccccttcgaggatgaggacgacacgggcagcaccgtcagtgagaaggacgacactaaggccaaaaatgtgagcagctacgagaagaacccagagctatcccaccgactggtcagacgatgagtctaacaaccccttctcctccacggatgccaatggggactcgaatccattcgacgacgacgccacctcggggacggaagtgcgagtccgggccctgtatgactatgaggggcaggagcatgatgagctgagcttcaaggctggggatgagctgaccaagatggaggacgaggatgagcagggctggtgcaagggaacgcttggacaacgggcaagttgcgctataacc

SEQ ID NO: 166105 - DNA, 1326 bp, Homo Sapiens
  misc_feature (87)..(87): n is a, c, g, or t
  misc_feature (122)..(122): n is a, c, g, or t
  misc_feature (132)..(132): n is a, c, g, or t
  misc_feature (139)..(139): n is a, c, g, or t
  misc_feature (146)..(146): n is a, c, g, or t
  misc_feature (181)..(181): n is a, c, g, or t
  misc_feature (235)..(256): n is a, c, g, or t
tttattgatttttttcctcaaatactacacatgtaaaggaactgttaaactgaaaaagacttgacaatttttggtaaatccgtagcncagaaatgaggatttctgctggtaagttctcaggncagacacagncacaggnccacttnccaagcaagacatctgctcactggaaacggagtgnatgcatagctggtgacggcggcgggcactgctgagtcacgtgaaacacaggttnnnnnnnnnnnnnnnnnnnnnngccggcccgcgtggcccccgcgtaactctgggctgcagcacctgctcccgggcgactccggggcagcccgagacactcgtgctgcgggtaaggacccagcttctgtttgtgcacaagtaacacgaacgaactgaaaatctgcaactactgcaaagaacgcgggcacttttacagtgttctgctacggagcccaggacaaaggccggtcagaagccggaccagcagtcagctggtgacgacgagcctccctccagcaggcaccacgtcagagaagccccaggcccactgagcccgggaggagacccagccggccagccagacgtgtgcctgaatgccacagacttcaagcagtttacaaacgaaactcactgttaaaagctgttaaatctcattaaaacagtagacgagtgctttagattctctgaatatcaaataatatatacagatagacactgagacatgacagtctaatctaaagcatctttacagatgcatttgcttgaaaagttagtcttctttttaactctgaatcagtgataaaattgttaatttgcaaaagagtacagttttaagcaagaatagagtgaaaataatttttaaatatggcgatttgggggagttctacctaaggttctatgtaaagcttccattcagatgcccaaagcacacaagagcattccaatagaaacccgaccataacccggtcccaccttcctggcataattcctttcctcaaacatctgccacctgaggctaagcctacacacggcgtggctgagtaacagggtaagggaatagggagatcgtttcctcaagactggtgcgcatcaatctgtgccataatttaagtagaaatgaacaggtgtataaaaaagtataactgtacacagcctttaaattaaaaacctcaaaatcttcactcaaaatgggatgtaagcttgttcatttaagttgcaggtgatggactcgtcagagagagtaatcagtggaacagatcagtgtaacccaccattgactcggaaaggagagacaagtcaagaacatagagatctatgataggccaacaggca

SEQ ID NO: 166106 - DNA, 737 bp, Homo Sapiens
tacctcgcgtaagtgctgaccgtactcccgacaccaacataccccttctgccttgtacccgattccgacttggagaaggaagaagaggagagtgaggaggactggaagctgcagctggaggctgaaaactacgagggccacaccccactccacgtggccgttatccacaaagatgtggagatggtccggctgctccgagatgctggagctgaccttgacaaaccggagcccacgtgcggccggagcccccttcatttggcagtggaggcccaggcagccgatgtgctggagcttctcctgagggcaggcgcgaaccctgcttgcccgcatgtacggtgccgcaccccactcggcaagttccatgctccggcccaaccccatcctcgcccgcctccttccgtgcacacggagcacctgagcccgagggcgaggacgagaaatccggcccctgcagcagcagtagcgacagcgacagcggggacgagggcgtgagtcaggaggagagacagggcagcacagctggggggtcaggatagaccggcaggcaagaagcccaagaagataattaggcaccgaccttgggctgctgttagagaactcaggcggcagcgccagtgacacggggcactagtcaggagagacctggacaggggtggtgggaagagcttgggcagaagtggctgaaaaactaaggcagtggcaaaggtagaactcaggcaggggtgatatcactcctc

SEQ ID NO: 166107 - DNA, 1102 bp, Homo Sapiens
tcagtcggtacccgatggtagccctttagcctagatgcttggacgaagtaacagtaatgaggttcagtgtcatcacataaatgcagtcatgaaccacaactgctgctctccattgccaagcacaaggtaaagggcttaccatcgtccactcatctttctcagtgtcgtatctttctacggtcctccgattaagttctccacctacgctatctcctccaattgcatagatatagccttcacagcaaaccaaagatggctttatgcggacaaaaagcattggggtctttggaaaccaggtattttgctgtgcatcaaaccaataaaagcaattcacagttctgaaggcagtctgaagtttgcttgttttactgtgatttgtttttgtgtttttcagaggaacttgaccccctgctatgtagatatcattatcaggagttacaacggtcccaaccttatgcaaatcagctggtgggctacataacttgtaaactttttctgcttgggggctgtaacagacagaagagtaaagactacaaggattttctgaagatgcttcaatgaaaatcatcatttcctctttagtcatcccaagtcttggtttgaaaaacttgggcatggacttatacagaccttgaaccaccactgacttatcattgggtggcagaccttgaaaccaagctctctgtgttacttctgaaagtgcatcaattctgatttggctaagaacagaagacaaatactgggatcgtgattctagtgttatactctagccacagcatagcagcttctcgaacggtttcttccttttctacatttaaattgtcactactgagaatatctatcagtaggtcatgtgacagctgcatgaacgcgtcctgatttccaccttgccatggcagggtggaaatcaggattactacaagccatactgaggcggcagcaggagcgaccaactgatcgcacacatgctttgttgggatatggagtgaacacaattatgtaccaaatttaacttggcaaactttctattgcctgtcccatgtgcattcttatttaaaattttccccatggaaatcactctcctggtgactatttccagagc

SEQ ID NO: 166108 - DNA, 1200 bp, Homo Sapiens
taaatggtcactactgggaatatctatcagtaggtcatgtgacagctgcatgaacgcgtcctgatgatacacagcagtgaacttgtgctccaccattcttttagcactctgttttaattcctcacaactgaagagatcagcaaaactcaacaatcgtacacaattctctgcatttatttttttaattaaatattctcgacaacgttgtaacacatcttctacctgtaggaagcaagctgtttcataaagctgttctacagtgctgtcattcattgccaagttacccgtgtatgcataagttattataatctgtaaggtggcagcatcgacattcctcaggtgtacatgggtttgtttgctttcacttagtccactcataaacatggccctgaaataagagctacatgttgcaagaaccatcttatgacaagggaattcagtgccctcaacaattaacactatgtcagtaaacaactgctgttcataaaacagtttcaactgtttccaacaaatgacacagcatattcagtattgatctgcctctcgtcttgagtggacatgactgtattcccattaatatctcccagaaacagattagaaaagtccgtcttactgatggaaggtcaagtgaatacttcagaaataaaggagaacctacttgctgttatctgcagcattcagtaccaagactgacacattcactaatgagtaatatcttgttacacagacttagaatcactcctaggtcatcctgtgttaattaggttcttcagagtttttcaacacagtctgcagacattgtgctcaaatctgcaattgtgcagctcatgagtgaaagagaaaaatacacgaggtagattttgtggcaacatcctatgttcagcggatcctgtggagtaactttgttggttcaatagctcaagaacagcagggccatcatttctgtgattctctcgacattgacttcatggttgcaatatggctgcagcagttttagccttcgcacctttgttcaaggcaagaagaggggaaagggggtggcttccaccatccatggtcttttttttcttcaggaaagtgaaagctttctcaggatactacatctcccaaactcagcagacttccacaaacatctcattgtctagaattgtaatttggccacctataaagattacaaaagagaaaaacactgggaatccc

SEQ ID NO: 166109 - DNA, 1239 bp, Homo Sapiens
  misc_feature (1046)..(1084): n is a, c, g, or t
  misc_feature (1086)..(1091): n is a, c, g, or t
  misc_feature (1094)..(1122): n is a, c, g, or t
ctgactctacaggatcccccggaggcgttgaatggccaattggatccaacagttgatacaacaagacgaggttttgtgtttatcacctttaaagaagaagaacccgtgaagaaggttctggagaaaaagttccatactgtcagtggaagcaagtgtgagatcaaggtggcccagcccaaagaagtctatcagcagcagcagtatggctctgggggccgtggaaaccgcaaccgagggaaccgaggcagcggaggtggtggtggaggtggaggtcagagtcagagttggaatcagggctacggcaactactggaaccagggctacggctaccagcagggctacgggcctggctatggcggctacgactactcgccctatggctattacggctacggccccggctacgactacagtcagggtagtacaaactacggcaagagccagcgacgtggtggccatcagaataactacaagccatactgaggcggcagcaggagcgaccaactgatcgcacacatgctttgtttggatatggagtgaacacaattatgtaccaaatttaacttggcaaactttctattgcctgtcccatgtgcatcttatttaaaatttcccccatggaaatcactctcctgttgactatttccagagctctaggtgtttaggcagcgtgtggtgtctgagaggccatagcgccatcatgggctgatttttattaccaggtcccccagaagcaggtgggaggctctgcttcctgctgccgctctgcagcctggacctgtggaccctggttgtaaagagtaaattgtatcttaggaaaccagtgtcacctttttttcaccttttaattttatattatttgcgtcatacatttcctgtaacggaagtgttaattttactgtactttttggtaccttttgggaatctaatgtattgtaaggtattttacacgtgtcctgattttgccacaacctggatattgaagctatccaagcttttgaaataaaatttaaaaacccccaagcctgggtgagtgtggaaaaaannnnnnnnnnnnnnnnnnnnnnnnnnnnnnnnnnnnnnnannnnnngtnnnnnnnnnnnnnnnnnnnnnnnnnnnnncctggcgggcgccctcgcccccccgaaaagctttctaaaacctttccgtttggggcgccgggccccatagggaaaagggaacatgggccaaagcttggttccctaggaaaaaccggg

SEQ ID NO: 166110 - DNA, 1345 bp, Homo Sapiens
cgggacggagcttggctgttggtcggtgggttcccgtgcggcggcggccaaggaggaggagacacagttggagcagctccgtgggctgactggggcgaggcctcagcagcgcgagcttgagtgcggccgagcctgcggcgccttcccctgcgggtggggacgagcgggccccgcggcgtcatcggcggcgaggagccgccgcgcctcggcctagcatgtcggaagcgggcgaggagcagcccatggagacgacgggcgccaccgagaacggacatgaggccgtccccgaaggcgagtcgccggccggggctggcacgggcgccgcggcgggggctggaggcgcgaccgcggcgcccccgagcgggaatcagaacggcgccgagggcgaccagatcaacgccagcaagaacgaggaggacgcgggaaaaatgttcgttggtggcctgagctgggatactagcaaaaaagatttaaaagactattttactaaatttggagaggtcgttgactgtacaataaaaatggatcccaacactggacggtcaagagggtttggggttatcctgttcaaagatgcagccagtgtggagaaggtcctagaccagaaggagcacaggctggatggccgtgtcattgaccctaaaaaggccatggctatgaagaaggacccggtgaagaaaatcttcgttgggggtctgaatcctgaagccactgaggaaaagatcagggagtactttggcgagtttggggagattgaggccattgaattgccaatggatccaaagttgaacaaaagacgaggtttggtgtttatcacctttaaacgaagaagaacccgtgaagaaggttctgggagaaaaagttccatactgtcagtggaagcaagtgtgagatcaaggtggcccagcccaaaagaagtctatcagcagcagcagtatggctcttgggggccgtggaaaaccgaaaccgagggaaccgaggcaagcggaggtggtggtggaggtggaggtcaaagtcagagtcggaatcaggcctacggcaactactggaaccaggctacggtaccagcagggctacgggcctggctatggcggctacgactactcgccctatggctattacggctacggccccggctacgactacagtcagggtagtacaaactacggcaagagcaagcgacgtggtggccatcagaataactacaagacatactgaggcggcagcagggagcgacaaatgatcgcacacatgctttgttggatattggagtgaacacaattattgtacaaatttaacttggcaaatttctatgctgcccatgtgcatcttattaaatttccca

SEQ ID NO: 166111 - DNA, 1056 bp, Homo Sapiens
  misc_feature (405)..(434): n is a, c, g, or t
  misc_feature (451)..(524): n is a, c, g, or t
  misc_feature (883)..(883): n is a, c, g, or t
  misc_feature (990)..(990): n is a, c, g, or t
ggacagtcagggtagtacaaactaccgcaagagccagcgacgtggtggccatcagaataactacaagccatactgaggcggccagcaggagcgaccaactgatcgcacacatgctttgtttggatatggagatgaacacaattatgtaccaaatttaacttggcaaactttctattacggctacggccccggctacgactattgcctgtcccatgtgcatcttatttaaaatttcccccatggaaatcactctcctgttgactatttccagagctctaggtgtttaggcagcgtgtggtgtctgagaggccatagcgccatcatgggctgatttttattaccaggtcccccacaagagtgagttgtctgtgcgctccgacggctggaatgcagacgctttttttnnnnnnnnnnnnnnnnnnnnnnnnnnnnnncgccccggcgcccgccnnnnnnnnnnnnnnnnnnnnnnnnnnnnnnnnnnnnnnnnnnnnnnnnnnnnnnnnnnnnnnnnnnnnnnnnnnaccgacgagccacccaagcccgccgtggtccacagagaacggaggagccaggcgcgcgtccgcgccgggatgggctagtggggagggcgcccggtcgtcgcgtcgcccgcacaagacaaggggagcgtttcgcgcgcctcaccatgccgcgaactccgtcacgtgcgcgttccccaccccatctcctctcgctcccccctcccgcgatagcccgcgcagtaatcgtgaattgacgccgttcgggggcgcgcgagttgcacgatagtctcgctcaccagccgcgctgttctaaatagcgcggaataccggaacccgctgcgagtagtccgcatcacgactcttgctccgcctcaccgcgnagcgacctccggcgttccccgccgtcattccgtttctactggatctgtcccccctcctcgggagcgtcagtccactcgaaccactgcttcacttcgctgaatataanctcctatgagcgctcactcgcgttcccgcaccgcgacccgctcgtcctgacctacccaggcaaaaa

SEQ ID NO: 166112 - DNA, 541 bp, Homo Sapiens
tgataccaccattgctaagtcggatctgctccagtgtctccagtaccagttctaccagatcccagggacctgcctgctcacagaggtgacagaggaagatcaaggaaggatctgtatggtcactgacctcgatgaaacccttgtgcatagctcctttaagccaatcaacaatgctgactgcatagtgcctatagagattgaggggaccatgcaccagatccatgtgctcatgaggccttatatggatgagttcctgacatgaatggaggaaatgtttaaatgtgttttcgtcattgctctcttcttcccagcctgaacaagtaggcagatcctgtgacgggtgagctggacgggtatgggatggtctggggctgcctgtcccatgagtcatgtttgtttcaccagggctgctatgtcaaggacgtcagccgtctggggagggacctgaggaaaactcatcctggacaactcgcctgcttcttacctcttccacacagagaatgcagtgcctgctgcagtcctggtttgatacattcaaacg

SEQ ID NO: 166113 - DNA, 258 bp, Homo Sapiens
ccggtacatctccgcttctcagcgaagtgaagtgttgtgatgatgcaatctaccgcggtagacggaaagacccatgaactttactgtagcgttgcattggactgttgaatcgatctgtgtaggataggtgggaggcttagaagcgtggacgccagtttgcgtggagccatccttgaaataccaccctggtttatttgaggttctaaccttggaccgtaatccgggtcggggacagtgcatggtaaggcggagagggga

SEQ ID NO: 166114 - DNA, 201 bp, Homo Sapiens
ctgataccaccggatcactatgtcctactttcgtacctgctcgacttgtcagtctcgcagttaagcacgcttatgccattgcactattagcacgatgtccgaccgtacctagcgtaccttcgaactcctccgttacactttgggaggagacgccccagtcaaactgcctaccatgcaggtgaatagggccgagctcgatta

SEQ ID NO: 166115 - DNA, 1232 bp, Homo Sapiens
  misc_feature (110)..(118): n is a, c, g, or t
agggggtctcaaagactctggtccccctggtacccgggttccaaggtaaagcgccagggggtctttcccggttggggggaagcggcttttctgcttggggggtggtaaannnnnnnnnccccacgaaactcaaacaccggctcccgcatgtccagaagctggtggaagatgtaggtgacggagtcatcccagcggcactggaagaaggacaagccggctggagtcatggtttcttggtgtttcttgtagaaatcaaaagtgcggaaggtccgctgggccagctgatagcagggtgaggggcgtgcgtcctcagagaagtcaatcggctggtcctgcttgaagagcaggaaggcaagacggtggatgccggagcctcgggcagggaagggggggaggtagggacacgtcacctgtccttcagccacccggttacccgggatgttggttagcagccagtggaggtactcagcatctggctccagcaggtgcccatccaagctagtgagtagcaacgtccacaaggagccctcttctgcctcataggtcacctctggcgcttgggcagcctcggttggagtcacctcattgccacagtacacaggcatcaggtcatcctcacccacagcgtaggccacgtgcagggggactcggggcacaaaggtggcaccgtggaacaggtctcggtagaggccgtaatactcagccagacgctgcttgtggtaggggccacaggtcctctcccactcggcccgcacggcatccagcgggacactggctgtgcggaggcgggcagcccgctcctcttccacattggcccgaagctcctggatggcctgtttccgttccagtagctgttgggtccgggagactttgggtggaggcagcccaatatcaatcttctctttgggatctgtcttctccccgaaatactctcggtaggtccgccaccagtgcggggcctgcgcctcctgctctgctcggcgccggtagcggtcgaagctccggtacttctccagccgctccaggttgctcaagtcgatgtcactgttgggcatcggccccagcgggggtgtccggcggcccaggacggccgaggtgctgaagccccgccatctccgacactcgcacagcgcggctcgccaccagggcgccgccatcttccctccggcctgcgacactgcggccgccactaggacccgggcacagcctcgtgccgaattcgccacccaggc

SEQ ID NO: 166116 - DNA, 967 bp, Homo Sapiens
  misc_feature (664)..(682): n is a, c, g, or t
  misc_feature (915)..(915): n is a, c, g, or t
  misc_feature (937)..(937): n is a, c, g, or t
ttttgattaacatttggggcctgataggggaaatggtgaagcaatggaaaagaacagacaactaatgatttgcttctatgtccagaatattttacctttaaaaaaatgtcattggcaccataaataaggactgtgagagactgtttaaaagctgtgaaagtctgaaacctataagccaaggtgttccctgcctaaacttattgctgttcccacaaaggactaagcctgttcataagttaccaaagttgccattttggagatggaaattgacgaggagggaaggtcttttattggagagtatacagtacaagcagatcattctgccttagaggtgctaattcccgaaattagaagaccctttcttttccagtaatgaagttataaatatcagcttgttcatccaagccactggctgaggtgttaggaagaggaagagggtggtagaggaggtaagacagtagggaaagacaagggcccatgctcttagtggggaaaactcttggagccgtttactttgagctttgaacactgaaaccattgttggcagggttcagtcactgacagcacaagtttcactgaattgatccaagagtttagtgatttcaaaagccttggtctcaggagaagattaaactttcatattgggcagtggttcactttaaannnnnnnnnnnnnnnnnnnaaacaattttttaagaaatcctaataagtaacatacccaaaatgctctgtcttgagtcatgagaaccatcagttcttgatattgtctagacttgcatctagagctacgttgtaaaattcttttaggcatgtgttagatttctgtgtaaactttgtttaaatgtaaacttcatactacattgtcagtttttgtcttaataaaactatagaatttatcaaaccaaaaccacgctnacccccagacccacacccaccnggcaatattagctcccgaaacctccccccc

SEQ ID NO: 166117 - DNA, 182 bp, Homo Sapiens
ctcggataaggccaatcctgagatgcgtggtgatcctgagagagagcagactgcctgccaggtaaatggtccatattatttccttggcagaggccctgacaggggctggggtccgtgttacctcagcagtctttctgcttggcctactcttgctgctctgtaggaaggccctatcttaccac

SEQ ID NO: 166118 - DNA, 652 bp, Homo Sapiens
ctctacaggatcccaggccaaagacaatgcatataaaagaactggcagacaataaatatagagtcccccactcctgcttggtgctctctttctctctccttctctacatagagaagtgccagagcatccgtcagtagaagttacttaaggttggctgtgtcttccacatcttttgtttacccatgaagaactgtgaccatcttgttctgtgtcttgtcataaagatgggacgtgacttctttctgctcttgcttccatctggtgctgttttctgcacagcctccttgagaccttccagaaccttcttttttcctacttcgtatcacttaaccagtagctatctgggatggttccagaggctgaagtttgcagttgaataacattttaaatagtgttaagcgacttgggatctctggccctttgcgtttcagtatttgtcctttttatgccctgaatgtttaacctgccacatgtttgtactgcaacatgaatcttgggaaattttaaggttatgcatttcaaatgttttttggttatccgtaaaactaatgggccccttattgggctcatttgtccataaaagaagcctcgcataaggattggcccacccacgctacacacaaccttccaggcatttaatgtccgggtgcgg

SEQ ID NO: 166119 - DNA, 896 bp, Homo Sapiens
gctcggtacccatccgacagctctgtcctgacatgctgtctccctgggccgaggaagcagcaaataatatcaattgagcatgtgaaaatgtgatgacggtgtgtgtggtgtaatgtttctagatgtcttcaccttctgtctcccatcccggttgcaatctcactcagacatcacagtaccaccccaggggtggcagtagacaacaacccagaaattgagacagggatctcttaccttgggaaaataggggttaggcatgaaggtggttgtgatctaagaatgatggtcgtgttattaaatagcattaagactggaagtggacaagagtgttgagcataccttgtctaacctgctctttctctttggtgccccctatctcaacccttcctgggaatctaataagtctcaagcatttccaattgtagactaaaacccactctaagcatctcctctagtattttccatgtatcagaacagaggtgtcttatgtagggagggggcaagtatgaagtaaggtaatgatatactactctcattcaggattcttgctcccatgctgctgtcccttcaggctcacatgcacaggaatgctacatgatggccagctgcttccctccttggttatcatccactgcagctgctagttagaaaggtttggagggatgacttgtagtaaagtcatggggattttattgatttatttgcacttgtgggattctgtggggtgggagtggggagcaggaattgcactcagacatgacatgtcaattcatctctgctaatgaaaagggttctttctcttgggggaaatgtgtgtgtcagttctgtcagctgcaagttcttgtataatgaagtcaatgccatcaggccaaggaaataaaataattgcttacctt

SEQ ID NO: 166120 - DNA, 217 bp, Homo Sapiens
tagggtcttagggaggggtgagataaggggcaccaaagagaaagagcaggttagacagggatgctcaacactcttgtcaattccagtttaatgcatatttaataacaaaaccatcttcttaatcacaaccaccttcatgcctaacccctattgttccaaaggtaagagatccctgtctaaataagttgtctccctagaccctaggatcctctaggtg

SEQ ID NO: 166121 - DNA, 619 bp, Homo Sapiens
tctgtcccgccccgaagagggctccaagaaggcagtgaccaaagcgcagaagaaagatggcaagtcacgcaagccagccgcaaggagagttactctgtgtacgtgtacaaggtgctgaaacaggtccatcccgacactggcatctcttccaagccatgggcatcatgaattctttcgttaacgacatatttgagcgcatcgcgggcgaggcttcccgcctggcgcattacaacaagcgctcgaccatcacctccagggagatccagacggccgtgcgcctgctgcttcccggagagcttgcccaagcacgccgtgtcggagggcaccaaggccgtcaccaagtacaccagctccaagtaaacattccaaggggagacaacagctatttagacataatcttttccaacagtcgtcactgctggacactgtttcatcttgcaaataaaccaatgaaaatgagtgatcctagaagaagataaatggaggtattttgaacaatcaaagaaggacaaatgaacacctggctgagaaaaattagctcttttttctatgcataaaactattaaaatattcttcatagaaatttatgacacaggaaacataaagacaaaattaaaat

SEQ ID NO: 166122 - DNA, 1019 bp, Homo Sapiens
agaaaagcgcccgtcatagtaggtgtggacacgcacagagccgagaggtcccgcggggagggttccctgtgaggccgagaccgtttgggggttcttggccggctcccccaggggacattgagcatgagcctttgagacggtgtaagactgcgttagttgttcacgcgttttgtcgcccgcaggaatttgaagtatagttgaatagggtgttttgttttacgagaggggccgggccggtgtttttccgttcgaggggttttgtttagcaaaagggtagttcccatggccaaggtaatgaaattgccccggtgaattaaggtctgttgccagagagtaaagtgcggtttttaagggttgtaaacctcaagagataagcatgaagggcagaagcgctttaagcgcataacctcgaaacgcgtatctggggatgaaccactgtccagcaaaccaggatcgagaaagacgtcggtgacaaccacacagttcccagtgtcaggcacccaagagacttcctaacaaagatgtagagatccataccctcagaaaaggaatagcagttcagctcaccccagtcagcatgtctctcccatggcaaagttacttggataccggtgtacatggagaaatgcacacactgccctccaattcaaagatgagcatcagccacctccccagagaagaagcagccacacggccgtcaggatttctctcctcgaggtcactagtgtagatgcgcctgctgaaaagcgccagccgggaagccacgcctgcgatgcgctcgaaaatgtcgttcacaaacgaattcatgatgcccatggccttggacgaaatgccggtgtcagggtggacctgcttcagaaccttgtacacatagatggaatagctctccttgcggctgcgcttgcgcttcttgccgtctttcttctgcgccttagtcaccgccttcttggagccctttttcggggcgggagcagacttcgctggctctggcatagcactgtgtagctataaagcgccaa

SEQ ID NO: 166123 - DNA, 830 bp, Homo Sapiens
cgatctgctgctcgtctcaggctcgtagttcgccttcaacatgccggaaccagcaaaatccgctcccgcccccaaaaagggctccaagaaagccgtcaccaaagcccagaagaaagacggcaagaagcgcaagcgcagccgcaaggagagctactccgtatacgtgtacaaggtgctgaagcaggtccaccccgacaccggcatctcctctaaggccatgggaatcatgaactccttcgtcaacgacatcttcgaacgcatcgcgggtgaggcttcccgcctggcgcattacaacaagcgctcgaccatcacctccagggagatccagacggccgtgcgcctgctgctgcccggggagttggccaagcacgccgtgtccgagggcaccaaggccgtcaccaagtacaccagcgctaagtaaacttgccaaggagggactttctctggaatttcctgatatgaccaagaaagcttcttatcaaaagaagcacaattgccttcggttacctcattatctactgcagaaaagaagacgagaatgcaaccatacctagatggacttttccacaagctaaagctggcctcttgatctcattcagattccaaagagaatcatttacaagttaatttctgtctccttggtccattccttctctctaataatcatttactgttcctcaaagaattgtctacattacccatctcctcttttgcctctgagaaagagtatataagcttctgcacccccactggggggttggggtaatattctgtggtcctcagccctgtaccttaataaatttgtatgccttttctcttatttaaaaaaa

SEQ ID NO: 166124 - DNA, 504 bp, Homo Sapiens
aggaggtaccaactgtcaggtgtggacaaggggtatcctggccggagcaggcaggaataaacgtgggtgttcactgtggccagcagctccctcagacacaaacaccgtccttcctgtggtctggcccgttgtcgtgtaagcgggggacaggaagcatgagggagcttgtggaggtcgggccacgtgccatcccagacatcaagaggccccaatgggtttttacttgtttctcgcagtctggaggggcagccatgaaaactccaagcgccccttggcataagaaggagatgccccagactctccacgtccagaaactggtgggatctggctcatggggaggggcagagcggcagtgataggacttcaggtgaacccaaggggctgggggaacagacccagctactgagcaccctgcggcatgagactccttgagaggtggggagcacggggccttcaggactccgctgccttcttgttggtcttgttcaagagtttcttgagggt

SEQ ID NO: 166125 - DNA, 926 bp, Homo Sapiens
  misc_feature (710)..(715): n is a, c, g, or t
  misc_feature (717)..(862): n is a, c, g, or t
ggctggttgtgcaaccattgcttcatttctttgcaaaatgtagttaagatatactttattctaatgaaggccttttaaatttgtccactgcattcttggtatttcactacttcaagtcagtcagaacttcgtagaccgacctgaagtttctttttgaatacttgtttctttagcactttgaagatagaaaaaccactttttaagtactaagtcatcatttgccttgaaagtttcctctgcattgggtttgaagtagtttagttatgtctttttctctgtatgtaagtagtataatttgttactttcaaatacccgtactttgaatgtaggtttttttgttgttgttatctataaaaattgagggaaatggttatgcaaaaaaatattttgctttggaccatatttcttaagcataaaaaaaatgctcagttttgcttgcattccttgagaatgtatttatctgaagatcaaaacaaacaatccagatgtataagtactaggcagaagccaattttaaaatttccttgaataatccatgaaaggaataattcaaatacagataaacagagttggcagtatattatagtgataattttgtattttcacaaaataaaagttaaactcttcttttctttttattataatgaccagcttttggtatttcattgttaccaagttctatttttagaataaaattgttctccttctannnnnnannnnnnnnnnnnnnnnnnnnnnnnnnnnnnnnnnnnnnnnnnnnnnnnnnnnnnnnnnnnnnnnnnnnnnnnnnnnnnnnnnnnnnnnnnnnnnnnnnnnnnnnnnnnnnnnnnnnnnnnnnnnnnnnnnnnnnnnnnnnnnnnnnggggccggggccccaaaagaaaagagaaacggggcaaaacgtttttcccaagaaaaacccgggc

SEQ ID NO: 166126 - DNA, 928 bp, Homo Sapiens
atgggggggaaagtgaaaagtgactaaaagcggctgtaccggtcggaatcccgggatatcgtcgacccacgcgtccgagagacaccaatattagctaatgtatttggagtgttttccattttacagtttatattccagcactcaaaactcagggtcaagttttaacaaaagaggtatgtagtcacagtaaatactaagatggcatttctatctcagagggccaaagtgaatcacaccagtttctgaaggtcctaaaaatagctcagatgtcctaatgaacatgcacctacatttaataggagtacaataaaactgttgtcagcctttgttttacagagaacgctagatattaagaattttgaaatggatcatttctacttgctgtgcattttaaccaataatctgatgaatatagaaaaaaatgatccaaaatatggatatgattggatgtatgtaacacatacatggagtatggaggaaattttctgaaaaatacatttagattagtttagtttgaaggagaggtgggctgatggctgagttgtatgttactaacttggccctgactggttgtgcaaccattgcttcatttctttgcaaaatgtagttaagatatactttattctaatgaaggccttttaaatttgtccactgcattcttggtatttcactacttcaagtcagtcagaacttcgtagaccgacctgaagtttctttttgaatacttgtttctttagcactttgaagatagaaaaaccactttttaagtactaagtcatcatttgccttgaaagtttcctctgcattgggtttgaagtagtttagttatgtctttttctctggatgtaaggagtataatttgttactttcaaataccccgtactttgaatgtaggtaaagagtggtatctataaaaattgagggaaag

SEQ ID NO: 166127 - DNA, 792 bp, Homo Sapiens
tataacataacttggttcctacctccacccttccaccccttccccgcgccaggacccttagagtttcccctttccctcttcttcacgcccccgtgccactgctctcctgacaagaggccatcaggcagctctcgcatgggccctggggcccttaccaaggtgggctgccgccatgcggtcaaggatctgttccttttgttgttttgttttcagccaaaactagaacagagagagaagccaggatcaactcaccaacagatacaaagaaaaagagacagagagacagcgatttagaggccggtcaccagaaagatggcgtcagggtgggaggatgccccggatggcaaggcccctaaatggatggaaccaagtgtcagtcactctctcacgcttgggaagaatgttcggttgaatggcgttcacgtggacactgggttgggtagatgctggccaatcagtcccagccattgtcctggatcatgtgtgctgagttcaatgatgtaggtgccttcttgatgatttctggctgcgttcaaaagcatgttcggatttccagcccagagtggtttggcagttttcacagtaaatggctgcgactgcatgcagtcctgttagctacactcgctcttctgcaggcccacagcccacattaactactgagttaaagaggtatgctcgtccttgacttccttggtatgacttggcaattagttcatcatgagtggccaagtgagctctgctagtgaatgcagtctgtagctccgttggcagtagggctaatattcctggttt

SEQ ID NO: 166128 - DNA, 1114 bp, Homo Sapiens
tttaatggtggaagacgagatgagctgccaattgtggtgtctgaagaccaagactacacagctcattttgctgatcctgatacacttagttaactgggactttgtggaacaagtgcgcatttgtagccatgaagtgccatcttgcccaatatgcctctatccacctaccgcagccaagataacccgttgctggcacacatcttctgctggcgcatgcatcctgcactatctttcactgcagtgagaacgacgtggacgctaaatgtcccatctgttacagctcctgtgccactacagaacggactctcacacgacgctgtcgtctgccacagagctcaccactcacgtatgcttgtcgcgtgataccatctacgactgcagcctgactgaacgacgggacacaacgcgggctgttgcgtggcttctgcccaacatccaaatgcgatgaatgtacgaccatcccattcatctaggagatgaacacgcacagccagtactccaagctcgcctgctggccctcataacggagcacgcgcgcacgccaccgcagctagctcctgcgcaggacaaagcaagcacccagacgcacgcacgctggcacaccgacgacgacacactccccgaagtcctcgcttcactccgacggcacgccttacccacggaccctcaacgcactccggcaagcagcgcctccgtcgcgcgcctcgcgccggaagcccccaccgcgccgccccccggccgtccggccgaggctcgcctaccgacaacacaaagctgcgtgagccgactagcgaccacccactggcgccgaacggaagctcctggcacctcacaaaccccacacgaaagaaccttaggcctgacaaacacgcggcacagcacaggccacactcgaggacatagacacctccaaccacaacgaaaaacccacgacaaacataccgcaccccctaggacccaacctccctatgtaaaacacgccttgccaactcacactccgggctaccaaccacagacgacaacacccgcaggcccggacagccaacaaagaccgtgacggagcacggacgaacgccacgctcaagagcgtggagggactacgcgaataagcagc

SEQ ID NO: 166129 - DNA, 645 bp, Homo Sapiens
ccaggtcttttcccctcaattgtggtggctccagccttctgcagcctgacccaggttgggcaagggcggaggtgaggaatctttgaggaccaagcccagtggtctgggaatcgggaggtagagagggaagggtctgccttgggggctccctcctcccaacccaacccctagagaagcgaccaaatcccagagatggggtgaagctggggtggggagggtctgctctttgaattacttgaaggtactgactccaaggctgctgttgcccacttaggtgtgagggggacactgtcactgcatttgggagggcagagggtggcgggtaaccagaggatccaccttggccctcacccactcctgctaggccctttccctggggaatctggaagcctgactttgcccccagggaagttggggaccgccttccctcccttctccacctctcactctgggcaccctctccaattgcactaaagtagctgttgtgccagtctgccccccacaaggggggaggtctctgcttccagtcttcttcccccgctgcctccgctcccaccctggacaatctccttgtttcccttgtgttcctggatagctcagctttgtatgtgtgtttgaggggaaaagacctgggggatctctaga

SEQ ID NO: 166130 - DNA, 355 bp, Homo Sapiens
gaaacacaggaaggctggggaaaagtacatcagggaaacctaatctagcttcagggaggtggggctgtggggaagaagagtgttaggaaagagaagcacatttttaaaagatcgtcaattacagaagaaaacaaatgaatttcactggcctatcctaagaccattctagccaatcagatttttgcagcttggtttctgcccattggcttgtaatcagtattgccaagtgtaaaacaccagccagtctgttccttgaatcattttaagtctaaggggacagcatcagtaattagcagctcaggctggagttaatccctaaggaactctcatttcctgcctctatgtcagttttcgt

SEQ ID NO: 166131 - DNA, 624 bp, Homo Sapiens
tcgataagggccaagagtcttgtcaaaaagaaaagtgatgttcactggaaagtgtggccaagtttgggatttccttttaaaagtattctaaccaccagaggtttttgatcagctagttccatgttcactgttaacacatgaggacttcttatcactgctggagctcctgcttatctgttttcttgcttgcatactagttggcttatctcgataagccaataagagtgctgtatagaacgcatgtgcaaaccgttaagagtagcttctttttgaggcctggacttctgattcatctatagaagtctattatgattccatcaattgcatagcttgtgtacctggtagaaattgtgtcttggaatgaccctttcgagttattgacatggctctgatgaatagaacatgagccccaaaactaaatccaaaaggaattctctatctttcatccaccacatgtggcaagacaagttggccctttcttacccagaggtctcttgtgtgacagcatctttctcctccgttctccattgtgtgctttccattttgtctttagtgcctatactgttaggtgttttcttcactggcattcacaaatttaagccattgctgcctcttgccgccgtt

SEQ ID NO: 166132 - DNA, 1094 bp, Homo Sapiens
  misc_feature (278)..(286): n is a, c, g, or t
cacagaacatgaccagtccaccaaattatatggccactactatgagcagtgagttcaggctgtccccttgggacctcgcttgtcccaggcacagtcaccctttccataaccatcactagaaatcccaaagcccagaatcctgctcacctaagctcaaagaaggaagctgttgctggcaggtgctactcagaagtctggcacatctgtgtatttcttgtctaattcttctcattggcctggagcatctcttcacatttttctctagagagcctggcacnnnnnnnnnccccaacaacctgaccattttatcttctcagtctagggcttctggggtcaaaagaacggactgaaatacagtatcacctatatgaatgtctgctcctgagggaagttaacaagaagccagattagatactgactggatttgggtgtctctctcaagtggagaagatgtgaatagaaacagaagtttacaaaacactatagcctaacaaataggtaaaagctgtgatttaaagctggctcaagactggcccaggcataatactgtcaatctaaaggtaaccggcaacatcaaaaagtacatctctaaagaatcaggcttaaagataaacaggagaactggaaatatctaagagtaagaagtgtaaacaatagaaaagaggtagggtttagggttctcatcttgggatttccccaggtcttcaagcttctatccttcctgggttctgggtcatgggcctccagattccggccgttagtcttgagatacctttttcgcttgggtcctctatccatctaggtaggctttgtgacaggggccttccatccttgggttgtaggtcttccagctacaaccctgggctaatcttaggtcgttggccttgtgtcacaagtctcagttcttaggccttccatgtgtcctgtcccaggtcttaagacttctaactcaagccttgagacttccatccaactcaggccttcggtccaattcaggccaccctctgttttcttggctcttgaggcttttgttggtttcaggcctgaggcttctatctatcttgaacatggctttccatcttagcctcgtgccg

SEQ ID NO: 166133 - DNA, 990 bp, Homo Sapiens
  misc_feature (918)..(927): n is a, c, g, or t
gctgggtggcgaattcgcacgaggcccataccagccatttggtgggcagtgccctttccgacccttacctgtcctttgcagcagccatgaacgggctggcagggcctctccatggactggcaaatcaggaagtgcttgtctggctaacacagctgcagaaggaagttggcaaagatgtgtcagatgagaagttacgagactacatctggaacacactcaactcaggacgggttgttccaggctatggccatgcagtactaaggaagactgatccgcgatatacctgtcagcgagagtttgctctgaaacacctgcctaatgaccccatgtttaagttggttgctcagctgtacaagattgtgcccaatgtcctcttagagcagggtaaagccaagaatccttggcccaatgtagatgctcacagtggggtgctgctccagtattatggcatgacggagatgaattactacacggtcctgtttggggtgtcacgagcattgggtgtactggcacagctcatctggagccgagccttaggcttccctctagaaaggcccaagtccatgagcacagagggtctgatgaagtttgtggactctaagtcagggtaaaactggagactgggtgaaagtgactaccagtaaagtgagggaagcctaaataaaaagtatactttttgttcaggggggcctttaaagacttaagattaaatttatttctggaggcactgataataatgtttgagggtttaaatattaaatttaagacttttaacagatgaaaaatggtccccttctttccctaaacaggttccctttcccctggcctgggaatgaagtggcccatcctaccgcatgggccctggggaggatggaccaggaacctatggcttggtggtaatgaagtaaggtttggggnnnnnnnnnntaatccttaaaaggggaaattcggggttcccgggttttccttggggctccaaaccccggttgg

SEQ ID NO: 166134 - DNA, 902 bp, Homo Sapiens
  misc_feature (872)..(872): n is a, c, g, or t
ataccagccatttggtgggcagtgccctttccgacccttacctgtcctttgcagcagccatgaacgggctggcagggcctctccatggactggcaaatcaggaagtgcttgtctggctaacacagctgcagaaggaagttggcaaagatgtgtcagatgagaagttacgagactacatctggaacacactcaactcaggacgggttgttccaggctatggccatgcagtactaaggaagactgatccgcgatatacctgtcagcgagagtttgctctgaaacacctgcctaatgaccccatgtttaagttggttgctcagctgtacaagattgtgcccaatgtcctcttagagcagggtaaagccaagaatccttggcccaatgtagatgctcacagtggggtgctgctccagtattatggcatgacggagatgaattactacacggtcctgtttggggtgtcacgagcattgggtgtactggcacagctcatctggagccgagccttaggcttccctctagaaaggcccaagtccatgagcacagagggtctgatgaagtttgtggactctaagtcagggtaaaactggagactgggtgaaagtgactaccagaaagtgaggaagcctaaactaaaaagtatacttttgtttcagggggcctttaaagacttaagattaaattatatctgaggcactgataatatgtcctgaggttaagcatataaattaagactttaaaaagatgaaaaatggtccccttcttccctaatcagctcccttcccctgactggtatgaagtgcccatcatacgcatgggtcctggaggatgacccaggactaatgcatgtgggaattgagtaaggttttggncccccctcacttattttcttaaagaggaaa

SEQ ID NO: 166135 - DNA, 1333 bp, Homo Sapiens
  misc_feature (1135)..(1135): n is a, c, g, or t
  misc_feature (1146)..(1146): n is a, c, g, or t
  misc_feature (1170)..(1170): n is a, c, g, or t
  misc_feature (1203)..(1203): n is a, c, g, or t
  misc_feature (1210)..(1210): n is a, c, g, or t
  misc_feature (1222)..(1222): n is a, c, g, or t
  misc_feature (1244)..(1244): n is a, c, g, or t
  misc_feature (1249)..(1249): n is a, c, g, or t
ccggggaaaggggaaacttgatttagggaaagaaaggggaccattttttccattcttttaaaggttcttaatttatatttttaaccttcaaaacatattattcagtgcctcagaatataaatttaatctaaagtctttaaagggccccctgaaaacaaaaagtatactttttatttaggcttcctcactttctggtagtcactttcacccagtctccagttttaccctgacttagagtccacaaacttcatcagaccctctgtgctcatggacttgggcctttctagagggaagcctaaggctcggctccagatgagctgtgccagtacacccaatgctcgtgacaccccaaacaggaccgtgtagtaattcatctccgtcatgccataatactggagcagcaccccactgtgagcatctacattgggccaaggattcttggctttaccctgctctaagaggacattgggcacaatcttgtacagctgagcaaccaacttaaacatggggtcattaggcaggtgtttcagagcaaactctcgctgacaggtatatcgcggatcagtcttccttagtactgcatggccatagcctggaacaacccgtcctgagttgagtgtgttccagatgtagtctcgtaacttctcatctgacacatctttgccaacttccttctgcagctgtgttagccagacaagcacttcctgatttgccagtccatggagaggccctgccagcccgttcatggctgctgcaaaggacaggtaagggtcggaaagggcactgcccaccaaatggctggtatgggcacttacattgccaccctcatggtcactgtggatggtgaggtacaggcgcgtgagctcagtgaactgatgatcagtatagcctaacatgttggtgaaattgtgagaccagtccaggttagagtcaatggccccaataccgctgccttctctgtagagatttcggtagatctttgctgcaacacaaggtagctttgcgatttagatccatagagtcttcataaatcaactcccagtacttggttcggctgataccctgtggcatatgctcgggcaaagttactttcactgttgagggctgttaacagctggcactgagctgaggacanggggtgtaggntgggtggggaaagttgtccaggcntgggtggaccacatgggggaagggcagagcttngcccttnttttggccccantcttttttgaggaggccaaggntaccngttccccctgtttggggggtattgttcccgttttacccggcaggccaaattaagggccctcagggagggggtttttttccccca

SEQ ID NO: 166136 - DNA, 1699 bp, Homo Sapiens
  misc_feature (868)..(877): n is a, c, g, or t
ggcagctgtacaagattgtgcccaatgtcctcttagagcagggtaaagccaagaatccttggcccaatgtagatgctcacagtggggtgctgctccagtattatggcatgacggagatgaattactacacggtcctgtttggggtgtcacgagcattgggtgtactggcacagctcatctggagccgagccttaggcttccctctagaaaggcccaagtccatgagcacagagggtctgatgaagtttgtggactctaagtcagggtaaaactggagactgggtgaaagtgactaccagaaagtgaggaagcctaaataaaaagtatacttttgtttcagggggcctttaaagacttaagattaaattatatctgaggcactgataatatgtttgaggttaaaatataaattaagactttaaaagatgaaaaatggtcccttcttccctaatcagctcccttcccctgcctggtatgagttgcccatcatacgcatggtcctggaggatgaccaggactaatgcatgtggtatgagtaggtttggccccctcactatctctagagtgagaatctggctcctgtttccatgggtcaaagccggttgcagagaatctgtagtcactttggagctttagcttctctgccaagccctcaataagccagcaaaccaggactctgccccttctgtttccataggaatcatgttggatagtcagctgtaccaagcccccttggccctctcccatgcacacaaacacctcctagcaagacctgttggttagctggacatgctttggcaattttttttatactaccaagtgaccataaaggcatggcatttgttgtgactggcacccaatgtttgannnnnnnnnnaaaactatccaattaaaattaaggtctgggagtgttctgtttcccattactttaatactcacctcctcccagactttctacacctgttgcacctcaggcagaggatgttctggaccttccccctcttgggtccctactaggaggacctcttcaacagatctgtggggcccagtcattggggttttatcagtgcttaatgtgaactaagttttttacttccacagaatacaagccactaccttctgacctccccaccccccaccaacccccatcttttaatatgctgtggggcatagaactccggaatgaccagcatgatattttcagagtcttgtccccggggtattagcacctctttttgaacagggaattgattcaagattggacatggtctcctctgattatcaggtactggggctgagggcattaaaaatagtaagcctccctcctcgtcccctgcctcaagaaattgcctccttatttatcaacatctttttcctccctttccctgagagctcacagtacaatgtttcagaagccccatttgcacaggttttcagcaactcagaatgctctacttctttttctttgagaaaggattaagatacactcctgctgtgcccccatctttcctccaaactcctgcctgtgtttgtgtggatacccagtcccagaaccacactgttgagttggacacactgtaaacccctgggtaactgtcaagtcatgatggagacttcaggttgttctgtataaaatgcaaaataaatgtttttattaacaatcccgagggggggagaaaagggacaaagaaaacatggt

SEQ ID NO: 166137 - DNA, 1293 bp, Homo Sapiens
gggggaggaccccgggctgggcgccgccgccggttcgtctactctttccttcagccgcctcctttcaaccttgtcaacccgtcggcgcggcctctggtgcagcggcggcggctcctgttcctgccgcagctctctccctttcttacctccccaccagatcccggagatcgcccgccatggctttacttactgcggccgcccggctcttgggaaccaagaatgcatcttgtcttaaatcttgcagcccggcatgccagtgcttcctccacgaatttgaaagacatattggctgacctgatacctaaggagcaggccagaattaagactttcaggcagcaacatggcaagacggtggtgggccaaatcactgtggacatgatgtatggtggcatgagaggcatgaagggattggtctatgaaacatcagttcttgatcctgatgagggcatccgtttccgaggctttagtatccctgaatgccagaaactgctacccaaggctaagggtggggaagaacccctgcctgagggcttattttggctgctggtaactggacatatcccaacagaggaacaggtatcttggctctcaaaagagtgggcaaagagggcagctctgccttcccatgtggtcaccatgctggacaactttcccaccaatctacaccccatgtctcagctcagtgcagctgttacagccctcaacagtgaaagtaactttgcccgagcatatgcacagggtatcagccgaaccaagtactgggagttgatttatgaagactctatggatctaatcgcaaagctaccttgtgttgcagcaaagatctaccgaaatctctacagagaaggcagcggtattggggccattgactctaacctggactggtctcacaatttcaccaacatgttaggctatactgatcatcagttcactgagctcacgcgcctgtacctcaccatccacagtgaccatgagggtggcaatgtaagtgcccataccagccatttggtgggcagtgccctttccgacccttacctgtcctttgcagcagccatgaacgggctggcagggcctctccatggactggcaaatcaggaagtgcttgtctggctaacacagctgcagaaggaagtcggccaagcatgtgtcagcatgagaagttacgagactacatctggaacacactcaactcaggacgggttgttccaggctatggccatgcagtactaagggagactgatccggatatacctggtcaggaagagtttggctgaaacaactggcctatggacc

SEQ ID NO: 166138 - DNA, 241 bp, Homo Sapiens
tcggataagggccaactaacataatcataaagctatgccaacatctctgatttttttcttataaacaattaaaattttcctcaggtttacatagggaatggtaaggctgcattttaaagggtaccacttgggattacttttccttctataatcagaaaaaatattccagctgcactattttcttttcctttctttcttttgatacagatctcactctgtgccctatcgagtaaatcctcta

SEQ ID NO: 166139 - DNA, 957 bp, Homo Sapiens
  misc_feature (916)..(916): n is a, c, g, or t
gtataattgactacaactgccgctcagcttccgggagttcctgctcattttccacaaggccgcggcaggggagctgcaggaggacagtaggctgatggcgctggcaaagctttctgagatcgatgtggccctggagggtgtcaaaggtgccaagaacttctttgaagccaaggtccaagccttgtcatcggccagtaagtttgaagcagagttgaaagctgagcaagatgagcggaagcgggaggaggaggagaggcggctccgccaggcagccttccagaaactcaaggccaacttcaatacatagtcctgctgaccttgccctctgcccacagctgtgcatcacagatgccccgagaagagatgactaggcatcttcatcactgctgtcggtcccctccctgagccagcatctccatccaccaccccgtgccagctcccgtgccagccttcattcctcccagtgtccaagcccctccaggagggtcctggggtgggccagatgcctgcccacctctgtctcctgcctctgctcctctgcccttcttatagccagaacttgtatcttctcagcaaccttcactttgtccttgtccctttaccattccccatcaaagagtagtctgctatatcaatttgtgtagatatgtctgtctttttgggtcctcagagaaaatgcccattttctcggagaattctctgcactcctctctgcttcacattcaacttccctgttctcatctttggtaggattctgccagttgcttttgcatcttctgttcctggggtaatggtggggtcttaatgggaggctggggtgggaccactgcccgtccactctttcaacagggagggaacaggcatgccaccatagtaacacacattaggaggaaagggacagagggtctgcttcttncctggccaacttttcttctggggccccttaggtatttcccc

SEQ ID NO: 166140 - DNA, 1067 bp, Homo Sapiens
  misc_feature (838)..(838): n is a, c, g, or t
  misc_feature (840)..(840): n is a, c, g, or t
  misc_feature (859)..(859): n is a, c, g, or t
gcctctgctcctctgcccttcttatagccagaacttgtatcttctcagcaaccttcactttgtccttgtccctttaccattccccatcaaagagtagtctgctatatcaatttgtgtagatatgtctgtctttttgggtcctcagagaaaatgcccattttctcggagaattctctgcactcctctctgcttcacattcaacttccctgttctcatctttggtaggattctgccagttgcttttgcatcttctgttcctgggtaatggtgggtcttaatggaggctgggtggaccactgcccgtccactcttcaacaggaggaacagcatgccaccacagtaacacacattagagaaaggacagaggtctgctccttcctgccacctttctcctggccccttagcattcccccagtccctccctcttcaccttgctccgtctatgtcttcccagctcagccttttccccactcttaaatactgtactacttcactgtaagaacgaaagaatagttaggataccaatgagtaaaagggttcctgttcactctgactctgtgcaaattgtattacagtagaccgctgacgttcccaagtgacagatccagggcctttcaaacatccccaaagtcatggccatactcaccattagccagtttctaacatctgtttcagggtatccagctgtagatgttcttatcccccatacttgtgagttcttggggttgctcacaaatactaggggtttttgttgtatttttaacaaatatatcctaatgtcatatttattctcttttgtaactgctgtctttacaataaagaaatcatctgcaaaacncnacaatccgtcgacagtganccctgtccggccgcctcgggccctcaaaaagttttccagaccatttcctttgtgcgcgcggggcccagtaaggtaagggaaacatggggcataggctgggttcccaaggaaaaacccggggccatggaactaaggccttgggattcctccaccaaataaaaaaacaccccccggtgggacaaccgaaagcgtttccgtgaacaaaaaa

SEQ ID NO: 166141 - DNA, 471 bp, Homo Sapiens
  misc_feature (358)..(358): n is a, c, g, or t
  misc_feature (365)..(365): n is a, c, g, or t
  misc_feature (448)..(448): n is a, c, g, or t
  misc_feature (456)..(456): n is a, c, g, or t
gtcatgcttctgttcctgggtaatggtgggtcttaatggaggctgggtggaccactgcccgtccactcttcaacaggaggaacagcatgccaccatagtaacacacattagagaaaggacagaggtctgctccttcctgccacctttctcctggccccttagcattcccccagtccctccctcttcaccttgctccgtctatgtcttcccagctcagccttttccccactcttaaatactgtactacttcactgtaagaacgaaagaatagttaggataccaatggagtaaaaggggttcctgtttcactctggactctgtggcaaattgtatttacagtaggaccgctggacgtttnccaagtngacagattccaggggccttttcaaaacattccccaaagttcatggggccttatttaaccatttgggccagtttttttaaactntggttttnagggggtattccggt

SEQ ID NO: 166142 - DNA, 404 bp, Homo Sapiens
  misc_feature (45)..(45): n is a, c, g, or t
gccccgtcctatgtcctcccccagctcagcccttttcccccaacncttaaaaactgtacctacctcactgtaagaacgaaagaatagttaggatacccaatgagtaaaagggttccctgttcactctgactctgtgcaaattgtattacagtagaccgctgacgttcccaagtgacagaacccgggcctttcaaacatccccaaagtcatggccatactcaccattagccagtttctaacatctgtttcagggtatccagctgtagatgttcttatcccccatacttgtgagttcttggggttgctcacaaatactaggggtttttgttgtatttttaacaaatatatcctaatgtcatatttattctcttttgtaactgctgtctttacaataaagaaataat

SEQ ID NO: 166143 - DNA, 928 bp, Homo Sapiens
aggcatcaagctggcaggcatgctcagaggctttctctaaacacctctgttcccatcaaaaaacaagacccaagtctgagaagctgggtaggtttacatggtatcaaaatttaacatctgcagccaaaagccacacctgagctactcagaagcacaagaaagtatgtgtatgtaacacagcaccaatcgcatggtccttttctcatttaaagctttctcaggtaagctttaagagctggaggatacatactgaaaaaaagtctcagtatgaaagaaagaaaaccccagtgttaaaatacatgaatacttcctgtgccatctgaatctctggctcaggatcagatctaatgaccacatctctggtgggcataaaatatttacaaccttgtcaaaggcacagtggcatttaacaactaaagacttgggaatgtacagtaaaagattaattgtaatcattaacctggcttccattggtagaattcactcttgccggataacatgtgagggagatggtgattcggagcctgctggctggttatcaccgcaaagcaagtccttgaaccctggagcaggtgaaagtgaagtcacagaaacgtctcggtgttttttttctgctgatttacatctttcctgcttttttgccaacctgagtcgggatgcggaggatattgggggtttcttccatgaccctgacaagcaggttgtcaatgtagtcttccagctcgcggacctggaactccttcttgcttatcgtttccttctgtttgaggaccagctgaatcagctcatcgtgggtcagctgcgcatatgcaaatgcagggtccgaggggctgtatttcttcatcatgacctcattgttcaagttctcactgatgatggtggcagttcccaagctgcagttagcaaccttggtggccgtggcattcat

SEQ ID NO: 166144 - DNA, 502 bp, Homo Sapiens
ggggacttggaacacgtggtatggcgagcaggaccaagctgtccacctctggaggtatgaaggaggctatccagccctcacagaagtcatgaataaactcagtagaaaataaggaatttttggaatatcgtaaggcaagaagtgacatgcttctctccaggaagaatcagctcctgttggagttcagtttctggaatgagcctgtgccaagatccggacctaatatatatgaactcaggtcttaccaactccgaccaggaaccatgattgaattgtggcaattactgggctcgtgcaatccgcttcagacaggatggtaacgaagccgtcggaggattcttctctcagatagggcagctgtacaatggtgcaccatctttggccttacagggatcttcagaccagggaagacatacggaatgcagcatggcacaaacatggctgggaggaattggtatattacacagttccacttattcaggaaatggaatccagtgagatc

SEQ ID NO: 166145 - DNA, 955 bp, Homo Sapiens
  misc_feature (751)..(911): n is a, c, g, or t
gagaggggggcacgggaccctggcctgctcatccaccaatctctaagccaaacccctaaactcaggagtcaacgtgtttacctcttctatgcaagccttgctagacagccaggttagcctttgccctgtcacccccgaatcatgacccacccagtgtctttcgaggtgggtttgtaccttccttaagccaggaaagggattcatggcgtcggaaatgatctggctgaatccgtggtggcaccgagaccaaactcattcaccaaatgatgccacttcccagaggcagagcctgagtcaccggtcacccttaatatttattaagtgcctgagacacccggttaccttggccgtgaggacacgtggcctgcacccaggtgtggctgtcaggacaccagcctggtgcccatcctcccgacccctacccacttccattcccgtggtctccttgcactttctcagttcagagttgtacactgtgtacatttggcatttgtgttattattttgcactgttttctgtcgtgtgtgtgggatgggatcccaggccagggaaagcccgtgtcaatgaatgccggggacagagaggggcaggttgaccgggacttcaaagccgtgatcgtgaatatcgagaactgccatgtcgtctttatgtccggccacctagtgcttccacttctatgcaaatgcctccaagccattcacttccccaatcttgtcgtagatgggtatgggtttaaaacatgcacggtgannnnnnnnnnnnnnnnnnnnnnnnnnnnnnnnnnnnnnnnnnnnnnnnnnnnnnnnnnnnnnnnnnnnnnnnnnnnnnnnnnnnnnnnnnnnnnnnnnnnnnnnnnnnnnnnnnnnnnnnnnnnnnnnnnnnnnnnnnnnnnnnnnnnnnnnnnnnnnnnngtagtcccggacaacgggaagcgacggcaggaaaagggggaacc

SEQ ID NO: 166146 - DNA, 1797 bp, Homo Sapiens
  misc_feature (1006)..(1117): n is a, c, g, or t
  misc_feature (1121)..(1149): n is a, c, g, or t
  misc_feature (1154)..(1154): n is a, c, g, or t
  misc_feature (1160)..(1173): n is a, c, g, or t
  misc_feature (1192)..(1200): n is a, c, g, or t
  misc_feature (1253)..(1313): n is a, c, g, or t
  misc_feature (1338)..(1346): n is a, c, g, or t
  misc_feature (1425)..(1469): n is a, c, g, or t
  misc_feature (1484)..(1484): n is a, c, g, or t
  misc_feature (1496)..(1505): n is a, c, g, or t
  misc_feature (1699)..(1707): n is a, c, g, or t
acgataagggtacaatgcggtgctggggctggacacccaaggcgatcacatggtaatgctgtctgcgattcctggggaagctgagaacaaagtgagttcagagcctagcggcgtcacctgtggtgctggaggaccggaggactcaaggtgcaacgtccgagagagccttttctctctggatggcgctggagcacactgtccctgacagagaagaggagtattacacagagccagaagtggcggaatctgacgcagccccggacagaggactccaataacactgaaagtctgaaatccccaaaggtgaactgtgaggagagaaacattacaggattagaaaatttcactctgaaaattttaaatatgtcacaggaccttatggattttctgaacccataacggtagtgactgtactctagtcctgttttacaccccgtggtgccgcttttctgccagtttggcccctcactctaactctctgccccgggcatttccagctcttcactttttggcactggatgcatctcagcacagcagcctttctaccaggtttggcaccgtagctgtccctaatattttattatttcaaggagctaaaccaatggccagatttaatcatacagatcgaacactggaaccactgaaaatcttcatttttaatcagacaggtatagaagccaagaagaatgtggtgataactcaagccgaccaaataggccctcttcccagcactttgataaaaagtgtggactggttgcttgtattttccttattctttttaattagttttattatgtatgctaccattcgaactgagagtattcggtggctaattccaggacaagagcaggaacatgtggagtagtgatggtctgaaagaagttggaaagaggaacttcaatccttcgtttcagaaattagtgctacagtttcatacattttctccagtgacgtgttgacttgaaacttcaggcagattaaaagaatcatctgttgaacaactgannnnnnnnnnnnnnnnnnnnnnnnnnnnnnnnnnnnnnnnnnnnnnnnnnnnnnnnnnnnnnnnnnnnnnnnnnnnnnnnnnnnnnnnnnnnnnnnnnnnnnnnnnnnnnnntttnnnnnnnnnnnnnnnnnnnnnnnnnnnnnttggngggcgnnnnnnnnnnnnnnaaaaaattttttaaaaaannnnnnnnngggggcggggccccccaaaggaaaaggaaaaaggggccatttctttttttccnnnnnnnnnnnnnnnnnnnnnnnnnnnnnnnnnnnnnnnnnnnnnnnnnnnnnnnnnnnnncccccgggggggaacaacacaaagnnnnnnnnnaaaaaatctcccaaaagggggatttcttggggggggctcttctccgggggatcttcacccacccggaggggtcctccannnnnnnnnnnnnnnnnnnnnnnnnnnnnnnnnnnnnnnnnnnnngccgccgtgggggantttttttatttnnnnnnnnnngaggggtgggggagaatttattttttttaaaaactctttcttccgcgcccccgccccgcgggaagaaaaccccccctccaccacacaacggggcgggtggggagagaaaccctgttatatccccccgcgcgggggcggattcaaacacaccccactttgggcccaccctttggcggttataaaaatatatattnnnnnnnnnggcggcgaaaaaaagggggggcgcacaacaaaaaaatagcccccctcttttgcgggccccccttttttataaaacaaaagtggggggaaa

SEQ ID NO: 166147 - DNA, 690 bp, Homo Sapiens
  misc_feature (585)..(585): n is a, c, g, or t
ccctcataagcccaaaggagaagtggagtcagtgccctcacgggcgtccctctctgtggtcatcctggctgaagatagcccttcggagcagctgtttggaggaggaagaacctatgaatctctaaggctctggaaccattctgcccgcccaccatgcccttgggacctggttctcttctaacccctggcaatagcccccattcctgggtctttagagatcctgtgggcaagtagttggaaccagagaacagcctgcctgctttgacagttatcccagggagcgtgagaaaatccctgggtctagaatgggaactggagaggaccctgagaggagacgggctgggcggcgacccccacagggctctcgagaacagattctcccctccagtatgggccctggctgtggcccccattcctcaggactgcacagaggaggactggctccggctccgtcgggctcacccttaaccactattcctggctctgcaaaccccagactttgcacacagccccaggctccacacagaaatgttgaacttggcctcagacaggctggcccttcctaggctctaggggctaaggggngagtggggagccaagaggtcccatattcctgagtgcaggggtagtccctcttcaccttgcctgctgcgtgtgggatcagtaatattcagattttgcccaacaatt

SEQ ID NO: 166148 - DNA, 741 bp, Homo Sapiens
  misc_feature (574)..(642): n is a, c, g, or t
tgcacacgccgaaccaccacacagaaatgtgaacttggcctcagacaggctggcccttcctaggctctaggggctaggggggagtggggagccaagaggtcccatattcctgagtgcaggggtagtccctctcacctgcttcctcagacgactctggaagcttccctctaccaccgggcactgagacgaagctccctgacagccgagactggcagccctccatctggtccgtaccctcgccagaggcccccctacatcaacctcctggcgatgccctggtggagcagatgggtgctctgggagtcctgtgcttcctgatccaatggtgccaaacccttcatctcccccagaagcgcagcatacccctggggacccctcggccactgcccactcggggagccttctctgtttctggggcctcccccaccatagctctgattcccaccccacataggaatagcctgactgagggggaaggggtgggagagaagatacagacatggaggaggggaggctgctctggcaaagtcttcaaggcttttgggggtccaggcctggggtcaagaaggaaaannnnnnnnnnnnnnnnnnnnnnnnnnnnnnnnnnnnnnnnnnnnnnnnnnnnnnnnnnnnnnnnnnnnnctttcctaggacccaccataccctgtgtatgtatgcatgtttttgtaaaaaggaagaaaatggaaaaaaatctgaacaataaatgttttatttgcttta

SEQ ID NO: 166149 - DNA, 434 bp, Homo Sapiens
  misc_feature (28)..(28): n is a, c, g, or t
  misc_feature (39)..(39): n is a, c, g, or t
  misc_feature (64)..(64): n is a, c, g, or t
  misc_feature (78)..(78): n is a, c, g, or t
  misc_feature (104)..(104): n is a, c, g, or t
  misc_feature (109)..(109): n is a, c, g, or t
  misc_feature (313)..(381): n is a, c, g, or t
  misc_feature (396)..(396): n is a, c, g, or t
  misc_feature (418)..(418): n is a, c, g, or t
agggttcctctgggaaaccctgtgcctnccctgaatccnaatggttcccaaaacccttcatctncccccaaaaaaccncagcaataccccccgggacccccctnggccnactgccccactcggggagcccttcctctgtttcctggggccctccccccacccatagcctctgattccccaccccccacataggagtaccctgactgagggggaaggggtgggagagaagatacagacatggaggaggggaggctgctctggcaaagtcttcaaggcttttgggggtcccaggcctggggtcaagaaggaaaannnnnnnnnnnnnnnnnnnnnnnnnnnnnnnnnnnnnnnnnnnnnnnnnnnnnnnnnnnnnnnnnnnnnctttcctaggacccnccataccctgtgtatgtatgcntgtttttgtaaaaagg

SEQ ID NO: 166150 - DNA, 631 bp, Homo Sapiens
ccccacgaaaccggaaatggggatacatcagaggtgatggatactcaggcgggctccgtggatgaagagaatggccgacagtttgggtgaggtagagctgcaatgtgggatttgtacaaaatggttcacggctgacacatttggcatagatacctcatcctgtctacctttcatgaccaactacatgttttcattgcaacgtctgccatcacagtgggaatacctatttcctccggaagcaagcaaacttgaaggaaatgtgccttagtgctttggccaacctgacatggcagtcccgaacacaggatgaacatccggaagaccaattgttctccaaagataaggatattataccatttatttgataaatactgggagtgcatgacaaccagacagagacctgggaaaatgacttggccaaataacattgttaaaacaatgagtaaagaaagagatgtattcttggtaaaggaacacccagatccaggcagtaaagatccagaagaagattaccccaaatttggacttttggatcaggagcttagtaacattggtcctgcttatgacaaccaaaaacagagcagtgtggtgtctactagtggggatttaaatgggggaatgcgcagggagc

SEQ ID NO: 166151 - DNA, 755 bp, Homo Sapiens
  misc_feature (661)..(710): n is a, c, g, or t
ccttgccaagaaaaaaggcgtaaagcggaaagcagatactaccacccctacacctacagccatcttggctcctggttctccagctagccctcctgggagtcttgagcctaaggcagcacggcttccccctatgcgtagagagagtggtcgccccatcaagcccccacgcaaagacttgcctgactctcagcaacaacaccagagctctaagaaaggaaagctttcagaacagttaaaacattgcaatggcattttgaaggagttactctctaagaagcatgctgcctatgcttggcctttctataaaccagtggatgcttctgcacttggcctgcatgactaccatgacatcattaagcaccccatggacctcagcactgtcaagcggaagatggagaaccgtgattaccgggatgcacaggagtttgctgctgatgtacggcttatgttctccaactgctataagtacaatcccccagatcacgatgttgtggcaatggcacgaaagctacaggatgtatttgagttccgttatgccaagatgccagatgaaccactagaaccaggggcctttaccagtctctactgccatgccccctggcttgggccaaatcgtcttcagagtcctccagtgaggaaagtagcagtgagagctcctctnnnnnnnnnnnnnnnnnnnnnnnnnnnnnnnnnnnnnnnnnnnnnnnnnnagctcagactcagaggggatcctcagagcgaccgcagcaacaacc

SEQ ID NO: 166152 - DNA, 2804 bp, Homo Sapiens
  misc_feature (182)..(182): n is a, c, g, or t
agtccctccttagttgccccctcagctgagccgccgccattttcttgctggtcccccgtctccagagcgccccaagctgcccggagctctccggagaggccccaaagagactgctttcgtgcccgccaggcagggggtttgtcgcctggaggccccagaggaacggcctccccccaacttanccggttatgctggaccgggcggtgaggggaaccgaggccacccggactttccgcggctgaggcagccgccggttccttgcggtcaagatgctgcaaaacgtgactccccaccataagctccatggggaagggaatgcagggttgctggggctgggcccagaagcagcagcaccagggaagaggattcgaaaaccctctctcttgtatgagggctttgagagccccacaatggcttcggtgcctgctttgcaacttacccctgccaacccaccacccccggaggtgtccaatcccaaagaagccaggacgagttaccaaccagctgcaatacctacacaaggtagtgatgaaggctctgtggaaacatcagttcgcatggccattccggcagcctgtggatgctgtcaaactgggtctaccggattatcacaaaattataaaacagcctatggacatgggtactattaagaggagacttgaaaacaattattattgggctgcttcagagtgtatgcaagattttaataccatgttcaccaactgttacatttacaacaagcccactgatgatattgtcctaatggcacaaacgctggaaaagatattcctacagaaggttgcatcaatgccacaagaagaacaagagctggtagtgaccatccctaagaacagccacaagaagggggccaagttggcagcgctccagggcagtgttaccagtgcccatcaggtgcctgccgtctcttctgtgtcacacacagccctgtatactcctccacctgagatacctaccactgtcctcaacattccccaaccatcagtcatttcctctccacttctcaagtccttgcactctgctggacccccgctccttgctgttactgcagctcctccagcccagccccttgccaagaaaaaaggcgtaaagcggaaagcagatactaccacccctacacctacagccatcttggctcctggttctccagctagccctcctgggagtcttgagcctaaggcagcacggcttccccctatgcgtagagagagtggtcgccccatcaagcccccacgcaaagacttgcctgactctcagaaacaacaccagagctctaagaaaggaaggctttcagaacagttaaaacattgcaatggcattttgaaggagttactctctaagaagcatgctgcctatgcttggcctttctataaaccagtggatgcttctgcacttggcctgcatgactaccatgacatcattaagcaccccatggaccaacagaaacgggaagagaacaccaacacatacgtccagagtgggtacttgtctgtacgcttcacccgaacagttggaaggatctgagtatgatgccaagtcagatatgtacagcttgggtgtggtcctgctagagctctttcagccgtttggaacagaaatggagcgagcagaagttctaacaggtttaagaactggtcagttgccggaatccctccgtaaaaggtgtccagtgcaagccaagtatatccagcacttaacgagaaggaactcatcgcagagaccatctgccattcagctgctgcagagtgaacttttccaaaattctggaaatgttaacctcaccctacagatgaagataatagagcaagaaaaagaaattgcagaactaaagaagcagctaaacctcctttctcaagacaaaggggtgagggatgacggaaaggatgggggcgtgggatgaaagtggacttaacttttaaggtagttaactggaatgtaaatttttaatctttattagggtatagttggtacaatgcttcgttgtatttagtaagcctttacaagacttgttaaagatgtcagagtgccccaagctgccgttccttcccttcctgccccacaagctccttttcctgaatttcctacctaaatattaaccatatgcctagtctctgaaactaaaaacttggacctcatcctcaattattttctcctttcaactctgttgaccctctgtctggtcttcctctagaaggttctaccgcagaaattgatgtgtgctccctgccctcgtcactgcccaagcccgggcctgcacatactcactggactgttccagttttgacagctgccagtcttcctgcccctttcacactgcagctgaagttcattacctgaaggacgcctcatcatttcattccttggctccaaaccttctgctgcctctaagataaaagctcaacttcttaacagtgtacagtgtgcaacttccaacctttttatctgttctctccaccttcagtttagcgtcattccaaaaccacacccttgcaaagctttgtactccgcaccccagatgatctccaggcagctcagatctctttcctgcctttgccctgcactgttccccggtacttcctcctttattgtagcactcagctccccagccaatctgtacatccctcagaggcagcgatctgatgaattggtttttgaatcccagaaagggtctgccatggagttggcagtcatcacggtagatggcgtatgattttgctgaattttaaataaaatgaaaaccataaattacatgatgccttttattggacacttggaaaactgggcct

SEQ ID NO: 166153 - DNA, 970 bp, Homo Sapiens
aagtagcgaggcctgggtggcgaattcggcacgaggctggagtggagcagcctctagaacgagctggaggattctgcctaccgatacagagccttcgagtcgtccggggccgccattacaatccacctccatccgcttggaaatggccttcgtcccggcctatgactggtcccagcgggcagtacagaccccctagaagcccctggagctcccctttttcgggccccgcccaatcctcggagtctgtccaccccctctactccgccctcaagaggatttcaaagatggaggcggcggctccctaaaccacttttcgtgttcatccgcctccatccgagatcgaaacgggacctcgtcggccccgtaggggcccgacaagaagagggaatccctgcagaccaacagcgggctatattgacgacggtgtctgagatcggggaccgtcttttgaagagtcagtccctccttagttgcccgcctcagctgaggccgccgccattttcttgctgtccgccgtctgcagagcgcgccaagctgcccggagctctccgagaggccccaaagagactgctttcgtgccggccaggcagggggtttgtcgcctggaggcccaagaggaacggcctccccccaacttagcgggttatgctggaccgggcggtgaggggaaccgaggccacccggactttccgcggctgagggcagcgccggttccttgcggtcaagatgctgcaaaacgtgactccccacaataagctccctggggaagggaatgcagggtttgctgggggctgggcccagaaagcagcagcaccaaggaaagaggattcaaaaaaccctcctctccttggatgaagggccttggaaagccccaacaatgggctttcggtggcctggctttggcaacttaaacccctgcccaaaaccccaaaacccccggggagggggtcccaatccccaaaaaaggccc

SEQ ID NO: 166154 - DNA, 377 bp, Homo Sapiens
ccaggattacggcgttgtgggtggcagcaggatacgtggaaacagtgtcttttacaactcttccctatgttagcctttgtcttgcaagaggaacttgaagtctgaggagtggcttccacttgccctatgtcaggctcactctggagctcgtgggacaggtggctgtgtctcctggaccccagttggcatcctggatgtctcttctcctccttaaaatgcaccatagtcaatggcccctctggacaaggcaactttgagaccaatggaagcagccagagagctgtgtacttgcgcattgacgagctctgtttttctggccctcctaacaaataagatcctggtagtgttggccccttatgggataacctctagagtcg

SEQ ID NO: 166155 - DNA, 811 bp, Homo Sapiens
gggcctcttcaagttgactgcagtccatcacccacggccattattaatttgtttttgcaaaggccaggaaggtgaatctaatggagatggaaaccaccacacctgcttccctggtctctgatgttggtgttaacctctgcaattcctcaagcaaagcactccttctatcaggctcactgtcttgctggagggaggaagttccacaggctctcacttggttctttctgccgtaacaacccttactcctccggccaaggagccaatgtgagcattcagctggcagctaagaatgtgtatcccaataaacagggcagacctacagacccactggacccactagagatggacttgggccacagtgccttccatgacttcaataaacagaggggtgtggtgatcttgacaaagtcctggcgtcaatgtcagtgtccggatacacaccatgttcccgtcctcaaaaagcctctctgtacccctctatgttggtgacacaacctctggcaaatggccacacactcctttggggacagagtacgagcgtaactggtgcggagtgggtggcatgctttatattgggagagccgcacgccctacggcttccagcctcctcttcattttggcagctgtgagtctgaatttcactcaaatctggaaactgtggtgagacactgtgggaagcttgttgctccgaatggcataaacctgtacacggtcccctgaatcgttaccccactggggacaaacaaccccccctaacttgaacctttggtccaaaaaatacccaaccaatcccccagggtgggaataatcc

SEQ ID NO: 166156 - DNA, 651 bp, Homo Sapiens
aatgccgagtgaagacattctgggcctggacaggctgcaaaaggcaaaagctgtgcctggaaaagtcgccatgcggcatgagcttggcttaaagaggccactgcaaggcaggagctgggcctgtagaggctgccgaaaggcaggagcttcgcctgaggatgccacagtgagacaccatctgggtctggagggtccactgtgaggcagaggctggcctgtagagtccgacagtagacagaagttaggcaaaagcctgatttgaggaagttttgggcttcaagagtcagccacgaggcaggcactaggcctggaaatggcctcacagtcataagttgggcctaaatgggccactgtgagggaggagctgtgcctgttgaggctgctggcaggcaggcagaaatttggcctggggcagctgccatgaggcaagagctgggcctggaaaaagcccctgggaggcaagagcagggcctgcagaggctgttctcaagtcaaagctgggcctgttgatgccaccgggaagcagaaggtgggcctggagagtttgacttgaggaagttttgggcctacattgccgccattagctggacaggaactgggccaaaaaaggctgtttgtggaggtaggactcctgtttggggaggtagcact

SEQ ID NO: 166157 - DNA, 426 bp, Homo Sapiens
taacaactacataatggtggaaatattccaaaattcaatattttgggatttatacacaaaagataaacaaattagaggccaagaggctgccggaagggaaaaacggggcctggaatggccgacgtgaggaatgagctgggcctaaagaggccactggcaggcaggagctggacctgccgaagtggccgaaaggcaggagctttggactggggaggccgcagtgaggcgagagctagctgggcgtggagagtccgctgtgaggccgaggccgaggccgggcccgtgcaggccttcgagaggcaggaggccgggcctgcaaaggccgactggagatcaagttctgcgcctgaagaggctgccaaaagtcaaaagcggggcctgggaaggccgccgagagccatgagctgggctgggccgaaagaggcc

SEQ ID NO: 166158 - DNA, 1033 bp, Homo Sapiens
  misc_feature (995)..(995): n is a, c, g, or t
tagcgaggcctgggtggcgaattcggcacgaggcctgcctgccagcagcctcaacaggcatagctcctccctcacagtggcccatttaggcccaactcatgactgtcgggccatttccaggcctagtgcctgcctcgtggctgactcttgaagcccaaaacttcctcaaatcagccttttgcccaacttctgtctactgtcggactctacaggccagcctctgcctcacagtggaccctccagacccagatggtgtctcactgtggcatcctcagtcgaagctcctgcctttcggcagcctctccaggcccagctcctcctgcctcccagtggcctctttcggcccagcccagctcatgcctcccggcggccttcccaagccccgcttttgactttcggtggcctctgcaggcctcgacaaggcccagcctcctgcctcccgaaggcctgcacaggcccagcctctgcctcacagcggactctccacgcccagctagctgtcgcctcattgcggcctcccgagtccaaagctcctgcctctcggccacttcggcaggcccagctcccacctgccagtggcctcttcaggcccatggggctcgttcctcacaacggcctttccaggcccagtttttcccttccggcggcctctccgggcccagaacctcctcaagtcggcctctccagagccacttgcaccctccgggcgtcctctccgggcccagctcttcttcctggttgcgtctccaggcccgactcctgcctctcacaacctctttggactcagtgcctacccatctcctggcggcattggtcggcccacagcttcctcaagccaagctccccaggcccaggtcagggcctcacggtgggcctctccaggatgagctcctgccctccgatggcatctcccaggcccaaatgggtttctcccgggtccggtggggctcccttcccacgccaagctttggggcctccccgggcggacgctgtgnaaggccacaaaattttgttccctgaaaattcctaccct

SEQ ID NO: 166159 - DNA, 1341 bp, Homo Sapiens
gggattgcgagccgaacccgggagctggcgccatggtgctgttgcacgtgctgtttgagcacgcggtcggctacgcgctgctggcgctgaaggaagtggaggagatcagtctgctgcagccgcaggtggaggagtccgtgctcaacctgggcaaattccacagcatcgttcgtctggtggccttttgtccctttgcctcatcccaggttgccttggaaaatgccaacgccgtgtctgaaggggttgttcatgaggacctccgcctgctcttggagacccacctgccgtccaaaaagaagaaagtactcttgggagttggggatcccaagattggtgccgcaatacaggaggagttagggtacaactgccagactggaggagtcatagctgagatcctgcgaggagttcgtctgcacttccacaatctggtgaagggtctgaccgatctgtcagcttgtaaagcacagctggggctgggacacagctattcccgtgccaaagttaagtttaatgtgaaccgggtggacaatatgatcatccagtccattagcctcctggaccagctggataaggacatcaataccttctctatgcgtgtcagggagtggtacgggtatcactttccggagctggtgaagatcatcaacgacaatgccacatactgccgtcttgcccagtttattggaaaccgaagggaactgaatgaggacaagctggagaagctggaggagctgacaatggatggggccaaggctaaggctattctggatgcctcacggtcctccatgggcatggacatatctgccattgacttgataaacatcgagagcttctccagtcgtgtggtgtctttatctgaataccgccagagcctacacacttacctgcgctccaagatgagccaagtagccccccagcctgtcagccataattggcgaagcggtaggtgcacgtctcatcccacatgctggcagcctcaccaacctggccaagtatccagcatccacagcgcagcatccttggggctgaaaaaggccctgttcacagccctgaaaaccaagggttaccactcccaaaacatggactcattttcccactccacctttcatttggcccagcacctggccacgaacaaatgtccgcatcctccctataccctgccaaacacctggcacaattgccctccacaaacccgactgccttctccgcgaggcggcccccccattgttatttcgttggagcaccctttcaaaaaatatctttgaaaaagcgactgggtcctttccaagaaaaattgggagaaaaaccccacgaaaacaaacctcggatgttccacgaaag

SEQ ID NO: 166160 - DNA, 782 bp, Homo Sapiens
gggattgcgagccgaacccgggagctggcgccatggtgctgttgcacgtgctgtttgagcacgcggtcggctacgcgctgctggcgctgaaggaagtggaggagatcagtctgctgcagccgcaggtggaggagtccgtgctcaacctgggcaaattccacagcatcgttcgtctggtggccttttgtccctttgcctcatcccaggttgccttggaaaatgccaacgccgtgtctgaaggggttgttcatgaggacctccgcctgctcttggagacccacctgccgtccaaaaagaagaaagtactcttgggagttggggatcccaagattggtgccgcaatacaggaggagttagggtacaactgccagactggaggagtcatagctgagatcctgcgaggagttcgtctgcacttccacaatctggtgaagggtctgaccgatctgtcagcttgtaaagcacagctggggctgggacacagctattcccgtgccaaagttaagtttaatgtggaccgggtggacaatatgatcatccagtccattagcctcctggaccagctggataaggacatcaatacccttctctatgccggtccagggaagtggtaccgggtatcactttcccggagccgggggaagatcatcaaccgacaatgcccacataccggccgtcttggcccagtttaattggaaaacccgaaggggaactggaaggaggacaaagctgggaaaaactgggaaggacctgaccatgcgatggggggccaaggcctaaag

SEQ ID NO: 166161 - DNA, 804 bp, Homo Sapiens
  misc_feature (344)..(360): n is a, c, g, or t
ggcaggaagctgtgaaattagaagtaattttaaagcatactttacacctctatataatcaaagtaagggcaagataaaacttgtcagtaaaacatgttttattattttttagataggtagcctgcaacataaaatatattttgaaagctgttaagggggtgtataatctgttaaaaaaataccatgattagtatttcacatttagtgactcagatccctttgtgtaagtcctttgcgttgtgcaaagaagtttttctatgagatgagaattatgaacacttcatataggtaaattccataggttgagctggggcagaaattaatggctcctggagattgcatcnnnnnnnnnnnnnnnnngagcttagaattcccatttggacagaatttagcttttgtgctgttgattaattctgtactaaactggtagccaattgttcacttctaaatggaagggaaaaagttacccacacaagttagaaaatgatttaccgaattatttttttgagttagtatgtatatactgttttaaatcagtaatgtttgttccttttgctgcccatttggggagtatgtgggcaattcctagtgctcttgtatgacattactccttcttgaaacttgtatatgccagaaaagtatatataaaaagatgcctggggggtaacctttgtatctgagattctgaattcattatgggaccttttagaaatcctatttagaataattggggtccatactagggggctccaattacctctgaaccttgggggggcttaatccccttaaataaattgcttttag

SEQ ID NO: 166162 - DNA, 631 bp, Homo Sapiens
tagcatcaacgcgtccgcaggtgcgctgaaacaccggaagctcgggatcacgtgaactccatggtggacatctccaagatgcacatgatcctgtatgacctgcagcagaatctgagcagctcacaccgggccctggagaaacagattgacacgctggcggggaagctggatgccctgactgagctgcttagcactgccctggggccgaggcagcttccagaacccagccagcagtccaagtagctggacccacgaggaggaaccaggctactttccccagtactgaggtggtggacatcgtctctgccactcctgacccagccctgaacaaagcacctcaagtgcaaggaccaaagggggccctggcttggagtgggttggcttgctgatggctgctggaggggacgctggctaaagtggggaggccttggcccacctgaggccccaggtgggaacatggtcacccccactctgcataccctcatcaaaaacactctcaccatgctgctatggacgacctccagctctcagttacaagtgcaggcgactggaggcaggactcttgggtccctgggaaagagggtactaggggcccggatccaggattctgggaggcttcagttaccgctgg

SEQ ID NO: 166163 - DNA, 751 bp, Homo Sapiens
cctcctgttgaaaaaaaagataaagaggagactgtatccaagtgagttacccgtctgcttttagcaaggttagttgcatccaggcaagtcagtcctctgctcgcatctcagtcttggtcttctagcaggagtatgtctccaaaccttttaaacagagcatccccgcttgctttcaacattgcaaattcgagcagcgaagccgactgcccagacccatttgcaaatggtgctgatgtccaagtcagcaacatagactacagattatcccggaaggagctgcagcagctccctgcaggaagcatttgccaggcatggcaaggtgaagagtgttgagctcagcccccatacagattatcaactcaaggctgttgtgcaaatggaaaacttacaagatgcgatcggtgcagtgaatagcctccacagacacaaaattggcagcaaaaagatcctggtctcacttgccaccggggctgccagcaaatcactctctttactgaggtaagaaacaagcaagctgtttatttcaggaaataacatttgacccagaaacaatttagaaataataaaaatagattcaatcacattcccacccccttgtgatgattgcatgtggaataatgcttattctagattgatacagttagaaacaagccatttgactcttgtctaagtcattaatcaaagctggaatacagcttaaacttgacaggcacttgggagtaaaataatacgcacacaccaggagtccgga

SEQ ID NO: 166164 - DNA, 718 bp, Homo Sapiens
tgagtcgctctcgaggattcacgagtgcacacacacagaagacacaacatccaaaaaaggagtgtgcgtgtgtgtggaataaccacccagccgcttgtcacactgccccataatctccaatggacttttaaaaccaacaaaagccgaaacggtggcccagaggctgctcctttgttatcccatgctttctaattcaagtcgaatgactgctttggtcacacttttttagtcacagtaaaaaatcacgggcgccctctggcatgcatgacatgcgataatcagaaaaggtaccactcccgtgttttttgtttctgaatatgtctgttcacggaccacaagggcatgggtcaccaatccgaagtggatgggactaaaccattgcgccttagaggccctcaattcaactacgaaccctttaacagcaacagcattaatatacgcttttggagctggaattaccgcgggtgctggcaccagacttgtcctccaattgttactcgattttggatgggtttaaatatcccccattgaaaacgacaatgcaaaagcactgtcggctctatttcttttcgctgcctcatcttttttttttgacattgggcaatttgcgcgcctgttgccctccgtagaagtggtagctattctcaggctccctctcggaatcgaacctaatccccgatccgtaaagccatgcagtccactaacggcatcgtggcta

SEQ ID NO: 166165 - DNA, 573 bp, Homo Sapiens
acgcgaatgaggcgctggagtggcgatcatcatgaagaagggctcaaagttggacttgtagtccagaaagtccaaggagacattagccaaaacatctgtcaggtagtccacactatagttttcaccatgcttccgtgccttcccattgatagacagggtgtaattataatacttagaattcttttccaaggcataccagtaactccaacccagaggaacgtgttctagtccacctgcatctggggctccgtactcatttaaatatttccctgcaaaaaaggtctgataaccacacattgatctgagaattgctgggaaagtatttggttcttggatcttctgccaggacttactactgcagttcccctccagagtgttgttcacaacgtgattgattatgtgggtactttcctgtcaggatactggctctgctggggcagcagagagcacttggcacataagcactggaaaaagtcatccccatctctccgatgagagctttggttttctttagtggtgtcatgccgccgagcacttcgtcctggtcgtccgtgaggagcagcaccaccagga

SEQ ID NO: 166166 - DNA, 761 bp, Homo Sapiens
  misc_feature (708)..(716): n is a, c, g, or t
ggggtgttggatttagaagtgaatgtgtttggaatatggcctacagagaatagaaacaaatccatgtaaacaattttgaaggaggcatgggagctaaaaatcctgtgatactaagatctcagtcatatgaattacaacgtagtatttactggcaagaaggagaaagttgaaggactcagctaaaggagtacagcaattgtagtaactgacacatcctctctttgcaagctgctgactgggcacactcatgccaagtttcagaattattggtcttctgggtttttgctttttaaaagaggtgtgggagcagaggaatggaaacaatcgtgagtttttgagctagggaaagttggagctcctttaatctttttaaaggatcagtgctgccctaagtgaataaactcaattgtccatctttattttagagttttaatgaattcaaggaagggagcatagcatatctgtggcaaactattttccactcaaatcctgagttattgctgcatgctttaatttcttccctttcagcatctgagaaccttaaagccaatgtctgcgatctttttttggatatttatacttttagatatatagtacctttaagtagcagtatgggacaaggcttgtaaatgttttgtctaatgttctattgtcaccttttatgcatttatcacttccaaatctaactttgcacaagtaacccatgtnnnnnnnnntgtacatttttcaaaagttgtaaataaaaataaccttaaaatttc

SEQ ID NO: 166167 - DNA, 964 bp, Homo Sapiens
  misc_feature (335)..(335): n is a, c, g, or t
gggccctggaaagcactgtgtccagtgtgggcgccttgcacgccctacgcccgcggctcagctgcttccaccagctcctgctggagcctcccaagctggagccgctacagatgacatggggcatgctggctccgcctctgggcaacacgcggctgcacgtggtcaagctcctggccagtgccctgagcgccaatgatgcagccctgacgcacgagctcctggcactggacgtgcccaacaccatgctggacctcttcttccattatgtcttcaacaacttcttgcatgcccaagtagagggatgcgtgagcaccatgctgagcttggggccaccntcctgacagcagccctgagacgcccatccaaaaccctgttgtgaaacattctgctgcagcagtgccgcctggtggagcggatcctgacgtcctgtggaggagaacgaccgtgtacagtgtgcgggaggccctcgggaaaggctacatgggtcacctgacaagagtggccggtgccctggtgcagaacacggagaaggggcccaatgcagagcagctgcggcagctgctgaaggagctgccccagcgagccagcaggagcagtgggaagccttcgtatcggggcccctggcggagaccaacaagaagaacatggtgggacctgggtgaacacccaccacctacccatcctcccagtgaaccatgaaggacgtaccggccctaagggaggtccaaccttcccctggagggaagggctgtgccttgcaagcagggcccttccacggggacccttccgaaatgtcccggggaaggcgacccctcttggcccgtttcgattgggaacctcctctcgcgggctttccgaacgtggattcacacggcagtttcttgcgcgcgtatacccccggacgagcgactaaatccgtgcgcgaacactgtaatactcgcacattcttgcaccataataataa

SEQ ID NO: 166168 - DNA, 908 bp, Homo Sapiens
catcggcatgaaggcgtcttcaaattcctgcgctccgaggctgtggcccaactatgggcccaaaagaaaaagaacagcaacatgacctacgagaagctgagccgggccatgaggtactactacaaacgggagatcctggaacgggtggatggccggcgactcgtctacaagtttggcaaaaactcaagcggctggaaggaggaagaggttctccagagtcggaactgagggttggaactatacccgggaccaaactcacggaccactcgaggcctgcaaaccttcctgggaggacaggcaggccagatggcccctccactggggaatgctcccagctgtgctgtggagagaagctgatgttttggtgtattgtcagccatcgtcctgggactcggagactatggcctcgcctccccaccctcctcttggaattacaagccctggggtttgaagctgactttatagctgcaagtgtatctccttttatctggtgcctcctcaaacccagtctcagacactaaatgcagacaacaccttcctcctgcagacacctggactgagccaaggaggcctggggaggccctaggggagcaccgtgatggagaggacagagcaggggctccagcaccttctttctggactggcgttcacctccctgctcagtgcttgggctccacgggcaggggtcagagcactccctaatttatgtgctatataaatatgtcagatgtacatagagatctattttttctaaaacattcccctccccactcctctcccacagagtgctggactgttccaggccctccagtgggctgatgctgggacccttaggatggggctcccagctcctttctcctgtgaatggaggcagagacctccaataaagtgccttctgggctttttct

SEQ ID NO: 166169 - DNA, 805 bp, Homo Sapiens
  misc_feature (516)..(577): n is a, c, g, or t
  misc_feature (634)..(693): n is a, c, g, or t
  misc_feature (728)..(756): n is a, c, g, or t
ggggaccagcagcaggaggagaaagaacatggcgggcgcatcagagctcgggaccggcccaggagcagcgggtggagatggagatgattcgctatacccgatcgcggttttaatcgacgagctccgcaatgaagacgtgcagctccgactcaacagtattaagaagttatcaacaattgccctagcacttggagtagaaaggacccgaagtgaattgttgccatttcttacagatacaatttatgatgaagatgaggtactattagctcttgctgagcagctgggaaatttcactggcctagtgggaggtcctgactttggcccactgtctgctgcctcctttggaaaatctggcaactgtggaagagactgttgttcgtggacaaggctgtggagtccctgaaacagatctcccaggagcatactccctggtgctcgggaagcttaatttttgaacctctgggggaacccctttaacaagggggggaattgggttcacccctctcgcaaattttnnnnnnnnnnnnnnnnnnnnnnnnnnnnnnnnnnnnnnnnnnnnnnnnnnnnnnnnnnnnnnaaagccggaaaatccgaaacggccatttcccggttcccttggggggccccaaaggannnnnnnnnnnnnnnnnnnnnnnnnnnnnnnnnnnnnnnnnnnnnnnnnnnnnnnnnnnnaaattttgcggaaaaaagttttttgtgaaataatnnnnnnnnnnnnnnnnnnnnnnnnnnnnnttttggttccccccggggggccccaccaagaccctaaaaccctttcccc

SEQ ID NO: 166170 - DNA, 290 bp, Homo Sapiens
cgagcttcggtacccgctgcccacgaagtgctgcccacggcccagtgaggctgcctgagacctggacgcaggccttcgacccctgcacgccccactgcctgtctacctgggtggctcagctcgcctgtgggtgtaggggcggctacaaaccttttggacttgctggcaccaatcattgaagtcatcttcagtcttacagaaaaacccctaaaacgaaatgacgatgagcagaacacgacacccccatctgcagtcggctaagaggtgggggcttccattcccacttcgtg

SEQ ID NO: 166171 - DNA, 924 bp, Homo Sapiens
gggtccaagctcccgcggatggtccatgccggcacgggcggggtggctggccagtggaagcttttcttccggggatggaggcagccatccagtgggctcccacggctggctgccgtggtgtggggttccaggtagatgagctcctcacccaacgtagccgatgaagtagtgggcgctgtgggcttccctccgatgacgcccagggactggggcatcatgaagcagtgcttcagcgtctccacgtaggcttcgttgatgtccgtgagccccaggcgcaggggaatgagaagtaccaggggtctccatggcgacggcctggtggggacctcagctccggcagggaatccgttgcagagccgggcggaatctgcaggaaacgcagtggcgcctgcacagggaacgctggtcctgcacaaccttctgatttcctccatcacaacagtgttgtccattgcaatgtggaccgccaaggagctccacgtatcgaagacagcaagcttcttcaggacctgggcgacagtgttgggcccgtaccactggcctatggacttgccttcgccaactcccatttgcgctatctggtgaatggagtagtaactgtccttcctgtcgatgaatgcgttgaggacgctgaagtagctgtctggctgcctcttcctttgtgtccacctccaatctcggcctaggtgccggcacaccagggcttgggcaaagatcatctgtccacaccgcagcatgcagccccagcctgtgtccgaggtggggcctgtccccccaatggctggaaagtttttcctgtatgtaaaccaaagtctagatgccacatcagacaagatctcgtccttttctgtgaaaatgctgtattttctacccagtatccaaacgggctctgaggtctcaggaaaatcttcaaactcagcaaac

SEQ ID NO: 166172 - DNA, 435 bp, Homo Sapiens
  misc_feature (16)..(16): n is a, c, g, or t
  misc_feature (21)..(21): n is a, c, g, or t
  misc_feature (125)..(125): n is a, c, g, or t
aaccgaaaaaatcttnccaantcgctcctaacatcaagaaaaaatctaaggaacaggttccaggaacgtcggggcaggcccagatgtgaaaggctgctgctcccaccagctcaaaacatgggcanggcacctcccaagcagagacagctttttgacttgctggcaccaatcattgaagtcatcttcagtcttacagaaaaaccccacagcgatggacgggtccaagtacgcgatgctcatgcggcacggcgggtgctggcagtggaagctctcgtccgggatgaagcagccatcagtgggctccacggctggctgcgtggtgtgggggtccaggtagatgagctcctcaccaacgtagccgatgaagtagtgggcgctgttgggcttccctccgatgacgcccagggactggggcatcatgaagcagtgcttcag

SEQ ID NO: 166173 - DNA, 940 bp, Homo Sapiens
ccacgaagtgctgggagaaagtgctgttagtgcctgggtgtggaggtgctgggccttccagcaaccttcaggagggatggggtctgtggctccagactgacctaggttggggcctgctgaggaggagctggcagcctcctcaatggcttgtggctcccgagcctcctgtggggaccactgggactttccattctgggaggccccaaagtgatccctgtcaataggcttgggaccattgggcccaggctcctagggtctctggacgggaaaggatcctcttccccactctctcctgctcctttaggggccacactctggctcacttctgggtgaggtgccaagctcagctcctgtgcacctggctgttctcaggcccttcctcggtgtcgtcctctgaggagtccacctcacgaatggcttcttgcttctgcagcgactcccgtcgttcggctcggtcctgccggagggtgcctagggcccgtgagggagcaggctgcagcacccccttccctggcagggcccccttgccagacagcacactcctggctccaactacctccagagggctcacttccctgggcggcagttccttctttagttcagagtggggcaggtcaaggctgtgcttgcgagaagtggctagcttcttctcagaggcggcaagtgctgctgccagtttctcagccgactgcaccctcttgagtagtggtgaacggggtggctccgcactcttgggccgtgagagttgcctgcccaggggaggtgacaagtgaagctttgtgggaaaggcctgggctacatggccagacaggggcgatggggaccgctgaggtgaagctgttcggacgcgtgggtcgacgatatcccgggattccgggagcccgggtacccaggcactgcattaaataaaaaagcccaacccttgttctactaagttaca

SEQ ID NO: 166174 - DNA, 595 bp, Homo Sapiens
ctgcccacgaagtgcagatgactttgtggtgcagaagccagagctcagtactccctccatttgccacgcccctggaggagaatactttgtggaaggagaaacgtggaacatcgactcctgtactcagtgcacctgccacagcggacgggttctgtgcgagacagaggtgtgcccaccgctgctctgccagaacccctcacgcacccaggattcctgctgcccacagtgtacagatcaaccttaacggccttccttgtcccgcaataacagcgtacctaattactgcaaagatgatgaaggggatatattcctggcagctgagtcctggaagcctgacgttgtgtaccagctgcatctgcattgatagcgtaattagctggtttctctgaggcctgcccttcggtatcctgtgaaagaaatgtcttgagaaaaggccaagtgttgtcccgtactgcatagacacaacttccaaagaatggtggtgtgccactgtcagtgggaaggactatgccgacgagagagcggtgggacactggacagctgcacccacggcgtacggcctgcagggccagaccctctgctcgacctcagctat

SEQ ID NO: 166175 - DNA, 852 bp, Homo Sapiens
  misc_feature (19)..(19): n is a, c, g, or t
ggtctaagagcgagcctgngtggcgaattccgcacgaggtgcacttcgtgcgcagcgacgagctccgtgaggcctggcgtattttcaccccactgctgcaccagattgagctggagaagcccaagcccatcccctatatttatggcagccgaggccccacggaggcagacgagctgatgaagagagtgggtttccagtatgagggcacctacaagtgggtgaacccccacaagctctgagccctgggcacccacctccacccccgccacggccaccctccttcccgccgcccgaccccgagtcgggaggactccgggaccattgacctcagctgcacattcctggccccgggctctggccaccctggcccgcccctcgctgctgctactacccgagcccagctacattcctcagctgccaagcactcgagaccatcctggcccctccagaccctgcctgagcccaggagctgagtcacctcctccactcactccagcccaacagaaggaaggaggagggcgcccattcgtctgtcccagagcttattggccactgggtctcactcctgagtggggccagggtgggagggagggacaagggggaggaaaggggcgagcacccacgtgagagaatctgcctgtggccttgcccgccagcctcagtgccacttgacattccttgtcaccagcaacatctcgagccccctggatgtcccctgtcccaccaactctgcactccatggccaccccgtgccacccgtaggcagcctctctgctataagaaaagcagacgcagcagctgggacccctcccaacctcaatgccctgccattaaatccgcaattcggaagct

SEQ ID NO: 166176 - DNA, 540 bp, Homo Sapiens
gctgtttgcggatttaatggcagggcattgaggttcggaggggtcccagctgctgcgtctgcttttcttatagcagagaggctgcctacgggtggcacggggtggccatggagtgcagagttggtgggacaggggacatccagggggctcgagatgttgctggtgacaaggaatgtcaagtgccactgaggctggcgggcaagccacaggcagattcccccacgtgggtgctcgcccctttcctccccctcgtcccgccctcccaacctggccccactcaggagtgaaacccagtggccaaaaagccctgggaaaaaccaatgggcccccccctccttccttctattgggctggagtgaatgaacgaggtaacccagctcctgggccaaagaagggtctcgaggggccaggatggtctcgagtgcttggcagctgaaggaatgtagctgggctcgggtagtagcagcagcgagggggcgtgccagggtggcaatagcccggggccaagaaatgttgcagctgagggtcaatggttcccgg

SEQ ID NO: 166177 - DNA, 1088 bp, Homo Sapiens
  misc_feature (863)..(863): n is a, c, g, or t
  misc_feature (989)..(989): n is a, c, g, or t
ggcctgggtggcaattcggacgaggcctttggactgagggtcgcgggggctatttcgatgaatttgggatcatccgggacgtgatgcagaaccacctactgcagatgctgtgtctggtggccatggagaagcccgcctccaccaactcagatgacgtccgtgatgagaaggtcaaggtgttgaaatgcatctcagaggtgcaggccaacaatgtggtcctgggccagtacgtggggaaccccgatggagagggcgaggccaccaaagggtacctggacgaccccacggtgccccgcgggtccaccaccgccacttttgcagccgtcgtcctctatgtggagaatgagaggtgggatggggtgcccttcatcctgcgctgcggcaaggccctggacgagcgcaaggccgaggtgaggctgcagttccatgatgtggccggcgacatcttccaccagcagtgcaagcgcaacgagctggtgatccgcgtgcagcccaacgaggccgtgtacaccaagatgatgaccaagaagccgggcatgttcttcaaccccgaggagtcggagctggacctgacctacggcaacagatacaagaacgtgaagctccctgacgcctacgagcgcctcatcctggacgtcttctgcgggagccagatgcacttcgtgcgcagcgacgagctccgtgaggcctggcgtattttcaccccactgctgcaccagattgagctggagaaccccagcccatcccctatatttatggcagccgaagccccacggaggcagacgagctgatgaagagagtgggtttccagtatgagggcacctaccaagtgggtggaacccccacagctctgagccctgggnacccactttccaccccggcaggggcacccttctttccggcggccgaaccccgagtcggggaggactccgggaccaattgacctcagctgcccatttcctgggccccgggctctggccacccttggnccggccccttcgctgctggctaactacccgaagcccagcttaaatttcctcagctggcccaagcacttccaaaaacattcctgggcccctccagaaacc

SEQ ID NO: 166178 - DNA, 1097 bp, Homo Sapiens
  misc_feature (159)..(159): n is a, c, g, or t
ggggcccaggaaatgtgcaaggctgagggtcaagtggtcccccggagtcctccccgaactcggggtccgggcggcgggaaaagaagggtggccccttgccggggggtggaggttgggttccaaaggggctcaagaggcttgtggggggttccaccccanctggtaaggtgccctcataactggaaaccccactctcttcatcaggctcgtctggcctcccgtggggccctcgggctgccataaaatataggggatgggcttgggcttctccagctcaatctggtgcagcagtggggtgaaaatacgccaggcctcacggagctcgtcgctgcgcacgaagtgcatctggctcccgcagaagacgtccaggatgaggcgctcgtaggcgtcagggagcttcacgttcttgtatctgttgccgtaggtcaggtccagctccgactcctcggggttgaagaacatgcccggcttcttggtcatcatcttggtgtacacggcctcgttgggctgcacgcggatcaccagctcgttgcgcttgcactgctggtggaagatgtcgccggccacatcatggaactgcagcctcacctcggccttgcgctcgttcagggccttgccgcagcgcaggatgaagggcaccccatcccacctctcattctccacatagaggacgacggctgcaaaagtggcggtggtggacccgcggggcaccgtggggtcgtccaggtaccctttggtggcctcgccctctccatcggggttccccacgtactggcccaggaccacattgttggcctgcacctctgagatgcatttcaacaccttgaccttctcatcacggacgtcatctgagttggtggaggcgggcttctccatggccaccagacacagcatctgcagtaggtggttctgcatcacgtcccggatgatcccaaattcatcgaaatagcccccgcgaccctcagtgccaaagggctccttgaaggtgaggataacgcaggcgatgttgtcccggttccagatggggccgaagatcctgttggcaaatctcagcaccatgaggttctgcaccatctccttgcccaggtagtgtcgat

SEQ ID NO: 166179 - DNA, 858 bp, Homo Sapiens
cactacatccgcagacccgccagcacccgcggagagggcaaacaacaagcctgtgtggcaaattccgcacgaggccctttggcactgagggtcgcgggggctatttcgatgaatttgggatcatccgggacgtgatgcagaaccacctactgcagatgctgtgtctggtggccatggagaagcccgcctccaccaactcagatgacgtccgtgatgagaaggtcaaggtgttgaaatgcatctcagaggtgcaggccaacaatgtggtcctgggccagtacgtggggaaccccgatggagagggcgaggccaccaaagggtacctggacgaccccacggtgccccgcgggtccaccaccgccacttttgcagccgtcgtcctctatgtggagaatgagaggtgggatggggtgcccttcatcctgcgctgcggcaaggccctgaacgagcgcaaggccgaggtgaggctgcagttccatgatgtggccggcgacatccttccaccagcactgcaagcgcaacgagctggtgatccgcgtgcagcccaacgaggccgtgtacaccaagatgatgaaccaagaagccgggcatgttcttcaacccccgaggaagtcggaactggacctgaccctacggcaaccgatacaagaacgggaagctcccctgacgcctacgaaccggccctccatcctggacctcttcccgccggggaaccagatgcactttccgtgcgcaggcgaccaagcttccgtgaaggccctggccgtattttcacccccattgccttgcacaaaatttgaactgggaaaaaaccccaagccccctctccccttattttttatttgggcaccccgaggg

SEQ ID NO: 166180 - DNA, 875 bp, Homo Sapiens
  misc_feature (805)..(806): n is a, c, g, or t
  misc_feature (825)..(825): n is a, c, g, or t
  misc_feature (831)..(831): n is a, c, g, or t
  misc_feature (851)..(851): n is a, c, g, or t
gaatttgggatcatccgggacgtgatgcagaaccacctactgcagatgctgtgtctggtggccatggagaagcccgcctccaccaactcagatgacgtccgtgatgagaaggtcaaggtgttgaaatgcatctcagaggtgcaggccaacaatgtggtcctgggccagtacgtggggaaccccgatggagagggcgaggccaccaaagggtacctggacgaccccacggtgccccgcgggtccaccaccgccacttttgcagccgtcgtcctctatgtggagaatgagaggtgggatggggtgcccttcatcctgcgctgcggcaaggccctgaacgagcgcaaggccgaggtgaggctgcagttccatgatgtggccggcgacatcttccaccagcagtgcaagcgcaacgagctggtgatccgcgtgcagcccaacgaggccgtgtacaccaagatgatgaccaagaagccgggcatgttcttcaaccccgaggagtcggagctggacctgacctacggcaacagatacaagaacgtgaagctccctgacgcctacgagcgcctcatcctggacgtcttctgcgggagccagatgcacttcgtgcgcagcgacgagctccgtgaggcctggcgtattttcaccccactgctgcaccagattgagctggagaagcccaagcccatcccctatatttatggcagccgaggccccacggaggcagacgagctgatgaagagagtgggtttccagtatgagggcacctacaagtgggtgaacccccacaagctctggagccctgggnnacccaccttccacccccgncaaggncaaccctccttttccgccgnccggacccccgagatcgggaagga

SEQ ID NO: 166181 - DNA, 1462 bp, Homo Sapiens
aatacggcccaggccctcacggaagcttcgtcgcctgcgccacgaaagtgcatctggcttcccgcagaaagaccgtcccaggatgaggcgctcgtaggcgtcagggagcttcacgtttcttgtatctgttgccgtaggtcaggtccagctccggactcctcgggggttgaagaacatgcccggctttcttggtcatcatcttggtgtacacggcctcgttgggctgcacgcggatcaccagctcgttgcgcttgcactgctggtggaagatgtcgccggccacatcatggaactgcagcctcacctcggccttgcgctcgttcagggccttgccgcagcgcaggatgaagggcaccccatcccacctctcattctccacatagaggacgacggctgcaaaagtggcggtggtggacccgcggggcaccgtggggtcgtccaggtaccctttggtggcctcgccctctccatcggggttccccacgtactggcccaggaccacattgttggcctgcacctctgagatgcatttcaacaccttgaccttctcatcacggacgtcatctgagttggtggaggcgggcttctccatggccaccagacacagcatctgcagtaggtggttctgcatcacgtcccggatgatcccaaattcatcgaaatagcccccgcgaccctcagtgccaaagggctccttgaaggtgaggataacgcaggcgatgttgtcccggttccagatggggccgaagatcctgttggcaaatctcagcaccatgaggttctgcaccatctccttacccaggtagtggtcgatgcggtagatctggtcctcacggaacagggaggagatgtggttggacagccggtcagagctctgcaggtccctcccgaagggcttctccacgatgatgcggttccagcctatctggctcatgcaggactcgtgaatgttcttggtgacggcctcgtagacggtcgggggcaaggccaggtagaagaggcggttggcctgtgaccccaggtggagggcattcatgtggctgttgaggcgctggtaggaggctgcatcatcgtactggccagccacataggagttgcgggcaaagaagtcctccagcttgagcttctcctctggggtggccttgaagaagggctcactctgtttgcggatgtcagccactgtgaggcgggaacgggcatagcccacgatgaaggtgttttcgggcagaaggccatcccggaacagccaccagatggtggggtagatcttcttcttggccaggtcacccgatgcacccatgatgatgaatatgtgtgtatccgactgatggaaggcatcggcctggaaaagctcttcccgcaggatcccgcacacctgggtccggctcagggccacctgctctgccatgacgctgtctgccgcttcgtcgtcgtcgccctccgcgctcgcagccccgaagtg

SEQ ID NO: 166182 - DNA, 1008 bp, Homo Sapiens
  misc_feature (432)..(432): n is a, c, g, or t
  misc_feature (449)..(449): n is a, c, g, or t
caggacgagctgggcattcgacagcctttggactgaggccggggctatttcatgatttgggatcatccgggacgtgatgcagaaccacctactgcagatgctgtgtctggtggccatggagaagcccgcctccaccaactcagatgacgtccgtgatgagaaggtcaaggtgttgaaatgcatctcagaggtgcaggccaacaatgtggtcctgggccagtacgtggggaaccccgatggagagggcgaggccaccaaagggtacctggacgaccccacggtgccccgcgggtccaccaccgccacttttgcagccgtcgtcctctatgtggagaatgagaggtgggatggggtgcccttcatcctgcgctgcggcagggcctgaacgagcgcaaggcccgagtgaggctgcagttccatgatgtgggcggncgacatctttcaccaancagtggcaagcgcaacgaggctgggtgaatccccgtgccagcccaaacgaaggcccgtgttacaccacagaatgatttgacccaaaaaaacccgggcatttggttttctttcaaaccccccaaaaaggaaatccgggaacttttgggaccctttgaaccccttacggcggaacccaggtttttatacaagaaaacccgggaaaaaacctgacccctacgagccccccatccaagaaaaggcggcccccggagccagatgcacttcgtgcgcagcgacgagctccgtgagggctggcgtattttcaccccactgctgcaccagattgagctggaaaagccccaaccccatccccctatatttatgggaacccgaggccccacgggaggcaaaactagctgaataaagaaaagggggttttccacgtatgaaggggcccctaccagtgggggggaacccccacaaagcttcctgagcccctggggtaaccaaactttccacctcccggcaaaggggccaacccttccctttcccgggccgcccccaaaccccctaaatccg

SEQ ID NO: 166183 - DNA, 376 bp, Homo Sapiens
tacgggcatgtccgggtaaggctgccgtcccctgcatgctcagcaggcagaacccagaatggtagcccacacagagcctgtccctgagcaccgcaagcactgaagctgccgggagccacaatctcattgaactttctgtggaatggcttcgttctctggatctcatagcaaaggatcagccgtttcacggccacaaacaggcaggtgccagagttcctcttgagtgtggccgtggccataagctggcagcctttggtttccggaagcttgatgtcaaagctgccttccgctccatcaagggacgaccacggatagaggtgcacatggtggttccggccacagaggaggattacgatcttctcccggtacatgtcca

SEQ ID NO: 166184 - DNA, 716 bp, Homo Sapiens
tcttctcccatcagaagagtgtattctaatgccctgatgccatgggtcaggtatagccaggctggagaaaagaagctgccaccatggttgcactttcactgaagatcagcattgggaatgtggtgaagacgatgcagtttgagccgtctaccatggtgtacgacgcctgccgcatcattcgtgagcggatcccagaggccccagctggtcctcccagcgactttgggctctttctgtcagatgatgaccccaaaaagggtatatggctggaggctgggaaagctttggactactacatgctccgaaatggggacactatggagtacaggaagaaacagagacccctgaagatccgtatgctggatggaactgtgaagacgatcatggtggatgactctaagactgtcactgacatgctcatgaccatctgtgcccgcattggcatcaccaatcatgatgaatattcattggttcgagagctgatggaagagaaaaaggaggaaataacagggaccttaagaaaggacaagacattgctgcgagatgaaaagaagatggagaaactaaagcagaaattgcacacagatgatgagttgaactggctggaccatggtcggacactgagggagcagggtgtagaggagcacgagacgctctgtctgcggaggaagttcttttactcagacctgaatgtggattcccgggacccgtacaat

SEQ ID NO: 166185 - DNA, 979 bp, Homo Sapiens
gcctgggtggcgaattcggcacgagggaggaataggaatcatggcggctgcgctgttcgtgctgctgggattcgcgctgctgggcacccacggagcctccggggctgccggcacagtcttcactaccgtagaagaccttggctccaagatactcctcacctgctccttgaatgacagcgccacagaggtcacagggcaccgctggctgaaggggggcgtggtgctgaaggaggacgcgctgcccggccagaaaacggagttcaaggtggactccgacgaccagtggggagagtactcctgcgtcttcctccccgagcccatgggcacggccaacatccagctccacgggcctcccagagtgaaggctgtgaagtcgtcagaacacatcaacgagggggagacggccatgctggtctgcaagtcagagtccgtgccacctgtcactgactgggcctggaacaagatcactgactctgaggacaaggccctcatgaacggctccgagagcaggttcttcgtgagttcctcgcagggccggtcagagctacacattgagaacctgaacatggaggccgaccccggccagtaccggtgcaacggcaccagctccaagggctcccgacaggccatcatcacgctccgcgtgcgcagccacctggccgcccctctggcccctcctgggcatcggggctgaagtgctggtgctggtcaccatcatcttcatctacgaaaaacgcccgaaagcccgaggacgccctgggatgaagaagacgcccggctctggcacccctggaagagacagcggggcagccccctaaatgaacaagggccagaacgttccgcccagaagaactctttcctgaaggcaaggtgggcccgaaggacgccttccttgcttctcgggttttgcgccccgccgcccgggagatccccctcccccaggggctttgcaaaaatccccaggtttcctccccttctt

SEQ ID NO: 166186 - DNA, 1392 bp, Homo Sapiens
  misc_feature (86)..(86): n is a, c, g, or t
gaacacgaaggggcgtggggtggaatataaaagagaacgagcaagcgaagaagacgggcgaagcgcggaataagtaggggcgcganaggagggagggaaagatagacagcgagaaaaggggagcgggacgaaggggagggagaggcgtagaacagaaaagggcggggaaggggaaaaaggagggaagggaaccgcgagaacggcgcgttagcgagataggagagggcacaaggccggccgagcgccgggcagtacgaaagtgggaaagaaggggagaatcggaaggccacgggaccgcaggcgcgcgagggaagcagaagtcgagaaggctcgaaaggaagccgtgcggcaagagagggagaaacgctggagcgccggaatgcaggagaggggagaaccccaaatggcgtggaggaagagggaagggtatgatgggaatctagcggggcgggtgttctttaacaggtgagaacttggaatcttgcaagcactggggagtggactccggcggcggcgcagacgtggagcagggagcgtcctcgggccacctgcctcaggaagagttcctctggcggacgttcttgcctttgtcattctggtgctgcccgctgctcttcaggggtgcagagccggcgtcgtcatcatccaggacgtcctcgggcttccggcgcttctcgtagatgaagatgatggtgaccagcaccagcacctcagccacgatgcccaggaagggccagagggcggccaggtggctgcgcacgcggagcgtgatgatggcctggtcggagcccttggagctggtgccgttgcaccggtactggccggggtcggcctccatgttcaggttctcaatgtgtagctctgaccggccctgcgaggaactcacgaagaacctgctctcggagccgttcatgagggccttgtcctcagagtcagtgatcttgtaccaggcccagtcagtgacaggtggcacggactctgacttgcagaccagcatggccgtctccccctcgttgatgtgttctgacgacttcacagccttcactctgggaggcccgtggagctggatgttggccgtgcccatgggctcggggaggaagacgcaggagtactctccccactggtcgtcggagtccaccttgaactccgttttctggccgggcagcgcgtcctccttcagcaccacgccccccttcagccagcggtgccctgtgacctctgtggcgctgtcattcaaggagcaggtgaggagtatcttggagccaaggtcttctacggtagtgaagactgtgccggcagccccggaggctccgtgggtgcccagcagcgcgaatcccagcagcacgaacagcgcagccgccatgattcctattcctcgccggtcctacaacc

SEQ ID NO: 166187 - DNA, 907 bp, Homo Sapiens
  misc_feature (761)..(761): n is a, c, g, or t
gggcaagtgcgtgagagtacccgggggtccggaattcccgggatatcgtcgaccacgcgtcgggttgtaggaccggcgaggaataggaatcatggcggctgcgctgttcgtgctgctgggattcgcgctgctgggcacccacggagcctccggggctgccggcacagtcttcactaccgtagaagaccttggctccaagatactcctcacctgctccttgaatgacagcgccacagaggtcacagggcaccgctggctgaaggggggcgtggtgctgaaggaggacgcgctgcccggccagaaaacggagttcaaggtggactccgacgaccagtggggagagtactcctgcgtcttcctccccgagcccatgggcacggccaacatccagctccacgggcctcccagagtgaaggctgtgaagtcgtcagaacacatcaacgagggggagacggccatgctggtctgcaagtcagagtccgtgccacctgtcactgactgggcctggtacaagatcactgactctgaggacaaggccctcatgaacggctccgagagcaggttcttcgtgagttcctcgcaggggcggtcagagctacacattgaaaacctgaacatggaggccgaccccgggccagtacccggtggcaacggaaccagcctccaaagggctcccgacaagggccaatcatccacggctcccgcgtggcgcaagccaccctgggccggcccctctgggcccctttcctgggggcattccntggccttaaaggtggcctgggtggcttggttccacccattcaatccttccttcctaacaaaaaaagcggccgggaaaccccccaaagggaaccctccttgggaatgaatgaaacaaaacccccgggtttctttgccacccccttgt

SEQ ID NO: 166188 - DNA, 976 bp, Homo Sapiens
  misc_feature (641)..(641): n is a, c, g, or t
acggagcctccggggctgccggcacagtcttcactaccgtagaagaccttggctccaagatactcctcacctgctccttgaatgacagcgccacagaggtcacagggcaccgctggctgaaggggggcgtggtgctgaaggaggacgcgctgcccggccagaaaacggagttcaaggtggactccgacgaccagtggggagagtactcctgcgtcttcctccccgagcccatgggcacggccaacatccagctccacgggcctcccagagtgaaggctgtgaagtcgtcagaacacatcaacgagggggagacggccatgctggtctgcaagtcagagtccgtgccacctgtcactgactgggcctggtacaagatcactgactctgaggacaaggccctcatgaacggctccgagagcaggttcttcgtgagttcctcgcagggccggtcagagctacacattgagaacctgaacatggaggccgaccccggccagtaccggtgcaacggcaccagctccaagggctccgaccaggccatcatcacgctccgcgtgcgcagccacctggccgccctctggcccttcctgggcatcgtggctgaagtgctggtgctggtcaccatcatcttcatctacganaagcgcccggaagccccgagacgtcctggatgatgacgacgccgggctctgcaccccttgaaagcagcgggccagcacccgaatggacaagggcaagaaccgtccgcccgagggaactcttccttgagggaagggggcccgagggacgctccctggctccacgtctgcgcccgccggccggaatccacctccccagggcctggcaagaatcccaagttcctcacccccttaaaagaaaaaccccaccccggagaattccccattccaaaacctttccttcttttttttaaaaaaagttggggtttttcccccatttccggaatcctggtcccctt

SEQ ID NO: 166189 - DNA, 486 bp, Homo Sapiens
  misc_feature (105)..(105): n is a, c, g, or t
  misc_feature (224)..(224): n is a, c, g, or t
  misc_feature (256)..(256): n is a, c, g, or t
  misc_feature (449)..(449): n is a, c, g, or t
agaaactgtactggtcagtcacatcttacggcgaagggagagggccttaggggagcagagaagacaggcaaagttgtggactgtttgatcttgtattacccacangaatgagggcagctaaacccatagaaggagttggaccaaggcgaattacgagtcctgggtcccagcagtatgtgtgctgacttctgggtgccccagaaatagacctctcctgtagagtngtgatatacagaatgagtttcagtttgcattncagctgggattgaaagtaatcagtcatgagcaggcaggcaggaggtcctgttagccctgccttccaggaaggttgggggtgggagttttgagtgggaaagaggatgacatgttgtgagagagttctgagcctgtttgcttagggagagtgagtgagtgctcttggggcacttgctccaggccgtttcttgctngactttgcctgggttacaattaaatgcccaataaata

SEQ ID NO: 166190 - DNA, 1221 bp, Homo Sapiens
gtacccgggctacaaacttctctgtagcagctccacagatgaggtctgcttgggagatgctgggtcagcccaagcatgctgcctctcctgtacctggcttccaagcaagaaactgtttcttgcttttccttcagtcagttcatctgggcatcctggctctctcctggagggggcatctttgacaagctttgcccatccacgtgggccccttccagctcagctcccactgtgccttaagggaccatgcctgcacagcttgtttctttggcttaaaggcaggaatggtgggaaaggactgtctccacttctttctccatccctccgaggtgaaggtggggatggcactgtcgggcctggttggcctccttcccggttgaaaaccttaaatactgacccgttttgaggctgctagttgatagcttatgcctgtggtgggagtggttcccagggctgggggctctgaaagtggccccaagacaggtttggagtgcctgtccctctcttcagcctgtccctctttaaggccaggtgtggcatacaccttcacggggtttgcagcagcagaagtggaaggagcagcacagtccaggcaagtgggaagaggcgtggggcagcactgtgaccgatgctatgtagaacccgcacctctgggtcatctgctgcaagtctcttctcctgtggattgacatgggcctgaggactgtgagtgattttgccactgacagtcaccttcaacctcaagcagcggtcttcatgctggtggatgggtttggaggcactcacagatgtagtagtagctgtgtccttctttgaactccttgcccagggtgaaaggtgtgaagcgctggaacttctcagacagcttctccgggccatgcttggcactgggccggttgcactgccagcggacttggtccttggactggggctggcacagctggtactcctcatgctccaccaggtacagtatgtactgctccatggcagcgtctgccacagagtgatcttcatagtgcggacagatgatgtccacgtagtcattcagctgcacatgtatggtgtagtcctcattccggaacttgggatttgaactgttccagaagacggtgtggcgatcagcagcggccagactgcagcacagacccaagagaggggcccagaggaactccatagcgcggggcctggccaggccgagcggggacgcgggtctcctatgggtct

SEQ ID NO: 166191 - DNA, 708 bp, Homo Sapiens
aattaaccctactaaagccccaattaaccctttctgggtcgcccaattaaccctcactaaagtgctgggattacaggcgtgagctacactgcacctggcctaggagtagtattaagtggcccaggcaagaggaacatattcagactcggaggaatgaaggatgaaatgtggggaggggcagtgtctatgctgagggttatttccaaagaatgagaggctgggctgaacattgggcaggaagttagcaaaaactaaggagggtaggaatcaaggttagagggaagagaagaatgaaattgagtagggagctgagaaagcagggcgaggggcatttggacttacattttcctccagcaaaggtttcttatttaacccctgtgggcttatcttgcagccaaacccatcaccagcatgaagaccgctgcttgaggttgaaggtgactgtcagtggcaaaatcagtgagtgtcggagccctgtgggcctccttcctccatctctatgctgggtgcggtctagtgatctaggatggtatagaagtcttgcagcccagcccactcatacttacagccctctgcctctttgatacagtacctgatctactaccactcttgtctttcagctcacagtcctcaggcccatgtcaatccacaggagaaagctgcagcaggtgggtagcaggagcggtgagcaattatgtgggacgagca

SEQ ID NO: 166192 - DNA, 921 bp, Homo Sapiens
tacccaggactaaagagacgccagtccagagtagagtccgtaggcagccaagctgggcccagcgtgggggcaaatatgaggctacaatgaacggggtaggtgaggctggcatgggtgactcaggccagtgggcagcagccctgggatctccaggcctcaggcgggggcagcatgctgagaagggcgccagcctccctcatgctggagggcaggcccctcattctgacctgccagctccctttgtttggaggacactgttgggggtgagtgggcgctgtgccctcctggggtcctgggggctgtgcacatttgacaaggttccggaatgaggactacaccatacatgtgcagctgaatgactacgtggacatcatctgtccgcactatgaagatcactctgtggcagacgctgccatggagcagtacatactgtacctggtggagcatgaggagtaccagctgtgccagccccagtccaaggaccaagtccgctggcagtgcaaccggcccagtgccaagcatggcccggagaagctgtctgagaagttccagcgcttcacacctttcaccctgggcaaggagttcaaagaaggacacagctactactacatctccaaacccatccaccagcatgaagaccgctgcttgaggttgaaggtgactgtcagtgggcaatatcactcacagtcctcagggcccatgtcaaatccacagggagaagcagacttgccccaagatgaccccataggtggcgggctcctaacattagcattcgggccaaaggtgcttggccccacggctttctttctcccatttggccctggcgaccgggggccgtcctccactttcccaccttcctgtgctggccttggccaaaacccctccgtgggaaaaaaggtgcgatacatcctcgccctcccc

SEQ ID NO: 166193 - DNA, 992 bp, Homo Sapiens
tccgggagacagctgcccccgtaaaaggcagggtggcgggcggaaaaggaaccgtgtactgcaattaggggatgctgctgttcccaccctctcggatacaactcagtgcactcaggaggctgcctgagaagtcagagacaggagagacaggcagtcacaatgggttttggcttaggaagggaagggcctggttatcactgtgggatcctgctaacagcagccaaccttctgctcacaaggaagaaagtttggtgttgaggggggtgacagaaggctgaaagaatgtgagcaaacatattgctgagcctggcctgatgcactgttctctcccaaattctcagggccaaaggactgccgcctagcaggtaaaagcccctgctgccttggtcacatagtcacatagaaacggaaatgcccgccaaccgtctcccctatcaatcctatgctggtttaggtgaaacagaaaacaaaaatgaacacaaaatgattcccttccccctccccagtggccctatactatttggccataatggggtgaaaagccttcggagtggccaggcgcgtccagacagagggacaacacaagagcattgccccttcttgcagggggagaacagacgggctcagagcagcagcccagggggagggaagcttcccctagggaggtgcgagagtgtcgctggagagtgcaaggatggctgcagcagacaggcatgggtggcggggctgaagtgtcatggctggggaagcctgaaggtggcgagcccacaaatgggcccctaacgctgcagggggtctacccagttccacgacacctccctgctctgggcaggtccgctggtttcccattggatacgtctatactgagggcaggcacctaacagtaagtctccagcggtgagggaaatggcgcttgacagtgtgtgtcactgcatatgacaccatggaccccggcacacagggcacgcccttcactgtgagaacacgacaac

SEQ ID NO: 166194 - DNA, 927 bp, Homo Sapiens
gggggggaacccagggggcctggaaaataaacatttattcctcaagtacaaggtgtgaaatttcccaggggccccccttttcccacaaaagaatggctttaagcaaaaggccaggccacaatgggaaggttttgatattcccaccacggcagggaagttaaggcagggggtcccttaaaaggtggctgggtgcccccaagcagatgggaaaacagaaggtatggcccccgaggggaaggggggcaggttccaggggttaccagtgcttttcaggtacgtggtgtttctaataggggccatttgccaccccacatctttgggaactccccctggcctattgtgacatggcagggttccctgtttcttgaaggtagagaagatgctagtggggaggagctgagcctgtgacgtgcatttgtaccaggtccagatgggaaatgatgaggctgcaggctatgatggggccactgtgcactaaatgcttggtaccatcctatgaggggacaaggtgcagacccacattcccataggcacttaagcagtggtggataggaggctaccccaggggttcagctgtccttcaggtaatcagcttacccccaagaaggactgagaggaatatgagtaggacagttggcagatgacaatttcctttgcctggctcacgggagaagtctggttgggccaggtatgtgggtgtttggtgcctccatctggatagtgccagcaggtacaccaccctgccttatacctgaatggccagctaaataaccatagagcttaaggtctggctcaggtcaggattccctggctccttgccaacaaagcaaaaccagagattcagaaaactcagggcctaggagaaaacagacctgccttacaaaccccagagctggtcaaccctcaggcttcctctcaggaaaaaaa

SEQ ID NO: 166195 - DNA, 517 bp, Homo Sapiens
taccaagcatttagtgcacagtggccccatcatagcctgcagcctcatcatttcccatctggacctggtacaaatgcacgtcacaggctcagctcctccccactagcatcttctctaccttcaagaaccaggcagccctgccatgtcacaataggccaggggagtttccaaagatgtgggtggcaaatgcccctatagaaacaccagtacctgaaagcactgtagccctggacctgcctccttccctcggggccatacttctgtttccatctgctgggccaccagccactttagtgacccctgcctacttccttcctgttggatatcatacttccatctggctgcctttgcttaagccatctttgtggtagaggggccctggaattgcagctgtactgaggatgatgttattcacagcccctggcccacccactaatactactgcacagagtcaggatctcacatttcaccccaggctcaactgaggatgtggcttattaaacacggaagtgcaaag

SEQ ID NO: 166196 - DNA, 820 bp, Homo Sapiens
  misc_feature (96)..(96): n is a, c, g, or t
  misc_feature (111)..(112): n is a, c, g, or t
gttcaaaaatgccccagataattctcctttttatgctgtccaacaatgtccttttggctgatatttctgtattcatcaaatgttagttttaatganggaaagctccttaanncacaggatctcagtgaatttgtcttcatccgtgccccatctgttctcaccagctttatagagaatctgggcatcttgtttggccagatgctcatccactttcagactttcatctcttctgccatctgccaaaagtcaacagagctttccggaagtcaccagatgtttcggaactaatgtcatctccaagactcttcttgtatactgtataataggcttgagagatatccttcatttgcctgcttgtcctggtagttaagatttcaatcaaggcatcttcgtttgttcccgcgcccttcatggatttctttagctgctttgcatcaaagactgctggtggagtcactagggccaccatgagatgctcaaagtggccagagagatcacccttcaagtcatctttcagctcctttccatatgctgcttgatattccttaacaatcacctgccgctgtgcatttgacctctcagtcagaatgctgatgagcattttctcatcagttccaattcctctgattgctttctgaatagcttcagcatccactgatgggctaaagtctggataatctcttactgttcctcggtgtccaacccagatagatgccatgatatcccacctttgccttgagctgagatcacactaatccaaagcgcggtgggggaaactggtgtgcgagtaaactgcgaacaaactgcgagcgaaggtccc

SEQ ID NO: 166197 - DNA, 1489 bp, Homo Sapiens
  misc_feature (593)..(593): n is a, c, g, or t
gggtactattcaagaggtaaagagaaatgtgtatgaccttacaagtatccccgttcgccaccaattatgggagggctggccaacttctgctacagacgactcaatgtgtcttgctgaatcagggctctcttatccctgccatcgacttacagtgggaagaagatcttcacctgcacagacccgggaacagtcggaagaacaaatcaccgatgttcatatggttagtgatagcgatggagatgactttgaagatgctacagaatttggggtggatgatggagaagtatttggcatggcgtcatctgccttgagaaaatctccaatgatgccagaaaacgcagaaaatgaaggagatgccttattacaatttacagcagagttttcttcaagatatggtgattgccatcctgtattttttattggctcattagaagctgcttttcaagaggccttctatgtgaaagcccgagatagaaagcttcttgctatctacctccaccatgatgaaagtgtgttaaccaacgtgttctgctcacaaatgctttgtgctgaatccattgtttcttatctgagtcaaaattttataacctggngcttgggatctgacaaaggactccaacagagcaagatttctcactatgtgcaatagacactttggcagtgttgtggcacaaaacattcggactcaaaaaacggatcagtttccgcttttcctgattatatatggggaaagcgatcatctaatgaagtgttgaatgtgatacaagggaacacaacagtagatgagttaatgatgagactcatggctgcaatggagatcttcacagcccaacaacaggaagatataaaggacgaggatgaacgtgaagccagagaaaatgtgaagagagagcaagatgaggcctatcgcctttcacttgaggctgacagagcaaagagggaagctcacgagagagagatggcagaacagtttcgtttggagcagattcgcaaagaacaagaagaggaacgtgaggccatccggctgtccttagagcaagccctgcctcctgagccaaaggaagaaaatgctgagcctgtgagcaaactgcggatccggacccccagtggcgagttcttggagcggcgtttcctggccagcaacaagctccagattgtctttgattttgtagcttccaaaggatttccatgggatgagtacaagttactgagcacctttcctaggagagacgtaactcaactggacccaaataaatcattattggaggtaaagttgttccctcaagaaacccttttccttgaagcaaaagagtaaacacggcccagcggtggaaccagccattccttgacaagccagcagcctgcgtcaggagaagggctcctcgccaacccacccacacgctcgtctcactcaattcaatgtcacacttctgcctcttgcaaaattgctggaaaaagtaataataaatatagctacttaagaaaaaaa

SEQ ID NO: 166198 - DNA, 440 bp, Homo Sapiens
  misc_feature (23)..(23): n is a, c, g, or t
  misc_feature (67)..(67): n is a, c, g, or t
taacaaacaccctgcccttgcgnggttattttgaaaggatcaacctaagatacctgcgaagacctcntccgtgccccagtgccatagtttcagaatcagtgtgccatagataaaatgaaggcccatgtagagaatatagtgccttgtttcagtcttttgaatatgtgttccttcatctttttaggtaactcaactggacccaaataaatcattattggaggtaaagttgttccctcaagaaacccttttccttgaagcaaaagagtaaacacggcccagcggtggaaccagccattccttgacaagccagcagcctgcgtcaggagaaggctcctcgccaacccacccacacgctcgtctcactcaattcaatgtcacacttctgcctcttgcaaaattgctggaaaaagtaataataaatatagctacttaagatttcc

SEQ ID NO: 166199 - DNA, 907 bp, Homo Sapiens
cggacgcgtgggctacgacaagttttgtcagcgaaagaaaggcatctagttgagataaaacaaaaactcggcatgaacctgatgaatgaattaaaacagaacttcagcaaaagctggcatgacatgcagactaccactgcctacaagaaaacacatgaaaccctgagtcacgcagggcaaaaggcaactgcagctttcagcaacgttggaacggccatcagcaagaagttcggagacatgagacgaaagtaggcggtacgaaccctaatggaggcagttttgaggaggtcctcagctccacggcccatgccagtgcccagagcttggcaggaggctcccggcggaccaaggaggaggagctgcagtgctaagtccagccagcgtgcagctgcatccagaaaccggccactacccagcccatctctgcctgtgcttatccagataagaagaccaaaatcccgctgggaaaaacccaggccttgacatggtcattcaaatggcccctccagaaagtttaatgatttccatttgtatttgtgttgatgatggaccacttgaccatcacatttcagtattcatagatgactgtcacattttaaaatgttcccacttgagcaggtacacaactggtcataattcctgtctgtgtaattcgatgtatatttttccaaacatgtagctattgtttgctttgatttttgcttggcctcctttatgatgtgcatgtccttgaaggctgaatgaacagtccctttcagttcagcagatcaacaggatggagctcttcatgactgtctccagcaataggatgatttactataaatttcatccaactacttgtgatctctctcacctacatcaattatgtatgttaatttcagcaattaaaagaattgattttaaaaaa

SEQ ID NO: 166200 - DNA, 909 bp, Homo Sapiens
  misc_feature (872)..(872): n is a, c, g, or t
gcggggccagctgcgttctgagcctgggcgcagctgccatctgctctgggaagcaccagggtgtccccgccgccctcagctcgaagtcagccaccatggaggcgcaggcacaaggtttgttggagactgaaccgttgcaaggaacagacgaagatgcagtagccagtgctgacttctctagcatgctctctgaggaggaaaaggaagagttaaaagcagagttagttcagctagaagacgaaattacaacactacgacaagttttgtcagcgaaagaaaggcatctagttgagataaaacaaaaactcggcatgaacctgatgaatgaattaaaacagaacttcagcaaaagctggcatgacatgcagactaccactgcctacaagaaaacacatgaaaccctgagtcacgcagggcaaaaggcaactgcagctttcagcaacgttggaacggccatcagcaagaagttcggagacatgagacgaaagtaagcggtacgaaccctaatggaggcagttttgaggaggtcctcagctccacggcccatgccagtgcccagagcttggcaggaggctcccggcggaccaaggaggaggagctgcagtgctaagtccagccagcgtgcagctgcatccagaaaccggccactacccagcccatctctgcctgtgcttatccagataagaagaccaaaatcccgctgggaaaaacccaggccttgacattgttattcaaatggcccctcccagaagtttaatgatttccatttgtatttgtggttgatgatggaccactttgacatcacatttcagtatttctagatgactgtcaccttttaaaatggtccaactttgaccaggacacaactgggncataattcctgcctggggaaattcgagggaatatttt

SEQ ID NO: 166201 - DNA, 582 bp, Homo Sapiens
  misc_feature (43)..(43): n is a, c, g, or t
ttcatgagggagactgtcaataaggctgtggctctggacactnatgagaagggccagctgacatccagcatggtggatgatgtcttctacattgttaagaagtgcattgggcgggctctgtccagctccagcattgactgtctctgtgccatgatcaacctcgccaccacagagctggagtctgacttcagggatgttctgtgtaataagctgcggatgggctttcctgccaccaccttccaggacatccagcgcggggtgacaagtgccgtgaacatcatgcaacagcagcctccaacaaggcaaatttaacacaaaaggcatcgagagtactgacgaggcgaagatgtccttcctggtgactctgaacaacgtggaagtctgcagtgaaaacatctccactctgaagaagacactggagagtgactgcaccaagctcttcagccagggcattggaggggagcaggcccagcccaagtttgacagctgcctttctgacatggccgacgtgtccaacaaattccgagacctcttgcaggaagggctgacggagctcatcagcgcagtcatctaaactcgggc

SEQ ID NO: 166202 - DNA, 420 bp, Homo Sapiens
gtaggatctcgctgatccgcttaaggtatagactaaaaccacacgttctacttataacacatacattcataagactctgaaattagagacttaccagctgtaagcccatccacattgggagggagataagctgctgtacttgacttcgtatcaagtctacttcctgtttagggcatgaagaaaataagtttataaacataccagcatttctacctaagtctttacataagaagtatactgcctttttaagtcctggagggaaaacatgccacaaatattttcaagttaatattttgatattaagaagttcaatgctttaaaaaagactccatccttattatctacagattttgtacttgcaaattcatatactaataaaaatgtatttgtaaccccaaaatcaacactccatgcttaagc

SEQ ID NO: 166203 - DNA, 336 bp, Homo Sapiens
ccgctgattcgcttaagggaaggttcagctctcctgtctggggcatctactggagcacctcagaagacaaggaggaaaacactggctcatgttttctttccctgtgagggaggggaggtttctagatgatactaaaagcctgttgccactgttgtgtcatgatttccattcttcatcatggaaagccacaagcctcagaaggcagccagaggacaggaagagtctgtgatgctcatgtctgtgtcatggcatgagggggaattgacgagtgcttgcttagcatcagctctcattgtattgaaggctgtgcccttggtgtgcttaagcggatcagcg

SEQ ID NO: 166204 - DNA, 375 bp, Homo Sapiens
cacagactgatgacgatgattacttattcgaccgtcagtaaccccgattgagcccgctaaagatactagataattctatcttgaataacttgagaccctttcggggcacaaaagccataaaagtttaaaactccaacaaatgcccacaaacaaaagggcctcaaagagcaaatcaacccatggtaataattcagggtaagaagctgagttacaccaaaggcctgtggaatggagagtgggctggggagaaattctggggtctaatccattctttgacttttactaagagttatgaaacttggaggcaagtcacttgaaccaagatgcagtttcctttatcagccaaagaggaaaatacttcccctgtgcttaagc

SEQ ID NO: 166205 - DNA, 432 bp, Homo Sapiens
gacctagaggatccgctgatccgcttaagccattgtaaattcgggtcttcgttacagtagctgaacttacatcctaactagcaagtggtggaaggagaggaggctaatcaatgtaacgggatgttacacatacaagaaacttgctcaataggtgccaagaaaaggtggtgaatagtggatagatgtggactacaaggaggttcccagaagcagcagtattgtctctgttaatgctacagaggtaaccaagcctttaaggaacatattagaagtatagtattcccatgtaatgcaatacccagaaatgcattgtggagaaaaaacaattctttatcactgaaactcaataaacaacttaaggtattccctagaagaaatgattaaaactccatcccagtactgcttggctgaccttaagcggatcagcggtac

SEQ ID NO: 166206 - DNA, 666 bp, Homo Sapiens
  misc_feature (53)..(53): n is a, c, g, or t
ttcggagctcgggtgaccgcttgatcccgcttaagttgagaattgatccgttngaaggggaaacaagacaaggaggaaggtcgagattgcgaattaccatggggcttccatagggtccacgtgcggcaagttaccgcgacctgccttcaccagggtgaaccatttagccacgctgaacaaccaccaatagcgccctgcaagagacaagtctatcgagccctctcggcatgtccactggtagcccgggcaccagccgctgcggcttgtgaggggcaccatgctccaccacacggggaccttcacagttggaaaaaaagaagaggaaaaactaattccttcggtaacagtttattttcatttttgggaaaggcaaaaccactacctggaactcggtgcctccgtggttaactttcctattttgcttgtgatttaaaggctgttctgggccaggggggaaaaggtgtctccttcggtagggaatatataacgtggtgataacctgtcactaggcaggagcatccactctgcagggacagtggcccctcgggaaagcccgccgctcctggccaaggcctctctgcagactccacgggggctcaccctctgccgtcaggcgactctgaaattccgacatttctcccttaaagtctcaacacaccaaggaag

SEQ ID NO: 166207 - DNA, 336 bp, Homo Sapiens
gaggtcgctctggattatcccgctgatccgcttagcttagtgttatgcaggttaatttctcaaataactaatgtttaataagtactaccatttcaaaagcacagtcattacaaaccactcgtaattgacatcttactacatacataaaacaacttccatacacagaaaattctgggagggatggaactggcaaccaaaatgagtgactgacggcacagtctcaaccaatcaaggtttattaagccagctttagggcccatccaggaaaaaccaacacatatgtaactgtttttccaaagagattttcaggaggtttcctatttatgtgtttcctta

SEQ ID NO: 166208 - DNA, 869 bp, Homo Sapiens
ttgcgctacgtgctgaaagaagggttaaaatggctgccattgtatgggtgttactttgctcagcatggaggaatctatgtaaagcgcagtgccaaatttaacgaggaagagatgcgaaacaagttgcagagctacgtggacgcaggaactccaatgtatcttgtgatttttccagaaggtacaaggtataatccagagcaaacaaaagtcctttcagctaatcaggcatttgctgcccaacgtggccttgcagtattaaaacatgtgctaacaccacgaataaaggcaactcacgttgcttttgattgcatgaagaattatttagatgcaatttatgatgttacggtggtttatgaagggaaagacgatggagggcagcgaagagagtcaccgaccatgacggaatttctctgcaaagaatgtccaaaaattcatattcacattgatcgtatcgacaaaaaagatgtcccagaagaacaagaacatatgagaagatggctgcatgaacgtttcgaaatcaaagataagatgcttatagaattttatgagtcaccagatccagaaagaagaaaaagatttcctgggaaaagtgttaattccaaattaagtatcaagaagactttaccatcaatgttgatcttaagtggtttgactgcaggcatgcttatgaccgatgctggaaggaagctgtatgtgaacacctggatatatggaaccctacttggctgcctgtgggttactattaaagcatagacaagtagctgtctccagacagtgggatgtgctacattgtctatttttggcggctgcacatgacatcaaatgtttcctgaatttattcaaggagtgtaaataaagccttgtgattc

SEQ ID NO: 166209 - DNA, 608 bp, Homo Sapiens
ctagaggttagctgatcgcttaagggcttagacataagatggctggaagaattgtgaatcttgtagtcagaaacttgaaagagagaataaccattgtaacatcagtcacagcataggcatggctattgcaccttgggaagaagcctttaatcggttagacttctcaagtgcaattcaagatatccgaaggttcaattatgtggtcaaactgcaggacaaattcgagcatcttaaaatgattcaacaggaggagataaggaagctcgaggaagagaaaaaacaactggacggataaaccatagcagtagtttagcaaggactagaagcctttcctctctaagagagaaaggaatgtatgacgtgcagtccactactgagcctaccaacttgatggccaccattttttggatagcagcatctttattagaatcagattatgaatatgaatacctcctggctctcaggcttctcaacaaactgcttatccatttgcctttgcataaatcagagagtcgagagaagattgaaaatgtacaaagcaaatcgaaatggactaatttgccaggactccagcaagctcttccttaaggggatcagcgggtaccgag

SEQ ID NO: 166210 - DNA, 536 bp, Homo Sapiens
tgctgagtactggcaaacattagtccatttcaatttgctttgtacattttcaatcttctctcgactctctgatttatccaaaggcaaatggataagcagtttgttggagaagcctgagagccaggaggtattcatattcataatctgattctaataaagatgctgctatccaaaaaatgatggccatcaagttggtaggctcagtagtggactgcacgtcatacattcctttctctcttagagaggaaaggcttctagtccttgctaaaactactgctatgggtttatccgtccataccattatatcacagtgtgttactccgccgccggtcacctcgtcaggtcaccaaatcaaacttaatctcaaagagttacttcttgcattactgttatatcccaaataactgctactattaatgggacttgtgcttaagcggatcagcgctgatccgctaaagagagtgaggcctgactctaaaaaaacccttaactccccaaataaagggcttttcaaatcccagccttacagcatgagg

SEQ ID NO: 166211 - DNA, 339 bp, Homo Sapiens
gcttaaggggtgcagagggcctggactatgtgtgtctgtgggatagtctgttactacctctgggactctcatctcgtgagtgtgcttgggtgtgtccaaccgtttttcctagtgacaaagtctgggtaattctgtggggacatatattggtgtatctgggaggtcccatgtgtctcagtggtggtccctgttttcaggaaagagtgtctgtgaatgtccatgtgtctcactgcacagctgtgatttttctgtgtctctgtgttttccagtctttgtgtgatgaaatataaaggcctagcaggctcagagttattaatgaattgtacttaagcggatcat

SEQ ID NO: 166212 - DNA, 373 bp, Homo Sapiens
aggacccgctgatccgcttaagtgatccgctaggctgatccgcttagagatttgagtgtggaagccttctagcttggtgtggaggctggtcatcagctcaaacaccttctcctggacagaaaatccaaaattgttaccatcctcaatccgaggtatccgcagctgcaaccaggtggtgaccaggttgagctgctcaatgacatccttgatctcaggcttcaagcgctgcagaaggaccacgatcttttcattgcagttcactgggccacagggaggacctttgtcttcatcctcccccttcttcttttcatccttgtcttccttctcctgctgtttcttccgctcctctttctctttctccttaagcggatca

SEQ ID NO: 166213 - DNA, 418 bp, Homo Sapiens
aagctaggaccacgacaactcaattgtagtcgatccccagcaggcttgggccccagattaagatgtcatataacacagcataagcattgcggatctccatgaccatcagccggatgtcccggtactctgcctcatccagctcgtgcaccagctgccgataatcacccacatggggctgcttggctgctttagtcactgcatcaccacgctcagagaaatacttagagatttgagtgtggaagccttctagcttggtgtggaggctggtcatcagctcaaacaccttctcctggacagccactccaaaattgttaccatcctcaatccgaggtatctgcagctgcaaccaggtggtgaccaggttgagctgctcaatgacatcttaatctggggcccagcctgctggaccggctcgttc

SEQ ID NO: 166214 - DNA, 849 bp, Homo Sapiens
aagacctctgtaccaagacagagaacctgctcgggagctatttccccaagaagatttctgagctggatgcatttttaaaggagccagctctcaatgaagccaacttgagcaatctgaaggccccattggacatcccagtgcctgatccagtcaaggagaaagagaaagaggagcggaagaaacagcaggagaaggaagacaaggatgaaaagaagaagggggaggatgaagacaaaggtcctccctgtggcccagtgaactgcaatgaaaagatcgtggtccttctgcagcgcttgaagcctgagatcaaggatgtcattgagcagctcaacctggtcaccacctggttgcagctgcagatacctcggattgaggatggtaacaattttggagtggctgtccaggagaaggtgtttgagctgatgaccagcctccacaccaagctagaaggcttccacactcaaatctctaagtatttctctgagcgtggtgatgcagtgactaaagcagccaagcagccccatgtgggtgattatcggcagctggtgcacgagctggatgaggcagagtaccgggacatccggctgatggtcatggagatccgcaatgcttatgctgtgttatatgacatcatcctgaagaacttcgagaagctcaagaagcccaggggagaaacaaagggaatgatctattgagagccctctctcccattctgtgatgagtacagcagagaccttcctgctttttactggggactccagattttccccaaacttgcttctgttgagatttttccctcaccttgcctctcaggcacaataaatatagggtatacgcactggccaaaag

SEQ ID NO: 166215 - DNA, 984 bp, Homo Sapiens
gggaggaaggcggagctgggtgcgagcgccctaccgctttcgctttcccttcgcggtgcccactccactccttgtgcggcgctaggccccccgtcccggtcatggccatgctcagggtccagcccgaggcccaagccaaggtggatgtgtttcgtgaagacctctgtaccaagacagagaacctgctcgggagctatttccccaagaagatttctgagctggatgcatttttaaaggagccagctctcaatgaagccaacttgagcaatctgaaggccccattggacatcccagtgcctgatccagtcaaggagaaagagaaagaggagcggaagaaacagcaggagaaggaagacaaggatgaaaagaagaagggggaggatgaagacaaaggtcctccctgtggcccagtgaactgcaatgaaaagatcgtggtccttctgcagcgcttgaagcctgagatcaaggatgtcattgagcagctcaacctggtcaccacctggttgcagctgcagatacctcggattgaggatggtaacaattttggagtggctgtccaggagaaggtgtttgagctgatgaccagcctccacaccaagctagaaggcttccacactcaaatctctaagtatttctctgagcgtggtgatgcagtgactaaagcagccaagcagccccatgtgggtgattatcggcagctggtgcacgagctggatgaagcaaagtaccgggacatccggctgatggtcatggagatccgcaatgcttatgctgtggtatatgacatcatcctgaagaacttcgagaagctcaagaagcccaggggaaaaaacaaaggaatggatctattgagagccctctcttccatttctgtgatgagtaccagcaaagaccttccctgccttttttacctggggaacttccaaaattttcccccaaaccttgcctttctggttggaaaatttttttccctccaccctttgg

SEQ ID NO: 166216 - DNA, 826 bp, Homo Sapiens
gggctttcccttcgcggtgcccactccactccttgtgcggcgctaggccccccgtcccggtcatggccatgctcagggtccagcccgaggcccaagccaaggtggatgtgtttcgtgaagacctctgtaccaagacagagaacctgctcgggagctatttccccaagaagatttctgagctggatgcatttttaaaggagccagctctcaatgaagccaacttgagcaatctgaaggccccattggacatcccagtgcctgatccagtcaaggagaaagagaaagaggagcggaagaaacagcaggagaaggaagacaaggatgaaaagaagaagggggaggatgaagacaaaggtcctccctgtggcccagtgaactgcaatgaaaagatcgtggtccttctgcagcgcttgaagcctgagatcaaggatgtcattgagcagctcaacctggtcaccacctggttgcagctgcagatacctcggattgaggatggtaacaattttggagtggctgtccaggagaaggtgtttgagctgatgaccagcctccacaccaagctagaaggcttccacactcaaatctctaagtatttctctgagcgtggtgatgcagtgactaaagcagccaagcagccccatgtggggtgattatcgggcagctgggtgcacgagcctggatgaggcagaagtaacggggaaatcccggcttgatggttcatgggagatccgcaaatgccttatggctgtggttaatatgaacatcaatccctgaaaggaactttcgaaagaaagctccaagaaagcccccagggggaagaaaaact

SEQ ID NO: 166217 - DNA, 849 bp, Homo Sapiens
  misc_feature (257)..(318): n is a, c, g, or t
gggccactccactccttgtgcggcgctaggccccccgtcccggtcatggccatgctcagggtccagcccgaggcccaagccaaggtggatgtgtttcgtgaagacctctgtaccaagacagagaacctgctcgggagctatttccccaagaagatttctgagctggatgcatttttaaaggagccagctctcaatgaagccaacttgagcaatctgaaggccccattggacatcccagtgcctgatccagtcaaggnnnnnnnnnnnnnnnnnnnnnnnnnnnnnnnnnnnnnnnnnnnnnnnnnnnnnnnnnnnnnnggggaggatgaagacaaaggtcctccctgtggcccagtgaactgcaatgaaaagatcgtggtccttctgcagcgcttgaagcctgagatcaaggatgtcattgagcagctcaacctggtcaccacctggttgcagctgcagatacctcggattgaggatggtaacaattttggagtggctgtccaggagaaagtgtttgagctgatgaccagcctccacaccaagctaaaaggcttccacactccaatctctaagtatttctctgagcgtggtgatgcagtgactaaagccagcaagcagccccatgtgggtggattatcggcaacctggtgcaccaacttggatgaggcaaaatacccgggaaatcccggcttattggcatggaaaatccccaaaggcctatggctggggttatatgacctcctcctggaaaaactttcaagaaattccataaagcccaggggaagaaaaaaagggcaaatgatctaattgagaaccctcttctccccattttgggaaggagtaagcgaa

SEQ ID NO: 166218 - DNA, 815 bp, Homo Sapiens
ggggaccctcgacttcggagaggcagcgcggttcctctgggtgcttccgcctccccttctcctgcttctccagcctcttcggcctcctcgcccgccgcgggaacccgagaccccagtgtatgccccacccctgaccccgctcgcgacatgtccaccccggctcggcggcgcctcatgcgggacttcaagaggttgcaggaggatcctccagccggagtcagcggggctccgtccgagaacaacataatggtgtggaacgcggtcattttcgggcctgaagggaccccgtttgaggatggaacatttaaacttacaatagaattcactgaagaatatccaaataaaccacctacagttagatttgtctctaagatgttccatccaaatgtctatgcagatggtagtatatgtctggacatacttcagaaccgttggagtccaacctatgatgtgtcttccattctaacatccatacagtctctgttggatgaacccaatcccaatagtccagcaaacagccaggctgctcagctgtaccaggagaacaaacgggaatatgaaaagcgtgtttctgcaatagtagaacaaagctggcgtgattgttgaccccgggtacagtttaaagaagctggccataagaaaaatatatattgatgtgtttgtcacctccctactcctgtcattacatttactttattaaaaagcaaaataactgttgtgctgtttccatcttccttgccaagttttcctacccccttctaccctctcccttaaacatcaagaaaacacccctctatgaaaatccaatggtactg

SEQ ID NO: 166219 - DNA, 732 bp, Homo Sapiens
catttgtaacacagaccctgaaactggatggcctttcaccttctgtgcctctccaagtcccaaagaagtcaattttgtttcaaggggagcttcaagtcaccagcccagagttccactttttcctgaaaatggtttacaccagcagccagaacccttgcttccaaataatatgaaatctgcctgtgaaaaacgtttaggatgttgtagttctcctcattctaagccaaattgctcaaccctttctccaccaatgccactgccccagctgttaccttcggttactgatgcaaggtcggcaggaccttctgatcatattgattcctcagttactggggttcaaaggtttcgagatactctaaaaataccctacaagctggaattaaaaaatgaaccagggagaacggatttgaaacacattgttatagatgggagcaatgttgcaattacccatgatctgaaaaagttcttttcttgtcgtggaagtgcaattgcagttgaatatttttggaagcttggcaacagaaacatcactgtatttgtccctcagtggagaacaaggcgtgatcctaatgtcacagaacagcacttcttaacccagctccaggagctcggaatattatctttaactcctgcccggatggtctttggagaaagaatcgcttctcatgatgacagaattctactacacttagcggacaaaacagtgacatgaaatcaacaccacacaaaagc

SEQ ID NO: 166220 - DNA, 880 bp, Homo Sapiens
tctagagtatacactcctgttggccacgcactgtggtcgatctccacttcccattggctctctacaagaagttactcaatgtaaagcctggcttggaagacttaaaggagttgtcacccactgaaggaaggagtctccaagagcttttagattaccccggggaggatgtggaggagactttctgcctcaacttcacgatctgccgagaaagctatggagtgattgaacagaagaagctgatacctgggggagataatgtaactgtgtgcaaggataacaggcaggaatttgtggatgcttatgtgaattatgtcttccaaatctcagttcatgaatggtacacagccttctctagtggcttcctaaaggtgtgtggtggcaaagtacttgagctcttccagccttcagaactgagggctatgatggtggggaacagcaactacaactgggaagaactggaagagactgccatctacaagggagattactcggccacacatcccactgtaaaactattttgggaaacatttcatgagtttccattggaaaagaagaagaagtttctcttgttcctgacaggcagcgatcggacttcccatctacggcgtggccagtctgcagattgtcatccagtccacagccagcggggaggagtacttgccggtgcgccacacttgctacaaccttcttgacctccccaagtacagcagcaaagagattctgagtgcccggctgacccaggcccttgacaactatgaagggtttagtttggcctgaggcttctcagtttgtccagtatttcccttcgttcctcagtgtccacattgaggcctatacagaaaatcatggggagtgatttctatttttttattgtctaagc

SEQ ID NO: 166221 - DNA, 470 bp, Homo Sapiens
tgcctagagttccgctgatccgttaagtacgaaatgataaataatcgtcctctcacattagtttcatcattaaattcttcagcccacttcttccttgactgtgcagtagtggaaccatctaaacggtaatagtcaatgtttcgaagccacttcccctcacctttataaataaggggtttatctttatcttctgtcttctccctactagctaattcaagaaaatcttcaatcaagtccagagatatgagggactggctgaaatcaaggactttatccccaatttcctctgccattcgaagaatttcaaagagaagtaccattttcccagaatgctctaaaacctcagcatcagcatctgtaacaaaatctttgtaccagtctggagctgggcttgcttggattagaagaagaagtagctttactttcttccagttttaaagaaacagaaggattgtttcctcttaagcgga

SEQ ID NO: 166222 - DNA, 383 bp, Homo Sapiens
ctagagttaccctgatccgcttagccactatattagggttttctgttccacattgccaaattcaattcttgatacatacagaatcctgtaacttactgaggaatttgccaaatttaatagaaactcacgttagacagaatctgtaaaaagctatattaggtactttcaaaatgctatatcaagttactgagtctgactgccacatatttgtcatctatatgtggccccatgtctacttcaggcatggttaatcaattagggcactctctgccaataaactggaaataagtcaataaaaatgtctcaactccaagtctcaacagctacaattgatattaacctggcactcaataaagaacctattttcccttaagcggatcagc

SEQ ID NO: 166223 - DNA, 385 bp, Homo Sapiens
gcttaagcatgaagcatactgacatttcaaccagacgcacaaaggagatctctcagtggcagcggagtggaaaattgccatgaatgctagttagggtagaaagactgtattgtataaacagacctttttagtgcattactttttaaagtggatatctgtggtggttccactttaatactgaaacaccgaaaggcatttctatatttctaatcatgttctaaagtgctcttatgagagacttgtgggccatcagtattagtgatttcatactgcagtgctggcattgcagatatttttttaaattggtgctgctttgcccaatcatgttaaaactcagggggatataaaaataacattcatactggctatcttcttaagcggatca

SEQ ID NO: 166224 - DNA, 537 bp, Homo Sapiens
gtaatgacagatataatgagagggcacccataacccaggcaaaatccaacagccatcatcaaatgctgggccatgtgatggaacacgaggatgatccggtaagccagcaggaagccaagcatgagcatccagaagaacaaagagaggtagaagaagtgtgtaaagaacacagcaactgtgcagactccagaagggttcaccgtggtgtccactgtggcaccaacaataaaccagacatcagcaatcaagagggacagggctatgttcaccatgcaaatacgacgtgtgtgagaggtttggctttttttaatctgcttccaaaacaaagcctcgatgatcaggcataaaatgagacttccaatggagatacccagtcccacataggtgatccattttacaacggggaagattgtagaggggacaaaaaggtgacatcaatatggagaaggacgtcaagtgagtacattggcacgtcacgatgtcttgagtttcattcactaggtgcagcctgcattcttccaccttaagcggatcagc

SEQ ID NO: 166225 - DNA, 342 bp, Homo Sapiens
ttaggactacctgtaaggtgttgagtagtcatggtgactgacatcctgtctcattctcaatcttaggaatagctttcaaaatttaaacattaagtatgatgtatgctgtaaatttttaaaatattctatatcagattaggaagttccattctgttaggctgctaagagtttttattatgtatggtgtgtaattatattcactgttatttttgtatctactaagatgatctgatgatttttctctttagttatgttaatgtggtaagttatattgattggttttcaactattaaaccaaaacatatttctgaaataaatctagcttagtcatggtgcttaagc

SEQ ID NO: 166226 - DNA, 427 bp, Homo Sapiens
  misc_feature (12)..(12): n is a, c, g, or t
tgaggatcccgnctgatcgcttacgcagctatatttgaaatattaagtatgaaaggagtaattaaaaacaagcaaaacaaaacaagacttagtttttaaatgaccaaacttgttccttaaagatgtggtcattaactcgagttagttcttatttcctctgtttattttttattctaagtacactgattctgtgaatgtaccttttttattaacagggaaaagaaaatgaattaatttgatatgctctaaatacattaaaggtgcttcaaaatatgtagaaacattactatgaaatcagtttttaaaagatatactttctctttgtcctgaggtttctcgggcttgttcaaaaggaagaattcttgcctgccatacagaaactctctagcactccctgaccttaagcggatcagcggggaccgagctc

SEQ ID NO: 166227 - DNA, 782 bp, Homo Sapiens
  misc_feature (25)..(25): n is a, c, g, or t
  misc_feature (169)..(169): n is a, c, g, or t
  misc_feature (172)..(172): n is a, c, g, or t
ccggtcgactctagaggaccccgtnagcatttccagcagcgtcagctccttctccacacccccgaggctgccctgcaaggctcgctccttctcctccagcttctgcacagtcagcagctgggcatccacctgggacttgaggccaaggacctgctcgcccaactcattnttntcctcccgcagcagcttgtgaatctggttggccttgatccgctctgacattagcttaaagttggcatcatccttttcccgcaactgctgtagcaagccgcccgttctgttcctgcatgtcctcaaaagcctgacctgtcacacccatctctgagagcagagcctcctcctcctgcttggtggcacccagcttgcgctgcaggtgttctatctgctcctctgcctgccgaatgcgccgcagggcatcctcatccgcgatcttcttgctctcccttcgatccctctcctccaattcccggatgcggctccgaagctcatcaacctcggccttagccttgcgttccgctgccatgagctgcaccttatcccgctgctccttgggcgctgacttgtacatatcccaccagcagtttcatctcctttctggctctcctgggccttcttgagctctgctcggagacccttgaggagttctgattccttccgcttggtttcttccaccttggccttctcccgatcagcccttgagagagcggaggctacaggtggaggtcctaggctgggaccttcccgttcccgaagctcccgcttggggtcgacgcggccgcgaa

SEQ ID NO: 166228 - DNA, 513 bp, Homo Sapiens
agaaggtggaagaggagctgaagcggctgaagaggaccgcgtcagaagactcctgcaagaggaagaagctggaggaagagctggaaggcatgaggaggtcgctgaaggagcaagccatcaaaatcaccaacctgacccagcagctggagcaggcatccattgttaagaagaggagtgagggatgacctccggcagcagagggacgtgctggatggccacctgagggaaaagcagaggacccaggaagagctgaggaggctctcttctgaggtcgaggccctgaggcggcagttactccaggaacaggaaagtgtcaaacaagctcacttgaggaatgagcatttccagaaggcgatagaagataaaagcagaagcttaaatgaaagcaaaatagaaattgagaggctgcagtctctcacagagaacctgaccaaggagcacttgatgttagaagaagaactgcggaacctgaggctggagtacgatgacctgaggagaggacgaagcttaagc

SEQ ID NO: 166229 - DNA, 626 bp, Homo Sapiens
  misc_feature (581)..(581): n is a, c, g, or t
tagcttagaggatcccgctgatccgcttaaggaaaggaggaaagagtaaatgaagaaagtcatctaactgaaaaggaatatatagaacattgtaacacccctacaactgattctgattcatctatagcagttaaagcactacaaatagatagctttggtttagttacatgctttcaacaagagtctcttgatgtttctcaaatgatacttggaaaatctcagcaacctgagtcaaaaatgcaatctgaatttataaaagaaaaaagtgctacttgttcaaatgaggaaaaagataacttaaacgagtcagtaataactgaagagaaagaaacagatggagatcacctatcttcattactgaacaaaactacggttcacaatatacctggattcgacagcataaaagaaaccaatatgcaggatggtagtgtgcaggtcattaaagatcatgtgaccaattgtgcattcagttttcagaattctttgctatatgatttggattaattctatataattttggacttttaaatattaaggttaaaaaatacctgtatctaaaattgattctggttactgttgtnctaaaaactaaaggtattaaaagtataaaattaaaattttgcaaa

SEQ ID NO: 166230 - DNA, 697 bp, Homo Sapiens
tttaaaagagggtgagaacaatgattatgtttgcaaaagttctgagaagtcccatctactgtccaaaactttggattgaagtccttattttgttttttcctttacttagagacaggtatatacagtgctgctgtaataatgaaacaaaggtgaaatctactgtaaagttgcacaatacagaaaactgttgctccatcttctactacataaacgtgtgactccacaggttagtaatgttgttgtcattgtttttgttaagttggaattattccatcacgtctaagacctctctttaactccagatcctccaattttttccacaattcttcacgctccttttctttctttttctcacgctgacgatctgacttgtatgtggctgtcagctcgtcaaacatggtgctgttcatttccataaatgccttcaacacattgtacaccaacgccacaatagccggattccaatgttcttttgaaatcctataaaggctggaaaacatgatgggaaggatgacgttagagttttcttctatcaaactcatgatgtattcattattccaataatagagtgctctttctgccacctgaaaatgggggctagatacacacttggcgatttgtttaaacaaaggttcttggattttaacaaattgtgaaggttcaatcacatccaatatttcttccagttccccaagcc

SEQ ID NO: 166231 - DNA, 786 bp, Homo Sapiens
  misc_feature (63)..(63): n is a, c, g, or t
  misc_feature (159)..(163): n is a, c, g, or t
  misc_feature (165)..(185): n is a, c, g, or t
gaaccccaagggattcctcccttagggggaaaaaccagggttaatggaccccattgttcccanctttacccttaactgggggcccccgcgcgcccaaaacgaaatgggttctaagaaaagctttctcggaggggcccgagggcggcccggacatgtttnnnnntnnnnnnnnnnnnnnnnnnnnngggggaccagatgaaattccaggcttttatcagaagcaaaagtttatccctatccaaaaatgaaattatacaaattcatacatatggtaaagattctagctgcctcttaaacgagacaaattttcagcagaagggcccaaaacaaaatggtcctagtcctctgaagtaaaaatatttatgggaaaaatcagtttttgtaagaaagaaaaattaagaatagtctctctcccaggccatagagcttcctttgtccaatcaggttggagcatgccaggggagatcagcttgctcagaagtcactatctaacgaagaaaaacataaatcctttcagagaaaggacactcagaaagaacaggtgaggagtgtgtaacatcaaaccaaaccaacctcatctcaaccccactcagggcctctctgatgcaatcccaaagttagcagtggcaatgcaactttcagaccgggagagctctgactgcctgttggatactcgagtcacagtccatggcgtgttttgttattggccaatgtctgttaaccattaactctcttcatgattgcaccagttagaccatttgccctgatggataatggtgatagccg

SEQ ID NO: 166232 - DNA, 657 bp, Homo Sapiens
  misc_feature (596)..(596): n is a, c, g, or t
  misc_feature (618)..(618): n is a, c, g, or t
tcgcttagtgctccctggggatcttcccacaggagggccagcgctgtggaccttacaacgccgagtgcactgcattcctgtgccctagatgcacgtggggcccactgctcgtggactgtgctggtgcatcacggatggtgcatgggctcgccgtgtctcagcctctgccagcgccaaaacaagccaaagagcctcccaccagagccgggagaaaaggcccctgcaatgtggtgacacctccccctttcacactggatccatcttgagccacagtcactggattgactttgctgtcaaaactactgacagggagcagcccccgggccgctggctggtgggcccccaatgacacccatgccagagaggtggggatcctgcctaaggttgtctacgggggcacttggaggacctgggcgtgctcagacccaacagcaaaggaactagaaagaaggacccagaacggcttgctttcctgcatctctgtgaagcctctttccttgggccacagattgaattcgcagggagtgcagcaggaaggaacaaagacagggcaaacggcaacttaggctggggttcattgttgcttggggcaaggncgggttccttccacagagaggnaggggaccattttttggacagacagtttttggggaggtt

SEQ ID NO: 166233 - DNA, 912 bp, Homo Sapiens
aacatgatacactcgagctcggtacctgcaagcttgggtttcagagtccggggggccgccaggcccctcttggtcagcttggggccaccagctgccttgctgttctttgccaccatgctacacaggagggaaggcgtcagtttggagctggagggaccttgggcggccaactcgtccttcaggaattcgtcgtctttcctctgagtccgtattgtaagagtagctgctcacttccgaggcaaacggggaatgggccgacttgggctggcctctggccttgaaccccacctccatcttcctggttttggctgcccttttgtgtttaccttctctggaggatttcagagacaggccgaggcccttggccagcgccttcctgttcttccccagcaggctgtcgtaaggagtcaagtacctgccgcagcccccgctagttttcgatttccccccagcactgtccgaaaacttgaagggcgacttcaacttgtcctgcttggtgagggagagggccttgtcgagcttgcttgccaactgctcctggtcgctggccatcttcttcttcttaatctttagctgactgatgaagtccgacgaggcctcatgttcatcccaagtctggttcctccccctggctttccccattccgatgagggcatcatgttcctcctcagaccccttgtgtctctttcttatccctgctcccagctcataatcatctgatgtcagcagagacttgctgctcagctttccgctactgtggccgctcttccctctcttgcgggggggcgacagggcgctcggggcgtgggtccgttttcgcggcctgccagggcctctgcgtgccaagcttctatggggttcctcgcgcctgtcctcggagtcccggcggcgctgcacgacgcgtgggtccga

SEQ ID NO: 166234 - DNA, 1039 bp, Homo Sapiens
  misc_feature (161)..(161): n is a, c, g, or t
  misc_feature (163)..(164): n is a, c, g, or t
  misc_feature (167)..(167): n is a, c, g, or t
  misc_feature (177)..(177): n is a, c, g, or t
  misc_feature (179)..(179): n is a, c, g, or t
  misc_feature (181)..(181): n is a, c, g, or t
gggcttatggaaatttaatagggaccccccttttggggggacccggcccgattttcccccctttgttccaagaaaagctggttgcagggaacaagctaattgcccatgtgccgttttcattacttctttttcccgcccccgacataggagccctggagttngnnggnttcgggtgcntntnttacaaactgggaagctgtttattggttcgcgtgaggaagcctatatccaaggaggcaccaaggagggggagggaattcccctgctacagtaccatggaaggggctggggctggggagtgggcctgccaacaggcagggggtcaggagaggttttctggaactagcctcagcttctcaaatgggccttaggacacagcccatggggggagggggcagagccaggctggctctgaaagccaaggatagctaagaactccacctcttaggcccctgacgcatggtcagcgtggggtctggctggatggggtggggcagggccccctgcctattctacattcaagtgtcgctccctccgtggtcttgcagggtctctctggggccttctgaggctggctggtagtggtgagtgagaagtggcatctcctctgtatcctcccaacatctgtctgtccagaattggtcccctcctctctgtggaggatcccgccgtgccccagcacagtgagcccaggctacgttgccgtttgcctgtctttgttccttcctgctgcactccctgcgagttcagtctgtggccaaggagagaggcttcacagagatgcaggaaagcaagccgttctgggtccttctttctagttcctttgctgttgggtctgagcacgccaggtcctccaagtgcccccgtagacaaccttaggcaggatccccacctctctggcatgggtgtcattgggggcccaccagccagcggcccgggggctgctccctgtcagtagttttgacagcaaagtcaatccagtgactgtggctcaagatggatccagtgtgaaagggggaggtgtcaccacattgcaggc

SEQ ID NO: 166235 - DNA, 456 bp, Homo Sapiens
  misc_feature (16)..(16): n is a, c, g, or t
  misc_feature (63)..(63): n is a, c, g, or t
agggaccaattctganagacagatgttgggaggatcagagaatgcacttctacttacactacnagcagcctcagaaggccccagagagaccctgcaaaaaccacggagggagcgaacacttgaaatgtagaataggcaagggccctgcccaacccaatccagccagaccccacgctgacccatgcgtcaggggccctagaggtggagttcttagctatccttggctttcagagccagccctgctctgccccctccccccatgggctgtgtcctaaggcccatttgagaagctgaggctagttccagataaacctctcctgaacccctgcctgttggcaggcccactccccagccccagccccttccatggtactgtagcaggggaattccctccccctccttgtgccttctttgtatataggcttctcacggcgaccaataaacagctcccagttt

SEQ ID NO: 166236 - DNA, 1055 bp, Homo Sapiens
ccgcttaagaccaatgtataagcctgttgacccttactctcggatgcagtccacctataactacaacatgagaggaggtgcttatcccccgagatacttttacccatttccagttccacctttactttatcaagtggaactttctgtgggaggacagcaatttaatgccaaaggaaagacaagacaggctgcgaaacacgatgctgctgccaaagcgttgaggatcctgcagaatgagcccctgccagagaggctggaggtgaatggaagagaatccgaagaagaaaatctcaataaatctgaaataagtcaagtgtttgagattgcacttaaacggaacttgcctgtgaatttcgaggtggcccgggagagtggcccaccccacatgaagaactttgtgaccaaggtttcggttggagagtttgtgggggaaggtgaagggaaaagcaagaagatttcaaagaaaaatgccgccatagctgttcttgaggagctgaagaagttaccgcccctgcctgcagttgaacgagtaaagcctagaatcaaaaagaaaacaaaacccatagtcaagccacagacaagcccagaatatggccaggggatcaatccgattagccgactggcccagatccagcaggcaaaaaaggagaaggagccagagtacacgctcctcacagagcgaggcctcccgcgccgcagggagtttgtgatgcaggtgaaggttggaaaccacactgcagaaggaacgggcaccaacaagaaggtggccaagcgcaatgcagccgagaacatgctggagatccttggtttcaaagtcccgcaggcgcagcccaccaaacccgcactcaagtcagaggagaagacacccataaagaaaccaggggatggaagaaaagtaaccttttttgaacctggctctggggatgaaaatgggactagtaataaagaggatgagttcaggatgccttatctaagtcatcaccatcttcctgctggacttcttcaccatggtctccgagttcatccctgtctcttggtgatagttctctccttgc

SEQ ID NO: 166237 - DNA, 989 bp, Homo Sapiens
ggggggtaggcgctgtctccgtcgcctccaacccccccggtccgaccagggaaggtgggatgctctgatggccgggcctgcggcgctgagcgcggcggcggcggctgctctggcggccgccctgctcctgctgcgtcgtgaggacccggggccgggggcctggccccagcatggccgaaacagaagccctgtcgaagcttcgggaagacttcaggatgcagaataaatccgtctttattttgggcgccagcggagaaaccggcagagtgctcttaaaggaaatcctggagcagggcctgttttccaaagtcacgctcattggccggaggaagctcaccttcgacgaggaagcttataaaaatgtgaatcaagaagtggtggactttgaaaagttggatgactacgcctctgcctttcaaggtcatgatgttggattctgttgcctgggtaccaccagagggaaagctggggcggagggatttgttcgtgttgaccgagattatgtgctgaagtctgcagagctggcaaaagctggaagggtgcaaacaatttcaactttgctaatcctctaaaggagctggataaatcaagcaattttttatatctacaagttaagggagaagtagaagccaaggttgaagaattaaaatttgatcgttactctgtatttaggcctggagttgtgttatgtgataggcaagaatctcgccccagtgaatggctggttagaaagttctttggctccttaccagactcttgggccaggggggcattctgtgcctgtggcgaccggggttaaaaccaagctgaacaatggggtgagaccaagagacaagccaatggaactgctggagaaacaagcccttccaatgacctggggaaaaacgcatggtttctcctcagccctggaccccccttggaaaaaaggggtttttatttggcaaaccttaacaccacatcaccccaatcgcgttaatttccccggggcc

SEQ ID NO: 166238 - DNA, 956 bp, Homo Sapiens
agtgattcaaaaggtataaccaggctctggaccctctgatggcagagcaccatcaattctggaatggaatggatgcctgaggataagtaaaccacaaagttaaaacatgctgactttttgttaggaccctgaaattaaccgatttggtgatgggttgtttaaggttgacacataaaaccagtttctccacgtgtggtcatggcttgagagagccatgcgctttccccaggtcatggatggccttgttctccagcagttccatctgcttgtctcttggtctcaccacattgttcagcattgctctaaccacggtcaccacaggcacagaatgccccctggcccaagagtctggtaaggagccaaagaactttctaaccagccattcacctgggcgagattcttgcctatcacataacagaactccaggcctaaatacagagtaacgatcaaattttaattcttcaaccttggcttctacttctcccttaacttgtagatataaaaaattgcttgatttatcagctcctttagaggatagcaagttgaaatgtttgcaccctccagcttttgccagctctgcagacttcagcacataatctcggtcaacacgaacaaatccctccgccccagctttccctctggtggtacccaggcaacagaatccaacatcatgaccttgaaaggcagaggcgtagtcatccaacttttcaaagtccaccacttcttgattcacatttttataagcttcctcgtcgaaggtgagcttcctccggccaatgagcgtgactttggaaaacaggccctgctccaggatttcctttaagagcactctgccggtttctccgctggcgcccaaaataaagacggatttattctgcatcctgaagtcttcccgaagcttcgacagggcttctgtttcggccatgccggcttggtcttccgggtggcctcgcccc

SEQ ID NO: 166239 - DNA, 822 bp, Homo Sapiens
tgtgaactaatgaaaacaaagctggggggggcgtaattattacagcccaggggccattgagcctaacggtcggaatcccgggatatcgtcgaccacgcgtcgaacatttcaacttgctatcctctaaaggagctgataaatcaagcaattttttatatctacaagttaagggagaagtagaagccaaggttgaagaattaaaatttgatcgttactctgtatttaggcctggagttctgttatgtgataggcaagaatctcgcccaggtgaatggctggttagaaagttctttggctccttaccagactcttgggccagggggcattctgtgcctgtggtgaccgtggttagagcaatgctgaacaatgtggtgagaccaagagacaagcagatggaactgctggagaacaaggccatccatgacctggggaaagcgcatggctctctcaagccatgaccacactggagaaatggtttttattgtcaaccttaacacccaacaccaaatcggtaatttcagggtctaaaaaaagtcagcatgttttaactttgttgttttactatcctcaggcatccattccaatcaagaaatgatggtgctctgcatcagtggttcagagcctggttatacatatagatcactcagggagctttggaaaaataaagatttgtcagccctatctcaaacttgaatcaaaatttctggggtgtgggcacaataatctgtaattttctttgtttatacttcccctgatgccactggttccgatgccactggctgggggcctgctttgaaatgcttgtctgcagagtcacagcag

SEQ ID NO: 166240 - DNA, 562 bp, Homo Sapiens
agacaccctggtaacccagcagcaccgtagcctctgccctgtaaaaatcagactcggaaccgatgtgtgctttagggaattttaagttgcatgcatttccagagactttaagtcagttggtttttattagctgcttggtatgcagtaacttgggtggaggcaaaacactaataaaagggctaaaaaggaaaatgatgcttttcttctatattcttactctgtacaaataaagaagttgcttgttgtttgagaagtttaaccccgttgcttgttctgcagccctgtctacttgggcacccccaccacctgttagctgtggttgtgcactgtcttttgtagctctggactggaggggtagatggggagtcaattacccatcacataaatatgaaacatttatcagaaatgttgccattttaatgagatgattttcttcatctcataattaaaatacctgactttagagagagtaaaatgtgccaggagccataggaatatctgtatgttggatgactttaatgctacattttaaaaaaagaaaataaagtaataatataactca

SEQ ID NO: 166241 - DNA, 940 bp, Homo Sapiens
  misc_feature (17)..(17): n is a, c, g, or t
  misc_feature (165)..(165): n is a, c, g, or t
tcaaggagcgagcctgngtggcgaattccgcacgaggcccaagagtgtggctacagaagagagggcagcccccagcactgcccctgcagaagctacacctccaaaaccaggagaagccgaggctcccccaaaacatccaggagtgctgaaagtggaagccatccntggagaaggtacaggggctggagcaggctgtagacaactttgaaggcaagaagactgacaaaaagtacctgatgatcgaagagtatttgaccaaagagctgctggccctggattcagtggacccccgagggacgagccgatgttgcgtcagcccaggagagacggtgtcaggaaggttcagaccatcttggaaaaacttgaacagaaagccattgatgtcccaggtcaagtccaggtctatgaactccagcccagcaaccttgaagcagatcagccactgcaggcaatcatggagatgggtgccgtggcagcagacaagggcaagaaaaatgctggaaatgcagaagatccccacacagaaacccagcagccagaagccacagcagcagcgacttcaaaccccagcagcatgacagacacccctggtaacccagcagcaccgtagcctctgccctgtaaaaatcagactcggaaccgatgtgtgctttagggaattttaagttgcatgcatttcagagactttaagtcagttggtttttattagctgcttggtatgcagtaacttgggtggaggcaaaacactaataaaaaggcctaaaaaggaaaatgatgcttttcttctatattcttactctggacaaataaagaaattgcttgttggttgaaaaattttaaccccgttgccttggtggttctgcaagccctgtcttacttggggcaccccccaccaacctggttaactggggggttgtgcacctgtccttttggtaaactc

SEQ ID NO: 166242 - DNA, 902 bp, Homo Sapiens
  misc_feature (817)..(860): n is a, c, g, or t
gggagtctggggtttggctgtccggacggtgcagcggcgaggccggccgcgaagatgccagtggcggtgatggcggaaagcgcctttagtttcaaaaagttgctggatcagtgcgagaaccaggagctcgaggcccctggaggaattgctacacccccagtgtatggtcagcttctagctttatatttgctccataatgacatgaataatgcaagatatctttggaaaagaataccacctgctataaaatctgcaaattctgaacttgggggaatttggtcagtaggacaaagaatctggcagagagatttccctgggatctatacaaccatcaacgctcaccagtggtctgagacggtccagccaattatggaagcacttagagatgcaacaaggagacgcgcctttgccctggtctctcaagcgtatacttcaatcatcgccgatgattttgcagcctttgttggacttcctgtagaagaggctgtgaaaggcatattagaacaaggatggcaagctgattccaccacaagaatggttctgcccagaaagccagttgcaggggccctggatgtttcctttaacaagtttattcccttatcagagcctgctccagttccccccaatacccaatgaacagcagttagccagacttgacggattatgtgggctttccttgaaaactggatttatcactcctaagttccaagattcatctttcagaatcctgtatactgacaaacgtagaaatgtaaagtttgtattttcaatttattggatggcttaagcacctcagcattccttactatgtgataannnnnnnnnnnnnnnnnnnnnnnnnnnnnnnnnnnnnnnnnnnnaacgtgatgctgaatagtagtagaaacagtatcatcaaaaag

SEQ ID NO: 166243 - DNA, 1152 bp, Homo Sapiens
aaggagcgaggcctgggtggcgaattcggcacgaggcaccgctctgaggcctgtcctgattctggggcctttgctggacgtggtgaaggagatgctggtgaatgaggctcctggcaagttctgcagatgtccccttgaggtgatgaaggcctcccagcaggccattgagcggggtgtcaaagattgcctgtttgtcgactataagcggagaagcggccatttcgatgtgaccactgtggcgtcaataaaggagatcacagaaaagaaccgacactgcctcctggacattgctccgcacgctattgagcggctccaccacatgcacatctaccccattgtcatcttcatccactacaagagcgccaagcacatcaaggagcagagagaccccatctacctgagggacaaggtgactcagaggcattccaaagagcagtttgaggcggcgcagaagcttgagcaggagtacagcaggtacttcacaggggtcatccagggaggagccctgtcaagcatttgcactcagatcttggcaatggtcaatcaagaacaaaataaagtcctgtggattccagcctgcccgctctaggagaatgctgtgctgtggatgactgcagctggccgcctgaggggacgccagactcagctcttttctagcgactgaaagtagaagtctgtccgtctatgaacatgcaggggaaggatccggaaccaggacccagaagcacctcctttgtagacagagggccacggctgcgtgcgatccaggcccaggcccacacactctgcccgtgtcacacgtgtgctttaacacaaaacagataacactaaagacgggttcagcacccacctttctttagccagctgatcagagatgctgcaaagagaacctttcggatcactcgtttacaagccttttctaagtatttggtggtttatgtttacttgaacggctccatgttgccggtgcccagcccctgtcccctctgtcaaccccctgtcgctttggtgttggtttcgttcccgtcttcagcaaaacgaccttggaacctcaatgggggctgctttgctttgggaggttcttgttggtgggaccagagcttgacaaactcctgctccttgtcgtggcgattgggatcctctaggtcacct

SEQ ID NO: 166244 - DNA, 675 bp, Homo Sapiens
cccctcctcagcagacgcagctcttccctccagggatgggacaggatgattttatgatcacgagtgtgggggccttgccatctatcaagtacaaaagaccagtataagagatctcagtgctcaggtacgccagtgctcagccttttcaagaaaatcttatactttctcctttctcctcagcagacgcagctcctttctagcgactgaaagtagaagtctgtccgtctatgaacatgcgggggaaggatccggaaccaggacccagaagcacctcctttgtagacagagggccacggctgcgtgcgatccaggcccaggcccacacactctgcccgtgtcacacgtgtgctttaacacaaaacagataacactaaagacgggctcagcacccacctttcttagccagctgatcagagatgctgcaaagagaacctttcggatcactcgtatacaagccttttctaagtatagggtgatttatgtttacttgaacggctccatgtggccggtgcccagcccctgtcccctctgtccaaccccctgtcgctttggtgtagagtacgtgcacgtcttcagaaaaacgagcttggaacctcaatgggggcttgtttgctttgggaggttcttgtgggtgggacagagctttgaaaagctcctgtgcgtggatgcactctt

SEQ ID NO: 166245 - DNA, 203 bp, Homo Sapiens
atatgatgcctggtctaatagtccctacatcttgctgaaagtaggatgtacacaaaaggagaaagtataagattttcttgaaaaggctgagcactggcgtacctgagcactgagatctcttatactggtcttttgaacttgatagatggcaaggccccaaaaatcgtgatcataaaatcatcctgtcccatccctggaggaaa

SEQ ID NO: 166246 - DNA, 804 bp, Homo Sapiens
  misc_feature (78)..(124): n is a, c, g, or t
  misc_feature (139)..(181): n is a, c, g, or t
ggatcatatggaaattgatgctttagtgagggtgttggctatcctattgttaatttcctgcatccttttttcttcttnnnnnnnnnnnnnnnnnnnnnnnnnnnnnnnnnnnnnnnnnnnnnnntgttcctgggctcannnnnnnnnnnnnnnnnnnnnnnnnnnnnnnnnnnnnnnnnnngtgtgagccactgtgcccagcttgtccttttttcattacacaaaaagactgaatttggttagttctaagttggaagataaagatggtatgcacaggaggcccttgggagccctcagataactttctcattcttccaaaatcaggctgggatgcattctgtaaattttccctgcctaggatgtatacctgaggaataaggtaaggaagatgtcagcaagtcagcctctggtttacctgctagctggcatggatccttaaggaagcaggagggagttgggaagagaggaaggggtgaagttggtatcttttaaagcgagagtgattttacctcagattttgaagaatactaaggaatccagttgttggggtacatgctattattagaaggatctagataatttgtcctctgagtcatacttgacattgtacctgtggcacatcaatccgcactgtttgatactctggctgaatctcagctttcaccaacattgtcaaaggaccttttttagtgcccagccatgcctaagagtgtgtcatctgaagaagggaaacatcctgcatactgctgtcctgaattgctcagtcctcactacctaccagacccgttgggtaaaggtacaaaa

SEQ ID NO: 166247 - DNA, 589 bp, Homo Sapiens
tgacctgaggacccgctgatcgcttaggcaaagataattgggctaacaggataatgaataacaaggcaatttagggctgatgaagacagaggtgcagtaagcgtttgctgtagttgttttgactaattttgccatgaatactctctaacttacacacagtgggtatacaatacttgtcaagtgcctgaaaaggtacaattatcctaagatgaccatggaataagagtatcattcgtggtgcatagatttttcatgtgctcctcccacagaaaaagctacaatcattttcttattgatacgcaagttcatataggaacttagatgtgctccttcactacttttcacatatttgtcacatgtcagtatacttggaattatttgctcagtgttgattttcagattcaaagttttatgaagatgggggcatgttcgacttttttgtttatatagcacctggtaatcagcaatatctgctgtgaaaatgaataaactgatgatttcaaaacccactcgactgcaggaacctttgatctctaatagataaggatctatcattagttctttataagaagatgtgcgcttaagaaaa

SEQ ID NO: 166248 - DNA, 388 bp, Homo Sapiens
gctgatccgcttaaggggtcaggtcacagaagactgctcatcaaaatggtctaaatacaagcatgacctggcagctagttgtcaggcgagggtggttgcagcagaggagaaaaatggggtggttttcatcccgaggagaaggtgtggcagcttataacccccagctcaacctgaagaatgttcagaggaatctcatcctcctacatccacagctgcttctccttgtagaccaaatacacctgggagaggagagtcccttggagacagcagcgagcgtcttccataatgtggatgttccttttgaggagactgtggtagatggtgtccatggggctttcatcaggcagagagatggtctctataaaatgtactggatggacgatactgg

SEQ ID NO: 166249 - DNA, 914 bp, Homo Sapiens
  misc_feature (678)..(678): n is a, c, g, or t
caggtctttccccctcaaaaataaacccaacgaaaataaaaatcatcaggacggaatgtcccaaagaaacaggtatttcaagccagaaatctgcaatcctaaattgcaggacatttgagtggaaccattcatttcctttctaatcagagcatttctgtttatctgcacagaaacccaaggcagcagaaaggctgtctatttactcactgattgtgatttgcccaggaaagtttgctggtttggacagcaagcagatccaatatggttggcaatgtctctgttctgctggaagaaacccataaacaggagaaaggctgacaaaccatgttcctttatgtgaagggggaagaactggaccttcttgtgttctgaaatttggtactgggtgggggtatgtgctatctgcttaagagaacacaggaaaaggaggagggagaaagtggggtttggaagatagaggaagagagaaaaaaaagttcaatgtaaaagattatctaatcagagcatgaggctggttttgagttggaatatcttcagttaacagaattaaactgaaaaacataattttttccttcatttttctccagcatttttgcaggtcagacatggtaacatgtgctgaagaaaaacatttacgtttaatttgggggaaatgggctaatggtgcttttcagaaantaaatttttacatttgctgacattttatggtaatttagctgcaaaaatgtaatacggaataatatatgaaactgagttgtggagggaatcctgtcaaaaatgaaagtgaatatattctgagtttgtccgagatctgctatagctcttctctagataagaacgacctgacaacataagctgctttactctttaactcttaccaaagtgctactgcatgtgtgtaaaacaaataatca

SEQ ID NO: 166250 - DNA, 656 bp, Homo Sapiens
actagaggaccccgactagtccaaccataccgactagtcccctgaaaatacatttccctccctctcttccccccaatatctcccttttttttctctcttcctctatcttccaaaccccactttctccctcctccttttcctgtgttctcttaagcagatagcacatacccccacccagtaccaaatttcagaacacaagaaggtccagttcttcccccttcacataaaggaacatggtttgtcagcctttctcctgtttatgggtttcttccagcagaacagagacattgccaaccatatgggatctgcttgctgtccaaaccagcaaactttcctgggcaaatcacaatcagtgagtaaatagacagcctttctgctgccttgggtttctgtgcagataaacagaaatgctctgattagaaaggaaatgaatggttccactcaaatgtcctgcaatttaggattgcagatttctgccttgaaatacctgtttctttgggacattccgtcctgatgatttttattttggtaggttattatttttggggggaatgacatgtatgggtcttttatacatgaaaatttgtttgacaataatctcacaaaacatatttacatctgaacaaaagcctttttgttaccgtagcgtatacatg

SEQ ID NO: 166251 - DNA, 145 bp, Homo Sapiens
aacttgaccacagtcttccctctgaagaaggacatgccatttcatgttacagaaatgcgatagagtaaactgtaataaattaggtacaagcacctagtttgtttaaccttatgtggaatagtcccgtgggcgtaagcgatcagct

SEQ ID NO: 166252 - DNA, 390 bp, Homo Sapiens
ctcggtacccgctgatccgcttaagttggggattgtacatgagacggagctgcctcctctgactgcgcgggaggcgaagcaaattcggcgggagatcagccgaaagagcaagtgggtggatatgctgggagactgggagaaatacaaaagcagcagaaagctcatagatcgagcgtacaagggaatgcccatgaacatccggggcccgatgtggtcagtcctcctgaacactgaggaaatgaagttgaaaaaccccggaagataccagatcatgaaggagaagggcaagaggtcatctgagcacatccagcgcatcgaccaggacgtaagcgggacattaaggaagcatatattctaagcggatcagcggaacctctagagtcacctcag

SEQ ID NO: 166253 - DNA, 940 bp, Homo Sapiens
gtagcgaggcctgggtggcgaattcggcacgaggggcggccaaagcggcggcgacggcggagcgagaacgacccggcggccagttctcttcctcctgcgcacctgccccgctcggtcagtcagtcggcggccggcgcccggcttgtgctcagacctcgcgcttgcggcgcccaggcccagcggccgtagctagcgtctggcctgagaacctcggcgctccggcggcgcgggcaccacgagccgagcctcgcagcggctccagaggaggcaggcgagtgagcgagtccgaggggtggccggggcaggtggtggcgccgcgaagatggtcgccaagcaaaggatccgtatggccaacgagaagcacagcaagaacatcacccagcgcggcaacgtcgccaagacctcgagaaatgcccccgaagagaaggcgtctgtaggaccctggttattggctctcttcatttttgttgtctgtggttctgcaattttccagattattcaaagtatcaggatgggcatgtgaagtgactgaccttaagatgtttccattctcctgtgaattttaacttgaactcattcctgatgtttgataccctggttgaaaacaattcagtaaagcatcctgcctcagaatgactttcctatcatgcttcatgtgtcattccaaggtttcttcatgagtcattccaagttttctagtccataccacagtgccttgcaaaaaacaccacatgaataaagcaataaaatttgacttggacgctgcaaaatgactcccgcaaagaagggtggctgagaagaaaaaggggccgtttctgccatcaacaaagttggtacccccgaaaatacgccaatcaacgattcaccagcgcaatccatggtaggtgggccttcaaaaaagcccgtgcatccgtcagagcactccaaatgaggattccgc

SEQ ID NO: 166254 - DNA, 1045 bp, Homo Sapiens
  misc_feature (131)..(181): n is a, c, g, or t
  misc_feature (877)..(877): n is a, c, g, or t
  misc_feature (1029)..(1029): n is a, c, g, or t
aatacggtctaagagcgagcctgggtggcgaattttccacgaggggcagccgaacccaaagtagatccaggcggcgggctgcacattcccgttgttgcgttgcgtttccttcctctttcactccgcgctcnnnnnnnnnnnnnnnnnnnnnnnnnnnnnnnnnnnnnnnnnnnnnnnnnnncagttctcttcctcctgcgcacctgccccgctcggtcagtcagtcggcggccggcgcccggcttgtgctcagacctcgcgcttgcggcgcccaggcccagcggccgtagctagcgtctggcctgagaacctcggcgctccggcggcgcgggcaccacgagccgagcctcgcagcggctccagaggaggcaggcgagtgagcgagtccgaggggggtggccggggcaggtggtggcgccgcgaagatggtcgccaagcaaaggatccgtatggccaacgagaagcacagcaagaacatcacccagcgcggcaacgtcgccaagacctcgagaaatgcccccgaagagaaggcgtctgtaggaccctggttattggctctcttcatttttgttgtctgtggttctgcaattttccagattattcaaagtatcaggatgggcatgtgaagtgactgaccttaagatgtttccattctcctgtgaattttaacttgaactcattcctgatgtttgatacccctggttgaaaacaattcagtaaaggatcctgcctcagaatgacttttcctatcatgcttcatgtggcaatcccagggtttcttcatgaatcattccaagttttctagtccctacccacgtgcccttgcaaaaaccgcccctgaataaacgcaactaaatcttgattgttaaggctcccnaaaaacccccacaaaaaaccccgaggccttttattttccggggggcgcgacaaaagaaggtaaatggaacggggaccctggggccataacctgggtttccctgaaccccatattttttttcgtaccccacatgtgtaaaaccctgttccggnctcgacacctaatagt

SEQ ID NO: 166255 - DNA, 880 bp, Homo Sapiens
  misc_feature (41)..(41): n is a, c, g, or t
  misc_feature (48)..(48): n is a, c, g, or t
cccgcccccccgggacaataagaatgcccttgcgaaggttnagtgttnttctctttttgtgttttccctaacccaattcaaatttttaattggcctttattcaatggtggtgtttttttgccaagggcaccgtggttagggactaagaaaacctgggaatgactcagggaaggaaaccttggaatggaccacatgaaagcatgataggaaagtcattctgaggcaggaggctttactgaatgggttttcaaccaggggtatcaaacatcaggaatgagttcaagtgaaaattcacagggagaagggaaacatcttaaggtcagtcacttcacatccccatcctgatacttggaataatctggaaaattgcagagccacagacaacaaaaatgaagagagccaataaccagggtcctacagacgccttctcttcgggggcatttctcgaggtcttggcgacgttgccgcgctgggtgatgttcttgctgtgcttctcgttggccatacggatcctttgcttggcgaccatcttcgcggcgccaccacctgccccggccacccccctcggactcgctcactcgcctgcctcctctggagccgctgcgaggctcggctcgtggtgcccgcgccgccggagcgccgaggttctcaggccagacgctagctacggccgctgggcctgggcgccgcaagcgcgaggtctgagcacaagccgggcgccggccgccgactgactgaccgagcggggcaggtgcgcaggaggaagagaactggccgccgggtcgttctcgcgccgccgtcgccgccgctttggccgccgccgtgagcgcggagtgaaagaggaaggaaacgcaacgcaacaacgggaatgtgcagcccg

SEQ ID NO: 166256 - DNA, 778 bp, Homo Sapiens
atggcatcttggggttactatactcactcatgcaaaatccaaggtagtgtaatggaaacaatattggtaaaatagatgttgtggctataagcatctccctttatattagacatttagaagcttttaaaactttttagatgctaaaggttgtggcaaaactaggctgtgtagttgttccatttataagcaccttattacaggacagttacatgaacctataagggagtgtgctttcagttcaaaagagtaataaagtgcctagctatataaaaaccacaagacttcaaattgtaatttaagctaactgcagttatacatttgggttaacaaaatctagaccctgtctatgcagagttagactaattgttcatactgttttaataaccacataaaaaaacttactcttaattgactgaataagtagggtccactactgtatcttaacaatcaaattttattgctttattcatgtggtgttttttgcaaggcactgtggtatggactagaaaacttggaatgactcatgaagaaaccttggaatgacacatgaagcatgataggaaagtcattctgaggcaggatgctttactgaattgttttcaaccagggtatcaaacatcaggaatgagttcaagttaaaattcacaggagaatggaaacatcttaaggtcagtcacttcacatgcccatcctgatactttgaataatctggaaaattgcagaaccacagacacaaaaatgaagagagccataaccagggtcctacagacgccttctc

SEQ ID NO: 166257 - DNA, 410 bp, Homo Sapiens
catgatctgaggactcctgccataccttatgtgcaataatcttctggacctcttttccccttccacccatttcttcagttcctccactgttaccctcatcctcatcactctctttactcctatacctcagtaaaatcagagctttaacctttgccataaccctgatgatgatcgcagtcagaatcttgttgaatagcaaatgcttacctaagcaacctgctgagaagtctgcagaggtatcctgtggcacgtaaagccagatgtgagttaagagtgacaaatacacttttaaaacttgactttcagaatgcagcagttccatcattaatcagtgtaataacataccttgaaataggtatgatctcagtagtgtactaaatttggaactaggagaacatcgttacactact

SEQ ID NO: 166258 - DNA, 352 bp, Homo Sapiens
  misc_feature (175)..(192): n is a, c, g, or t
tcgcttaagactgtgggtattgttacataattaatatgagctagattttttttccccttaaagttatttcccaaatgagacacaaccaaaagttgggggtcagtaggaaacaagttcaaaagatgtagaatgaaaagaactgaatttccccccaaaaggtatgcatattatttannnnnnnnnnnnnnnnnngagatggagtttcgctcttattgccgagagtttgagtgcaggtggggcaaattttcaagctcaccgcaaactccaactcccggggttcaagcgaattctcctggcctaagtctcccaaatagctgggattacaggcatatgccaccatgcccgcttaagc

SEQ ID NO: 166259 - DNA, 451 bp, Homo Sapiens
tctagcaggatcttactgatccgcttaaggaggagagagaagctgaggcgtcttgtgtgaatacagcattgatctgggccttgtattaatggtaattagaattcgagtaagcatagatggtagtgggaagagttaagaacgtcacttctcaatacaaagttgaagtgatgagaaggatcaaaatgcctcgggataaaagcataggtttctacttgattgaagctttaggtgtttggcagagactagtgggaaataaggtggaataagtgtcagttgagtataaattgggaagagtatttgaatgccaggctgagaaatatggactttattaaagattctagagcaagtaaatgaagtgagcagaattgtgctcggagaagattgatctgtcacagcgtatgcagggtggaatagaggagcagtgcagacgattaggaaacagtcttacgcg

SEQ ID NO: 166260 - DNA, 396 bp, Homo Sapiens
  misc_feature (13)..(13): n is a, c, g, or t
gcttaaagtattntacgtgaggggaaatgaaaacttgcattcacacgaggactcatataattcaatgttcatagcagctttattcgtaataacccaaatttggaaacaatccaaatgcccatcaacaggggaatggattgacacactgaagtatacccatactctggaatactactcagtagtaacaaagaacacattactgacaatacaaacacagggtgaatttcaaaatactacgctaagtgaaagatgttagctacataaggtaacatactgtgtgattccatttatatgaaatagttctacaggcaaaactacagtgacagaaagcagaattggtgttcgccaggatccatgcatgggagagaggactggctgaagacagatacacacttt

SEQ ID NO: 166261 - DNA, 2198 bp, Homo Sapiens
catggcaacgggccaaccaagctgcagttgaactacctgggcaactacatcccgcgcttctggaccttcgaaacaggctgcaccgtgtgtgacgaaggcttgcgcagcctcaagggcattggggatgaagctctgcccacggtcctggtcggcgtgttcatcgaacagcccacgccgtttgtgtccctgttcttccagcggctcctgcggctccactacccccagaaacacatgcgacttttcatccacaaccacgagcagcaccacaaggctcaggtggaagagttcctggcacagcatggcagcgagtaccagtctgtgaagctggtgggccctgaggtgcggatggcgaatgcagatgccaggaacatgggcgcagacctgtgccggcaggaccgcagctgcacctactacttcagcgtggatgctgacgtggccctgaccgagcccaacagcctgcggctgctgatccaacagaacaagaatgtcattgccccgctgatgacccggcatgggaggctgtggtcgaacttctggggggctctcagtgcagatggctactatgcccgttccgaggactacgtggacattgtgcaggggcggcgtgttggtgtctggaatgtgccctatatttcaaacatctacttgatcaagggcagtgccctgcggggtgagctgcagtcctcagatctcttccaccacagcaagctggaccccgacatggccttctgtgccaacatccggcagcaggatgtgttcatgttcctgaccaaccggcacacccttggccatctgctctccctagacagctaccgcaccacccacctgcacaacgacctctgggaggtgttcagcaaccccgaggactggaaggagaagtacatccaccagaactacaccaaagccctggcagggaagctggtggagacgccctgcccggatgtctattggttccccatcttcacggaggtggcctgtgatgagctggtggaggagatggagcactttggccagtggtctctgggcaacaacaaggacaaccgcatccagggtggctacgagaacgtgccgactattgacatccacatgaaccagatcggctttgagcgggagtggcacaaattcctgctggagtacattgcgcccatgacggagaagctctaccccggctactacaccagggcccagtttgacctggcctttgtcgtccgctacaagcctgatgagcagccctcactgatgccacaccatgatgcctccaccttcaccatcaacatcgccctgaaccgagtcggggtggattacgagggcgggggctgtcggttcctgcgctacaactgttccatccgagccccaaggaagggctggaccctcatgcaccctggacgactcacgcattaccatgaggggctccccaccaccaggggcacccgctacatcgcagtctccttcgtcgatccctaattggccaggcctgaccctcttggacctttcttctttgccgacaaccactgcccagcagcctctgggacctcggggtcccagggaacccagtccagcctcctggctgttgacttcccattgctcttggagccaccaatcaaagagattcaaagagattcctgcaggccagaggcggaacacacctttatggctggggctctccgtggtgttctggacccagcccctggagacaccattcacttttactgctttgtagtgactcgtgctctccaacctgtcttcctgaaaaaccaaggcccccttcccccacctcttccatggggtgagacttgagcagaacaggggcttccccaagttgcccagaaagactgtctgggtgagaagccatggccagagcttctcccaggcacaggtgttgcaccagggacttctgcttcaagttttggggtaaagacacctggatcagactccaagggctgccctgagtctgggacttctgcctccatggctggtcatgagagcaaaccgtagtcccctggagacagcgactccagagaacctcttgggagacagaagaggcatctgtgcacagctcgatcttctacttgcctgtggggaggggagtgacaggtccacacaccacactgggtcaccctgtcctggatgcctctgaagagagggacagaccgtcagaaactggagagtttctattaaaggtcatttaaaccacaaaa

SEQ ID NO: 166262 - DNA, 936 bp, Homo Sapiens
ggaattcctgtctggcaaaccttctaaacatacaggaactcggggtttgattcaaacacaggatatggttcttttactgcctcagtgagtccaagagcttaagcccataggctgaagagctgcctctgcctctaaggatcagggcattctgtttttgatggcagaatctgagtcagaatgcagcacaatccctgtgattgccttcaacaccgtatcagacacttctgggatgtcttcattaacagggacacgcagcatctgaggtgtaacccagtgaagggctcaaaagctgccttgagggagatggataggtgaggtcaccacattccttgtctttctgacaccacagagcagcttccactctgatcctcttttgaatggcaagatctctcatctcatcatcagtagtttctggacagaacacatatttatagagatgagtcatgatgtacttttcaatctgatcccatttatcttctcaactcattctggaggcaccttctttgatccgaccctggaagacgcactgaagaatttcttcactgtggtaaccttgcgggtcttctcgttggttttcttttcttcaaacttggagaatgtgagggattgggccccttggctgctctgactgctggcaaaggcctcttcttcctcccgctggagtcgctccgccagctcccagtcctcctgaatctgcttctgcctggctttgtggtactcttccctccagcacttggagcagaaaccctgccaggcagggttgccgtagtaaccacatcctttcttgcacaggagatccaattgatccacatgaattcctcggcgttcagacttaaggctcatcttcttcctgctaaccactcgcccgcgtctccgccggcgtccaaaccaccgctcgcccgcttcgcccgggtaggtctggcgtggggtagaact

SEQ ID NO: 166263 - DNA, 412 bp, Homo Sapiens
ccacgtgatacccgaaagcaagtaattcttaaagatcttacagaaacgcagagtcaatcaggtttataaaggaaggctgaggggagagaggaggcctaggggcctggacgaagaggcctaggacctgaagagactccagcgagtctcgggaagcccaggggacctgtcaccatctgggcacttcccaggctcaatgctcagccagagtttgctggtggacctcaggattcgaagtgtgcaacagacggagtgcgcttgctgttcagggcggccccgtgcaggagcaccagctcaccctcaggcatctcggactggagggccagcagaaggtcagcaacttactcttaaaacgattgtttcggatcatattgatctctttcctttttccttttgtcctttcggtatcacgtgg

SEQ ID NO: 166264 - DNA, 533 bp, Homo Sapiens
tgtatgatccgcttagggagtaatgcaactgtatcaggctttgggtctagtgttctttctaccgtcagcacctgtgtggtcaattctggacacttcccagagaagtctttgagtagagaatcctactcaaatttcactgtatattttaagcattcctctcctttccctttgcctcccctgttgccttttcttcccctgatttctcctctggtcatctcctctcccttctgcgtgtaagccatgggaaagggatgagggaggacagcttctggttaaacacaggtccctcttccacatcaaatgaacattggcttcctgggacagaaggccttcaaaggagggattgcaaagcaaggcaaagcgttctgtcttcattttccccatccccatgagacaagactgatggaaagggtggtggggcaacactgcttaatggatgccttttcacatcatttcagtttttagccctcatgactgtattttctaatcagagacaataacattttaaataaaacaacgacaacgcaatttac

SEQ ID NO: 166265 - DNA, 557 bp, Homo Sapiens
tgatcgttagagcagtgtggggtatccatttgcctccgtggggagtagttcctcctctggggaaggtacgcagccttcccgcacagaaaatcgcgatccactacccaatccatgggcaccaccgccagctacccagagttctgcaactaccagcacgaccacaagcactggtagtgggtctggcaatagttccagcaatgctactgggaacaccgttgctgccgctaattatgtcgccagcatctttagtaccccaggcatgcagagcctgctgcaacagataactgaaaacccccagctgattcagaatatgctgtcggcgccctacatgagaagcatgatgcagtcgctgagccagaatccagatttggctgcacagatgatgctgaatagcccgctgtttactgcaaatcctcagctgcaggagcagatgcgggccacagctcccagccttcctgcagcagatgcagaatccagacacactatcagccatgtcaaacccaagagagcaatgcaggctttaatgcagatccagccagggctacagacattagcca

SEQ ID NO: 166266 - DNA, 492 bp, Homo Sapiens
  misc_feature (33)..(33): n is a, c, g, or t
atgttggtcaatgaactgaatcattcgaaaganaaagaatgccaatatgaaaaagagaaagcagaacagagaagtagctgtgagacagcttcaacaaaaacgagatgatgtcttaaacaaaggatcagcaacaaaagctctgctggatgcttcatcgcgtcactgcacctatttagaaaatgggatgcaggattcaaggaagaaattagaccagatgagaagtcaatttcaagaaatacaggatcaacttacagctactataagatgtactaaggagatggaaggcgacacacaaaagcttgaagtagaacatgtgatgatgagaaaaattattaaaaaacaggatgaccaaattgagcggcttgagaaaatcctgcagcattcaagtttgatgctgcaggtgtttgagagctagatgaaggtatgttgccaaaatttatgaattaaattcaaatcattgatttctgaaataaactctaagtagtgaacggt

SEQ ID NO: 166267 - DNA, 251 bp, Homo Sapiens
tcgcttaggtagaatcagagtgtaggactatctcattggctcctaatgacatgctaaataacaaatggaaattgctgtgagtgtcatgaagcaatcttaggaatatattattatgttgctgcaggaacataattggcagaggcttaagttgaattgaggccaagaaatttggtggtgttgatgggaggttacagggatagagcttatcaacttaatcaacttatctcatgctttgtgatagaagttcattc

SEQ ID NO: 166268 - DNA, 1029 bp, Homo Sapiens
  misc_feature (851)..(851): n is a, c, g, or t
gctgatccgcttaggacagctgtcagtactgctgctcccctagctggctacacaggcagtggaccaatccagatatggcagtttcttctggaattactcactgataaatcctgtcagtcttttatcaagctggacaggagatggctgggaattcaaactttctgacccagatgaggtggccaggggatggggaaagaggaaaaacaaacctaagatgaattatgagaaactgagccgtggcctacgctactattacgacaaaaacatcatccacaagacagcggggaaacgctacgtgtaccgctttgtgtgtgacctgcagagcctgctggggtacacccctgaggagctgcacgccatgctggacgtcaagccagatgccgacgagtgatggcactgaaggggctggggaaaccctgctgagaccttcctaggacagccgtgttggttggactctgaattttgaattgttattctattttttattttccagaactcattttttaccttcaggggtgggagctaagtcagttgcagctgtaatcaattgtgcgcagttgggaaaggaaagccaggacttgtggggtgggtgggaccagaaattcttgagcaaattttcaggagagggagaagggccttctcagaagcttgaaggctctggcttaacagagaaagagactaatgtgtccaatcatttttaaaaatcatccatgaaaaagtgtcttgagttgtggacccattagcaagtgacattgtcacatcagaactcatgaaactgatgtaaggcaattaatttgcttctgtttttaggtctgggagggcaaaaaagaggtgggtgggatgaaacatgntttgcggggggatgcactgaaaatctgagaactatttacctatcacctctagttttgaagcaaaagatggaccttcagtgcgggaggggccaaaaaccgtttgttgtgttaaaaatttaatttaataaatttgtgccagtaattttttcctaaaaaatcgtcttaagctcctaaggtg

SEQ ID NO: 166269 - DNA, 1253 bp, Homo Sapiens
  misc_feature (1143)..(1143): n is a, c, g, or t
atcacattcagccagccatgccaagaagtccagccaactgtgccagaaagtctctgatggaagttgccagctatgtctggagaactccgaggaggtcagccagccatgccagggggtctctgtggaggttggcaagctggtccataagttccatgtaggggttggtagcttggtccaggaaacccttgtagaagtaggcagcccagcttgaagagatccctgaggaggtcatccagccataccaggagttctctgtggaggttggcaggctggcccaggagacttctgcgatcaatctgttatctcagggcatccctgagattgataaaccatcccaagagttccctgaggagattgatctgcaggcccaggaggtccctgaggagataaattagaagtcctgggtggtccctgaagtgattgatcagctgcctggagagggtattcctcaagcccagcatccatctggtgatccaaaccctcagagccagtctctagcccatgaccagcactcaccccttccaccagcaacatgtgattaattttctcattagtggtatcacactataccagccatttgagccagcaaccttttctgttggctaactcactggccagctctcaccagcggtgtctggggaagtagttctctttgtatgaagcatacctgtgccagagctgtggttgaggaggagccagttttaggttcgaagaagccattggctcctcacttagccattagacttgaataggatttccttggggtgggttggtctgtcattacccagccttctctgagcatcctaggaaatcacagattgttaaaggaaatgccgcttcactgctgaagacaccatctggcgacagcaaatgcaaaagaggggactctagggtcttcacttttctggggaaatgttcacgacttctcaaggtacgctttagaccatatgtgcattcaggcgactcttgtctttgccagcactcctcaggtgagcccgggatggctatctgaaatgtctggaaaatagagtcccttccccaaacatctgacatggccactaaatctttagacttgccttatagatccttccatatcatccccaagtgccccttctgcctcagtcctgttcctctgggcaatanctctagggaaaagaaggtattagactgctgtgccaaattccgagcaactactttaaatgctctagaggattcttagccagtcctgtgaaagtgggccctcctccgggggg

SEQ ID NO: 166270 - DNA, 932 bp, Homo Sapiens
  misc_feature (696)..(696): n is a, c, g, or t
aaactgcagaatgacccccagctggaggcagagtaccagcagctgcaggaggaccaccagcgccaggaccagctcagggagaagcaggaggaggagctgagcttcctccaggacaagctcaagaggctagagaaggagcgggccatggccgagggcaagatcaccgtcaaggaggtgctcaaggtggagaaggacgcggccaccgagagggaggtcagcgatctcacccgccaatatgaggacgaggctgccaaggctcgcgctagccagagggagaagacggagctgctccgaaagatatgggccttggaggaggagaacgccaaagtggtggtgcaggagaaggtgcgggagatcgtgcggccagaccccaaggcggaaagtgaagtggcgaacctccgcctggagcttgtggagcaggagcgaaagtaccggggtgccgaggagcagctccggagctaccagagtgagctggaggccctcaggaggcgagccccccaggtgaaagtcaaagaggtgactaaggaagtcattaagtacaagactgaccctgagatggagaaggagcttcagaggctcagggaggagatcgtggacaagaccagactgatcgaaaggtgtgatttagaagatctacccagctgaaaaaggaaatccaggccctgaaagaacaccaaaccccaggtccagaccaanagaggtgggtcccaggagatcctccaattccaagaagaccctcaaaccaaggaaggagggtggcgtctctgaagggcaaagctctcagaaggagcagaagaaaacaagttgggatctggggagagggaaaagaggcttccccaggaaagagcaagatcgccccgggaaaagaggcagggaagctcctccccggggtgaaaggaaaagagggtgggtgccaccctatggaaggtggc

SEQ ID NO: 166271 - DNA, 732 bp, Homo Sapiens
gcttaagcaggacagtggcttaagtctccactccaggaaagaatcaaagtttctagagtttgtgagaaaaccagagagtgggctctcctgatttcttcactctgaggggccgttcttcatgttctcccagcttgttccaagactgggccgtagaattccatgtttcaggagcctaagaccctcccagagcccaggggcttcaccgcagaccccaagccattgagcacatcacccaaagcagtggccaacatcgcggacccctgtgccttgtcacagatgggtgctggtcctcaggcgttggggacactgctgggtcgatggggtcggattctgccagtttctgctctgcagccaaagatggtcagaagcattgtcacttcagtaacatcaagtgctcaaagacatggcaaccgttcagtggtacttaagtattcaaaatatacaactacagattctctgacagaaaccagcacggggtcttcaccttcattcaccccacaggcgacatgcgagggagaacagcatctcagtggtgatttccaaaccaagcctttgttttcggtgtggggttttgggggtttgctttaatgtttttgaaattgtaaatgttgggctttgtattttgatgtaaactgagcataatggcattttagggcctgtgaccaaaaatgaagcttgtaacgaccatggatctgaataaacatgtcctcactacatgccatgggtaccgag

SEQ ID NO: 166272 - DNA, 435 bp, Homo Sapiens
tgggtctgctctgttaggggctacaaactgctctcaaaagaatgacaatactgagcttccaattcagtgcaggcacagtgttggactatggcacatttagttggagtcggggggaggtcaggaatatgatcagataatggattttataccttagagcaaaatctattagtctctctcagtttatcaatttaaatggctttaggcttatagggggtgtaaactttaagaatataattctcccattcaagtttacagcaaacatctagccaccttcaaaacaaagaatatacagaccatcatttagcaatactaatacatgattttccttggggatggcaggtttgagaatcctttaacaacaggacatacttcccctaaattacagtgaattatttataacgagataaagctttcaggtacaagctgaaggtgggg

SEQ ID NO: 166273 - DNA, 839 bp, Homo Sapiens; identical to SEQ ID NO: 3590

SEQ ID NO: 166274 - DNA, 522 bp, Homo Sapiens
aggatctattcatgtaccggcaagctgagggagtaacatattattgaagttggcacaccacctacagggaaccagccctatccaaagaaggcagtggatgtctactttcctccaagaagcacaaaatgatttacctgttgcaatgcagatcagtgaaaagcatgatgtggtgttcttgataaccaagtatggatatatccacctctatgatcttgagactggtacctgcatctacatgaatagaatcagtggagaaacaatttttgttactgcacctcatgaagccacagctggaataattggagtaaacagaaagggacaagttctgtcagtgagtgtggaagaagaaaacataattccttacatcaccaatgttctacaaaatcctgattcggctctgagaatggctgtacgtaataacttagccggtgctgaagaactctttgcccggtacgctgatccgcttacgggaagaaacgccacagacgaaaatggctaaattcgtgatccgcccagcaactg

SEQ ID NO: 166275 - DNA, 1063 bp, Homo Sapiens
  misc_feature (483)..(570): n is a, c, g, or t
tggttaccggtccgagattcccgggatatcgtcgacccacgcgtccgcttttataagggatcagccaaatgaaaggcaagttagaatccagcttaaggatcatatagatcgtaccaggaagaagagaggcgagaaagatgaaactgagtatgagtacagtgggagtgagtgaagaagaggaggaagtgcctgaacaggaaggagagccaagttccattgtgaacgtgcctggtgagtctactcttcgccgagatttcctgagactgcagcaggagaacaaggaacgttccgaggctcttcggagacaacagttactacaggagcaacagctccgggagcaggaagaatataaaaggcaactgctggcagagagacagaagcggattgagcagcagaaagaacagaggcgacggctagaagagcaacaaaggagagagcgggaagctagaaggcagcaggaacgtgaacagcgaaggagagaannnnnnnnnnnnnnnnnnnnnnnnnnnnnnnnnnnnnnnnnnnnnnnnnnnnnnnnnnnnnnnnnnnnnnnnnnnnnnnnnnnnnnnnttgaaagagaacaggttcctgtgagaacaacatctcgctcccctgttctgtcccgtcgagattccccactgcagggcagtgggcagcagaatagccaggcaggacagagaaactccaccagtattgagcccaggcttctgtgggagagagtggagaaagctgggtgccagaacctggggagtgggcagctccctcagggtccagcaactcagggatcccagcgccgggtctcaccctggggtctcacgaagtggctccgggaacggctgcagaagtgagatcatcaccagtcagaaggcccatctcaagcgctgaaacgcctgaaaaaccgagataaaaggagtgtgaaccccaggcgggatgacggcagggcaaaggcgcagggaggagcggaacaagaggaacacccagagagggacaagcgaggacaactaagggggacccaaagagaggtcaggcgagacaggaagggaacgagagaggaaccctcaag

SEQ ID NO: 166276 - DNA, 528 bp, Homo Sapiens
gtgctgactgttcagaagccctatggtggctccgggccactttacacttgtgtgcctgctggtagtccagcatccagctcgacgttagaaggaaaaaggcctgtgtcatatcaacacttatctaacagcatggcacaaaagagaaactatgagaattttattgggaatgcacatgatcgaccaaatgacaaaaaaacttgattcactaattagggggaaaaaaggtcttggtggatgtcagtgcttactccccatgaaattaaattttacttcatcctttgagaagcgaatggtgaaagctactgaaataagctgtgatcgtactgtacataaaacatatgaggaatctgcaaggaacactacagttgtgtaaagttgttctgttaacttttgtaccaaatagcaatacaaactagttggaacagttggaacttacatacatggggactggaaatctctattttgtccctgaataatatttttcttagaattgaccaaataagaagtggaatttttgcatacttaagc

SEQ ID NO: 166277 - DNA, 506 bp, Homo Sapiens
  misc_feature (370)..(370): n is a, c, g, or t
ggtggaaggacaaaactcttggcttggaagcccaatacctagaaagccagcttctctgtatctgtgcccttgaaaatgctgtacctatttaaacagaatatgagaactgctgaactcaataaaccacactaaaaagaagacagaatcatgacaatgcatgtctgctgttggaatttgaagggaagtcacttctcactaagctcgattgtccacccaagtatagaagcatgggttcctcataaaaagaaaactacaaatggtcactaagatgttaagagctgtctcaaagtggtaacttaagagtgctccctctctctaaaaaaccccggacacattattcattaagggttcatctgtgagtccactccanacatgcagaggtaaccactcaatgactctgcttgttctaaagtaatccatgagcatgacacaaagtacatctattgaagttatctcatgctgtgaattatttttaatgcaattatctccatagataagtagcttgt

SEQ ID NO: 166278 - DNA, 1262 bp, Homo Sapiens
ccgtgaggctggccgagctccacgctgatctgaagatacaggagagggacgaactcgcctggaagaaactaaagcttgacggcttggacgaagatggggagaaggaagcgagactcatacgcaacctcaatgtcatcttggccaagtatggtctggacggaaagaaggacgctcggcaggtgaccagcaactccctcagtggcacccaggaagacgggctggatgaccccaggctggaaaagctgtggcacaaggcgaagacctctgggaaattctccggcgaagaactggacaagctctggcgggagttcctgcatcacaaagagaaagttcacgagtacaacgtcctgctggagacactgagcaggaccgaagaaatccacgagaacgtcattagcccctcggacctgagcgacatcaagggcagcgtcctgcacagcaggcacacggagctgaaggagaagctgcgcagcatcaaccagggcctggaccgcctgcgcagggtcagccaccagggctacagcactgaggctgagttcgaggagcccaggtgattgacctgtgggacctggcgcagtccgccaacctcacggacaaggagctggaggcgttccgggaggagctcaagcacttcgaagccaaaatcgagaagcacaaccactaccagaagcagctggagattgcgcacgagaagctgaggcacgcagagagcgtgggcgacggcgagcgtgtgagccgcagcagcgagaagcaccccatgctggaggggcggaccaaggagctgggctacacggtgaagaagcatctgcaggacctgtccggcaggatctccagagctcggcacaacgaactctgaaggcactggggagcccagcccggcagggaagaggccagcgtgaaggacctgggctcttggccgtggcatttccgtggacagcccgccgtcagggtggctggggctggcacgggtgtcgaggcaggaaggattgtttctggtgactgcagccgctgccgtcgtgacacagggcttggtggtggtagcatttgggtctgagatcggcccagctctgactgaaggggcttggcttccactcagcatcagcgtggcagtcaccaccccagtgaggacctcgatgtccagctgctgtcaggtctgatagtcctctgctaaaacaacacgatttacataaaaaatcttacacatctgccaccggaaataccatgcacagagtccttaaaaaatagagtgcagtatttaaacc

SEQ ID NO: 166279 - DNA, 1024 bp, Homo Sapiens
tatggtattctagcgatgggtacttagggacccggctgtgcacccccgggacaaacagcggatgaagcaggagctcagctctgagttgagcacgctgctgtccagcctctcgcgctacttccgccggggagcccccagctcccctgccactggtgtcctccccccgccgcatggcagaggagtttcggctcagtggggaggccttcgactggctgcttggggagattgagtccaagttcaaccaagccattgcgcatcccggggaaatggtgggggctctggctgcgcagtcccttggagaacctgccacccagatgaccttgaataccttccactatgctggtgtgtctgccaagaatgtgacgctgggtgtgccccgacttaaggagctcatcaacatttccaagaagccaaagactccttcgcttactgtcttcctgttgggccagtccgctcgagatgctgagagagccaaggatattctgtgccgtctggagcatacaacgttgaggaaggtgactgccaacacagccatctactatgaccccaacccccagagcacggtggtggcagaggatcaggaatgggtgaatgtctactatgaaatgcctgactttgatgtggcccgaatctccccctggctgttgcgggtggagctggatcggaagcacatgactgaccggaagctcaccatggagcagattgctgaaaagatcaatgctggttttggtgacgacttgaactgcatctttaatgatgacaatgcagagaagttggtgctccgtattcgcatcatgacagcgatgagaacaagatgcaagaggaggaagaggtggtgcacaagatggatgatgaagtcttcctgcgctgcatcgagtccaacaagctgacagatatgaccctgcagggcatcgagcagatcagcaaggtgacatgcacttgccacagacagacaacaagaagaagatcatcatcacggaggatggggaaatcaaggccctgcaggagtggatcctctagatcg

SEQ ID NO: 166280 - DNA, 573 bp, Homo Sapiens
  misc_feature (44)..(44): n is a, c, g, or t
  misc_feature (48)..(48): n is a, c, g, or t
  misc_feature (63)..(63): n is a, c, g, or t
  misc_feature (79)..(79): n is a, c, g, or t
  misc_feature (102)..(102): n is a, c, g, or t
  misc_feature (125)..(125): n is a, c, g, or t
  misc_feature (128)..(128): n is a, c, g, or t
  misc_feature (132)..(132): n is a, c, g, or t
  misc_feature (188)..(188): n is a, c, g, or t
  misc_feature (230)..(230): n is a, c, g, or t
  misc_feature (533)..(533): n is a, c, g, or t
  misc_feature (541)..(541): n is a, c, g, or t
  misc_feature (559)..(559): n is a, c, g, or t
ggccaggtgcccaaagctttgcaatgcctgccagggtggaactnttanagggattccccggtnaagcatttccagaagngaaaaaactccttcgctactgtnttcctgttgggccagtccgctcnaanatgntgaaagagccaaggatatttttgtcccgtttggagcaacaacgttgaggaaggtgnctgccaacacagccatttactatgaccccaacccccagagcncggtggtggcagaggatcaggaatgggtgaatgtctactatgaaatgcctgactttgatgtggcccgaatctccccctggctgttgcgggtggagctggatcggaagcacatgactgaccggaagctcaccatggagcagattgctgaaaagatcaatgctggttttggtgacgacttgaactgcatctttaatgatgacaatgcagagaagctggtgctccgtattcgcatcatgaacagcgatgagaacaagatgcaagaggaggaagaggtggtggacaagatggatgatgatgtcttcntgcgctgngggaaattccaaaaagtnccgagctgaattga

SEQ ID NO: 166281 - DNA, 569 bp, Homo Sapiens
gcttaaggaagagaactgattcctactgaaaattcaaattctattaccattctaactttcataaaaagttgggatcaagaagcagctgatttcctgccagggcttatattaggggggtgattcttaaaggacattaggattggtgctcagaaatggttaatcatgctgtgtgctagccagggccagctggtaccttctttgccatgagcattcaagggacggctaacctttattgacaatctatatcgcaaaagtcaggaaagaggttgtgagctgattggattaaagacctggcacttcagtaactcagcacgcttccacttcactcaacttaagagagttcattgacagtgttaggatgtgaaggctgggaaacacttattttgcttcaagagtcccacttggctctcccaaataggtacctcaaaaactgttagcaagcggcatttggatgtcttgacaggggctttgcagggatttttagggttttttccacattgtccacattaatggttggcatgattgtgcttgcaggccaagaaatgatcataccccttgccaaaggtaaa

SEQ ID NO: 166282 - DNA, 547 bp, Homo Sapiens
aggatcctgctgatccgcttaaggaggagattgctgcctatcaaagcaggtaagaagccgaactctgaggcctctcgccattgtctccgagtcggccagctggagcgttttcggggctgtaaaggggagaatggcgcatgcgcatattcagggcggaaggcgcgctaagagcagatttgtggtctgcattatgtctggagccagaagtaagcttgctcttttcctctgcggctgttacgtggttgccctgggagcccacaccgggaaggagagcgtggctgaccatcacgaggctgaatattatgtggctgccgtgtatgagcatccatccatcctgagtctgaaccctctggctctcatcagcctgcaagaggccttggagctcatgaaccagaaccttgacatctatgaacagcaagtgatgactgcagcccaaaaggatgtacagattatagtgttcccagaagatggcatacatggattcaactttacaagaacatccatttatccattattggacttcatgccgtctccccaggtggtcagg

SEQ ID NO: 166283 - DNA, 561 bp, Homo Sapiens
gatctagaggatcctgtgatccgttagcagaagagaaaatgtttgattctaaagagaaggcttcgaggagagaaacctaagatgggagaattgacaagttagataagggagcgagacagagagaaagccagcagatgaaggggaagggtaaggggaaggatcaccgaaggagatgagggtgcgagagagagaggtgccgattagtctagaagtatcccaggacagaagagcagaggtgcccccgaaaggtttgcagacgcctgtgaaggatgctggtggtgggaccggtagagaggcagaagcaagagagctacggttcaggttgggcaccagtgatgccactggttctctgcaaggggattccatgacatgaaaccgtagcagaaaacatcgttaccagtatcctgaagcagttcactcagtctccagagacagaagcatctgctgattcttttccagacacaaaagtcacttaagcggatcagcgctgatccgcttaagtagtttgggagtcaggctaagcaccatgagataaaccacatttctctgccgtgcagatta

SEQ ID NO: 166284 - DNA, 367 bp, Homo Sapiens
gcttaaggctgcgttgtaatttgcgttttacgttttggattcaaaacaacattctatagaagagctttacattggtgtgtagactattctgccccatacatcatgccagttctaacaagggctctgttaagtattggcatacgtgtattaggaaaggtctaagctgttaggaaaaactgggctagggaattgcctcaaccttctgaatttaagtccaattcttttcattacgtctcagctgcctttaggttctacattattccttggttgagttagagcaattactacagaaagtattaaaaattctgtggactgactgcatatcatcggactcataggaaaacagtggtggcacatatgcttaagc

SEQ ID NO: 166285 - DNA, 291 bp, Homo Sapiens
ttgctgatcgcttaaggaaaatcgactttcgttcgcgcgcgctcgcccaccggctgcagcaggagcagggttgggccatcggtgttgtcgcgtatgatgacgtcatgcccgacgcggttctcgccggggcaagagcgcgaccggcgccatcccaatggaaattgcttcgacagagaacgtgttgagagtacctggcaatacttcttgatggctgtcattaatgggtgtcagatgtctgtcccacccaacaggactgaagccatgtgggaagattttataacctgcttaagc

SEQ ID NO: 166286 - DNA, 325 bp, Homo Sapiens
gcttaagcccagtgcaaccaatactgaagttcaaaagtatcgaagaagtgataaaaagagcgaatagcaccgactatggactcacagcagccgtgttcacaaaaaatctcgacaaagccctgaagttggcttctgccttagagtctggaacggtctggatcaactgctacaacgccctctatgcacaggctccatttggtggctttaaaatgtcaggaaatggcagagaactaggtgaatacgctttggccgaatacacagaagtgaaaactgtcaccatcaaacttggcgacaagaacccctgaaggaaggcgggatccttccg

SEQ ID NO: 166287 - DNA, 714 bp, Homo Sapiens
  misc_feature (657)..(665): n is a, c, g, or t
gactctagaggaccccggctatacattatcagagaactaggtgaatacgcttgggcgaatacacagaagtgaaaactgtcaccattcaaacttggcgacaagaacccctgaaggaaaggcggggctccttcctcaaacatcggacggcggaatgtggcagatgaaatgtgctggaggaaaaaaatgacatttctgaccttcccgggacacattcttctggaggctttacatctactggagttgaatgattgctgttttcctctcactctcctgtttattcaccagactggggatgcctataggtcgtctgtgaaatcgcagtcctgcctggggagggagctgttggccatttctgtgtttccctttaaaccagatcctggagacagtgagatactcagggcgttgttaacagggagtggtatttgaagtgtccagcagttgcttgaaatgctttgccgaatctgactccagtaagaatgtgggaaaaccccctgtgtgttcatgcaagcagggctcttgcaccagcggtctcctcagggtggacctgcttacagagcaagccacgcctctttccgaggtgaaggtgggaccattccttgggaaaggattcacagtaaggttttattggtttcttgttttttgttttgcttgtttgtnnnnnnnnnggatttcactgagaaagttttggttagtgcataccgtgggtagaaggtt

SEQ ID NO: 166288 - DNA, 316 bp, Homo Sapiens
ggcagtgggggcctggaattgggcggaggagaaggggagaaatgggaggcaggttgcctgatccaaagcttgcttccattgagggtatagtattttccacaggggctgggcacagtcagaggttgcggatggagagctgcatcgtgacccgtcttgagggctcgcgttagacagaaagcggcacacagtctgccccagatgaccagcttggggaggtatttttctttctgggcctttgtgccaaagagcaggatgcctttgaaaccgatgctctgatgggcccccagggtaatgcccacgccaaggtcatgcatgc

SEQ ID NO: 166289 - DNA, 1910 bp, Homo Sapiens
  misc_feature (810)..(810): n is a, c, g, or t
acgccagagctgggtcagagctcgagccagcggcgcccggagagattcggagatgcaggcggctcggatggccgcgagcttggggcggcagctgctgaggctcgggggcggaagctcgcggctcacggcgctcctggggcagccccggcccggccctgcccggcggccctatgccggggatgccgctcagctggctctggacaagtcagattcccacccctctgacgctctgaccaggaaaaaaccggccaaggcggaatctaagtcctttgctgtgggaatgttcaaaggccagctcaccacagatcaggtgttcccatacccgtccgtgctcaacgaagagcagacacagtttcttaaagagctggtggagcctgtgtcccgtttcttcgaggaagtgaacgatcccgccaagaatgacgctctggagatggtggaggagaccacttggcagggcctcaaggagctgggggcctttggtctgcaagtgcccagtgagctgggtggtgtgggcctttgcaacacccagtacgcccgtttggtggagatcgtgggcatgcatgaccttggcgtgggcattaccctgggggcccatcagagcatcggtttcaaaggcatcctgctctttggcacaaaggcccagaaagaaaaatacctccccaagctggcatctggggagactgtggccgctttctgtctaaccgagccctcaagcgggtcagatgcagcctccatccgaacctctgctgtgcccagcccctgtggaaaatactataccctcaatggaagcaagcttcggatcagtaatgnggggcctagcagacatcttcaccgtcttgccaagacaccagttacagatccagccacaggagccgtgaaggagaagatcacagcttttgtggtggagaggggcttcgggggcattacccatgggccccctgagaagaagatgggcatcaaggcttcaaacacagcagaggtgttctttgatggagtacgggtgccatcggagaacgtgctgggtgaggttgggagtggcttcaaggttgccatgcacatcctcaacaatggaaggtttggcatggctgcggccctggcaggtaccatgagaggcatcattgctaaggcggtagatcatgccactaatcgtacccagtttggggagaaaattcacaactttgggctgatccaggagaagctggcacggatggttatgctgcagtatgtaactgagtccatggcttacatggtgagtgctaacatggaccagggagccacggacttccagatagaggccgccatcagcaaaatctttggctcggaggcagcctggaaggtgacagatgaatgcatccaaatcatggggggtatgggcttcatgaaggaacctggagtagagcgtgtgctccgagatcttcgcatcttccggatctttgaggggacaaatgacattcttcggctgtttgtggctctgcagggctgtatggacaaaggaaaggagctctctgggcttggcagtgctctaaagaatccctttgggaatgctggcctcctgctaggagaggcaggcaaacagctgaggcggcgggcagggctgggcagcggcctgagtctcagcggacttgtccacccggagttgagtcggagtggcgagctggcagtacgggctctggagcagtttgccactgtggtggaggccaagctgataaaacacaagaaggggattgtcaatgaacagtttctgctgcagcggctggcagacggggccatcgacctctatgccatggtggtggttctctcgaggggctcaagatccctgagtgaaggccaccccacggcccaagcatgaggaaaatgctctgtgaacaccttggttgtatccagggctgcagcctccggatcccgaaagg

SEQ ID NO: 166290 - DNA, 1178 bp, Homo Sapiens
ggtcgactactactactaaattcgcgggcggatcaacgttgccatgcacatcctcaacaatggaaggtttggcatggctgcggccctggcaggtaccatgagaggcatcattgctaaggcggtagatcatgccactaatcgtacccagtttggggagaaaattcacaactttgggctgatccaggagaagctggcacggatggttatgctgcagtatgtaactgagtccatggcttacatggtgagtgctaacatggaccaaggagccacggacttccagatagaggccgccatcagcaaaatctttggctcggaggcagcctggaaggtgacagatgaatgcatccaaatcatggggggtatgggcttcatgaaggaacctggagtagagcgtgtgctccgagatcttcgcatcttccggatctttgaggggacaaatgacattcttcggctgtttgtggctctgcagggctatggacaaaggaaaggagctctctgggcttggcagtgctctaaagaatccctttgggaatgctggcctcctgctaggagaggcaggcaaacagctgaggcgggcagggctgggcagcggcctgagtctcagcggacttgtccacccggagttgagtcgcagtggcgagctgccagtacgggctctgaagcagtttgccactgtggtgaaggccaagctgataaaacacaagaaggggattgtcaatgaacagtttctgctgcagcgggctggcagacggggccatcgacctctatgccatggtggtggttctctcgagggcctcaagatccctgagtgagggccaccccacggcccagcatgagaaaatgctctgtgacacctggtgtatcgaggctgcagctcggatccgagagggcatggccgccctgcagtctgacccctggcagcaagagctctaccgcaacttcaaaagcatctccaaggccttggtggagcggggtggtgtggtcaccagcaacccacttggcttctgaatactcccggccagggcctgtcccagttatgtgccttccctcaagccaaagccgaagcccctttccttaaggccctggtttgtcccgaaggggcctagtgttcccagcactgtgcctgctctcaagagcacttactgcctcgcaaataataaaaatttctagccagtcta

SEQ ID NO: 166291 - DNA, 403 bp, Homo Sapiens
cggcccgagccgatgctcagagtgacccaacaggagaagaccccaccccacggcccagcatgagaaaatgctctgtgacacctggtgtatcgaggctgcagctcggatccgagagggcatggccgccctgcagtctgacccctggcagcaagagctctaccgcaacttcaaaagcatctccaaggccttggtgaagcggggtggtgtggtcaccagcaacccacttggcttctgaatactcccggccagggcctgtcccagttatgtgccttccctcaagccaaagccgaagcccctttccttaaggccctggtttgtcccgaaggggcctagtgttcccagcactgtgcctgctctcaagagcacttactgcctcgcaaataataaaaatttctagccagcc

SEQ ID NO: 166292 - DNA, 1039 bp, Homo Sapiens
  misc_feature (139)..(139): n is a, c, g, or t
ggctggtaccggtccggaatttcgggatatcgtcgacccacgcgtcggagattcggagatgcaggcggctcggatggccgcgagcttggggcggcagctgctgaggctcgggggcggaagctcgcggctcacggcgctncctgggggcagccccggcccggccctgccccgcggccctatgccgggggtgccgctcagctggctctggacaagtcagattcccacccctctgacgctctgaccaggaaaaaaccggccaaggcggaatctaagtcctttgctgtgggaatgttcaaaggccagctcaccacagatcaggtgttcccatacccgtccgtgctcaacgaagagcagacacagtttcttaaagagctggtggagcctgtgtcccgtttcttcgaggaagtgaacgatcccgccaagaatgacgctctggagatggtggaggagaccacttggcagggcctcaaggagctgggggcctttggtctgcaagtgcccagtgagctgggtggtgtgggcctttgcaacacccagtacgcccgtttggtggagatcgtgggcatgcatgaccttggcgtgggcattaccctgggggcccatcagagcatcggtttcaaaggcatctgctctttggcacaaaggcccagaaagaaaaatacctccccccaagctggcatctggggagactgtggccgtttctgtctaacgaggcctcagcgggtcagatgcggctccatccgaactcgctgggccagcccggtggaaatactatacctccaggagcaacttgggtacaggatggggccctacgacacttccgggcttggccagcacagtttcgagtcccgcccggcgtaggaaacacacctgtgtgtgggcaggcgcgggcgaccagggccgcgaaaaagggtaggccaccgcgggtgctgggggggcccacaaaggagggaggaaggcaccaccacaggggggcgccccgcaacgggcaccgggaaaaaggggagctagtgcggggacgggcgcgcggatccgccgc

SEQ ID NO: 166293 - DNA, 1893 bp, Homo Sapiens
  misc_feature (45)..(45): n is a, c, g, or t
  misc_feature (113)..(113): n is a, c, g, or t
  misc_feature (377)..(377): n is a, c, g, or t
  misc_feature (523)..(533): n is a, c, g, or t
  misc_feature (595)..(631): n is a, c, g, or t
  misc_feature (816)..(896): n is a, c, g, or t
  misc_feature (898)..(898): n is a, c, g, or t
  misc_feature (1269)..(1283): n is a, c, g, or t
tatccacataccgtggtgttgcgtggttggattaacgcccccccnttggggttgggggagatttataacacggagtaggtgttcttgtctatcacaatccccgccctgttttntgttagagaaagtgagagtgttgtttttacccagaggaggtgtggggggcggaagaagaaatatagccttttaataaaataggggagggtttttttccccccgcccccacgctgttgctccttgccgcaaagaacagataagatgtggtcaaccgcaggttgggcgcaggcagacgtgccggggataaaaaattgtgcggcagatatatgagtgggaggagcgcgccgcgcgccacctgtgggggcgctctccctccccgcctngtttagagatagaaataaaaaatcccgccccgcgctatgaaagataacccccctctccgaagggagagaaacgccccccccaccttattgatgggagagtatttatttgttcacaacaaaataacaccctcctcgcgtggttgttnnnnnnnnnnngcgcggggggggtttattttatcaattgtgggggcgaggggatattccccacgagcgcctcnnnnnnnnnnnnnnnnnnnnnnnnnnnnnnnnnnnnngtgagaagacccaacacatttttgggcccaatgtttgcccgctttcgcccacagggggggcccccgcggcgccccaaaagcaaagagggtttctaaaaaaaatttttttcaggggggcggaaggcggggccccccacaagctatttttttcataatcgcgggggcgctatggttccccgtagttnnnnnnnnnnnnnnnnnnnnnnnnnnnnnnnnnnnnnnnnnnnnnnnnnnnnnnnnnnnnnnnnnnnnnnnnnnnnnnnnntngtaatgtaagacatttattttggctaaagttctggtgttttaacactgatttgtgatacaacggacattaaacttccttttaaaatgaaaaaaacaatttggtagctctcccttttctgtccagaaaaattcactctttcataatcaaattaccctaaaatttggtggcgttaagaggcaacaaaagttaagcttccaacgaatctgttctctcaaccggaaatgtcttctatttccaatcaggataaaaccttgacttacttgcaaggactatcacggttagcccttcagtgattcctgacaccagttctgtgaaaaagaaaaatttcctgcgagaaaagcttcatgtcttcatattgaagatcagtacnnnnnnnnnnnnnnncctttaaaacagtagcatcttaacttgtggcacaaaaggcaccaacattccctttccaaaccatccatcaccatgggtggaaggcagcgccacctgctgcccatcatattatggctcacatacccataatttccttgcggtgctgaattccaagtggggattattagagacccctcagagccaaaaggggaccttagaggtcttctagatgagtcccctcatttgtaggtggtggtttctggataactcagagtggcagggacacagacgagcctgtggaaaggtatactgctttaagattgagaagaaaaccatttggcgctctaattttgcctggatggtgctctgtcagtcaaagaaagggaacaggtctggggagggggaagggcaccctgagttcctgttccatcacttcccaggcaggtagaaggctgtccaggaacagttcccaatccgcagactgggcatgtgtgggcttctttacaccaagagactttacttttacttgactgaacttcagtatgcttacatcttgtaaagaacataccgggttcaaggggtgcaggactatcagaaatccaagtttcagcatacagtagtccatagtaaa

SEQ ID NO: 166294 - DNA, 1089 bp, Homo Sapiens
cttgtaccggtccggaatgcccggtatatcgtcgaccacgcgtcgacccgaattcattttctgaagttgctggcatttgggtcaaggttttattaaaagctacattttataacactggcacacacaaaaaagtagttttaagcttgtttgcacagttctttttttccattggaaatggaattcattgccttaggtctttttaaatagtgtattattatcgttggggctggctctatgcttgaaaaccagtttatttataacctgttataagtgctatattctgtttgcagttaggaaatgcagaattcaaagtgatctcctagcttgtaagcaaactgagatgcactatcccttttctataaaaaataagttaatgtgtcaagaaaccaactctattaaggtggggtttaatattaccctttcctatgtgttttatctaattattttggttgttaatatggtgataatggaaagtcaagttaaattttaaatattaagaattctgatttattgagattgaattatgccaccacgtttatgtaaaaatgaaggtggcaccgtggtgagacctaatgagaaatagttactcagttgtaaaaattttgatttattctctttcttctgacctccttgcctcttgtcttgaaccatagcaaaaggatactgcatctctcattactgtagtgctgaggttattgaagttatacaaaacacatctcagtctctgtttcttggaaaggtatctattacatcctgctagctgactgacaaaactaagcagggagaataaagataattgtcattttatgttttgcacacaaaacgcagaatttgtataaccatatgacttcatagttgtgatctcaaaaaagaaggaatttctccttggtatcttgacagttaatgtaacgaatactttaaatctctaaggcttctgaagtgttagaggtagagatggtctagtaaagatgtagtagtaatgttttatccatttagcatgtgtttattttttcatatgtactcaaaggtgacttattggttcacctcagtgatattacagctaaaaaaatcattcattagcaaaaggtc

SEQ ID NO: 166295 - DNA, 644 bp, Homo Sapiens
taatacagctgggtataaagcaggctggtccggtcggaatccgggatatcgtcgaccacgcgtccgatttctcctttgtttcttgcagttaatgtaagaatactttaaatctctaagcttctgaagtgttagaggtagagatggtctagtaaagatgtaatagtaatgttttatccatttagcatgtgtttattttttcatatgtactcaaaggtgacttattggttcacctcagtgatattacagctaaaaaaatcattcattagcaaaaggaaaagtcgtctcaacctaacatcagaagtgtttcttattattattttatattgagttgaatattgaactctaacagttttctacatacaaaacacagtgtcatgaaggttattcataattgcattatagaggaatgtagtatgtcataagtactttgtaaagatttgacattcaactgtagtatccatatgttgcttaaatttccttatgagccccatgatggaaagacttacaagatgaatttgagaaaaattgaaagaaattagattatcaggttctgttaaattgttacatgtatcttgcttaaatttctgtttattaatttatatccacccaagtacataaagcaaatttggaggaaacaactgaaa

SEQ ID NO: 166296 - DNA, 799 bp, Homo Sapiens
  misc_feature (197)..(197): n is a, c, g, or t
  misc_feature (277)..(277): n is a, c, g, or t
ggcaaagaccccaaagaaattaaaattccaaggtatgtaaaattcccacttaaaacccaaaaagtgtttaaagtaattcattcataagctaactaaaagcccaaaaaggacaaggccaccccaatataataaagtactgcaaaacaaatgggcaattttcagtttatcaaaattgggattttgcatttgtatccctnttctcaatcaagaaaaaaattctttttgaatgttatataacatacatataaaccaagatagaaaaatacattataaactngtaacaatggctgtaaatacattatcttacatgtttctcataggcaataggttggttatggtacatacatagcatgaaactaagataataaagaatagacaaaaatacatgtcagctgtacgataacatacaagcgacactcccatctacccacgctaaaaaattacataatactgtcagaaaaaaagtcttaaaaactacatattttaataagaaataaattcaataaagaatgataatactgagaaccaaggcattcagagatttcaaaagtcatgcttttttcagttgatccaaaattttgtcaaccaagttttcaaaagtttgttcagagccaacattccctataaatgtcacacatttattatttcatacatttactttcttccccataaaagacctttgataaacatctaaaatgtccaggtataacatagttgagatgaaactggatcaaatactggtattgtttttaacaactatcacctcaagtgtttgagtgtcgcaaatttattcaacccc

SEQ ID NO: 166297 - DNA, 917 bp, Homo Sapiens
  misc_feature (902)..(902): n is a, c, g, or t
ggactcaaattaagctgctttatacattaaacagactttgcatgactctgtgagacgaaaattatccatgaatagtagagctgaagtaggactgccgtgaatggtcaattgtttgatagattgatacagtacaggtaaatggatggaaaatcacatgtggccttccggaattcctgacattgaaccttttcttacatagtttgaccagaccaagctctatcatcttggcccctcatgtccctcgtcgtaacaagaatagggaactcgtgtcatgtagtctgtagtggaaaccctggtaaaattagcttttgtagcttctagggttaaaaacacagacagcccattccggagtttagcctcacaggactctggatcagagacccggccacttcattccagacttctgtggtttcaaaccactggttttgtggtaattgtgataataggcagcaaagagataactagtacaggtgcctgtctctcctcgttgaaggtcaatttgcagataaatgtatgctaaccctctaagagagaaagaatcgatcaaccaatcaatgaaagaactacagtagaaaatattgccctcacctttatgtggctgttccagagcccttgccacctgaagaagacaatgaggggtatttcaggcacttgaggagtgtggctttactgttatcaatcacatttctgtgggatctggcagctcttcattcagcccacaccgtgtgaggttgctcttggtgcaccgaatggggaagtttctacatcagtacctcggagagtccactggaagacctggacagtgggagttggtgacagcaccagcgtggaggccaagtacacacagcactgaagctccagacaccctcaggaggacggtaagggacggtaaggtgagatanatgtgatagccggga

SEQ ID NO: 166298 - DNA, 730 bp, Homo Sapiens
ctctagaggaatcccccgagccctcacatacctgcccacaaattatcttctatcttaaaaaatagtatggaaaaatccttcttgaaggattcaaattagttaagaccataaagggggaaaaagaacataattttcctaaaaatctggttcaaagttcaataattaatactttacattgttaatcacagctggtttataaatcccagtttagttattctgtaatgctacaaaccttataaaatcaaattagtaaacttcagtgattatattttaattaaaaaacagcatgtataaaataaaaaaatatcctgtaatagctgattttaaagaaaataatcaagtgatgaaaaaaaagcacttaatctcttttatacacttacctggtataacataaagaaccctcttagaaactcaagactagtaatatcgacatcatattttaaactatgcttggatttttacaaataaatatagataagccatattgcataggtgtgtgctttctgtctgtgacactaatgtgacacttgacatgttttcacagacatagtagggatatccatttatgaaacaagttctcaataaactttccacagcatgggaaataaatttcacttaataaatgtgaagtcagaaaaactatgtatttgtgtggatggtaactgtgcaattaatgctttttatgacagaaaagttgggatagccggatatattgcagatcctctagagc

SEQ ID NO: 166299 - DNA, 706 bp, Homo Sapiens
  misc_feature (61)..(70): n is a, c, g, or t
gaacatgtaaacattgccagataccagtcattattctttaatggctttttagtcctctgcnnnnnnnnnnaaggcaaaagaaatatgcatctagcatttctaataccaaatccccaatgtgattgttttaaagatcatggtatgatcacagggaccaaggctgtgtgcatatataactctggatttgaaaggaggagagttcagccatctagttcttttcttcacatgacacttttaaacagccagtttgactggaattaaccaacttggcacagcctaaaaaaggagtaatgtgaaattaaattatttttctttgaaagtcttttgaaataagagaccatgtaagtaggaccctaagacaaccaaggaatttgcttccaggccctcattcctctgctgttacttacaaatgttttaatttttactacctgatattctttctctaccttttccacatttgaaaatatacaaggcagctcacttcatcctaaaaacctaaaaactccaggaaagaacagaaaaggatgatatggggaaatttgcccataaatgccggttctggttcttagtttagccatttccatcagttgaaattgtggtgtgatctgtgcttgttcgtgttgtttgtttgtgtagctttgttttttaatattcatttaataagatgatgggcaatagcaaacatttttactcccaggaatataat

SEQ ID NO: 166300 - DNA, 374 bp, Homo Sapiens
cgtcgacgttggtcctctgccctggaccttgttcagacggtgtctctcctgtgtacagcaccacagtctctatggtgggagccttaaaagggcccccttcttgcttccctatctgtcgtctgatttctgcagtctccttgcacaccttttcatagcagtaggcacaaaggacatgtttctgtttcaggtgaccacattcaggacaaacgtctatgttgttcttaactttaataagcttctgcggatttcttctcctacaccggttaacttcaatggtgcgtctatttttgggagctgccatccaaaagatactgtccaaaaggctggaattctctgtcgacgcggccgcgaatttagtagtagtaggcggccgc

SEQ ID NO: 166301 - DNA, 835 bp, Homo Sapiens; identical to SEQ ID NO: 15033

SEQ ID NO: 166302 - DNA, 819 bp, Homo Sapiens; identical to SEQ ID NO: 75234

SEQ ID NO: 166303 - DNA, 376 bp, Homo Sapiens
cgttgttaaccgcccttgggtttaaaaattaatttgaatgaagttcccacttgtatccatggccctacccgaggagaagaggagtttgttaactgggcctatgtagtagcctcatttaccatcgtttgtattactgaccacatatgcttgtcactgggaaagaagcctgtttcagctgcctgaacgcagtttggatgtctttgaggacagacattgcccggaaactcagtctatttattcttcagcttgcccttactgccactgatattggtaatgttcttttttgtaaaatgtttgtacatatgttgtctttgataatgttgctgtaattttttaaaataaaacacgaatttaataaaatatgggtagtcacaga

SEQ ID NO: 166304 - DNA, 860 bp, Homo Sapiens
  misc_feature (660)..(689): n is a, c, g, or t
cgtttatcctttcaaattccgtgccttccccctcccttttgcgcacacaccaggtttaatagatcctggcctcagggtctcctttctttctcacttctgtcttgaaggaagcatttctaaaatgtatcccctttcggtccaacaacaggaaacctgactggggcagtgaaggaagggatggcatagccgttatgtgtaaaaaacaagtatctgtatgacaacccgggatcgtttgcaagtaactgaatccattgcgacattgtgaaggcttaaatgagtttagatgggaaatagcgttgttatcgccttgggtttaaattatttgatgagttccacttgtatcatggcctacccgaggagaagaggagtttgttaactgggcctatgtagtagcctcatttaccatcgtttgtattactgaccacatatgcttgtcactgggaaagaagcctgtttcagctgcctgaacgcagtttggatgtctttgaggacagacattgcccggaaactcagtctatttattcttcagcttgcccttactgccactgatattggtaatgttcttttttgtaaaatgtttgtacatatgttgtctttgataatgttgctgtaattttttaaaataaaacacgaatttaataaaatatgggaaaggcacgnnnnnnnnnnnnnnnnnnnnnnnnnnnnnncatgtcggcccgcctcggcccctcgagaaacctttcctaaaccattccttttgggcgcggcgggccccagtaagggtaaggtggaacatgggcccataaccttggttttcccttaggaaaaattcctgggctcattggaccttagtggcttgagaatttcttcacccaaat

SEQ ID NO: 166305 - DNA, 612 bp, Homo Sapiens
ggtattacccttgtagaaaactcttttgatattaacatttaaggcaagtagttccttccttatgatttaatataaaaacatatgcaaagacacggcatttacttggatttctttgtcatctcttcttctttcatccttacatattgcacttggttcactgtatctgtctgaatacactgtgcctcaaaatcattgtagtactgttagtggtacaactccctcattaaacatttcacactatcaggctacacagcacctatatcttgtgtttaaaggcacttgtagataatacaaattgtagttacctgtgaacaattgatttcctttagtattttggcattttgatcactttaatcacagcaattccaaagttttaaattggacagtaaatgtgtattttctgtgcaatgtgtatatttgtattagcattatctacttaaactaagtttggtatatcaagtaagaaaaatattatttgggtgtataaaactaattacttatagtcaaaggtatgtaactgccttttacataatgtgacaaaggaatatgtaggtcaaggccatggcgtgtcccagtgttcagcattaacaagaatgctggatacaggtcctc

SEQ ID NO: 166306 - DNA, 373 bp, Homo Sapiens
catttgctgaactaaaaacacaaatagagaaaatgagactagattaccaacacgaaatagaaaatttgcagaatcaacaagactctgaacgggctgcccatgctaaagagatggaagccttgagggctaaactgatgaaagttattaaagaaaaggaaaacagtctggaagccatcaggtcgaaactggacaaagcagaagaccagcatctcgtagaaatggaagacacgttaaacaaattacaggaacgctgaaataaaggtaaaggagctagagctacctgcaagccaaatgcaatgaacaaaccaaggttattgataattttacatcacagctcaggctactgaagaaaagctcttggatcttgatgaca

SEQ ID NO: 166307 - DNA, 708 bp, Homo Sapiens
  misc_feature (331)..(488): n is a, c, g, or t
  misc_feature (629)..(629): n is a, c, g, or t
taaggtccccggatgtagtagtctatgacatataaatatttctacaaatagtaattctctagccattcatttggagtatttaaaactcaacattcatagcacattttatgtggacaaagaacttatgttcagaacacaaaaataagtcgtacgtcttcattaaaaacaggtgaagaatttgaacaaacatttgcaaactaaaatacaaatgaaatacactcaacatcattaaacaagaaaataaaattatgagataatcactaataatcactacatatgcaccacagtgattaaaatttttttaagttaagccacgtgacccaacaaggtnnnnnnnnnnnnnnnnnnnnnnnnnnnnnnnnnnnnnnnnnnnnnnnnnnnnnnnnnnnnnnnnnnnnnnnnnnnnnnnnnnnnnnnnnnnnnnnnnnnnnnnnnnnnnnnnnnnnnnnnnnnnnnnnnnnnnnnnnnnnnnnnnnnnnnnnnnnnnnactacaaccgggtagtagttgtcctattgttacaactgattagcacttcagacgcactgcatccaagtgtactacttatttaagatgagctaagaagataaaaaggcagaacagcctttactatttgatttccatcatggntatatttgctggaagcatagaaagtcctatcactctactgcaggcccgggatttctttctatattaagaaggggactct

SEQ ID NO: 166308 - DNA, 1059 bp, Homo Sapiens
  misc_feature (810)..(810): n is a, c, g, or t
  misc_feature (813)..(813): n is a, c, g, or t
  misc_feature (815)..(816): n is a, c, g, or t
  misc_feature (818)..(819): n is a, c, g, or t
  misc_feature (821)..(821): n is a, c, g, or t
  misc_feature (828)..(829): n is a, c, g, or t
ggatctcgctccgggacccgcagtgggtcccggagaggaagctttgacgccacagggaattcttcctactcttattcctactcatttagcagtagttctattgggcactagtagtcagttgggagtggttgctataccttgacttcatttatatgaatttccactttattaaataatagaaaagaaaatcccggtgcttgcagtagagtgataggacattctatgcttacagaaaatatagccatgattgaaatcaaatagtaaaggctgttctggctttttatcttcttagctcatcttaaataagcagtacacttggatgcagtgcgtctgaagtgctaatcagttgtaacaatagcacaaatcgaacttaggatttgtttcttctcttctgtgtttcgatttttgatcaattctttaattttggaagcctataatacagttttctattcttggagataaaaattaaatggatcactgatattttagtcattctgcttctcatctaaatatttccatattctgtattaggagaaaattaccctcccagcaccagcccccctctcaaacccccaacccaaaaccaagcattttggaatgagtctcctttagtttcagagtgtggattgtataacccatatactcttcgatgtacttgtttggtttggtattaatttgactgtgcatgacagcggcaatcttttctttggtcaaagttttctgtttattttgcttgtcatattcgatgtactttaaggtgtctttatgaagtttgctattctggcaataaacttttaggacttttggtancancnnanncnaaaagannagaagaaattggcggcccgccttcgggccctcaaaaaagctttctaaaaccattccgtttgggggcggcggggccccacgaaagggaaagtgaacactggggtcaaatgctggttttccctaggagagatcccggcggccccgaacaaagggggcttgggagatccctcacgccaaattaagtatatggcccccgggggcggggagccccggagagggatttttcgagaa

SEQ ID NO: 166309 - DNA, 557 bp, Homo Sapiens
  misc_feature (150)..(225): n is a, c, g, or t
  misc_feature (386)..(386): n is a, c, g, or t
  misc_feature (402)..(402): n is a, c, g, or t
ggctatacattatccccgctgtgtagaaagaaaaggaggcgaaccgaaacaatccccaccaggcgcgtaggcgctgctcttcgttacagtcgatacacaaccacaaagagaaaaggacaccccaagcatcattcagcaacaaagaccaannnnnnnnnnnnnnnnnnnnnnnnnnnnnnnnnnnnnnnnnnnnnnnnnnnnnnnnnnnnnnnnnnnnnnnnnnnnacatacctccacacatacatttcagcccaaagataatgtgatagccggctatcacattatcaacacacacccaacaagtaaactagtatatacttagtacccaccaaaacccagctcagccacagtctctgtagcagggaaattaagggcgcaagccccanccctgaaggctcacantatgtagaatatatatacttggctgggcaaataagcttggctctgatgatattcttatagaggttggaaaataacaggactgatagcttagccagctcagcagaataaacgaatccactgccactgggatatgtgatagccgggatcctctaggt

SEQ ID NO: 166310 - DNA, 745 bp, Homo Sapiens
  misc_feature (535)..(566): n is a, c, g, or t
ggctatcacattatcttgtttacagatgaagaaaagccaaagagaagttatataactggcaagtttctctggctccccgcctgcaccactgctcaccagattgcatgaagagggaggcagctgtaacacctcataccgttgatctccagtgaactcagatacttgtttccacgtccaggaaaccacaaactaagctctttgaagcatcagcaaaccttgctaagtgacacgtgaatgataatgtgatagccggctatcacattatcatggtggagctgtcatctggtccttggtattacaggatgtggttgatgaaggtttccaatatggtttcaggccaaaaccagggaagattctagcttcagcctcatgtccatttccagtctgtcagcattagacatggtcactgttcaagtttcaagacatccattcttaactatagagaagagttactcccctggcgtcttaacctatggaaaacatgcacggataggatatattcgattgcctcctcttccctttcagtctatgcatnnnnnnnnnnnnnnnnnnnnnnnnnnnnnnnnggtcatcagcttgctgtgctctgcagggagcagaatcaaatgggcacatatttgtcctgagagacctgtgccgcactcaggtgcccgtgttaacgtgtgcctgcagatgtggttggcaccctcggctcgtagctcttctactgtaatgagacaagcctttcttctgtcactgcagaatt

SEQ ID NO: 166311 - DNA, 392 bp, Homo Sapiens
  misc_feature (15)..(15): n is a, c, g, or t
  misc_feature (27)..(27): n is a, c, g, or t
tttacaggaacatanatcataagtttnagggttttattatcaaagtcttgtaaaacaatttcagaaactgtacatcaacatggcacagactgtagcctacttttgtttctactgcacaaaagtgaagcttgaaacttctgtaactaagaaaacagttgcctactttgcatatataacatgaaatcaccgtgtgcataagattactactgcagtaacacaaatttattggttttatacaacttgagatcaaataaaggtacattatcaagtagatttgtcttattttaaaagcgtatgaaggtcaatttaaaatgcactaccccttttttccacacggagcttaaaacaaattaattgaagagtgaaaatcaaaataagggcaagagataagg

SEQ ID NO: 166312 - DNA, 938 bp, Homo Sapiens
catttcagctccagctcactgcttagttgtcttgagcttattggctaaaacagacaagaatatgaagacatagctgtgaagctgggaactgatctagaatacctgaagaaagttcgtggcaaagtctggaagcaaagaatatctagccctctgttcaacaccaaacaatacacaatggaactagagcggctctatctacagatgtgggagcattatgcagctggcaacaaacctgaccacatgattaagcctgttgaagtcactgagtcagcataaataaagactgcacaggagaattacccctatacctgagcctcaaccttctgggggaaagggaactagataacatacttcttacttgtctgtacagtaccttgttgcagatgggtgatatataatggtaatagaatagcacagccagacttgcttcctgcatggtagggagagacacaaaagatgggaaactgcttttccacaaggaatctccgtagaattttgcggcgaccagatggtgcataggtctggaaggtctgatctcccttggtcttccatgggatggttagtgtggaggggagatatagattgtccggccgctttgtgattccatggattgattcagtcttctggagttttttttctttatattttggggactggagcttttaaaatgtttggtttcagggatttttattcatgtgaagtgtatatgattctcttgagataaggttttaagctaaaatgttactcccctggttttagtttctggaaccctggacagattgaccgggaacttttgctgggggaaatccttttttatagggttttaataaaccaccttgaaccccatattccggccgtttttagggggccggacctcaaaaatttgggaacctaccagggcgcttgttggattttagaaggaggacctcagaaatttt

SEQ ID NO: 166313 - DNA, 648 bp, Homo Sapiens
tgccaaagcgtagtacccaatagtgtactctggctgttgcgttttccagcagtaggagaacctaatattcaacagtatgcacaaaacatgggcctgccccagaaccgtatcattttttcacctgttgctcctaaagaggaacacgtcaggagaggccagctggctgatgtctgcttggacactccactctgtaatgggcacaccacagggatggatgtcctctgggcagggacccccatggtgactatgccaggagagactcttgcttctcgagttgcagcatcccagctcacttgcttaggttgtcttgagcttattgctaaaaacagacaagaatatgaagacatagctgtgaagctgggaactgatctagaatacctgaagaaagttcgtggcaaagtctggaagcaaagaatatctagccctctgttcaacaccaaacaatacacaatggaactagagcggctctatctacagatgtgggagcattatgcagctggcaacaaacctgaccacatgattaagcctgttgaagtcactgagtcagcataaataaagactgcacaggagaattacccctatacctgagcctcaacttctgggggaaagggaactaaataacattcttcttacttgtctgtacagtac

SEQ ID NO: 166314 - DNA, 1231 bp, Homo Sapiens
gcttatgagtagccagcagggcggcgggtccctaggtcagccgagatttctcaggtccctccggccccctccctggagtccacagcgcctccggtgtccagaggatcggacacggcccggcccggccatggcctcgttgctgaaggtggatcaggaagtgaagctcaaggttgattctttcagggagcggatcacaagtgaggcagaagacttggtggcaaattttttcccaaagaagttattagaacttgatagttttctgaaggaaccaatcttaaacatccatgacctaactcagatccactctgacatgaatctcccagtccctgaccccattcttctcaccaatagccatgatggactggatggtcccacttataagaagcgaaggttggatgagtgtgaagaagccttccaaggaaccaaggtgtttgtgatgcccaatgggatgctgaaaagcaaccagcagctggtggacattattgagaaagtgaaacctgagatccggctgttgattgagaaatgtaacacggtcaaaatgtgggtacagctcctgattcccaggatagaagatggaaacaactttggggtgtccattcaggaggaaacagttgcagagctaagaactgttgagagtgaagctgcatcttatctggaccagatttctagatattatattacaagagccaaattggtttctaaaatagctaaatatccccatgtggaggactatcgccgcaccgtgacagagattgatgagaaagatatatcagccttcggctcatcatatcagagctgagggaatcatatgtcactctacatgacatgatcctgaaaaatatcgagaagatcaaacggccccggagcagcaatgcagagactctgtactgaggcccagggccagggccagggggactctgtgagtctggctcaagaccgacattgccttggtttggtacatgactatcgtgatggggaaactggctggaaatagtaatcacacctctctgtttttagttagagtctaatgaaactctcatctagttctgtgataggttgacctcttttttcaggcctcaggaactcttctatgtccgtccctaataccccacacccaacctgtcgtaatttctggagaactccaggtttgtgtgtgcaggatgttggcacataaaatacctgtgttttcattctccccctctcttcctcctgtgttttgcgcttaatgtat

SEQ ID NO: 166315 - DNA, 978 bp, Homo Sapiens
agtcacgccagcgctggcagtcaagaggggctttgctgtgctaataggattgagggtgtgggaccctcaccgaatcattgattactgaaaattgaatgtttttgggtccacattcaaggctgaagtgtaatagtgtatatataacctttcctatggaaatgtgacattgagtaacattgtgttgctgtgtgaagccattaatataaatcttggtaatgacccatatctctatatgtatgtgttcccagttgtgggagcaggcactaatgaaatcctgtgcctggaatggagatatttaggtacctgaggcttagtgtcctgtggtctgcatgtaagatagatgacatcctagaacaaagaagctgttttaacttaatccccctgatcagcaggatatctgtgtgttcagtgacatcatacattctgtatctagaagtctaaaatttctgcctttctcctaaagaatgtgttcttgcattttggttgaaataacctacacagtgttaaaaatcagatacctcctttagtgaccagttcaaattttaatagcgataggtagcccctgagaaatttatcactataactccacaggaaatatgacttggaagtgctctgtgtactaaacaaaataaagcccctctttgcattttaaaaccaaagtcaaaacaaaactcttgtaatgcaattaattaacttcatgtcttcccatgactcaagttttgttaaatatgcccaaaaactttgattggcagtttcttcggttaattattcctatagaatgtattttaagaaatctatacaaattggatatatggcttggtaattctccagtttctaggaggtacctatttctaccgtttcaagtgatgaagtgaaaataatttacattcgatagtgatactgataacaaacctacttaagagatatgttgctttttacttaagggataatgtgatagccgggatcctctaggtcgcc

SEQ ID NO: 166316 - DNA, 724 bp, Homo Sapiens
  misc_feature (98)..(158): n is a, c, g, or t
gcgaggcgggccgcgcgcgtcggcgtcacagcccgcggcagaggcgcccagggcggccgggcccacgacgccgaaagcgccgctgcggttgccgcctnnnnnnnnnnnnnnnnnnnnnnnnnnnnnnnnnnnnnnnnnnnnnnnnnnnnnnnnnnnnntccggcccgggactcgggtttgggcgaccaggaggtgccggtggccgcgctcggacccggtgacttaagagattaaaattaatttggttgctgttggttctgaacaaataatgagttcttttatttgaggtatgccattttgaagactgagacgttggagttttatcctagaggataaaggaaatctttgggaaagtcagtattttatatagcaaaaatatgaacctcaaactgaatcctctaaaggccccatacaatgaagtagacattggtggaaacatttacacccagtcagcttgaagagtttcaaatggaccctaccactgagaaatcaagatggcagtctactatggggaattgaggaaaaatggattaatacaagagtcctgtgataatatacaaccaagacagggttcttttaacatggattccatgcagtgaatgaagacataggtttcttacccaacacaaatggacagtggatttgactttctaaagactttttttgtggacattttgacatttggagaagaaagatggcacactaacccagataatagtttatg

SEQ ID NO: 166317 - DNA, 1232 bp, Homo Sapiens
  misc_feature (204)..(212): n is a, c, g, or t
ggcgagggcaattgggtagaagaatttgggggggcgcgacaagggcgtggatcatgagtcgcgcgtgaataatcttccccggcggtcgtagcgtcggcggaggtacgtaacgaggacataggagcggcgcgcgaattgtctacttattgtggcggcgggcggggtgtattatcacgtgagggcgtcgctcatcgggttaacaannnnnnnnntagcggcaaaatgtccggaggaaaaggcggggggcggggaaaaacgaacagggcgggaaagagcggtagggcgggaaaaacaaaggcgaaaatagctgggggcaataagggggggtgtggcgaaatcggtggtaaatacgcggcgcccgcttgtgttcatgcgcgaacgtagggctgaatgcggggcgcgccgggtccggtatttcacaatatagtagcaagtgggggtccaaatgaagtgggggggcatgtaatggggatagcggtggtgtgatcagaacgcgggttggccggcgcccacagggtagcgtgttggggtgaggggagcgccggaagccgtggcaatacgtgggcgtagccaaggtgcgcatgcgtgggggcctatatctcacttggtcgcgctcggcgcgtgatggtccccgcgtcacgggcgggtcacgccagggggcggtggggtagagtttggtgccatcccgcgccggccacgtcgggctcccgcgccccgaagaagatggtctgcgggaacccgcgccatttcggtggtttgaccggcgtagcaccgcgggtcccctagtccgacctgggtcgcgcccgagactgatgtggtggcgcggccggatacagatcttgaagagtcggtaccgggccacagtcggtcgcgaggcggtggccgggtcgcttcgtgtttgtggcaaggttcgactccggccccggatcgtgcgggtgagcatgcccttcgggccgggtccagccgccggggcccgggggagcctccgaggcggcaaccgcagcggccctttcggcgtcgtgggcccggccgccctgggcgcctctgccgcggcctgtgacgccgacgcgcgcggcccgcctcgcctcagccgcggcagccccactcccgcgggcctgctggccgtccgggcgtagctccccgccggccggcgggcctcgcggccgcggcggaacgcctgacagctcggggtgctgctgcctctccggccatcttgtgccgtgtgtgtggtg

SEQ ID NO: 166318 - DNA, 428 bp, Homo Sapiens
catgggatatgtggtgtggaggcagattcctagaagcaccttccataccaatgccacggtacatggacgggagaggggaacctctgactaaaagtacaaagtttctcagtatccagacggtcatctgtaaggagaatttctaatgatttcttttcttcaactccacgaaaccccactttctcataatatactgaacgaaagtctctctgagagtcctcagtcatatctcattccgttaatgtgatagccgctgcccacgaagtggggaattgctagatgtgtggactgagctacaggatatccatgatgcacatggcttgagataacagtggggcggctcccatagcaacaagaagcttttgtcctccttgggaatagacacccgaaacattctcttcacgggaaataagaagcagactgtaatagtg

SEQ ID NO: 166319 - DNA, 595 bp, Homo Sapiens
ggccagcgatcaccttgatagcttcttcccttaggtgctcttctcttttcggttcctgggtagatgtgctgtctttctctactgtagacatgagtcttgcaaatgcatcagtcactttgaggcttgaggtggagatttccagcttagaagttgtcaactcatacaactccggatccacaccatctaaagggttagtaaggccactgctactccagtcaaactggacgggtggtagagactcctggaactgatcagatgtacatgtgttcatatctggtgacatggtggctgtctgaccgatggaagctattttttctgcagcagagagtggtttcagtggttccttggtgggctctaacatacccaatcctgctgcatacatgggcactataacaggctgcttcttattgcccgtgaagagaatgtttcgggtgtctattcccaaggaggacaaaagcttcttgttgctatgggagccgccccactggtatctcaagccatgtgcatcatggatatcctgtagctcagtccacacatctagcaattccccactttcaggtaaggcctctcgtcgtttttattggcaaaggtgctt

SEQ ID NO: 166320 - DNA, 1263 bp, Homo Sapiens
atttcattttctaaacgaatcctaatctttcctgtgactgaatcggttcagaggatatcttttcaataaggaaggaagccctcccctgctcactggggacgtcgcaggattttgaagacctaaagatttactcttttgtgcacagacgctggaagcatttggactcacttttccccttcgtctttctctccctttctgtctttctgtgtctcctccaagaatgaaatatgactgaggactctcagagaaactttcgttcagtatattatgagaaagtggggtttcgtggagttgaagaaaagaaatcattagaaattctcctaaaagatgaccgtctggatactgagaaactttgtacttttagtcagaggttccctctcccgtccatgtaccgtgcattggtatggaaggtgcttctaggaatcttgcctccacaccacgagtcccatgccaaggtgatgatgtatcgtaaggagcagtacttggatgtccttcatgccctgaaagtcgttcgctttgttagtgatgccacacctcaggctgaagtctatctccgcatgtatcagctggagtctgggaagttacctcgaagtccctcttttccactggagccagatgatgaagtgtttcttgccatagctaaagccatggaggaaatggtggaagatagtgtcgactgttactggatcacccgacgctttgtgaaccaattaaataccaagtaccgggattccttgccccagttgccaaaagcgtttgaacaatacttgaatctggaagatggcagactgctgactcatctgaggatgtgttccgcggcgcccaaacttccttatgatctctggttcaagaggtgctttgcgggatgtttgcctgaatccagtttacagagggtttgggataaagttgtgagtggatcctgtaagatcctagtttttgtagctgtcgaaattttattaacctttaaaataaaagttatggcactgaacagtgcagagaagataacaaagttcctggaaaatattccccaggacagctcagacgcgatcgtgagcaaggccattgacttgtggcacaaacactgtgggaccccggtccattcaagctgaacgcacccgctggttgtggaccgtctgccaggcaccacagtgagcattgtgttcttggcatgtgatctgggaaactgattgaataatacacttttcttgctttggtgctcaaagtggtttttttcccccaataaaattatttaattggaaacac

SEQ ID NO: 166321 - DNA, 898 bp, Homo Sapiens
  misc_feature (735)..(743): n is a, c, g, or t
gctaccctcggggctccaggaatcctgggatatcgtcgacccacgcgtccggcttcggttattgcctttccttggtgtactcgcacttcttggctaccttgcagttcgtccattcctcccgaagaagaaacaacagaaggatagcttgattaatcttaaaatacaaaaggaaaatccgaaagtagtgaatgaaataaacattgaagatttgtgtcttactaaagcagcttattgtaggtgttggcgttctaaaacgtttcctgcctgcgatggttcacataataaacacaatgaattgacaggagataatgtgggtccactaatactgaagaagaaagaagtataataataataacaatattttctcattctttgtgtatagaaaattttaaaatggtggtcttaattattactactggttgaacaattatttcttccaatttattttcttcctgcactactgtttgtatttgatcctttgtctattcagtcacttaattagaaattaaattgtcaagcctcttattctgacttcaaagaattaatgtatcttccaacaataaaatcacttctgattttaatctaggaaaacctaaattgtggctatggatccaaagctgtttgtttctttgaatatcaatattttcaacaggatcttgtatttaaaattcccacctacattgttaaatatgttattttttcatatctcttttggttttgataatctgaaagtgnnnnnnnnnctcgttttggccttccaactgcatttgggttagggggaattaagaaaaatattgcccatcaggaattacttgggggtttcacagagatagactctttgcttttaaagagaattgttggggtatttaaaatgaaaaatccccgcttttagaaaaaa

SEQ ID NO: 166322 - DNA, 643 bp, Homo Sapiens
gaattctataacgagaagaagtcctcgatcatatgggtactttccgcagtatactggatcagctagactggatagtaaacaaatttaaagaagattcttctttagaactcttccttctcatccacaatttggatagccagatgttgagaggagagaagagccagcaaatcattggtcagttgtcatctttgcataacatttaccttatagcatccattgaccacctcaatgctcctctcatgtgggatcatgcaaagcagagtctttttaactggctctggtatgaaactactacatacagtccttatactgaagaaacctcctatgagaactctcttctggtaaagcagtctggatccctgccacttagctcccttactcatgtcttacgaagccttacccctaatgcaaggggaatattcaggctactaataaaataccagctggacaaccaggataacccttcttacattggcctttcttttcaagatttgttaccagcagtgtcgggaggcacttcctcgtcaatagtgatctgacactccgggcccagttaactgaatttagggaccacaagcttataagaacaaagaagggaactgatggagtagagtatttattaatttcttgttgataatgttat

SEQ ID NO: 166323 - DNA, 810 bp, Homo Sapiens
  misc_feature (142)..(173): n is a, c, g, or t
tgctgcccttcctgctgaacttcagagggagctgaaagcagcgtatgatcaaagacaaaggcagggcgagaacagcactcaccagcagtcagccagcgcatctgtgccaaagaatcctttacttcatctaaaggcagcagtnnnnnnnnnnnnnnnnnnnnnnnnnnnnnnnnccatcggttcaccaaaaaggattcagagtcctttgaataacaagctgcttaacagtcctgcaaaaactctgccaggggcctgtggcagtccccagaagttaattgatgggtttctaaaacatgaaggacctcctgcagagaaacccctggaagaactctctgcttctacttcaggtgtgccaggcctttctagttagcagtctgacccagctggctgtgtgagacctccagcaaccaatctagctggagctgttgaattcaagtgatgtgaagaccttgctcagagaatggataactacaatttcagatccaatggaagaagacattctccaagttgtgaaatactgtactgatctaatagaagaaaaagatttggaaaaactggatctagttcataaaatacatgaaaaggctgatgcagcaatcggtggaatcggataggaatatggcatatgacatatattcttgacaatgtccaggtgagaaaaacagacaacacttcatggaatgccacattaaacaggtcacatacactattacccgagaagcctggatggctctctgaatagctgtgacataagttgcttgtgaggtactagacagagggcatgaacagtcatgcccggaggtaaaataa

SEQ ID NO: 166324 - DNA, 651 bp, Homo Sapiens
  misc_feature (183)..(468): n is a, c, g, or t
tgcgaggtagggagaaaagccagtttcacttaagaatgtacttgtaaagtgaggtgcagtggctcatgcctgtaacttataaaatttttcatgttgtctttgtcaagtaccgatatgtgtgtcatattgattttgtaaaagaaaagattccaggtagttttatttcctatgtagtttatttannnnnnnnnnnnnnnnnnnnnnnnnnnnnnnnnnnnnnnnnnnnnnnnnnnnnnnnnnnnnnnnnnnnnnnnnnnnnnnnnnnnnnnnnnnnnnnnnnnnnnnnnnnnnnnnnnnnnnnnnnnnnnnnnnnnnnnnnnnnnnnnnnnnnnnnnnnnnnnnnnnnnnnnnnnnnnnnnnnnnnnnnnnnnnnnnnnnnnnnnnnnnnnnnnnnnnnnnnnnnnnnnnnnnnnnnnnnnnnnnnnnnnnnnnnnnnnnnnnnnnnnnnnnnnnnnnnnnnnnnnnnnntgtactttggagtaatggttaaaagtttagatcctaaggtaacacctagcagtgtttaaatctcaattttgccacttgctagttttatgaccctggacgaattcttcacctctctaaggttcagttttcttaactataaagagaagacatagggttactacgaagggtaactgaacagccatt

SEQ ID NO: 166325 - DNA, 334 bp, Homo Sapiens
taaattcgcggccgcgtcgacgggacataaattggcccctgagtcgattgccctgcttcctgctgggatgctgcgagctgtggagtctatcagatgtgggctgaattttgctgatcagctgggtagttttggccgagaactgcacttgcctcagtgttctcatctatgaaataaggaccctcatgcccacactgtagagtcacgaagctcagagattattcccagcagcagccagcacctggcctggctgaggccattgcaccgttatcctggaaactgaggcagaccacaggacgggttgatccggccgcgaatttagtagtagtagtagacc

SEQ ID NO: 166326 - DNA, 1030 bp, Homo Sapiens
  misc_feature (776)..(776): n is a, c, g, or t
  misc_feature (823)..(823): n is a, c, g, or t
cctgggtggcgaattcggcacgaggctagtacggcttcaggtccagagcgtggagaagcctcagtaccgcgggacgttgcactgcttcaagtccatcatcaagcaagagagcgtgctgggcctgtacaagggcctgggctcgccgctcatggggctcaccttcatcaacgcgctggtgttcggggtgcagggcaacaccctccgagccctgggccacgactcgcccctcaaccagttcctggcaggtgcggcggcgggcgccatccagtgcgtcatctgctgccccatggagctggccaagacgcggctgcagctgcaggacgcgggcccagcgcgcacctacaagggctcgctggactgcctcgcgcagatctacgggcacgagggtctgcgtggcgtcaaccggggcatggtgtccacgttgctgcgtgagactcccagcttcggcgtctacttcctcacctatgacgctctcacgcgggcgctgggctgcgagccgggcgaccgcctgctggtgcccaagctgctgttggcgggcggtacgtcaggcatcgtgtcctggctctctacctatcctgtggacgtggtcaagtcgcggctgcaggcggacggactgcggggcgccccgcgctaccgcggcatcctggactgcgtgcaccagagctaccgcgccgagggctggcgcgtcttcacacgggggctggcgtccacgctgctgcgcgccttccccgtcaacgctgccaccttcgccaccgtcacggtggtgctcacctacncgcgcggcgaggaggccgggccccgagggcgaggctgtgcccgccgncccctgccggggccggccctggcgcaacccttccagcctggggaggttcaacccggcccctccttttcccagggggttcctttctcaagaaaaccctggggaacataaaatttgggcccccctggaaatcgcaattggccccgggcttttccctggccttggggaaaagccttggcgcaaaacctggttgggaggagttcttaaata

SEQ ID NO: 166327 - DNA, 1378 bp, Homo Sapiens
agacgcccagcttcttcgcctacttcctcacctatgacgctctcacgcgggcgctgggctgcgagccgggcgaccgcctgctggtgcccaagctgctgttggcgggcggtacgtcaggcatcgtgtcctggctctctacctatcctgtggacgtggtcaagtcgcggctgcaggcggacggactgcggggcgccccgcgctaccgcggcatcctggactgcgtgcaccagagctaccgcgccgagggctggcgcgtcttcacacgggggctggcgtccacgctgctgcgcgccttccccgtcaacgctgccaccttcgccaccgtcacggtggtgctcacctacgcgcgcggcgaggaggccgggcccgagggcgaggctgtgcccgccgcccctgcggggcctgccctggcgcagccctccagcctgtgacgctcaccccgccctccttccccagggctccttctcagaaacctgggacataaattggcccctgagtcgattgccctgcttcctgctgggatgctgcgagctgtggagtctatcagacgtgggctgaattttgctgatcagctgggtagttttggccgagaactgcacttgcctcagtgttctccatctatgaaataaggaccctcatgcccacactgtagagtcacgaagctcagagattattcccagcagcagccagcacctggcctggctgaggccattgcaccgttatcctggaaactgaggcagacactccagcccctttctgggatcctggccacgtcattgtgctcctgccctgcaggctggctcccgggggtctctgatggccaaccaaggggccacccagggacctctaactccacacatcctccacccgggggggtggtgggccacccctctggtctgtgttagggacagaggaaaacttggtgtgcctcctggtgtcacagaactggatcctctgcataccccagcttctccacatgccactgctaggggtaccccagctgctgccactcctgctggagggtgaactggggaccctgcaccctccgggaagccatggagtctgctggaggcaccatatcagcctgcgggactagggtggggagcaaacaggccagcggtggaggtctggacagttcaagtgttgatgcagctgtggcaaggagaaatccttccggctctgggcctcaggctgcctgtccataaaatggggacatggcccagctgacggacaaatggagtctcgagccactaacaaccggcagcaggatcccccaagtgtgcagagggctcagcagagaacagtattgggaccccctcaccaggcttggaacacctcccagcaaaaggaagccaagttaagtccctctggctcccag

SEQ ID NO: 166328 - DNA, 686 bp, Homo Sapiens
  misc_feature (295)..(590): n is a, c, g, or t
ccaaactgactcttgaccaaagaatctgatttggcaaaccaaatcttagtgcagtgttcgctcctcgtccccttacccagaacatgattcagatcctaacataaacacaaaaacaggtcagggaaccaaaacactgtggtcttgtctattatacaaaatattgagataatgttcacgattcattctgttttcagcaattgtgacaattttgaagcttctctcgaagcttcgaaacacttcatttcctactaaataccaaaacgtgtcagacaggcatcaccagtgggaacttggnnnnnnnnnnnnnnnnnnnnnnnnnnnnnnnnnnnnnnnnnnnnnnnnnnnnnnnnnnnnnnnnnnnnnnnnnnnnnnnnnnnnnnnnnnnnnnnnnnnnnnnnnnnnnnnnnnnnnnnnnnnnnnnnnnnnnnnnnnnnnnnnnnnnnnnnnnnnnnnnnnnnnnnnnnnnnnnnnnnnnnnnnnnnnnnnnnnnnnnnnnnnnnnnnnnnnnnnnnnnnnnnnnnnnnnnnnnnnnnnnnnnnnnnnnnnnnnnnnnnnnnnnnnnnnnnnnnnnnnnnnnnnnnnnnnnnnnnggggaactttgtttttaaacgtttacaaacaaaaagattttcgatgcataggccagtcctaatgcatcccataatggggaccaaggcaaaaacaca

SEQ ID NO: 166329 - DNA, 1100 bp, Homo Sapiens
  misc_feature (37)..(38): n is a, c, g, or t
  misc_feature (67)..(68): n is a, c, g, or t
  misc_feature (71)..(76): n is a, c, g, or t
  misc_feature (171)..(371): n is a, c, g, or t
  misc_feature (666)..(961): n is a, c, g, or t
cgggaagagggcggggccccggaaaccatgttttttnntgttcgttgtgcttcttttctggcgcccnnctnnnnnngggaggaccaggagttttccattttcgggccacccaagggcttgggagtgccagtgggcgcgaatcttcagcttcggctgaaaccctcccccctnnnnnnnnnnnnnnnnnnnnnnnnnnnnnnnnnnnnnnnnnnnnnnnnnnnnnnnnnnnnnnnnnnnnnnnnnnnnnnnnnnnnnnnnnnnnnnnnnnnnnnnnnnnnnnnnnnnnnnnnnnnnnnnnnnnnnnnnnnnnnnnnnnnnnnnnnnnnnnnnnnnnnnnnnnnnnnnnnnnnnnnnnnnnnnnnnnnnnnnnnccaaactgactcttgaccaaagaatctgatttggcaaaccaaatcttagtgcagtgttcgctcctcgtccccttacccagaacatgattcagatcctaacataaacacaaaaacaggtcagggaaccaaaacactgtggtcttgtctattatacaaaatattgagataatgttcacgattcattctgttttcagcaattgtgacaattttgaagcttctctcgaagcttcgaaacacttcatttcctactaaataccaaaacgtgtcagacaggcatcaccagtgggaacttggnnnnnnnnnnnnnnnnnnnnnnnnnnnnnnnnnnnnnnnnnnnnnnnnnnnnnnnnnnnnnnnnnnnnnnnnnnnnnnnnnnnnnnnnnnnnnnnnnnnnnnnnnnnnnnnnnnnnnnnnnnnnnnnnnnnnnnnnnnnnnnnnnnnnnnnnnnnnnnnnnnnnnnnnnnnnnnnnnnnnnnnnnnnnnnnnnnnnnnnnnnnnnnnnnnnnnnnnnnnnnnnnnnnnnnnnnnnnnnnnnnnnnnnnnnnnnnnnnnnnnnnnnnnnnnnnnnnnnnnnnnnnnnnnnnnnnnnnggggaactttgtttttaaacgtttacaaacaaaaagattttcgatgcataggccagtcctaatgcatcccataatggggaccaaggcaaaaacacacacacacaactacaaaatattccctagaaaaatgcaagatccc

SEQ ID NO: 166330 - DNA, 1014 bp, Homo Sapiens
  misc_feature (764)..(773): n is a, c, g, or t
  misc_feature (806)..(819): n is a, c, g, or t
  misc_feature (871)..(871): n is a, c, g, or t
  misc_feature (921)..(921): n is a, c, g, or t
  misc_feature (949)..(949): n is a, c, g, or t
  misc_feature (980)..(980): n is a, c, g, or t
  misc_feature (1000)..(1000): n is a, c, g, or t
cgactctagtaggatccacagatgcgcgaggaagtatgttctggtcacgtacagccggctcggagcccaaaggagcctcaggttcagggctcagggcgggggggtcccattttgtgtgctggcgcctctgctgtgcccagcagtggctgctgaggaagcagctgcagcagtagagagacgcacttgcctcatcagaccctccctgccccaccccagcatgatgccctggaaatctggagccccttggagctgagctggacggggggccagctgcgagcatgtgcactaaacgcagccctttccaggggaagagagcaggatggagaatggaaggaaagccccccaggcttcgtgaattgcaagaagggacccttccaggatgacactaggaacagggctagggcactcgctcagtccctaggggcttgtttgttctttattattgtgtttaaatccttatagagcaatatcaggatggtgttaataggtctgcctcagaatgagaatcaatccttttagaaaacctttatactaagcctcctcttcaaaattcacagtggcgattagcggactggagtctggtggcgattagcggactggagtctggggacatccgtggcaaagacaccagctcaactttagtgcttcccaactttatttagaatgacatggggtgggtgtctggtgtgtgtgttttccctacgcacctcccatagctattaacaactgaggaaggccagtgcagaatatttttggagaacgannnnnnnnnnaaataatatatcattcctatggggggaaagccnnnnnnnnnnnnnngggctgagttattccctccctcccctcaataccctcagtactgaactacttnccctttgcttttctcagggcctccccccaccgattttgagggcagggttngccagatttaggcaaaacccaaaacagngtgctgagtttaaacggcaattttcaggggnaaacaaagggtatttttttnggctttaatttggc

SEQ ID NO: 166331 - DNA, 248 bp, Homo Sapiens
taccttcaggatcttcaggtagacctaacaatcaacaggctaatgtcagaccaccactcagactactgaagcctccaaattgtgcagatatttaatcattgtgaaaatcttccttccaggagaaataacttcaatccactttggatcacccaagtgctcttagaatttcaaggattttatgagcttgtctgaaaaagcaatataagttgtttcatatgttatttctttgttcgttcttgtggttaggt

SEQ ID NO: 166332 - DNA, 714 bp, Homo Sapiens
  misc_feature (476)..(480): n is a, c, g, or t
  misc_feature (484)..(484): n is a, c, g, or t
  misc_feature (487)..(489): n is a, c, g, or t
  misc_feature (491)..(530): n is a, c, g, or t
  misc_feature (533)..(533): n is a, c, g, or t
  misc_feature (554)..(556): n is a, c, g, or t
gatctcagaggttccccaggtagactaaccttcttattttagtgatctttctaattcgaaagctgtgttctttttgaataccgtgcatgggggttaagctgatgttcaaacagtttgcataaaaaacaatgaatcagcttaagtcatttaatcatttcaagtgcattctcgcatcctttaaaaataagtttaagaaatttaagagaaatgtgttttcattaagtattgcatatctttagttatgccatggtaaattcccttttttcgtatggattaaaggaaggttatgataaaatgattaggttcatttacattcacttggtagcaattacatgagaatttgaattttgtcgtgttagggtaagtacattcctgtgaatgatggtacagataggtgagattttctgttatggtacccaaactcaccatttggtcctctttaatctttgagggtttcaataaaaattgttcactcnnnnnaaanaannnannnnnnnnnnnnnnnnnnnnnnnnnnnnnnnnnnnnnnnncanaacaaccaccacaacccaaannnccctttgtgggccccgcctccgccccccaaaaaatctttctaaaaaccatttcctttgggccccgcgggcccccctggggaaagggaacctgggcccaaaacttgttcccccaagaaaaaaccggggccaggaaataagggtctgggaactccccacc

SEQ ID NO: 166333 - DNA, 311 bp, Homo Sapiens
ctcaccaggtagtctaacaagagaaatgtatcatttccatattctgtataaaacattcacacttatctgtccatctcatagcactgatcagaccaggaagctaggaaaagacccttttgcatcagtggaactccttgaagcttaccacaagtcataaggcagggcttggtacgagccaattaaccagagtgcaattacattaaaaacctcccccaaactttccgtggcacattgcattatggtaaaaccagaggttcatcacctattttgtattagttaggtctacctggaagatcctgtagagtcacccg

SEQ ID NO: 166334 - DNA, 971 bp, Homo Sapiens
  misc_feature (195)..(195): n is a, c, g, or t
  misc_feature (254)..(254): n is a, c, g, or t
  misc_feature (861)..(873): n is a, c, g, or t
ggttagccaaaggggttaaggaatctcctttaaaagtttgggtttgtttctttttcccgcgggggtatccaagagaaaatacggaatcttattcttctgggttaggggtcaaatttacaaaaatttcccatgggacctgaagcaaaaaggccccacggggggaataaaaaatcactccacccattggacgccacncagtattttttcaagttatgggcttttgaaagtataacaaatttcaggtaaacaaaatncaaaagaaaaaaattccttctgcgtacaacaaagaagcacctgttatattttgaatgcattcttcatgttgccagctttctaaacttgtttttttgatgcctcaacagacagaagtgaaaattatatgccactcttaagtacatccaggttctcctctacatattcccaatatggaatgctggctagcaatcatggcactctctcagaaaccagccactggaagttaaaacttctggatttcaagagctagtacaggctgctaaatttaacaaaggaacaaaccttcataaatggtacaaactacctgcccaacacactcttctattttccagaccctttaatattgagtagtctagtcttggattgactatggtgggttaggtctaatctaagtatcttaatagctatctagggataatgaataaaattaaatacaactggtacctcaagtatcataagagaataaatttatgaagacaagcagaccaaagcaactcaagattttctacacctgactactgtagctgtaacttcaaataatgtgttacctatgaaacttattatgtacgaattagttcttaaagacagaaatgatggaaacatgtnnnnnnnnnnnnncaacagtaagtgttcaaacagatccctgttttgttataaagaactggagctctaggtggcatctagtggatattttaatagcaataaaaataaaaaat

SEQ ID NO: 166335 - DNA, 175 bp, Homo Sapiens
ccaggtagacctaactgaatcaaaatctccattttaacaagagtccccagtaactgagaagcaccagcctaaggcaagtgaaatgatctctaagccttgcctccccccaccatgttacaaaagtggggataagcatataaccctacggggttagtctacctgggtatactctaga

SEQ ID NO: 166336 - DNA, 199 bp, Homo Sapiens
aggatcccccaggtagacctaactgacacatactcaataacatgttgattggataaattcggaaagtcatcaatatttgtacatatctcagaatataaaaatagaagcattttatttggtttcaggcaaactatatgactgcccccttgctccacttctccccactttggggacctatccctgggttaggtctacctgg

SEQ ID NO: 166337 - DNA, 264 bp, Homo Sapiens
ccaggtagacctaacagcccacagaagaagaagcatcttcaaaggaggattctgcaccttctaagccagttgtggggattatttaccctcctccaggggtcagaaatattgttgacaagactgccagctttgtggccagaaacgggcctgaatttgaagctaggatccgacagaacgagatcaacaaccccaagttcaactttctgaaccccaatgacccttaccatgcctactacctgggttagtactacctgggggataatc

SEQ ID NO: 166338 - DNA, 474 bp, Homo Sapiens
gaaagcaagccaggaatctgcctatgtggtagacgcaaccattactacttgaacccccttagaaaagcttttccagcattccataactcaggttcctcagttataaagtgggaaactcataattgtcctacctacctcacaggggtgttgtgaggatcaaaggaacagatgaatgtatgagcactttcagacatgtaaggcactgtcatgtaacaagtaggggaaagactctggagcacattagtgctggtgtgtgccaagcccgtgggctgttgaccgtaagggatattcaagtaggaggaggaagagaagatggcattgctaataaaggttgtgatacacaaccataggattaactgcctcctcaagtccatcatgtaaataaggtgctatgtataccaacttctcaccacctttgtgtttctgttcggtaatcctggtgtggacaaataaagttttcacttgtatgtaaat

SEQ ID NO: 166339 - DNA, 442 bp, Homo Sapiens
tcagcctaaatacagaatgaatatgaatagtttgtgaaaagggttagagaacaccaatattcctatagtttctgtattaatgcagtagagacagaggttcctaacgcaaaaagaaaaccacaagtaaagaccgtcaaattagagctttagaatatgacttgaaaaagtagggatgggcaaaacagcataagaaaatattttttcttaatgcagatggacagtgttttcttgttttaaaaatgttttgcctatttgccagcatttttttgaagtaatacactgctgctacctggaagatgtctaacttcattttctacaactcttatgtgattttgccattgtcattaagatgcattgattttatttatgaggtgtatgactttaaatatctaaatgctgtattaagtgacttgtttcaaaggaataaatgaagtgaaaacgt

SEQ ID NO: 166340 - DNA, 270 bp, Homo Sapiens
ccaggagcttacaggtagactaacgacctcacatcatgtattcacaaggtcaaagttctggtccacaaacccttccctatagaagttcaatggctgcgaaagaatttgtagtaaaccaggcctcccaggatggcgagctccagtaagatgataatggaaagcagcagcttgttggttgtcacttttctggacattgaacggagaatcttccgacttttgctcaagttttcacttgtgtttaccagtctactcttggttaggtctacctgg

SEQ ID NO: 166341 - DNA, 860 bp, Homo Sapiens
gggcggggaccgaagaaaagaagaaattgatcagggattttgatgaaaagcaacaggaagcaaatgaaacgctggcagagatggaggaggagctacgttatgcacccctgtctttccgaaaccccatgatgtctaagcttcgaaactaccggaaggaccttgctaaactccatcgggaggtgagaagcacacctttgacagccacacctggaggccgaggagacatgaaatatggcatatatgctgtagagaatgagcatatgaatcggctacagtctcaaagggcaatgcttctgcagggcactgaaagcctgaaccgggccacccaaagtattgaacgttctcatcggattgccacagagactgaccagattggctcagaaatcatagaagagctgggggaacaacgagaccagttagaacgtaccaagagtagactggtaaacacaagtgaaaacttgagcaaaagtcggaagattctccgttcaatgtccagaaaagtgacaaccaacaagctgctgctttccattatcatcttactggagctcgccatcctgggaggcctggtttactacaaattctttcgcagccattgaacttctatagggaagggtttgtggaccagaactttgaccttgtgaatgcatgatgttagggatgtggatagaataaacatattgcctgctgtgggctgacagttcaaggatgcactgtatagccaggctgtgggaggagggaggaaagatgaaaaaccacttaaatgtgacaggaacaacagcaacaagaccagtatgatataccaaggtaataaatgctgtttatgacttctttaccacaacaaaccaacacacacacaaaag

SEQ ID NO: 166342 - DNA, 605 bp, Homo Sapiens
ggtgagttaccagcattgtaggttacagctgacagttttcatatgccccatctttgtagttacagttagattctgcagatcctatatcatcaggtggactgaaatgactgctgccttgagactctgtatcaatacttttggtttctgactgaaggtggacagaaacctgaactgctatttcctggccttgttcattcagagagccatcatctgaatctcctcctggtgaattactccgtcccatctctgggttaatgacatagatgccaccttgagcattcaaggcaggtctctctttaattctttcacccaggtcatcagggtcatccactcgcgcagcctcaaacatctcctcaacaaaggctcgacagtttagaataagaggtggaagagggacacttctggccagttcttcaatataacgagcaaactccatggtcttaaatggtgtgactttggcgagctccagagtttgggctgaggtaatgatggggatacgttttgcaatctcaaaggccttctgaagtttctcagccccttcagttataaagaactcattgatggccttctcagtcttgcgaagatggctgctcatcataccgcgg

SEQ ID NO: 166343 - DNA, 1159 bp, Homo Sapiens
  misc_feature (303)..(406): n is a, c, g, or t
  misc_feature (439)..(439): n is a, c, g, or t
  misc_feature (442)..(442): n is a, c, g, or t
  misc_feature (444)..(532): n is a, c, g, or t
  misc_feature (931)..(931): n is a, c, g, or t
  misc_feature (949)..(949): n is a, c, g, or t
  misc_feature (1066)..(1066): n is a, c, g, or t
ggatctcatagactaaccatccccgcctcactgcttagcccccttggcttcccctaggccagctcacactcaaggtccagcttggatctggagctcctacaggaagccttccccagccctgctctgctcggagacctcttccccctccatacctacctctcccacttctgtggcaggctcttctttatcctcaggcttcagctcagacatccctcacctgctaggccacagcagctcctgcaaagcttcccacggtccctgctgctctccctccccgcacctagtgttacttggtctacatcnnnnnnnnnnnnnnnnnnnnnnnnnnnnnnnnnnnnnnnnnnnnnnnnnnnnnnnnnnnnnnnnnnnnnnnnnnnnnnnnnnnnnnnnnnnnnnnnnnnnnnnntgagtttattgatgaatacaagttagtacttantcngnnnnnnnnnnnnnnnnnnnnnnnnnnnnnnnnnnnnnnnnnnnnnnnnnnnnnnnnnnnnnnnnnnnnnnnnnnnnnnnnnnnnnnnnnctcgattataattaatcagcggggaacgggttgtatcccctttttttgtcggccctctggtgccccgccctccgcgcccccaaaaaacctttctacagaaccccccgggtgggggggcgcgcggcgcccactaaagccccaaagttaaatatggggacccctggtttttttcccccccggcgaacacccgcccgttctcccacacaagaggggtcttgtgattctccccccgcaaaaacacaacccccgcctttgggacgtataaccccgcaacgcgtctcctgcaccactaattcgcccgccgcgcggagctctttagacagccgctttcgccggcggatgttatcccaccgatgttgggcgtctcgcgccgcggggaaggtcgctatcctgtcaganagttgtccgcgccgcccncggcgtcggcgccaattataaataagtaaaagacgaacgtgggggagagaagatcactacaacgcacctctcccttcccctaacaggcgggaacaacccacccctccgccaccacgngcgcaattgagtaacacacttgatagcgcgccgccgcggcgcgcgacttacaagaaatctatatgtcccgcccgcgccgccttagacacaccc

SEQ ID NO: 166344 - DNA, 289 bp, Homo Sapiens
gactaacctaataggtcactctactgaagttaagagcattcccaaagaatgctctatataaaacttgtgtgtatgtttgcaggaatcttaatggatatgtttctagaggaaatgctcccatgagcattctctccatcatttagcagctgttaaaatgatgctcttcccaatgcccttgtccaatcattgtaaacgtgctctgagttaacctggtagccagtacacagtatcacagtaaatgacatttcttatctgtatgttaggtctaccttggggtactgagcttcga

SEQ ID NO: 166345 - DNA, 326 bp, Homo Sapiens
caggattatgactaacccactacctttacggagttatgctgccaaatacttgatttcagacttctttcaaatcttagctttcagaagcactttataaaacataaaattcaattgttgattggttgactgagcatgtttcccttctcataaactctgatatatccagaggtttgtgaaaccccctgtgtggcccaagacctcagctaaacagcgagtgaaaaccaagatggctcacagttgtctttctgggtactggttcacttcagcaggcaggacaactctcttggagagtaacacacacagttaaggaggttaggtctacctgg

SEQ ID NO: 166346 - DNA, 322 bp, Homo Sapiens
tgcacacgccgagcctccagaccttgacacttccccctttagctataaaagcacttaccagccgaacgtggaacagtatcacaaaagattccatctcccaacgatttcagaactctgagctcagagagactccagattttaaaaaataatttgagtgcttggaaactattagctttttaagttccttccaaatatgttagtacctaccctttactttttccccaagaccatctcagggtggagcattctgtctaagagaagaaagataaggaggctcccacccacctctcccaagagcagacattaaacatctttgtgcttt

SEQ ID NO: 166347 - DNA, 347 bp, Homo Sapiens
aagcttgattgcctctttaatctggttattggctcctttaggatctaaatccatagcccaagagaaattcatcagggcgaggtgcgtttgacctaacttcttgtaaacctttcctattaagaagtaaacgagggattctttgggaacaatttgtttcaattcttcaagttcttgtaaagcagactgaaaaaggcaaagaaaaaccttaaagtagcaaaaatttttaaagttttgaccaagcgtttttacttatttgatttcccaatcatcttcacaaaagctaactaaatcttaatcaatatacttccttattgtattagttcttattgctgtgggcaatcaagctt

SEQ ID NO: 166348 - DNA, 896 bp, Homo Sapiens
  misc_feature (723)..(723): n is a, c, g, or t
  misc_feature (866)..(867): n is a, c, g, or t
catggagatcgactctacaacactttggcatctgcaaaaagatgttgctctttcagttctgtcaaaagacttaacagacatggataaaaattcgccagaggcctggtgtgctgcagggaactgtttcagtctgcaaagggaacatgatatcgcaattaaattcttccagagagctatccaagttgatccaaattacgcttatgcctatactctattagggcatgagtttgtcttaactgaagaattggacaaagcattagcttgttttcgaaatgctatcagagtcaatcctagacattataatgcatggtatggtttaggaatgatttattacaagcaagaaaaattcagccttgcagaaatgcatttccaaaaagcgcttgatatcaaccctcaaagttcagttttactttgccacattggagtagttcaacatgcactgaaaaaatcagagaaggctttggataccctaaacaaagccattgtcattgatcccaagaaccctctatgcaaatttcacagagcctcagttttatttgcaaatgaaaaatataagtctgctttacaagaacttgaagaattgaaacaaattgttcccaaagaatccctcgtttacttcttaataggaaaggtttacaagaagttaggtcaaacgcacctcgccctgatgaatttctcttgggctatggatttagatcctaaaggagccaataaccagattanagaggcaattgataagcgttatcttccagatgatgaggagccaataacccaagaagaacagatcatgggaacagatgaatcccaggagagcagcatgacagatgcggatgacacacaacttcatgcagctgaaagtgatgaanntttaaacttctggaaatcagaacttttac

SEQ ID NO: 166349 - DNA, 330 bp, Homo Sapiens
  misc_feature (240)..(283): n is a, c, g, or t
ccaggtagacctaacacccaaaactatcttgcatgattccctcctaaatatattccttgattaagtaaatctggcaaatcactgtttgagctagttacataaaatttgttatcaagagaaggcttttctacaagtttccagattaacataaagaaaagagggaatcacagggcatttaagtgcaccttcccattactttccataaatcacctcatagttaggctgggcgcggtggctcannnnnnnnnnnnnnnnnnnnnnnnnnnnnnnnnnnnnnnnnnnngaggtcaggggactgagatcatcctggctaacacgatgaaacctcat

SEQ ID NO: 166350 - DNA, 687 bp, Homo Sapiens
  misc_feature (30)..(30): n is a, c, g, or t
  misc_feature (70)..(70): n is a, c, g, or t
  misc_feature (640)..(640): n is a, c, g, or t
  misc_feature (647)..(647): n is a, c, g, or t
  misc_feature (663)..(663): n is a, c, g, or t
  misc_feature (677)..(677): n is a, c, g, or t
ccctttacctaccttggggaaagccggcanccttcctcccaccattttaaccacctaatatatttaattncctttgaagagggttcctgtgtacgttattgtagttccccagtttaatatagttctttgtatctcttaacaggttgaagttattgcaaaacactctggaaagtaataattacatcataatcatttattttttaaacttaaaagcctagaaatttcctagaaagaaaataggagacatctcagagcaatttggttttggtgtatatgttctcaacagaaaaccagtgttaatgaatatcatgcctcagcactgtcacttttaaaacctgtcaggatcccactgtaaaattggaaatgggcagttctgaattttcacgtttgaaatgtaaaatataaacttcagtcaatatccaggtttattgtgtcctactatttaataatgagagaagtaatgggcaaggcctttactttcaggaaaggataggaagtataggattaatgactgggaaagttttaatatatttagcccaaaggttactttgaattggaagtctttgcattgactgtttgtgtttggggttatttgtttagctttacaaggtacacataagttagggtgagggggttgttnacccctncctgggtccgctttcnattccctgtggctncccgtcccag

SEQ ID NO: 166351 - DNA, 525 bp, Homo Sapiens
caggacttaccaggtagacctaactacaaaatccacgggtttaactgctgctctcctgaaatgaaatatctacaagaagtagcaggcattgagaaacagatgggaagatagtgttttgatatgattttctgtttacaggaaggcctaactacgtcctgttcacctcatgctattgggtaactttccagtaaaaaacaattgcactttgttttcttttccaaaaagaggcagaaactgatttcttcaaagtaaaaaggcaccaggtacccattctagactttccaaagctaggcacatattaaagagagtatacaaaataggcagagaagtagacttgctgacctgaggagctgagtgggaagcatggacttgccaaacttacctaagtgaccttgagcgatccagctaactttgcatagtttcctcttgtgtaaagtgaggtgcaagtacagatgacaatgtatagaaaacatagagcttagaatcctgtaccagaaagctgcctcatcacaatggttaggtcta

SEQ ID NO: 166352 - DNA, 455 bp, Homo Sapiens
tccttgtaatccaagcagtcgtttagcaaaaaattcatatccatcttccaccacctgatgagctcgacaaatcaaatctaaatcatgacgattcagaaatttactgactacatcagctccaaaagtaaaggaaacaccacgatcattttctccccagccttgcacatccttatctggatcagaccatagcaaatcacagagcaaacctgtatcagggacatcagtaggtctcataattctccgaatctgctccatagattgcaggtctggtgacaatcctccatgacaacagaagatcttctcatccacaatggctgctataggcagacagttaaaacaatcagtgaaggtcttccacaatttaatattaaatcttcgtttgcattcatcatagaatccataaatgcgattgatgctagcacactcatggtttcctcttaagagaaagaagttct

SEQ ID NO: 166353 - DNA, 780 bp, Homo Sapiens
  misc_feature (657)..(657): n is a, c, g, or t
  misc_feature (709)..(709): n is a, c, g, or t
gggggcgctcgtccctcatcgtgcaccagatcgtgcacaccggggagaagccctacgtgtgcggcgagtgcggcaaggccttcagccagagcgcctacctcatcgagcaccagcggatccacaccggcgagaagccgtacaggtgcggccagtgcgggaagtccttcatcaagaactcctccctcactgtgcaccagcggatccacacgggcgagaagccctaccgatgcggcgagtgcgggaagaccttcagccgcaacacgaacctgacgcgccacctgcggattcacacctgagcgcctctgtgcagggctctcactggcggtgcccaggacggacgccagatggctgcgcgctttgtcagcagtgctgtgagaagttctcccctggggtggggactcggggtcaggggagctcaggaatgtggtgttgtggaggggctggctgatcacacatgccccctccttactgagcctcagaaagcaagcccctcggtgtctgacgtatctggggacacttcaaggttcactgtagctgagccatggccgctggtaacagacatcagggttccagactagccctcttgagtaactgtcctagagctgggacaggtcacgcctgcctccacatctctgtttcttcagcgggaaagtgganctggtgaaggggagggaagaaacatctccctctttgtcagatacatcctggnagtccagatgcagcttgtcaccatctgcatttttctcccgtgggtttgggaaacgtgaggggcctttccct

SEQ ID NO: 166354 - DNA, 428 bp, Homo Sapiens
caggtagactaacccaggtagactaaccacatcaggccatcagatcttgagaaccaacagttatctagaattccgtgtctactaatgtttcacctgcatgcagccttcattaatttgtagcaaaatataaagtgatcattatgtagtttctggattaaaaaaatttgtgtgtgaagttgctttgtaaagtgcatgtggaattaatgggacagtgtgccctttgtgttagatgttagagcaaaagaaagggcttatagtgttagtattggagcactttgaagatagatattttcagaaaagatgtaggatttaaaagttaaattttaaattttagaaaaagatatgatggcaattggaaatagtcacaatgaagttcttcatccagtaggtgtttaacagtgttattttgccactggtaatgtgtaaac

SEQ ID NO: 166355 - DNA, 1100 bp, Homo Sapiens
  misc_feature (1058)..(1058): n is a, c, g, or t
accagcaccaggaccacggccagcaggcccagcacccactaacttcttcttcatggctctgcgtccagcagcagacgggggccccaagccttgcctggggtgttggccacgaaagacaggaggatttggtggaaacagctgaggaaataaccggggtctccctcacactctgctgaagcctgtagccacagaatcttcttcagagactctctgatcaggcagccttctcgttctcctgctgtggggcctcaggcaaatcactgaactgtccagcctggatgacggcagcacctcacttgccttgccactaggttcatctttgcactgtaactcccaaagtattgcttctcggtgctgggtgtgtggcattcatattccccggcatcccgggcctgaagatctgtgatgtgcaatagggttgggttcccctggactctttctatgaagatcttccctccgcggacgcgctgggtgtagatggcataggggaaggaagagtccatggtgctgacgatctgcacctctcgctctggcgacgaaggcaggtaaatggaccactggaaattctgttcagaaggtccctggtagccactcacattgcaccagatagtgatgtgggagccctccgtgcggtacaagggtccttcctgaacggtgacctgccgctgtgctgacaccacacccagcacagccagacagctcagcaccgggaaaaagcacttcatgtcggcagcctccaggagacacaacacaaggcgcttcctcttctcccagctcctaatctctcatttctggcaatccacttatagctccagagaacagttttggaaatagaacttaactcggaaaatgggaacagattaaaaagaagagatcagaaggagggagttggggggaaggggaggagtggaggcaagtgtgaaaactcccctatgctacaggaagggtccacaacaattcggaagtcgctcccggctcctgccacatcgtgtgccttgcaggttccactgaaattgcagactgtagtggattaatccttccagaagcacggaaaaaanggtctgagaaaatcctttcattcccttgattatacagaaatg

SEQ ID NO: 166356 - DNA, 431 bp, Homo Sapiens
tgctgcggtgactctaaggatctcccaggtagacctaacactgaggtggagatgacaacgttagagaaagtcatcaatgagacctgggcctggaagaatgcaactctggccgagcaggctaagctgcccgccacagagaagcctgtgtttgctctcaaaagacattgaagctaagatgatggccctggaccgagaggtgcagtatctgctcaataaggccaagtttaccaagccccggccccggcctaaggacaagaattgggacccgggcagagccacccctcaatgccagtgccagtgaccagggggagaaggtcatccctccagcagggccagactgaagatgcagagcccatttcagaacctgagaaagtagagactgcaggatccgagccaggagacactgagcctttggagttaggtctacctgg

SEQ ID NO: 166357 - DNA, 865 bp, Homo Sapiens
  misc_feature (768)..(777): n is a, c, g, or t
ggtaagaatattttaatagcagcatgacatttagcagtaatccattaagggcagtacctctaacaaggacgccttccagcttcagcgatgttacttacgtttgatgctacttaaagtaatgaatgacgttttaaggaatccctaaccctactatcagaaaaggtgtttgttaaagagccttctcttgtgtgttacgcatgaactttggtctgtaggtgttaaatggaacctctccatgtgtatatagtatttccttgtataaagcactttactacctaccacttgtgttgtgaacgtttggtgactgctgttgaaagaaggaaaagggtgtgtgagaaagcctactgaagcagcagcactgccactacatgtggacaaaagtgaccatataaaagaagttgtgctatttaactctgaatacttggagaaactaggtgaagatgcaaccagaaaggagaatatgtatgcgtgaagtctcagctttgagctggaggctagattccaagatgacagccatgatgaaactttttaaaaaactaaaccagaagagacttttaaataagaagaaagaaatccttaaatgtagaacatattgcttggcctaaaaggggaaatgggacttttaaattttaaaagaactccattttgcaatggcacttgtaatacccttttcacaaaattaattggtgaaacaccgaaatcttggttataattctttgggggcctaagaaattttaagaccctcggaacattttgaaaacaggtttnnnnnnnnnnttgggccctttcccttaaacacgaggaaacaagacccacttaaatattttttaccccgggtgttttattttaacacacaacaaaggag

SEQ ID NO: 166358 - DNA, 1186 bp, Homo Sapiens
gaggatttaccaggtagacctaaccccgccgcagctcctcggacgcaggtttaacttctttattcaacaaaaatgcggattcagaaaagcacccaggaaggttgaacctcgaagatcagacccagggacaagtggtgaagcatacaagagaagtgctttgattcctcctgtggaagaaacagtcttttatccttctccctatcctataaggagtctcataaaacctttattttttactgttgggtttacaggctgtgcatttggatcagctgctatttggcaatatgaatcactgaaatccagggtccagagttattttgatggtataaaagctgattggttggatagcataagaccacaaaaagaaggagacttcagaaaggagattaacaagtggtggaataacctaagtgatggccagcggactgtgacaggtattatagctgcaaatgtccttgtattctgtttatggagagtaccttctctgcagcggacaatgatcagatatttcacatcgaatccagcctcaacaaatatgtatgttttgtggagcttctcttccagcatagtgaacattctgggtcaagagcagttcatggcagtgtacctatctgcaggtgttatttccaattttgtcagttacgtgggtaaagttgccacaggaagatatggaccatcacttggtgcatctggtgccatcatgacagtcctcgcagctgtctgcactaagatcccagaagggaggcttgccattattttccttccgatgttcacgttcacagcagggaatgccctgaaagccattatcgccatggatacagcaggaatgatcctgggatggaaattttttgatcatgcggcacatcttgggggagctctttttggaatatggtatgttacttacggtcatgaactgatttggaagaacagggagccgctagtgaaaatctggcatgaaataacgactaatggcccccaaaaaaggaggtggcctctaagtaaaaactggggattggaacaaaagtgggtgcatcccggtcccttgcccgccctaacaagccccaaggagaaccttcggctatgaagtggaccattgggctactggcttccccgccctgggaaaaaaggcccaaccatcttggggcctcccccactggtttttttcacgcttgcgtgtcccccccat

SEQ ID NO: 166359 - DNA, 645 bp, Homo Sapiens
cttctctgcagcggacaatgatcagagatttcacatcgagtccagcctcaagtgttatttccaattttgtcagttacgtgggtaaagttgccacaggaagatatggaccatcacttggtgcatctggtgccatcatgacagtcctcgcagctgtctgcactaagatcccagaagggaggcttgccattattttccttccgatgttcacgttcacagcagggaatgccctgaaagccattatcgccatggatacagcaggaatgatcctgggatggaaattttttgatcatgcggcacatcttgggggagctctttttggaatatggtatgttacttacggtcatgaactgatttggaagaacagggagccgctagtgaaaatctggcatgaaataaggactaatggccccaaaaaaggaggtggctctaagtaaaactgggattggacagtagtggtgcatctggtccttgccgcctgagagccccaggagacatcggctagagtgaccatggctatgctcccgtctggaagatgccagcatctggcctcccactgttttcagctgtgtcccccagtccgtgtctttttagaatgtgaatgatgataaagttgtgaaataaaggtttctatctagtttgtaaccc

SEQ ID NO: 166360 - DNA, 1015 bp, Homo Sapiens
  misc_feature (89)..(111): n is a, c, g, or t
acacatgacttccagtccccgggcgcctcctggagagcaaggacgcgggggagcagagatgatccgagccgcgccgccgccgctgttcnnnnnnnnnnnnnnnnnnnnnnnagtgtcctgggcgtcccgaggcgaggcagcccccgaccaggacgagatccagcgcctccccgggctggccaagcagccgtctttccgccagtactccggctacctcaaaggctccggctccaagcacctccactactggtttgtggagtcccagaaggatcccgagaacagccctgtggtgctttggctcaatgggggtcccggctgcagctcactagatgggctcctcacagagcatggccccttcctggtccagccagatggtgtcaccctggagtacaacccctattcttggaatctgattgccaatgtgttatacctggagtccccagctggggtgggcttctcctactccgatgacaagttttatgcaactaatgacactgaggtcgcccagagcaattttgaggcccttcaagatttcttccgcctctttccggagtacaagaacaacaaacttttcctgaccggggagagctatgctggcatctacatccccaccctggccgtgctggtcatgcaggatcccagcatgaaccttcaggggctggctgtgggcaatggactctcctcctatgagcagaatgacaactccctggtctactttgcctactaccatggccttctggggaacaggctttggtcttctctccagacccactgctgctctcaaaacaagtgtaacttctatgacaacaaagacctggaatgcgtgaccaatctttcaggaagtggccccgcatcgtgggcaactctggccctcaacatctacaattctctatggccccgtgttgctggggggggtgccccagcccatttttagggtattgagaaaggacactgtttggtgggcccaaggattttggggcaaaattccttttccctcccgccttggccacttcaa

SEQ ID NO: 166361 - DNA, 303 bp, Homo Sapiens
ccaggtagactaacacttgatctacatgaagtattaaaaaactcagaatcctaacttgaagcatgttcaagcatgaggaaagaataacattttaccttttctgtggatgatggaaggttaattcatgaataaataagcccagctactagaggagggcaaccagtttttcttatcagaaacagaaaagaatgcagagactgtgaaacttttgggaatttgtgtgatagagaaatattctgctcacccaggctcctataacaattcaaccagttagtctacctggtaatcctgggagtcaccctc

SEQ ID NO: 166362 - DNA, 754 bp, Homo Sapiens
tccaggaccttaaggtagactaacgggagacctccctgttttcgaccccctgtctcctccagcagcaacaaggagcgggtggtcactgtgattgctcatgagctggcccaccagtggctcgggaacctggtgaccatagagtggtggaatgacctgtggctgaacgagggcttcgcctcctacgtggagtacctgggtgctgactatgcggagcccacctggaacttgaaagacctcatggtgctgaatgatgtgtaccgcgtgatggcagtggatgcactggcctcctcccacccgctgtccacacccgcctcggagatcaacacgccggcccagatcagtgagctgtttgacgccatctcctacagcaagggcgcctcagtcctcaggatgctctccagcttcctgtccgaggacgtattcaagcagggcctggcgtcctacctccacacctttgcctaccagaacaccatctacctgaacctgtggggaccacctgcaggaggctgtgaacaaccggtccatccaactccccaccaccgtgcgggacatcatgaaccgctggaccctgcagatgggcttcccggtcatcacggtggataccagcacggggaccctttcccaggagcacttcctccttgaccccgattccaatgttacccgcccctcagaattcaactacgtgtggattgtgcccatcacatccatcagagatggcagacagcagcaggactactggctgatggatgtaaga

SEQ ID NO: 166363 - DNA, 296 bp, Homo Sapiens
gtgtcagtgttacatgatttaattattaaggagagcgacaacaatgtaaaactcatagtttggatcgcttgatagaattaaaagagcatcctgctcatgaacgagatactacaggatctggttatggatatcctaagagtattgagcacaccagacttagaagtacgaaagaaaactctgcagttagcactggatcttgtctcttctagaaatgttgaagagctggttattgccctgaagaaggaagtgataaatacaaataatgtgtctgagcatgaagatactgacaacggcct

SEQ ID NO: 166364 - DNA, 485 bp, Homo Sapiens
  misc_feature (329)..(356): n is a, c, g, or t
aaatgagaaaaaagaaaaactaagacctgcactgtaaagcataatacaggagtagatttattacagctactccacattttccagagtgatacaatgaccatagagttaaaaactatcactgttatcgctgtttattttacaatacttggtttagtctacaagtttaaggcaaacatactaatgcatttgcttttcttcagaaatcatacttataaagattacataaaatctgtcccaaaacgtctaagaaatattcagtaattaaaaataagtctgattaagatgctttaccaggatacatgaatgaactaaggtggtatatgcttttnnnnnnnnnnnnnnnnnnnnnnnnnnnnggcaatctttatcttgtttcaacaatgcattctgaaaaggttaaatttcagaaattatttaaaggtaaataagagtggcagccataaggaatactatttataaaataaacagagttatagaggctactt

SEQ ID NO: 166365 - DNA, 928 bp, Homo Sapiens
ctggattgaaggcagagaaggaagggggagggaatgatcaaggccaaaatggccacatttagaagatacctcagatgataaccattgttatgtgtgtgcaattttatttaacagtgctgtgtatgtggtggacaagttatatgaaatatctagtctttctagatatttggaagtgcttgatgtatttaaaagtggtagtagaataacactttgtaaatagcttttaaaaactgatgggaaatgctgtttggaagtggaattgttgaaccacctgggaggtgggagggaagaaattgcaaatggtgttttgccattgtttattagaaaatttcagcttaatccattgtatatatgttacatgcatttcatttaactttgctatactgtatatattgtatatataacggacaaattagtcccgattttataatatctagtctctagatattaaagaggttgccaatgtatgacagaagtagagttagtaaactaacacattttgtacactttgttaaaatttgtagaaaggctgtcttctgaaaaggacttttggaagtgagataacatcagctctaagtgacacgtgcctatatccatcaggttggtggtggagaggagttggaaggaatgaagggttctagaccagaatgttcgtatttagaagacactatcagatataaccattgttacatgtgtgtagtttattcaaccctactgtgtatatagcggacaaacttaagtccttatttgaaacatctagtctttctagatgtttagaagtgcacaaagtatgttaaaagtagaggtagtaaataacacattttgtagctatccttttgatatgaaatattgtcttggaaattgatcaattctctgagcagtacccattttgatatttgtgctggttcaggtgggctgttgggctact

SEQ ID NO: 166366 - DNA, 1161 bp, Homo Sapiens
tcaccgagaccgacgttaagatgatggagcgcgtggttgagcagatgtgtatcacccagtacgagagggaatctcaggcctattaccagagaggatcgagcatggtcctcttctcctctccacctgtgatcctcctgatccctttcctcatcttcctgatagtgggatgaggaaggtcttcctgttttcaccatctttctaatctttttccagcttgagggaggcggtatccacctgcagcccttttagtggtggtgtctcactctttcttctctctttgtcccggataggctaatcaataccctttggcactgatgggcactgggaaaacatagaggaagacctgagagtgctggtcaaggccccctttggattgagttcatcatgagccgttgctaatgccaggccagtaaaagtataacagcaaataaccattggttaatctggacttatttttggacttagtgcaacaggttgaggctaaaacaaatctcagaacagtctgaaatacctttgcctggatacctctggctccttcagcagctagagctcagtatactaatgccctatcttagtagagatttcatagctatttacagacattttccattttaagaaaacccgacaacatttctgccacgtttgctaggagcgcacatgaaacctattcacaaaaaatcctaaagatccttaactcttgcgattgctgatcagccccctggagcatgagtctctgtggggcaccgaaaaactggggtgaattttttactttttccccgtaccgcgcttacacaccaagctgttcccacctggacgccaatatttggcgactaaataccgcaaccctctggggttaacaggcatattttttccctctttgaacccttacactgcctaaccccctttatccaacccgccctttccggcggcctttccaaacccacaaccgctctctggcgtattcggcgtgccacctttggaaaggacaacccatcactcattctccaaatagctatccaacagggaactcccatctttgggcggtgatttcccatcttccccccacacactaacacagtgccaaaacccatgtggtcatcacttaatcaacacacattcgcctatgttcctaaagaacatcgttttccggctcccctatat

SEQ ID NO: 166367 - DNA, 772 bp, Homo Sapiens
cgttctgaggtcacaggggcgcgcagtcatcgcgataattagtgccttcaaggttttactagaagtatcacctggggagcatccaaagccatagctgtggacgcggcaagagcaagggagtaagaaaggtagtatgagtgctggtagaccagctgcaactttcctatacagtgaaaaaggctggtgaaacaagtacagtccagatgttttaaaatcatactttctcagggatctccacaaacgggtgggtgtcctggctgtctgtgtgatagcctctttctataggtgaggcctcaaatgaattgcagctatcctggtgttcctatgagggcacttggtatgaaaaagggcatgtactccaaaacatttttgtaggttcttgggccagttgccaaagagtgtgaaagaatccaatagaggatttttcttactgatagcagtcattcattgcagtaaaataaaatatgatcccattagggaatctggaattctgacctcccatactccgtttggaaataaccactttatatttcattttttaaaaatctgatgatctctttgaggcaggtttcagatttggcagtacaacatgaaagattaggaaaagcattaataacgtgtgggtggaaagcttgttaaaaatctgagagtgaagtttgagttaaaagttgtttgaacatggcattgactgggaggccaaagatttaaagaagcggaagattcttctcttaagacatgaggagtaagttgtgtgataatggtatgtgttttg

SEQ ID NO: 166368 - DNA, 1091 bp, Homo Sapiens
gagaattaaacagagcctacaaagcagaattcaaaaagaccctggaagaggccattcgaagcgacacatcagggcacttccagcggctcctcatctctctctctcagggaaaccgtgatgaaagcacaaacgtggacatgtcactcgcccagagagatgcccaggagctgtatgcggccggggagaaccgcctgggaacagacgagtccaagttcaatgcggttctgtgctcccggagccgggcccacctggtagcagttttcaatgagtaccagagaatgacaggccgggacattgagaagagcatctgccgggagatgtccggggacctggaggagggcatgctggccgtggtgaaatgtctcaagaataccccagccttctttgcggagaggctcaacaaggccatgaggggggcaggaacaaaggaccggaccctgattcgcatcatggtgtctcgcagcgagaccgacctcctggacatcagatcagagtataagcggatgtacggcaagtcgctgtaccacgacatctcgggagatacttcaggggattaccggaagattctgctgaagatctgtggtggcaatgactgaacagtgactggtggctcacttctgcccacctgccggcaacaccagtgccaggaaaaggccaaaagaatgtctgtttctaacaaatccacaaatagccccgagattcaccgtcctagagcttaggcctgtcttccacccctcctgacccgtatagtgtgccacaggacctgggtcggtctagaactctctcaggatgccttttctaccccatccctcacagcctcttgctgctaaaatagatgtttcatttttctgactcatgcaatcattcccctttgcctgtggctaagacttggcttcatttcgtcatgtaattgtatatttttatttggaggcatattttcttttcttacagtcattgccagacagaggcatacaagtctgtttgctgcatacacatttctggtgagggccactgggtgggtgaagcaccgtgtcctcgctgaggagagaaagggaggcgtgcctgagagggtagcctgtgcatctggtgag

SEQ ID NO: 166369 - DNA, 1495 bp, Homo Sapiens
  misc_feature (1413)..(1413): n is a, c, g, or t
  misc_feature (1473)..(1473): n is a, c, g, or t
gctgacggctgctgcgcccgcggctccccagtgccccgaggtgccccgcgggccccgcgagcgggagtgggacccagccctaggcagaacccaggcgccgcgcccgggacgcccgcggagagagccactcccgcccacgtcccatttcgcccctcgcgtccggagtccccgtggccaggtgtgtgtctggggaagagacttacagaagtggagttgctgagtcaaagatctaaccatgagctaccctggctatcccccgcccccaggtggctacccaccagctgcaccaggtggtggtccctggggaggtgctgcctaccctcctccgcccagcatgccccccatcgggctggataacgtggccacctatgcggggcagttcaaccaggactatctctcgggaatggcggccaacatgtctgggacatttggaggagccaacatgcccaacctgtaccctggggcccctggggctggctacccaccagtgccccctggcggctttgggcagccccgcctctgcccagcagcctgttcctccctatgggatgtatccaccacccaggaggaaacccaccctccaggatgccctcatatccgccatacccaggggcccctgtgccgggccaagccatgccaccccccggacagcagcccccaagggcctaccctgggcagccaccagtgacctaccctggtcaacctccagtgccactccctgggcagcagcagccagtgccgagctacccaggatacccggggtctgggactgtcacccccgctgtgcccccaacccagtttggaagccgaggcaccatcactgatgctcccggctttgaccccctgcgagatgccgaggtcctgcggaaggccatgaaaggcttcgggacggatgagcaggccatcattgactgcctggggagtcgctccaacaagcagcggcagcagatcctactttccttcaagacggcttacggcaaggatttgatcaaagatctgaaatctgaactgtcaggaaactttgagaagacaatcttggctctgatgaagaccccagtcctctttgacatttatgagataaaggaagccatcaagggggttggcactgatgaagcctgcctgattgagatcctcgcttcccgcagcaatgagcacatccgagaattaaacagagcctacaaagcagaattcaaaaagaccctggaagaggccattcgaagcgacacatcagggcacttccagcggctcctcatctctctctctcagggaaaccgtgatgaaagcacaaacgtggacatgtcactcgcccagagagatgcccaggaagctgtatgcgggccggggagaaccgcctggggaacagacgagtccaagtttcaattgcggtttctgtggcttcccgggagccgggcnccacctgggtaggcagtttttcaatgagttaccagagaatggacagggccgggacatttntagaagagcatctgcccggaga

SEQ ID NO: 166370 - DNA, 807 bp, Homo Sapiens
  misc_feature (126)..(153): n is a, c, g, or t
  misc_feature (219)..(227): n is a, c, g, or t
  misc_feature (773)..(773): n is a, c, g, or t
catcatttggatttttttcctggctttcaataccaaaaaaatgcagatgctttaaggcctaaacagaattctgaagaatttaaaatatgcaattaaagtttgatatgttttgtctcccaagcaccnnnnnnnnnnnnnnnnnnnnnnnnnnnnaagtcagctgattttctctttagaaagagggtcagctagaaacctaggttttttggaattgtaaannnnnnnnnagtatagtctggagagaaaggtcattcaaaaggaaagtacaatgggacttgctgcccttcatcatctcgttcccgtgccaggtgtgtgttggtcacgtaaaagcctgggaagcatcagaggagtcccggattgctgctgctacctggagacagggttagcaaaataacactagtgatgagggagaggcttcttttcaccataagcctgctgtgtacaccgagggcggcaggagaagcatgggaaggagtcagcctaagtttgcacattgcataaagggtacactaaggtatgagctgaagctttaggttctccgtgcttccctcaagacctccttcttgctaacagaagcagtaggcaattgctgcagtgcgtttctcaccctgccaataggtctgtctgtatctctgttaaggaaaatagcctggtccctcctggcagtgcttggaagcttgatgctaatttttatatagcgtggcaaactgaccagcagtgccaggccttgatctgtattctgcactatccctttacttggttcctggcactgnatggtctccgaccctgaaaatcacgtgtgatcac

SEQ ID NO: 166371 - DNA, 387 bp, Homo Sapiens
gtaccacctcctaccacggtgtgtgcggacgctgacttggatggcagtggagtgtgcccatcagggagtgttcttcaaccaaggccagtgtttgcacggcagcctccagggtgttcgtggaggagcaggtctactctgagtttgtcaggcggagcgtggagtatgccaagaaacggcccgtgggagaccccttcgatgtctaaacagaacaggggcctcagattgatcaaaagcagttcgacaaagtcttagagctgatcgagagtgggaagaaggaaggggcctagctggtatgcgggggctcagccatggaagactaggggctcttcatcaaacccacttacttctcagtagtcactgactacgtccttaatcctgggatcacct

SEQ ID NO: 166372 - DNA, 863 bp, Homo Sapiens
ccgtaaatatctgaggttttaatattctaactataaaacatagctatagaggtacacagttaggctaggacagggtttctcaacctcaggactaatgatattttgggttggaaaattctttactgagtgtgggggggtgttgaggaggtatgcattgcacagtagcaaccttttccccaccccagttttgacaacccaacatgtctccagacatcaccaaattggtcttctgaaggccaaaatctaccccagatgagaacttctgggctagaattttatatggacataattgtaaactctgggtacacagacaatacaagactctatgtaatattataaggtaaagagtccagcacagtaagtttctgctatactgtttacgctagggcacagcttttatatactacttaggcatacagttatccacatataacttttgtcctactgaacactgacattagacaagaaaccacagctaatccagcgaacgcatcattatatcacgctgatatgagaaaaatctagagttttcaaacatttgctaaatggaagcctggaaaaatcactgcaagtgtccttctttctgaattcgaagtctgtctttctctacctgtaagcgttccttttcaatctgcagcttctcagattcaaacttcaaaaactgcagcctatccttttccagttgcaagcgttctcgctcaagttttaacttctctgtttctatgtcctgtggttgaagcatggatttttctccttgaccaagttcattttccaaggacggtttctctgaattgactatctgtaacctcaacttttctctttcaatctgcagccgctccttctctagctgaagccgctcatgt

SEQ ID NO: 166373 - DNA, 506 bp, Homo Sapiens
actatggtgatggatgcacaactctgaatatactgaaaaccactgaacattttaaatggatgaatcatttcatgtatgaatcatatcctgataaaggtgtttctttaaaaacaagacagcacatatcagagggtacatcaatccaaagttgaatttctcgtgaaagtaccctaatttcaataccgttatctttccaaaacatatcactaccctaacacagcaaatgcccaaaagcactcctggcactgcatatgcagaagagaggacagctaagaatggtaagatgatttcttcatcaagagccagttaaagctattctgctttaaaattaagagagcacttaagggaaatctctttgtctggtcaataactggtacatttattatgttagggaggtctggacctgagggccaagccatctatcccaattcattgcaagcaaatttattccgccgatgtctttcccacaaaattttcatctctgctttaaccgtggggtaggaggt

SEQ ID NO: 166374 - DNA, 311 bp, Homo Sapiens
cagagataactacgtacgctcgttcatttacacacataaatacgacgcttttcatacgtaaaataaacgtctttatcgacgatcccttctttatagagcgatgtgtatttatttgtataacacaaacacctacatctatcatacagaagtctatttccatacaaccgatacgtatttaccatacgcaagagtattcaatgcagagatacacgttgtcgttgtttgcatataagcgtacagaaacgtttacattaatacatataagtaaacgcgtggaaacgaaagaaataaaaaagcgaaatgagtcaaca

SEQ ID NO: 166375 - DNA, 725 bp, Homo Sapiens
  misc_feature (76)..(128): n is a, c, g, or t
  misc_feature (533)..(572): n is a, c, g, or t
  misc_feature (582)..(582): n is a, c, g, or t
  misc_feature (624)..(624): n is a, c, g, or t
  misc_feature (689)..(689): n is a, c, g, or t
gtagctgggcgtggtggtgtgcacctgtggtcccagctgcttgggatgctgaggtggaaggatctcttaaacccannnnnnnnnnnnnnnnnnnnnnnnnnnnnnnnnnnnnnnnnnnnnnnnnnnnnggacagagtgagaccccatctcaaaaaagtgtttaattaatatacttgtgagtggtctatttgcatttaaaactgctttctagaattaggatagctcccttaggtttaatgttttggtgagcaggaatatcagttacccctccagatcttaattctagttttttatcactttttcatgaggtgatctcatcctcatctcctagcatgtctgacaattttgatttctgaactctgtgctacctcagaggccagcttccttagggaaaaatcagtgctgaaataaagttatatttccttttctgctctaaatatatagtgggggaataagagaaatgaagaggaattcctgagaacgtaattactagaaactcccctctcccacgtaatgtctctcacacaccatgnnnnnnnnnnnnnnnnnnnnnnnnnnnnnnnnnnnnnnnnacaacaggtnggtgatctttgtgaagtctgtgcagcggtgcattgccttggncccagctaactagtgggagcagaacttcccagccattgccatccaccgtggggatgccccagggnggagagggtttcttcggtattcagcagtttaaagat

SEQ ID NO: 166376 - DNA, 1178 bp, Homo Sapiens
  misc_feature (182)..(182): n is a, c, g, or t
  misc_feature (380)..(468): n is a, c, g, or t
  misc_feature (524)..(552): n is a, c, g, or t
  misc_feature (658)..(754): n is a, c, g, or t
  misc_feature (1022)..(1022): n is a, c, g, or t
tggggacgggcgggaagagggggggagggtaggtggagggcgacgcgggtgtgtagttgacgagcgatgggggacggtgcggacctagatattgtagatagctcggaggtagattatatgggtggtggtaggagggccgtagtgatggcagcggtgtggagttggcgggtgagacagggggncggcgagggttgcaggtgaggggcagcaagggtggggaggcgagggcaggctgggcgggaagtgggtgggggaagcggggagggtgggcgagggtggagaaggatgtgggagggggtggaagacagaggatgtgggagacgagggagtggtggtgggagcaaggctgtggggtaaacaaaagacgacggtgtgagttnnnnnnnnnnnnnnnnnnnnnnnnnnnnnnnnnnnnnnnnnnnnnnnnnnnnnnnnnnnnnnnnnnnnnnnnnnnnnnnnnnnnnnnnncaggcgggagtggctaaagcggagcgagtgggcgcgttgtgggtgggaaagcagannnnnnnnnnnnnnnnnnnnnnnnnnnnnctgtggagggtgggctttgggggcgaaagaggggcgaggggtggcatggagggcagtgggagtcgacgggccggtggggaagggggtggttcacgcggctggagcnnnnnnnnnnnnnnnnnnnnnnnnnnnnnnnnnnnnnnnnnnnnnnnnnnnnnnnnnnnnnnnnnnnnnnnnnnnnnnnnnnnnnnnnnnnnnnnnntcggcggggcttgggaggacaggcacgtgcaccagtaaagggtccaaggtgctgcagcgggggcaagacaaccggtgctgtgtttcccatgcccgacttggcgtggcacaggacatccattcccagaatggcctgagggatgcactcatgctggacttctgacggatgctcaaagccacagtcgacaatggcccggagcaactctggcttgagcaggaagtcacgaaagccagagctgtggatggagacataggagcccttgacatcnttcttggcaggggcctcagccccatctcccccagctgctgtctccacctcatcatcttcatagtccaagagctcattgtccacatcgttctctgccataactaaacagggagagcgcgcctcgtgcggaattcgcacccagggctcgctcgtagac

SEQ ID NO: 166377 - DNA, 1607 bp, Homo Sapiens
ggggaaggcgggaggctggagtagagggaagcctgcaaccggaagtgaaggcagatttccctccttcgtcgctgttgctgccgccatacgcgctctccctgtttagttatggcagagaacgatgtggacaatgagctcttggactatgaagatgatgaggtggagacagcagctgggggagatggggctgaggcccctgccaagaaggatgtcaagggctcctatgtctccatccacagctctggctttcgtgacttcctgctcaagccagagttgctccgggccattgtcgactgtggctttgagcatccgtcagaagtccagcatgagtgcatccctcaggccattctgggaatggatgtcctgtgccaggccaagtcgggcatgggaaagacagcagtgtttgtcttggccacactgcaacagctggagccagttactgggcaggtgtctgtgctggtgatgtgtcacactcgggagttggcttttcagatcagcaaggaatatgagcgcttctctaaatacatgcccaatgtcaaggttgctgttttttttggtggtctgtctatcaagaaggatgaagaggtgctgaagaagaactgcccgcatatcgtcgtggggactccaggccgtatcctagccctggctcgaaataagagcctcaacctcaaacacattaaacactttattttggatgaatgtgataagatgcttgaacagctcgacatgcgtcgggatgtccaggaaatttttcgcatgaccccccacgagaagcaggtcatgatgttcagtgctaccttgagcaaagagatccgtccagtctgccgcaagttcatgcaagatccaatggagatcttcgtggatgatgagacgaagttgacgctgcatgggttgcagcagtactacgtgaaactgaaggacaacgagaagaaccggaagctctttgaccttctggatgtccttgagttcaaccaggtggtgatctttgtgaagtctgtgcagcggtgcattgccttggcccagctactagtggagcagaacttcccagccattgccatccaccgtgggatgccccaggaggagaggctttctcggtatcagcagtttaaagattttcaacgacgaattcttgtggctaccaacctatttggccgaggcatggacatcgagcgggtgaacattgcttttaattatgacatgcctgaggattctgacacctacctgcatcgggtggccagagcaggccggtttggcaccaagggcttggctatcacatttgtgtccgatgagaatgatgccaagatcctcaatgatgtgcaggatcgctttgaggtcaatattagtgagctgcctgatgagatagacatctcctcctacattgaacagacacggtagaagactcgcccattttggaatgtgaccgtctgtccttcaggagaggacaccagggtgggggtgaaggagacactactgcccccacccctgacagcccccaccccatggcttccatcttttgcatcaccaccactcctgaacccccatttctgatttgtcagaattttttgtaacaaaactaaaaatgaaacacatgtgtctgtggtatctgt

SEQ ID NO: 166378 - DNA, 938 bp, Homo Sapiens
  misc_feature (667)..(675): n is a, c, g, or t
  misc_feature (745)..(753): n is a, c, g, or t
gggggagtagagggaagcctgcaaccggaagtgaaggcagatttccctccttcgtcgctgttgctgccgccatacgcgctctccctgtttagctcttctgttagaaatagtatctttgttttcctttgctgttcctcaatcccctactcttcaccccttgttttcacctattttgcgagaacccatccagatcccccttcccttcttcccctgccggcccagttatggcagagaacgatgtggacaatgagctcttggactatgaagatgatgaggtggagacagcagctgggggagatggggctgaggcccctgccaagaaggatgtcaagggctcctatgtctccatccacagctctggctttcgtgacttcctgctcaagccagagttgctccgggccattgtcgactgtggctttgagcatccgtcagaagtccagcatgagtgcatccctcaggccattctgggaatggatgtcctgtgccaggccaagtcgggcatgggaaagacagcagtgtttgtcttggccacactgcaacagctggagccagttactgggcaggtgtctgtgctggtgatgtgtcacactccgggagttggctttttcagattcagcaaggaatatgagcgcttctctaaatacatgcccaatgtcaaggttgctgnnnnnnnnnggggggctgcctatcaagaagggatgaaaaaggttgctgaaaaaagaaactgccccgcactattcgtccnnnnnnnnnactccccagggcccgccatcccttaaaccccctggggttccggaaattaaagaagaccctccaaacccccctccaaaacacccctttaaaaccaccccttgttatattttttttgggggaatgggaaaaaagggcgcggtcttaaaggaaattggggccttttgaaacaacctgagaaccttcca
